United States Patent Application Publication US 2015/0315605 A1 - sequence listing, part 3

SEQ ID NO: 3835 - DNA, 2472 bp, Zea Mays
cgcaccacccacactcctcctcgcgagtcgcgaggcaagccgcaagctcctatatagagaggccccctccctcccctgcatggacagccaccgccttcttcaaccctccttccgtcttcctcctctagtcttacctcgttgcacctcaagaaacttggcgcgcaaccaggaaaccccctcttctctctctctctctctctctctctctctgccttctgattccaagctccccaactgcccagcaccaacctgccgaactcccctcctttttgttggtttgtcgaattataaattgagcccggccggctgactaccatgaagccgccatcactggtgcactgcttcaagctgctggtcctgctggcgctcgccaggctgaccatgcacgtccccgacgaggacatgctatcgcccctcggcgcgctgcgcctcgacggtcatttcagcttccatgacgtctccgccatggcgcgggacttcggcaaccagtgcagcttcctgccggccgccgtgctccacccaggctcggtctccgatatcgccgccaccgtgaggcacgtcttctccctgggcgagggctcgccgctcaccgtcgcggcgcgcgggcatggacactccctcatgggtcagtcccaggccgcccaggggatcgtggtcaggatggagtcgctccggggcgctaggctccaggtccacgacggctttgtcgatgcccccggaggagagctctggatcaatgtcctgcgtgagacgctgaagcacggcctggcacccaagtcgtggacggactatctccatctcacggtcggtggcaccttgtctaatgcgggggtcagcggccaggcgttccgccacggaccgcaggaaggggagacgtcgttacctgctcacccgaggataactctgatctcttctatgctgctctcggcggtcttggtcagttcgggatcataaccagagcaaggattgcacttgagcctgctccagagatggtgaggtggataagagttctttactcggattttgaaagcttcaccgaagaccaggagatgttgatcatggcagagaactcctttgactacattgaaggttttgtcatcataaacaggacaggcatcctcaacaactggagggcgtccttcaagccacaggacccagtccaagcaagccatttccagtcagatggaagagtgctatactgcctcgaactaaccaagaacttcaatagtggcgacactgataccatggaacaggaagttgctgtactgctatctcggcttagattcatacagtctactctattccacaccgatgtcacgtacctggagtttttggacagggtgcacacctctgagctgaagctgagggcacaaagcctctgggaagttccacacccttggttgaatcttctgataccgaggagctcaatccgcagatttgctacggaagtctttggcaggatcctgaaagatagcaacaatggtcctatattgctttatccagtgaacaaatcaaagtgggacaacaaaacgtcagtggtcataccagatgaggaaattttctacctagtgggattcctttcttcagcaccgtctctctcaggtcacggcagcattgcacatgcgatgagcctgaacagccaaatagtagagttctgtgaagaggctgatattgggatgaaacagtatctagcacactacaccacacaggagcagtggaaaacccactttggagcaaggtgggagacatttgaacggaggaaacacagatatgatcccctagccatcctagcaccaggacagagaatattcccaaaggcgtcactcccattgtctttgtgacggttcctgctatttaaaggcttctgtagagcatacattgtacaaaagtgtaggtaaaagtatcccctgtaaagacaatatctacggaaggtagctagcctgaagaacacagcatagcgactttttcagtggccaaagatacctcaaagcagtacttcaatgtggagcaacgtcacctgaaccctgaaggtggtgagtgcaactttggaggcaatcactggtagtggagcctggagggttgtagcggtccaaggaacctgtctgttgttacagcgttgagatgagctgtgctgatcaactgatcactaaccagtgtcccgaggaaatcatgttggtctgtatgtattttccgttaacaacagtgcagaagtttgcatgagggtagtgcattgattagcaaatagcactgcctgttatttcacttgtaactggcatctcatctcaaggagagcctgcgtaactgtagcaggttatattgttttccatgagtcagaaactcagaatattaatgctcgtgcaaaaacagtgtagtcgcttatcaatcatggtgttcagaaacagaaaaactcttggaattctctcaacttgttcattaaatgttagcaacctatagtgtgagcttggataacaa

SEQ ID NO: 3836 - DNA, 1218 bp, Zea Mays
acaacatttgggccttctcagtccagtagcgcgcgctttcccgtatgcgtccggcgctttcgtccacttcgtcctccaggtttcctttccacccccgccggtccagcgccaacaccagtcggcggagcggatctccggtgaggtcgagggatggcgaatggctgcggctacgtgtgggccctcgcggcgggtttcaacgccgcactcgccgccatctccgccaagttcttctccactctgcctcaaagctttgtcatccctccaggcaacagtgacaaacttcgccgccaacttcatttcatctgggcttgcggggtgtttcctgtttgatgagcccttgccttctaaggtaatacgggaattctcggtttttatatggtgcatcctgaggatcagcacagagaagtgaacgaaattgggctttatttgtaccgcatacgatctctctagctttctaattcccgcttcgattgaaatcctggagtgatttaccatggcatagagttggtgcaacctatggatgaggtaaatacaaggatttacagagtgctccctccctcaccagggggtgtagaatttaatcagatcccatcaagtgcagtattttcaacttgtttgggtagtttctgccgtgtgtttaaataaattgatcctcaagtcttttcttctaggtagtcgaagaaagcattatgttattgcttatgcggttagtcgcgtggtaaaaaaagattttcaatttagtgtcttcttctaacagtggtatcttgagaatataatacactggaacagctaattccaagacagattttttttgatctagcacgctagttggcttcagaaaggtgaaccattggtcatgtgtatttgatatacaccatgatactttaaaatctgtatttgaaatactacatgatctgtgccaattaagccttgctataattgacaaattgactactctgaacacagctcccttctctctctctctctctttttttttgacatggagacacctttatgcagtggtttgcaggtgccagtcttatcatttttggcgtctttatcctcagcaagtcaagcatcgaggagaaacagaactcagattaggaggaagttttgaccactagcgttagctgtaacataagcaatcctggacggcagtaccactctcaagttgtgcattagcagacgcgtcaagatcctgaggaaagaagagcctgc

SEQ ID NO: 3837 - DNA, 2803 bp, Zea Mays
catttctcctcgaacccccaggtcccccacacaacgcagatacggacactctcctactccgccctccccctgcgccccgcgcagcgcacgcccagcccagtccagccggaggagaccagatcaaagcgccaccgccacgccgtactctagctaatcccgccgccgcgccggggtcgcgaggaggaggatgaagcccaagagcctcccgttcatcgccttcgagcacaagcgggatgcatacggctttgctgtgcggccgcaacacctgcaacgttacaaggagtacgctggcatctacaaggaagaagaggaggagagatctgacaggtggaagaattttctggagaggcagcctgaatcatccggacaagatgctggtggtaatgctaaggatgatggttccgaatcactgcatgagaagacggtagttggaccacgaaagattgaaatatggacgccaattagaccgtccctgagcaacatcgagcagatgatgagcttgcgcatcgagaagaagcaatcctctgctagcaagcagcaagcaaaggatgtaatccatcctgtgaaagttgaggagggcaagttgtcagaggattcagacgacgagttctatgatgtagataaggttgatccgagccaagaagtgcagccgagcgatactgggaatgctgatgttggaagcaggagtcaagaagaaaattacatttcaaaggaagagttggagtgtctagtccatggtggactaccgatggctttgaggggagaggcaatgaacttttttgctggtctcttgcttctattgatgccggaggagaatgcgttttggacattggttgggattatggatgactattttgatggctacttttctgaagaaatgattgagtcacaggtggaccagcttgttttagaggagttagttcgagagaagttccctaaattagcaaatcacctggattaccttggacttcaagttgcatgggttactgggccatggttcttatccatcttcacgaatgtgcttccttgggaaagtgttctccgtgtatgggatgtgcttttgtttgatggaaacagagtaatgctgttccggacagctcttgcgctactggagttctatggccctgctcttgtgactacaaaagatgctggtgatgcagttacccttttgcagtctttagctggttccacttttgacagcagccagcttgtcttgacagctcgcatgggataccaatccgtaaatgaaacaatattgcaagaactgagtaataaacaccgcccacctgttatatctgcaatggaagaaagagcaaagggtctaggtgtttggacggataccaatggtcttgcatcaaaactgtataacttcaaacgtgaccctgaaccgctggtttctttaagtgattcaacagaccagttgagtgatgtgggagatggggataccaatcaagaaagtgatctgggaaacatggatgacgagtatggtggtgtaatagtgaattctgagattgattctttgcctgatccaaaggaccaggttgcctggctgaagttggagctgtgccgactcatagaggagagaagatcagctgttctcagagctgatgaactagaaacagcacttatggaaatggttaagcaagataacaggcgccaattaagtgcaaaggttgagcagtttgaacaagaaatatctgaactaagacaggccctgtcagacaagcaggagcaggagcaagcaatgtttcaggtcctgatgcgtgttgaacaagaactaaaaattgcagaggaagctcgcatctcagctgagcaggatgctgctgctcagagatacgcagcaaatgttctacaggaaaagtacgaggaagctatggcttcacttgcccaaatggagaacagagctgtaatggcagaaacaatgttggaggctacactgcagtaccaatctagccagcagaaagcaatgtccccttgcccttctccaagaccatcgatgctcgacgcatcccctagtcagtcaagccagaattcatcgcaggagttccagccaagaaggaaaaacttgcttggcccattttccctgagttggcgtgataagaacaaggaaaaaccgaacaacgctgatgactccaccaacacaaagtctacaaataatgatgaaatggtagaaacctccaacacaaatgatgagaagcatagagaaacactagatctaaatagtgagcagagagcagaatcacccaaagcagatgtcaagatgagagcagagacacctgagaaagacaacgacctgccaggggtccaactagtcactgacgatttgaatgggcaccacgaacagatgcaagaaataaaattggattgataagcattaagcacaatgctcccagcccaaatatcttcgccaccacgtaagtaatatcagagtatttatgatctgatcacacggtgccagttggtgacagcactgagggtggctaagttttgaaatgatactggtccccccctcctctcccctttccctttgtggttccccgaattctttttgccaccacatctaggttacatgtcatttctctccattttttataattttgaggagaaaatgagcaagttatatatggttgcccatccgttgctgcctcccaatgtaaatgcattggaagaactgtgagaaaaaagatgagaattgtgggcaattatgacacccttattcttgtaaattatcatatcatttagagtttatgcgtgctttcaattgaagaaatccgtgctggcgttaataacaccactgaaccct

SEQ ID NO: 3838 - DNA, 1360 bp, Zea Mays
ctgtaattcggctcaatcgtatatgctgtaataatgcagaactgctgatccctcagttggaattcctcaacgaggaaggagcacaggctgaactctgggcgttgtcaaagattttcctggacacacttgtacaagagacaggacaggtttggatacaagaaagttactgccattttccctgacgctggagcagctgcccttctcaagcatcaatggaaagatgcacaattcaagtgtgccagtttaggtgaccggaagccagttggtcctgaagatgaggtcgcagttatgattatccctgatcatcagatgctggaagctgttgaacgcatcacatctcaactctctgatgatcctataagacctcttgtcatgtggaacccacggcttgttagtggagatgttggagtaggctttaatgtacggaatctgcggagaaatttcttaagcacttttaccactgtttactcgatgaggccattgccaactggtgcagtctttagatgctttccagggcagtggaaagtgttttatgatgatccaaataggccaaatcggtatttgcttgcccgagaactcacaagtaggcccgatgcaactgatattgagagaatatttggtggtgccgatgagcaatctgaagaggcaccatcgttgatgaacaatgtcatgggcgtgttcagttccgtgagtcggtttatgagggtcatctccaagtgagagtcgaagcaaacattgttcacacttgaagccatcaacaaccatcatgatgcttgagttatacaagaagattattttagtgcatccatgttgttttcagtctgtaattactccatggtactgctattcggaacagtatagtttggcgttccggcacatgccaccaaatgtgtgcacataccataccgtggattcctggagtcatctgctgatcctacaccgtgaggtcaattatgtaagtgtgacttagaaaaaaaatgtagatagatcctcattctggaaaaagccgggtatttgattgtaattcaatactgtgcttgatatatcacaatcagctcgcattttgtaattcaatactggacgaatataaattcaatcctttgttttacatgtgtgttgtgtcagtcaatcagaacatttttctactctacagtgagtcagaatatctatcctctaaagtgacacacttatcctcagtatatatagttatatacaccgaatactgctgaaataaccatttttttaaggaagagaaacatttgaatgaagtgacctaaatacagtacattcagaatcttgggccgatgcgatcagtgctcccggttttccacaggagaggcggaggcgctgtgagagcctg

SEQ ID NO: 3839 - DNA, 2175 bp, Zea Mays
ggaaattgatggaaccccgtttctatgcgttatccaaagagctgcatagcagcgcttctcccagccacgtcttcatcacacacggtcgcggcgcgaagcaatggcgaccacggcgccgctgctctcgccccagcgcgcttgccctacccatctccggcgccgcctctcgcccctacatctcgtattccccctcgacgcgtcagcgaggcggctgcgccttcgccgggcgccgccaccttgttcggccaagttcggcaagttcgacgcctccgacgccccggcggaggccgaggaggcggggggcgcgacggatggtgggctggcgcagcccgtggaggaggacgacaggtcgggttcactgcaccctcaactcgtgcgtaattgagaacacaaaagatgctgacgttgtgaagcggccttcgctgtggttcagttgcttgccatcggatttggagggcgcgattcggcagtcagggaaggcgagcgcagatttcgtaaactccggaggcatgcgagctatcgcagaactgctgatccctcagttggaattcctcaacgaggaaggagcacaggctgaactctgggcgttgtcaaagattttcctggacacacttgtacaagagacaggacagaaagttactgccattttccctgacgctggagcagctgcccttctcaagcatcaatggaaagatgcacaattcaagtgtgccaggtactaatgtactatccactgagaagtgatggtttcataccaagttgatgtaacttgttgcatctcatgattttctgactacgagcggcatgctaccgacgtcaattggaaatcacaattgattttcttttgagaccaggaacagttaattttctagctaccaagaattggccagttcacctttagtcctagttgcaaatgccatattatactggacatgacaaggcagaattctgactctttgtattcttgaagaagaaactttatggatgcttccagattatgacattgaatagtattcaggttgttacttcgaatcttcaatctgtttttgacctgacttgtagtttaggtgaccggaagccagttggtcctgaagatgaggtcgcagttatgattatccctgatcatcagatgctggaagctgttgaacgcatcacatctcaactctctgatgatcctacctcttgtcatgtggaacccacggcttgttagtggagatgttggagtaggctttaatgtacggaatctgcggagaaatttcttaagcacttttaccactgtttactcgatgaggccattgccaactggtgcagtctttagatgctttccagggcagtggaaagtgttttatgatgatccaaataggccaaatcggtatttgcttgcccgagaactcacaagtaggcccgatgcaactgatattgagagaatatttggtggtgccgatgagcaatctgaagaggcaccatcgttgatgaacaatgtcatgggcgtgttcagttccgtgagtcggtttatgagggtcatctccaagtgagagtcgaagcaaacattgttcacacttgaagccatcaacaaccatcatgatgcttgagttatacaagaagattattttagtgcatccatgttgttttcagtctgtaattactccatggtactgctattcggaacagtatagtttggcgttccggcacatgccaccaaatgtgtgcacataccataccgtggattcctggagtcatctgctgatcctacaccgtgaggtcaattatgtaagtgtgacttagaaaaaaaatgtagatagatcctcattctggaaaaagccgggtatttgattgtaattcaatactgtgcttgatatatcacaatcagctcgcattttgtaattcaatactggacgaatataaattcaatcctttgttttacatgtgtgttgtgtcagtcaatcagaacatttttctactctacagtgagtcagaatatctatcctctaaagtgacacacttatcctcagtatatatagttatatacaccgaatactgctgaaataaccatttttttaaggaagagaaacatttgaatgaagtgacctaaatacagtacattcagaatcttgggccgatgcgatcagtgctcccggttttccacaggagaggcggaggcgctgtgagagcctg

SEQ ID NO: 3840 - DNA, 1365 bp, Zea Mays
cagagctctcgcctcttggcaaggtgctcataaaagaacacctgtgatgcctagaaggaaccctccacctccaagagagcaatctaatagttttttaccgcatggaagctcaaaggcaggagatgcacctttaggtgcattttgggcgacacagcatgcacaaggtgctcaagctgtagttaataggaaccctttgtttgatggggagtcaattaaggcaccactgtcatcaaagcagaaccaaagctgggtggacaccagcatcagtattcctggcaataggcatgatcattctggtcagatgtcactgacaagtaaagcacaaaataactctttgtccaataatggtttcagaggtctctctgacacggagatacaaaattctgggaaaagtagagcacaacaacctcaacccgagccaaaatgtgagaaagacccatttaatagctttgttgcagattttgacactcacaatctcaacattgccgttggtaaggcatccgaacttgaacttgaagtgtccaatctgaaggagcagttgaagaaaaccacattagaaaaggctgagatgacagccaagcatctcctcatcgtcaggagatccaagagctgaagctcactcttgccgagccaacacctccctcaaacaaagtcagctcaaggacacaagattctggatctcagcgaaaggaaaagatccaaggtactgtgtgggagcttgaacaagggatgcttgctagcaactcctcatcagccagttctgatgccaaaacatggcaggctttccctgacacaaagactcaggcccgaccaaaggtcgatcatgcaactaatgggagccaaaacataaccaagaacacaacgtcaggtgcttcccccgatgcgtggggttttggtactgataatttcagaacaccagcaacagcattaagcgctaccacacagatcaacagggcagctgcccaacggagctcatcccaaagatttaacgctggtgtggccaaggtagagcagccatctggatgggctggtttttaacttcaatcgacatgcgttaaccatcattctggtcaacatttgcaatccgcgctacacagctgctgttgccgatggagttgtgatctttgacatccacagggcatcaaaatcggttatttttagtgtgttcatcaattttggttgtgccaactttgatattgattcatgagatcacttgaaattacccgttgttaataagtaaatatatattgacagtattgtgcgtatttctttgtatgattatgaatatgcaacgggagaattcgggcggtatgacggtcccgctcccgccctctggccttccccatcccgacgcctcgtatccac

SEQ ID NO: 3841 - DNA, 1365 bp, Zea Mays
cttgagtttcttccgtacctactgtgctcataaaagaacacctgtgatgcctagaaggaaccctccacctccaagagagcaatctaatagttttttaccgcatggaagctcaaaggcaggagatgcacctttaggtgcattttgggcgacacagcatgcacaaggtgctcaagctgtagttaataggaaccctttgtttgatggggagtcaattaaggcaccactgtcatcaaagcagaaccaaagctgggtggacaccagcatcagtattcctggcaataggcatgatcattctggtcagatgtcactgacaagtaaagcacaaaataactctttgtccaataatggtttcagaggtctctctgacacggagatacaaaattctgggaaaagtagagcacaacaacctcaacccgagccaaaatgtgagaaagacccatttaatagctttgttgcagattttgacactcacaatctcaacattgccgttggtaaggcatccgaacttgaacttgaagtgtccaatctgaaggagcagttgaagaaaaccacattagaaaaggctgagatgacagccaagcatctcctcatcgtcaggagatccaagagctgaagctcactcttgccgagccaacacctccctcaaacaaagtcagctcaaggacacaagattctggatctcagcgaaaggaaaagatccaaggtactgtgtgggagcttgaacaagggatgcttgctagcaactcctcatcagccagttctgatgccaaaacatggcaggctttccctgacacaaagactcaggcccgaccaaaggtcgatcatgcaactaatgggagccaaaacataaccaagaacacaacgtcaggtgcttcccccgatgcgtggggttttggtactgataatttcagaacaccagcaacagcattaagcgctaccacacagatcaacagggcagctgcccaacggagctcatcccaaagatttaacgctggtgtggccaaggtagagcagccatctggatgggctggtttttaacttcaatcgacatgcgttaaccatcattctggtcaacatttgcaatccgcgctacacagctgctgttgccgatggagttgtgatctttgacatccacagggcatcaaaatcggttatttttagtgtgttcatcaattttggttgtgccaactttgatattgattcatgagatcacttgaaattacccgttgttaataagtaaatatatattgacagtattgtgcgtatttctttgtatgattatgaatatgcaacgggagaattcgggcggtatgacggtcccgctcccgccctctggccttccccatcccgacgcctcgtatccac

SEQ ID NO: 3842 - DNA, 1487 bp, Zea Mays
cttggaatccctctctcccttcgcaaattgtccaaagaacagtttcaacctttcatcgataggtttgctgactgcctgccaagctggaaagcagaccttatgacaagggccgggacaaaagttatggtgcagcatgtgcttacaggtgctcataaaagaacacctgtgatgcctagaaggaaccctccacctccaagagagcaatctaatagttttttaccgcatggaagctcaaaggcaggagatgcacctttaggtgcattttgggcgacacagcatgcacaaggtgctcaagctgtagttaataggaaccctttgtttgatggggagtcaattaaggcaccactgtcatcaaagcagaaccaaagctgggtggacaccagcatcagtattcctggcaataggcatgatcattctggtcagatgtcactgacaagtaaagcacaaaataactctttgtccaataatggtttcagaggtctctctgacacggagatacaaaattctgggaaaagtagagcacaacaacctcaacccgagccaaaatgtgagaaagacccatttaatagctttgttgcagattttgacactcacaatctcaacattgccgttggtaaggcatccgaacttgaacttgaagtgtccaatctgaaggagcagttgaagaaaaccacattagaaaaggctgagatgacagccaagcatctcctcatcgtcaggagatccaagagctgaagctcactcttgccgagccaacacctccctcaaacaaagtcagctcaaggacacaagattctggatctcagcgaaaggaaaagatccaaggtactgtgtgggagcttgaacaagggatgcttgctagcaactcctcatcagccagttctgatgccaaaacatggcaggctttccctgacacaaagactcaggcccgaccaaaggtcgatcatgcaactaatgggagccaaaacataaccaagaacacaacgtcaggtgcttcccccgatgcgtggggttttggtactgataatttcagaacaccagcaacagcattaagcgctaccacacagatcaacagggcagctgcccaacggagctcatcccaaagatttaacgctggtgtggccaaggtagagcagccatctggatgggctggtttttaacttcaatcgacatgcgttaaccatcattctggtcaacatttgcaatccgcgctacacagctgctgttgccgatggagttgtgatctttgacatccacagggcatcaaaatcggttatttttagtgtgttcatcaattttggttgtgccaactttgatattgattcatgagatcacttgaaattacccgttgttaataagtaaatatatattgacagtattgtgcgtatttctttgtatgattatgaatatgcaacgggagaattcgggcggtatgacggtcccgctcccgccctctggccttccccatcccgacgcctcgtatccac

SEQ ID NO: 3843 - DNA, 1846 bp, Zea Mays
cctagggctcctttttccccccctagagattgagatcaagcgggagatttcgactatgaagctgatcaaacatcccaatgtggtacagctgcatgaggttatggcgagcaaaacgaagatatacatggttcttgaatttgttgatggaggcgagctattcgataagatcgtcaattctggaaggctaggagaggatgaagctaggatatactttcatcaacttataaatgcagttgattattgccatagccgaggagtgtaccatagagacctgaagccagagaatttgcttctggattcaaatggagctcttaaagtttcagacttcggcctaagtgcatttgcaccacaaacaaatgaggatgggcttctgcatactacctgtggaactccaaactatgtagcacctgaggtgcttgctgataaaggttatgatggtatggctgcagatgtatggtcctgtggcataatcttatttgttcttatggctggatacttaccctttgatgatgccaatctgatgagactgtacaaactgatctgccaagcatatttttcttgcccaccatggttttcttctggagcgaagaagtttattaagcgcattctcgatcctaatcctgatacgaggataacaattgcagaaattttggaagatgaatggttcaaaaaagattataaaccaccacgttttgaacaaggtgaagatgttagccttgacgacattgatgctgcattcaatgattcagagagaaaagagagaaaccggaatccatgaacgcgtttgctcttatttcgaggtcgcagggtttcaaccttggaaatttgtttgagaaggagatgatgggaatggtaaagagggaaacatctttcacgtctcaatgcacagcacaggagatcatgacaaaaatagaggatgcatgtgggccactcggtttcaacgtgcggaaacaaaattacaagatgaaattgaaaggtgacaaatctggaagaaaaggtcacttatctgttgcaactgaggtttttgaggttgccccatcacttcacatggttgagcttcgtaaaaccggaggagacacattggagttccacagcttctacaagaacttctcatcggagctgaaagatatcgtgtggaaagctgaatctgacgcaaataataaacagacgaataagtgatacccagagaatctgtgtagccctcatgaggccacattcagatagatcacctcttcgggtgataccacctgcttggtactgtatgcttttttttttactggtaccacattagcagccaaaatctcttgtaaacgggaactccttctgaatgagcgcaattgtacaaaacacatatgaagaggccctccgtgagatgctccgaacactgcaatgggatgtcaaatagttctgaatggtgagtgctgtttttgcatctataggggcatatatgtttccattccatgtgcatgtaccgttgttgtatgcgcatgggggtacgtgtgcagcaggagagagagaacatctgaacgtgtcctgagaggaaaaaaaaagtctatgtccgtttctaaaatgctttggttgtcaccagggttgagtgcctttgttttatgaaaatggacaatggagaatgatgtatgaagcttaactctagtatttgggagtaaaagtatgtttggttggatgtataatgaggaatggaagggggtcgtcacactttctatagtgtttggatgaaagttaagcggtgaagaggtaaatgccggagtaattttttggtggtgtagggaatgttgagatccacatagttgtacttggttggatacgctattatttttagcacatatta

SEQ ID NO: 3844 - DNA, 1899 bp, Zea Mays
ctgcacacgcctagggctcctttttccccccctagagattgagatcaagcgggagatttcgactatgaagctgatcaaacatcccaatgtggtacagctgcatgaggttatggcgagcaaaacgaagatatacatggttcttgaatttgttgatggaggcgagctattcgataagatcgtcaattctggaaggctaggagaggatgaagctaggatatactttcatcaacttataaatgcagttgattattgccatagccgaggagtgtaccatagagacctgaagccagagaatttgcttctggattcaaatggagctcttaaagtttcagacttcggcctaagtgcatttgcaccacaaacaaatgaggatgggcttctgcatactacctgtggaactccaaactatgtagcacctgagatgtgtaagcatcgcgctcttcctgcaggtgcttgctgataaaggttatgatggtatggctgcagatgtatggtcctgtggcataatcttatttgttcttatggctggatacttaccctttgatgatgccaatctgatgagactgtacaaactgatctgccaagcatatttttcttgcccaccatggttttcttctggagcgaagaagtttattaagcgcattctcgatcctaatcctgatacgaggataacaattgcagaaattttggaagatgaatggttcaaaaaagattataaaccaccacgttttgaacaaggtgaagatgttagccttgacgacattgatgctgcattcaatgattcagaggaccgtcttgtggcagagaaaagagagaaaccggaatccatgaacgcgtttgctcttatttcgaggtcgcagggtttcaaccttggaaatttgtttgagaaggagatgatgggaatggtaaagagggaaacatctttcacgtctcaatgcacagcacaggagatcatgacaaaaatagaggatgcatgtgggccactcggtttcaacgtgcggaaacaaaattacaagatgaaattgaaaggtgacaaatctggaagaaaaggtcacttatctgttgcaactgaggtttttgaggttgccccatcacttcacatggttgagcttcgtaaaaccggaggagacacattggagttccacagcttctacaagaacttctcatcggagctgaaagatatcgtgtggaaagctgaatctgacgcaaataataaacagacgaataagtgatacccagagaatctgtgtagccctcatgaggccacattcagatagatcacctcttcgggtgataccacctgcttggtactgtatgcttttttttttactggtaccacattagcagccaaaatctcttgtaaacgggaactccttctgaatgagcgcaattgtacaaaacacatatgaagaggccctccgtgagatgctccgaacactgcaatgggatgtcaaatagttctgaatggtgagtgctgtttttgcatctataggggcatatatgtttccattccatgtgcatgtaccgttgttgtatgcgcatgggggtacgtgtgcagcaggagagagagaacatctgaacgtgtcctgagaggaaaaaaaaagtctatgtccgtttctaaaatgctttggttgtcaccagggttgagtgcctttgttttatgaaaatggacaatggagaatgatgtatgaagcttaactctagtatttgggagtaaaagtatgtttggttggatgtataatgaggaatggaagggggtcgtcacactttctatagtgtttggatgaaagttaagcggtgaagaggtaaatgccggagtaattttttggtggtgtagggaatgttgagatccacatagttgtacttggttggatacgctattatttttagcacatatta

SEQ ID NO: 3845 - DNA, 2161 bp, Zea Mays
cgctgtgactgtttcagcccaacccgtggtaccgaggctcagaatgagtgcctgttaatctcagagtttgggcctatacggaaaacgaaagagctttgggttgacaagtacacaccccactcgttggctgagcttgctgttcataaaaagaagattgaagatgtaaagaaatggatggaagagaagctgaaggcaccaaaggcaacggttggaggatggacccttgtcctaactgggcaaactggtgttggaaaatcagcaactgtgagagcaattgctgatgaccttggagcagacttatgtgagtggacgactccagtaccaacactgtgggctgaacatgttcatgctaattcaggattacgctatacatccaagcttgaagaatttgaaacttttgtagagaagataaggaagtattcaatgctttgtccaaccaacaccaggtcccaaaggaatctcattatcattttgattgatgacatccctgtaacaagtggaaatgttgcttttgcaagactagggaaatgcctaactggtttaattcgaagtactcaagtaccaactgtcatttcactcactcactaccacaaaagtgagagtaacgatactgcaatgtggaactctgaggaccttgagtccttacttcaagatgctggtgctcacaagattggtttcaatccagtaaccacaaattctatcaagaagatccttgttcgagtatgcaaagaagaaagctgccatgcatctgaagaattattgcatcaaatagccacctctagtggaggtgatattagacatgcaataatgtctcttcaatactattgtcttgaccccagaaggcatagttctgcattggcaacaagttctagttctactgtcccaaagaaccttgattctctggttccagggcatgagagctatggccctagcagtgcattaccttccccatgtggaagagatgagacactttcactatttcatgccttggggaaatttttgcacaacaagagggaaactaatagtgatgctgatatcgacctggattcgtgtcctcttaaagaaacctaagaagaaatgcactcaaaatggatgttccagaaaagattctttcacaagcacacggaaaagtacgaacagttgtggattttctttatgtaaatgttattgatttcattgacagtgaagctgttgatgatgcatgggctgtggtatcatatttgggtgaggcggattgtcttcttactggtggtccagtcgcatcatacaactcagaaaacatagcacagctcattgctgcctctgttgcggcacggggagttctttttggaaatgctcatgtcacaccatcaaggtggcatacaatccggagcccgaggctctggcaaactgatcaatcatctcgatccaataaggaccacattctgaaggaaagatttgattgttcaaggacgtgtggtttttgcaacttcgctgacttggtcacagaattcagaccattggagagatggattggtcctcgtaatggtgggcatagaagcagctgcttgccccacggcgtaggttgctcgcccatgggagtcgctgatggaaataattctgaagaggatgacgatatgatagaagattgttaatcgtgagtcgcattatgagatgccaacatatcattatggatgctgactagctgattcaaatagtggctcgctgtttaagggtgccattgatatttaagttttatgaagctaattgttgcacttaccagtttcatgcgtcacgtccgaagcgtgtagagtagctcggtttttctttcccatatgtcgtctaacaatcaaggagttaccagctgcgagaaaacatctaagtctaacatggcatgaagttacatagatgtagcactcatggtatcacttcgctagctgaactgaggatgattgattgaccgagttataaaaaagtgtagcatctacaatttaatatttagtatgtggctcatatgtccactttaattttaattttaaatttatttttgtagggagagtattacattggcttaccacgggatgttgtgcaattgttgtactataacatcaaatatgattcgtatgctgtcataacgcacgggcatattgtaccagtatatctctagtatattaaagcagca

SEQ ID NO: 3846 - DNA, 2156 bp, Zea Mays
cgcatctacttccacggacggtctctcctgtcggctgccaccgtcgccgagaacctttcttttttgtggattcctaccactcccccgacgaggcaagcagcaagcgttaattccattccttaattgccaatggcgaccgccttcgccagtacggccttgcggcgggcgccttgggataaactccacggcaaggaaggcatccgaagcctcgggggccttaatagcttcttcctcccgtggctgagactctggtcccgcgggctggtagggcatcggcatgggtggtcttgctgtctccgccttcgtgctgttttcttgggtgcttttcttgtcctgcatcttctcagtggatggactgtctaaagtgaggggtgttaacttgggaggatggttggtcattgaagggtggattaagccatcactttttgacgggattccaaatggggatatgctcgatgggacacaggtgcagatccgctcagtggtattaaacaagtatgttagtgcggccaatggtggtggctcaaatgtgacagtggaccgtgatgtggcctcaacgtgggagacattctggataatgaatttcagcttcggtgccttggaggtcaatttttgacatcaaacagtgaagatggtttgatcttggctacttcaaagcatccattgtccactgaaactttctccattgaaaggaatgctagaagggttcatatcagacttctgaatggaggctatgtgcaagatgggataataatttagcgacatttgaattggtgatcgttgccaataacttgcatggggactaccagcttgccaatggttatggccctgacaaggcgaagatggtcttagaagagcacagaagaagtttcattacagcaaaggactttgatttcctgtctcgccacggaattaatactgtgagaattcctgtcggatggtggataacacaagatccttatccaccttctccatttgttggagggtctttggcagccctggacctagcattttcatgggcacaatcttatggtttgaaatgtataatcgatcttcatgctgctcctggttctcaaaatggaatggaacatagtgcgagcagggatggttctgtggcctggccctctcctgaatatatctcacaaacattggaagtcattgacttcctggcgacaaggtatggaggccatccttcccttttgggtattgagcttctgaacgaaccttctgcagctacagttactttagatgttcttgtgtcctactatatgaggggataccaaattgtgcgaaaccattcgtcaactgcatatgttattctctgtcaaagaattgggaatgcagacccaattgaactgtttcaagctggtattggtctttcaaatgtcgtagttgatttacactactacaacttgttcaatccatactttgccaccatgaattccagtcagaatattgattttatttacaagatgagagcaccacagttacaagaccttaagggcatgaatgggcctcttgtcttcattggtgaatgggttaatgaatgggacgtgcaaaatgcatctcagtatgagtatcagaagtttggcagtgctcagttggatgtttatgccaacgctacctttgggtggtcgtactggacacttaagaatgacatgatccattgggacttcgagtggaatattaagaataagtacctattattcagtggttcatccatgctgaagacaccaagcttcctgctgctgctagcgttaggatggggaattcacctgatcatcatgccaagataacctggattctaggaactaagctgattggaagtgtggatgtacacatagactactcaaatccgaattatagttgaggcaaaattggtgcatatatctttcttatataaagtcatgtagttgctcctaggtttctccagtttttttatgaaaaaaaaagaaatcctggattactcgaacatctcgtagcacaccttcgtaatgcaatatgttactcagctgacgaaatgttcaggtgtgtacagcgtgccatttgatatttttacttttgaagatgttgaggtatcatttgttcaggatggagacagtagcactggacctcatgccatctccagcaagccatgtaaatggccgtgcaaaata

SEQ ID NO: 3847 - DNA, 2141 bp, Zea Mays
ctgccatgtgccagcgcatgagtggagactggagaaagagccctactaccctagctaagccggcacagcggcggccggcgatacacgtgcgagcggcggcgtgaggaaaggcgggcggggtgagagatacctaaccactaagcggctgcggcagcgccgcagcataaccggcaccaggtcaaaaaacgacgactgggcaggcaccgtatgcatatcctgaatttcagcaccgcatacactttctacagggcccttgccacaccagacaagcacagacaaacacgcgagcggcatgccatgtcatcaccggcagcaaggagcatcacttgctactccaaaattccagagttcttggtgggcactaatgggcagccaatgcccgcagtggggctcggcacagcatcacacccatttgtggcggaggatgtcaggacatccgtgctcactgcgctggagcttggctaccgccacatcgacactgcgggactctacgcctctgagcgagttgtcggcgaggccatggctgaggcagtgtcgtgcggccttgtggcgtccagggacgagctgtttgtgacatccaaggtgtggtgcactcaatgccatcctgagcttgtgcttccgtccctcaaggagagcttgaagaaccttcaaatggaatatgttgatttgtacctgattcattggcccatggctgtaaagcctagcaagcctcacttcccaatgaaaagggaggacattgtgccgatggaccttagtggtgtatggcaggcaatggaggaatgccatcgacttggccttgctaaaatgattggtgttagcaatttcacaacaaagaaattgcaggagctgcttgccattgcaaaaatttccccatttgtaaatcaggttgaattgaatcccacttggcaacagaaaaaactaattgagttctgcaatgacaagggtattcatgtgacggcttattctcccctaggaggccaaagaatctctaaactgaatccagtacgacaatctgacatattggaagagattggaaaggctagagggaagtcagtggcccagatttcactgaggtggatatacgagcaaggtgcaagcatggtggcaaagagcttgaaaagggagaggcttaaggagaacattgaaatcttcgattgggaattgagtgacgaagatcggtttaagattggtcagatagcacagcgcaagttggtcacagtacagaatctcctgtgtcctgaaggtatctccagtgtggatatcttggatgttgatgttattgaaatatagctgtggtctccatctatttgcaatgggcaaaagaattggtgtacaacatgttggatacatcagaagcagtctcatgttcgggtgcaaaaacaagcaatgcgctctagcacttgcgtgcacaaattctaggactgttagaccaactccagcaaaggtggctccgtatccgtaaaatacgtaggcgcgatcaccattgcggagcctccaaccgcgggcgttccagcagatagactccgtatcacactcgcaaccgcgggcgttccagcagatagactccgtatcacactcgcacaccatatctgcatgcaagtgatactgacagatgacagatgggtcctacgagcgtagacttttattgctacgttgctcagatatgtgcgcagaggagaaataatacatgggaaaagggagcgcaaatacacggcgtacattttgtggagagggatacggagtcagttggactgatgaatagtgcacagtgcaaaaggagattgggagccacatacggaggctgctggagttggtcttagtgacaagactgctcacttctctttttttctagcgcttttatgatgatcgatatagaaacaaaactgcactacatcgatcgtgataactatattgactggcataatgtctgttgttgggtatatttgttctttcctttggtttaaatcacgtttctctatactacattcatgttcatcttgtcaaatttacacatacatctttctgttgtcactaactcttttagtattagacttggtcatttatgagttgtatgagtacatagacttgtatgttaatggagtctatagtgactacgaatagacttatttattgagactttt

SEQ ID NO: 3848 - DNA, 1733 bp, Zea Mays
cggggctccgagccattcgatctccaatcggacggcctagacggctcccttcctctccttgccacacttgcgctcctctccgagttgtcgtctccgtcgctgctggctgctgcgccactcccccagccccgagatctgctcaacaatggcgacgcggcgccacatcctcctcctcgccgctgccttcgtgtcccttctcgcgctcgaggctgtggagggcctcgaagaggggccccgcgggcgccggctgctggtcctgctggacgacctggccgtgcggtcgtcgcactcggccttcttcggctcgctccaggcgcgcgggttcgatctcgaattccgcctcgccgacgaccccaagctctcgctgcaccgctacggttttggtggatcagtggaccagaacgcagtccttgaatttattgatgctgggcttgatatgatcctggcggcagattcctctgcctctgatcttattcgtggcattgcgacagagtgtggggttgattttgatgaggatccagaggcaatggttattgaccacattaactatgccgctatggatgttgaaggcgatcacaccttgattgttggtgatgatcttattcagtcagatgtcatactggggtctaaaaagattgaggctcctgtattatttcgtggaattggacacacggctaatccatcaaacagtttggttctgaaagtcctatctgcctctccatcagcatactcagctaacccaaagactaagttatcgttgcctccatcgcttactgggtcagctatatcactggtttcggttatgcaggcaagaaataatgctcgggtgctgctatctggatcacttgatctttttagcaaccggttcctgaagtctggtgttcaaaaggctggtagcaaaacgagatacgagagagctggaaatgagcaatttgtgacagagacaagcaaatgggtcttccatgagagggggcaccttaaggctgttaatgttaagcaccacaaggttggggagaccaatgaaccaggcatgtaccgcattaacgatgacctggaatactctgttgagatctatgaatggtctggaacaagctggaagccatatgttgctgatgatgtgcaactccagtttttcatgatgagtccttatgttctgaaaactatgtcgaatgacaacaagggtttatactcaacatccttcaaagttcctgatgtctacggagttttccagttcaaagttgagtaccagaggctgggatatactggtttgtcttttacaaagcagattccagtgcgcccttacaggcataacgagtatgagaggttcataacatcagcgtacccatactacactgcctcattttcaacgatgtgtgctttcttcatattctcgcttgtgtacctgtaccacaaataaaggactcacgggagcgcacaagtttctggaggctgctgatgcgacctagatctgtggccaagtgttacccggtgcaattttatggaatcatatatttgtagtaggccaacttagctagaattagacgaccgtgaccgcaatcatgggaaatttactcgtgctagtaggatgttcgatctgccccacaaattttttttgttcggatccttctgatcagcacttgtgaaaacgtttacagtctgtagcattgaaaggatgacgaagcatgtagtgattttgaaactactgctcttgctcagttcttcctcgttgcacg

SEQ ID NO: 3849 - DNA, 1413 bp, Zea Mays
cgaagagaatccatcccaatagtctgcccggtccattctatcttcgtcgatatcgccgtctgcccgtctctactgggaagggaagggagcacctgcctgctcctgcgcggcggcggttgttactcttctttccactgtgggttgctgatttccagagcggcgtggaggaggcactacccgttcttctgggctgtcaggccttccgtaccgccgccgccgtcgccactcccactcccacagccgcgcacgcgcttctcctcctcctcctcactgcgctccaccaagagatccgccgcaaagacgtcaatggactcgtcttcagtcggtgaacccttctacgtcgtccgcaagggggacgtcatcggcatctacaaaaccctcagcgaatgccaagctcaagtcagcaattcggttcgcgacccttctgtcaccgtcttcaaaggctactcgctgcgtaaagacaccgaggaatacctcgccgcgcgcgggttaaggaacgctctctacgccattgatgcaacagatgcacgagatgaattgttcgacgatctagttccctgccctttccagcaacctgatggagctgcatcgtctactctgaaaagatcacaggagattgaaatcggaccatcaaagaagcatcccaaagttgatgagcaggtaccattacctgatagtcatctctcttgtattcttgaatttgatggtgcctctaaaggaaatccagggaaagccggtgctggagcaataataaggcaggtagatggttccgtgccaagaaagggttcaagtatattcgtgctcaaggcgactctaagcttgtttgtaaccaggtccaagatatctggcgtgttaagaatgataatatggctagcttctgcaagaaagtgaaggagctaaagggaacatttcatttatttcaaatcagacatgttttgagggaatataattcggctgctgatgctcaagctaactttgcagtagaacttcctgttggtgaagttcaagagcagtcgaacttcccatgctagcagttgtgttgtggtcaagtgtggtttgtgcatcgctaaggttctgggactgaagctatgtcacatttgttcagttctcattgacacaaaaggaagagacgaaacaacagttgtattggaagtggtagtgggtctgatatatctgcggagtattgaacagacagatgcaatattgagtagattcttaggaaatttaatcgtctcaaacttctagatagtgcgagttgatttgtccaggaccagtgtttgctgatatacgatgtttgtattcagaacagtattagtaccggaaactttaattgctcctttctctatgttggttacttggttaaggttgagtgttgcttttaataaattggtcaaaattttattatcacttaat

SEQ ID NO: 3850 - DNA, 930 bp, Zea Mays
aacgttacttacaggatgggcccactacaaactttcactctctcttgcgcttgcgcagcctcttcttctccgatcccgactccaactctccctctctccttcgcctggcacatcctcggcggcgcggcagcctgcttcttcaccggcgcggcggcctgcttcttcgacgacgcggaggcctacggcggcctaccgagcggacgggtccacggacgaacggatctccggcgcctggcagatcttcggcgcgcggcctaccggttgtggacggatctccgctgcctggtgccctggcaggcagacgcggcagcgtcttctccaggcgggtggatctccagcgctcctcgagctggagcaggcaggcgtgccggtcttctccaggcgggtggatcttcaccggcgcggcggcctaccgggcggacggatccggtcgatctccagctgctccgtgcctctgctgctccgcggcctgagctccgggcggacggatccgcggcccagcgactccgctgcctctgctgctctgtgtctccagcggatccgtgcctctgctgctcggcgtcctgagctccggccgtctcgcgctgttgcttgctccttgaatccgcacacatgtgattggtcaaataaattttctttgtcagaacatatgtcacttacatatggcgcagtggattgtgtcagtggtaaggtgtttgctgtgctgggttcgatccttctagggtctattttttgcattttgtccgattaaactatattcaccgaatcagaggtccgattaaactatataaacttttgcataatccactgaattttttaccttaagcaaataaggccaaaacatgagtccatgccaagtttcactattttttgaccaaattttctatctatttaatttttggctaggaaggcatgtaacccaaaaaaata

SEQ ID NO: 3851 - DNA, 1481 bp, Zea Mays
ctgaaatgaaaatgaactatatatgttagtgtcaatacaatgtttacagctcccatttctgagtcgtaattcaacatgcaggagtagtgaaagatttgaaacttaccagtataccgacaatatgatcaattttgaccaagagactaccaacattgtggtattaataattgtcactatactagatatgaacaaatttacaacaataatatgcaatatccatacaccataacaaaagaatatgacaaaactaaattgctgcaaatatttccaacttctctgagaaactgatgaaactatttgatgccaagatgccaacttgccttcagatcataggaagggcttctacagttcagatcataggaatggcttctactgacattgccgagagctcagttgacacttgacacagtgcgtcgggtgtacataaagacagccaatgaccacatggtgaagccggagcaccaggacgaggcggtgattcgactgtggctgccgagcaaggtggtggtaatggacacttgaccacagccctttctcctccacgccggagcgagctgatcctcaagtcattgtgatctgtaagcgatggtgtatcgtagtcccgttggaggttccacctgttctgttctttcagtggtgctatatgtaagccaatcaagttatcattcatctatcaatataaaaaaaaggaggaaaaaccatgaggtgagaaggctaaatatataccactctcagtcacacacaaggaaagaaaggaggaaaactagctggtccacacactatatcccgatcatctaccatattaggcaactctgcatgccagaaatgcaggctcctccagtcctgagaccctctatttacaataggaatcaccggaagccttgtcggtttgacataatttggattgtccacgaaaatgcagctcccctgcctcatgcccatcaaatcgttaaacttgttagatcggtaggcagagagaggccagactgatgggaatggcagcgaaggagcactttgtgcttgttcatggtgaagggcatggagcctggtgctggttcaagctccgctggctccttgagggtgctggctaccatgttacatgcattgacctagccggaggcggcgtcgatcctactgaccccaacacaatccggtcgttccagcagtacgacaagccactcatagacctcatttcaaccttgccggagggggagaaggtgattctaatcggacatggtgctggagggctgagtgtgattcatgcaatgcacgaatttgttgacagaatcagccaagcattttttgtggcagctacaatgctaccatttggatttcaagctgatgaagataagaaagatgggttaccaactttgcctgagaacgagattgagttgacacttggtgcgggagcagatgatcctccaacaaccatttccttgaggccagaattccagcgtgatcgactatcacaacaaagccat

SEQ ID NO: 3852 - DNA, 1170 bp, Zea Mays
actcgaacgcgccggtgggagaggagaaccgcaccgcggcgcagacatgggcgagtactgcccctccccgcagggggactccgcgctggcggcgccgcccttgacgctcccctcctcgtccccagcgacggcggttaggccaagctacgggagctgcgaccgcagctacgtgaagcaggtcttcgacaacctccacggcagcatctccgtagacccgttggccctgcaatttgttgatacagaggagtttcagaggttgcgggatttgaaacagcttggtcttacatacctcgtctatcctggagcggttcacacacgctttgaacactcattaggtgtctattcgttggctggaaaggcaataaataatcttaaaacatatcagggagtagagcttggaattgatcctgtcgacatgcagactgtaaaacttgcaggtctcttgcatgatattggacatggacccttcagtcatttgtttgagcatgagtttcttcctcgagttgatcctggctcatcctggtcccatgaaaagatgtcagtgctccttttggacagtattgttgacaaacatgcaatagatattgaaaatgattacctcaaaatggtcaaggacatgataactgccagctctgatcctgccagcacaacaagtgcaaaggagaaacattttctttatgacattgtcgctaatggtcgcaatggtatagatgttgacaagtttgactacattggccgtgactgcagagcatgtggtcttggatgtaattttcagtattggaggttgatggaaggcatgcgagtgatgggtgatgaaatttgctaccctgccaaagattacttgagcatccataaattgttttcaacacgtgctgatctgcaccgaacagtctacacccatgccaaagtgaaggctgttgaactcatgctcgtggatgcccttgttgaggctaatgattacttggggatatcattgcatgcacatgatccagaagatttttggaagttggatgacacaatcattaaaacaattgagactgctcctaacaatgaactgaagaaagcaaaagaaatcattcaacgtattcgccgaagagaactctacaagatgctgctattaagaataatcaggaggaaaggaggtttgatcttcagagaggcgtatgataa

SEQ ID NO: 3853 - DNA, 3367 bp, Zea Mays
catttttcttcctcactcctcacacagtcacactgtcgaccgcaccacgagtggccatgctccaactcgcccccacgccgctgccgtcgccggcggccgggcgtaggcctcgaccctcctccgcatgcatctgctgctcgagcgtacgcgcgctggaggaggcgaagcgggtggtgctggtgcggcacgggcagagcacgtggaacgccgagggccgcatccaggggagctccgacgcctccgtgctcacgcccaagggggaggcccaggccgagacctgccgccagatgctcgcctccgactccttcgacgcctgcttcaccagcccgctggcgcgctcccgccgcaccgccgagatcatctggcaggggcgtgggcgtgggcgtggcgacggcctcatcccggaccccgacctccgcgagatcgatctctactctttccagggactcctgaagcgcgaagggagggagaggtacggtcctctgtaccggcagtggcagaagaacgcggccgagttcagcatcgacggccactacccggtgcaggagctgtgggaccgcgcacggagctgctgggagaggattttggcgcaccggggcaagtcagtgctcgtggtcgcgcacaatgcagtgaaccaggcacttgttgccacctctttggggcttggcgcggagcactttcggattctgctccagagcaactgtggcgctagtgtgctggacttcaccccacgggctgggggaggtcctcctaccgtctgccttaaccgcttaaatcagaccccaaactctcctgtcgctgggggaagttctgcgggaagaaagacgagcaagaggatcattctggcctgtcaaggggctacacaaagcagttctgagattagcttgggtggaacgggatatgcgccgctgaacatgctcgggactatacagtctcagaagactgcggaactactcctggatttgaaggtcgacagcatcgtctgcagcccgcaggtggcagctgttgatgccgcgactatcatatgtccaagaagctgcagattgcttaggtgctgattgcgtgcctcgttacgtggaaacgaaaaggttgatagaacttgagattgaagacgcctttcaagcaaagcagaagagatttggggacataggcggcggcggcacggagtacaaatcactggagcgagtatgggctcggtccgaggatgcatggcaggcactgctcagggagttgccagatgacacatcggagcgtgttgttgtggccgtaggtcatcctgccattcacctagctctaatctgccggtgccttggtttgccgatggagtatctgtcttctttccacctggacgaaggcagcgtcagtgtgatcgatttcccagacggaccgagaggaagaggcgtcgtcagatgcacgaattacacggcccatctgggaagatgggcgatacccattacacggcccaactgaaaatgactaagaattctaatctaacatgctagttcccctctgtatagcatagcatcaccataccgatgtacgtacatatataaatcttgatctcagtatgtcaccaaggcaaatgatgaatatgtctattcggatgacgtcaagtggttatcagttcaagagaagagagaccagaccgatggattccgtttcgtgtggcatacaggacaggacaggaagagatgctgacaaaggctgatgcctcgatctgcatggcggaagaaggttcagggcttgagcaggagcatgccacatgtcttttctgctgccacgtgtagcgcttcaacttccagcagcacagcactgcactctacaggctgctgcaacgcctcgatcccatgcccatggccatccatgtcgagcgagcccaccatgcactctactctaactaatctaatggagtactcaacgccgcaccaggtgtccgggaaccagcagcacggttactccggcgatggccggccaagaggcacatccggcggggagtccgactccgacgacgacgccctcctcttcctcgccgtcccggcaggctggctcgtgcgcctgctcgcgttcctcggggagctcgtggcgtctgccatcctcggcctcgtcttccccgtcgcagccctcgtgggcgcgctgcgcgccctccccgcggcggccgcgtccagcctccggcgcgtggcgcgcggcctgctcgccgcggcgtgcaccttcgccgcactcgtggccgcgctgctcgtgtccgtgctcctgggcttcgttctcgtccggcgctgcgtcgagggcccggtcaccgtgcgccagcagctcttcttcgactacacggaggcgcagcccagcgccgcggtgctcctcggtggagcgcgaggcgccgtgctgccggcgggtcactccgtcagcgtgtccatggcgttgctccttcctgattcctaccacaaccgtgaggttggcatgttccagataaaagcagaggcggtctcggcaagtggagtcaccatggcatcagcgacacagccgcacatgcttcgttacaagagcggcccagtccggctggcgcagaccgcgctgctgtgcgtgccgctcactctgggcatgcgcagcgaggcccaggccgccagcctcagggtgctgcagtacagggaagggcacggccggcacaggagaacaggggccatcagagtgctgctgcagccgagagccgcgacggtgagcctgccccaggtgtacagggcagaggtggtcgtgcagacggcgcttccgtgggcgaagagcctggcgcgcgggttcaggtggacgctctgcgtgtgggtgtcctcctccgtgtacgccgtcctcgctgtttgctgggtccggcctctcgtgctgtccgcgaggaggaggccgtctggtgttcaggaggccgatggaaacttggcttctggtttgggtttagtagacatgggcgaccgcccaaggaaggaggcgtctgattgtcttgcagcgaggtggagagcgaggagaagcgagcggaaagcgcagctccgaacgcggttacatggaggcggcatggagctggaggccactgaggattcagcttctagtgttgcggtggtagagagagagaaagagcctggtgaggccgtgaatgatccttgagaatctggttgtgtacaatcgtcggtatctggtggtatcaactaattttaattaagggtgtttctatactactctacatctcgagccatgtagatggatgaatgaacactgcatacacttcatggaagttggaacttgtgttcttgtgtgtctcccaactcccaacacttccgttgtttgggcaaaaccctatatttttcaggaaaaattgtggagtgtccccttgccatggttg

SEQ ID NO: 3854 - DNA, 4062 bp, Zea Mays
caggaccaaaatcttgtcgtgaagcacaggtgtcgcaagccacacatttttcttcctcactcctcacacagtcacactgtcgaccgcaccacgagtggccatgctccaactcgcccccacgccgctgccgtcgccggcggccgggcgtaggcctcgaccctcctccgcatgcatctgctgctcgagcgtacgcgcgctggaggaggcgaagcgggtggtgctggtgcggcacgggcagagcacgtggaacgccgagggccgcatccaggggagctccgacgcctccgtgctcacgcccaagggggaggcccaggccgagacctgccgccagatgctcgcctccgactccttcgacgcctgcttcaccagcccgctggcgcgctcccgccgcaccgccgagatcatctggcaggggcgtgggcgtgggcgtggcgacggcctcatcccggaccccgacctccgcgagatcgatctctactctttccagggactcctgaagcgcgaagggagggagaggtacggtcctctgtaccggcagtggcagaagaacgcggccgagttcagcatcgacggccactacccggtgcaggagctgtgggaccgcgcacggagctgctgggagaggattttggcgcaccggggcaagtcagtgctcgtggtcgcgcacaatgcagtgaaccaggcacttgttgccacctctttggggcttggcgcggagcactttcggattctgctccagagcaactgtggcgctagtgtgctggacttcaccccacgggctgggggaggtcctcctaccgtctgccttaaccgcttaaatcagaccccaaactctcctgtcgctgggggaagttctgcgggaagaaagacgagcaagaggatcattctggcctgtcaaggggctacacaaagcagttctgagattagcttgggtggaacgggatatgcgccgctgaacatgctcgggactatacagtctcagaagactgcggaactactcctggatttgaaggtcgacagcatcgtctgcagcccgcaggtggcagctgttgatgccgcgactatcatatgtgaggtccaagaagctgcagattgcttaggtgctgattgcgtgcctcgttacgtggaaacgaaaaggttgatagaacttgagattgaagacgcctttcaagcaaagcagaagagatttggggacataggcggcggcggcacggagtacaaatcactggagcgagtatgggctcggtccgaggatgcatggcaggcactgctcagggagttgccagatgacacatcggagcgtgttgttgtggccgtaggtcatcctgccattcacctagctctaatctgccggtgccttggtttgccgatggagtatctgtcttctttccacctggacgaaggcagcgtcagtgtgatcgatttcccagacggaccgagaggaagaggcgtcgtcagatgcacgaattacacggcccatctgggaagatgggcgatacccattacacggcccaactgaaaatgactaagaattctaatctaacatgctagttcccctctgtatagcatagcatcaccataccgatgtacgtacatatataaatcttgatctcagtatgtcaccaaggcaaatgatgaatatgtctattcggatgacgtcaagtggttatcagttcaagagaagagagaccagaccgatggattccgtttcgtgtggcatacaggacaggacaggaagagatgctgacaaaggctgatgcctcgatctgcatggcggaagaaggttcagggcttgagcaggagcatgccacatgtcttttctgctgccacgtgtagcgcttcaacttccagcagcacagcactgcactctacaggctgctgcaacgcctcgatcccatgcccatggccatccatgtcgagcgagcccaccatgcactctactctaactaatctaatggagtactcaacgccgcaccaggtgtccgggaaccagcagcacggttactccggcgatggccggccaagaggcacatccggcggggagtccgactccgacgacgacgccctcctcttcctcgccgtcccggcaggctggctcgtgcgcctgctcgcgttcctcggggagctcgtggcgtctgccatcctcggcctcgtcttccccgtcgcagccctcgtgggcgcgctgcgcgccctccccgcggcggccgcgtccagcctccggcgcgtggcgcgcggcctgctcgccgcggcgtgcaccttcgccgcactcgtggccgcgctgctcgtgtccgtgctcctgggcttcgttctcgtccggcgctgcgtcgagggcccggtcaccgtgcgccagcagctcttcttcgactacacggaggcgcagcccagcgccgcggtgctcctcggtggagcgcgaggcgccgtgctgccggcgggtcactccgtcagcgtgtccatggcgttgctccttcctgattcctaccacaaccgtgaggttggcatgttccagataaaagcagaggcggtctcggcaagtggagtcaccatggcatcagcgacacagccgcacatgcttcgttacaagagcggcccagtccggctggcgcagaccgcgctgctgtgcgtgccgctcactctgggcatgcgcagcgaggcccaggccgccagcctcagggtgctgcagtacagggaagggcacggccggcacaggagaacaggggccatcagagtgctgctgcagccgagagccgcgacggtgagcctgccccaggtgtacagggcagaggtggtcgtgcagacggcgcttccgtgggcgaagagcctggcgcgcgggttcaggtggacgctctgcgtgtgggtgtcctcctccgtgtacgccgtcctcgctgtttgctgggtccggcctctcgtgctgtccgcgaggaggaggccgtctggtgttcaggaggccgatggaaacttggcttctggtttgggtttagtagacatgggcgaccgcccaaggaaggaggcgtctgattgtcttgcagcgaggtggagagcgaggagaagcgagcggaaagcgcagctccgaacgcggttacatggaggcggcatggagctggaggccactgaggattcagcttctagtgttgcggtggtagagagagagaaagagcctggtgaggccgtgaatgatccttgagaatctggttgtgtacaatcgtcggtatctggtggtatcaactaattttaattaagggtgtttctatactactctacatctcgagccatgtagatggatgaatgaacactgcatacacttcatggaagttggaacttgtgttcttgtgtgtctcccaactcccaacacttccgttgtttgggcaaaaccctatatttttcaggaaaaattgtggagtgtccccttgccatggttgcagaagctgcaaacaggagagagcatgtttctgcttctacgcgccagtatgtgatacgtaatatcatacatgttctttgtgttgggtaggatgtaggcaggaaaaagacatcagatttgctggatgggtcctacttacactctacaggtgcttgaaaaatcgaacgagttggggttgggaccatcgtgtgtgtgctctaggagaactgatctgttagataatctcagttggtcctatacttcttactcatctacatctactgaaacctttaatttctaggacagggttcttgtgtgccacagcccacagccacaggcaactgatctgcacttcttggtatatgcacgcaaatacttcgtgggaacaaacaatggagggacagaatcatacattgagcactgtacaaccatgttagtgtaaaaggattgctaagctcagggccaagtggggctcccatgatttaatggagacttggcatgctggccagaagactgtactgtttttttttttttttgtgctgtttcaactaacagctactagctctgattgaccacctgttagttctaacttcctggtgagaaacatgacacttggaatttggatatctggaactgtaactgtatgcatgctggtttttttctcttct

SEQ ID NO: 3855 - DNA, 1867 bp, Zea Mays
ggcctccacccagcgtacatgcgctgcggtcgtctgttgccatctcgcgttcggtggtgactccgggctccgggcgccctgcgcccctggatttcgaaccgagaaagaaagctgctgcccaccgtttcccaagtcccatcgccgcccaagaaccggagccacgccgcagatccgccaaaatcacacctcctagcccgtcctccgtcccaatctcttctcgggccagggaggcggcgggacttggtgcctgcatccgagccctaggtgatacaaacttgtgctctggcgatgcaccttgctacatggatcaacctgaggaaaaccctgaattcccaagctgtgatgcctactttgaagctatccagtccaagaagaagttgccactgactttgcaagaatcactaactgctgcctttgctcagattccagtctcatccttccctgaggttccagctggtcgagaacataagggcagcaccagtactgaatccagaacctggggctcctactgattggcaggggaggtaccttggtgtcatcgattactcggcaatcatcctttgggtactagaaaatgctgagcttgctgctgttgcactctcggctgcatcggcaactgctgctggagttggcatgggtgctgttggtgctgttggggtggcagctttgggaacaactggcccagctgctgtagctggcttaactgcagctgcaattggggcttctgttgctggtggattaactgctgaaaagggtgtggcgaaggatgggctaactgctgcagatcatttaggggaggatttctacaaagttttacttcagcaggaacctttcagatcaacaacagttcgatcgattgttgagtcgtaccgctggtctccttttgtccccattacactggacacttccatgctgactgtacttctgttgctctctaagtacagattgcgaaatgtccctgtgattgagcctgaaaagcctatcatcaggaatttcattactcagactggtgttgtcaaagggctgcagcaatgtaaaggaagggactggtttgactacatttctgcacttcctctttcagacttaggacttccatttatgtccattgatgaggttatcaccgtcaacagtgatgatcttatcttagaagctttcaagtgcatgaaggataacaagattggtggtgtcccagtagtagaaggccccaaaagaaaacttgttggcagtgttagcataagggacatccgctttctgttgcttagacccaacttattttcaaatttcaggcagttgacagtcattgaattcatgaagactctaggctccactcttcctgattcagagagcaattgcctggtgaagccaccacccacttgcactcctgacgcttcccttggtagtgttattgacagcattgcatcaagaataacacacaggatatatgtagtggatgatgaccttgaggttgttggtgttgtgactctgcgtgatgtgatctcatgctttattcatgagccacccggttattgcgacaactatttggcttcagcgatggagaagcttgaggggaaaggagtcagatcagtggagaaaatttgagcttttctgtagcgtgaatgttgataataacaggtcagtatgtgaggaaggtttatttggttggaacggtgcattcgtgtcgtgttaatccagcaaatcctgtgtaggttaagtaacaaggcttctgtgctgttaaaaatattttactatgtcatttctttggacggttttctgaacaaatgtgtggtaaccattaggccttgttcggttattcctacaccaaatggattggatgtgattgaaaaaaaaatagtagagatttttgact

SEQ ID NO: 3856 - DNA, 1521 bp, Zea Mays
tcgcaacatatccgaacgtctcccgtctccgtgagaatccaccccacttccacagcgcacctgttactgctgcacttgctgctttgcacacgcactactgcactgcactagccgcgcctcgcaggtcgcgtcaagcaagcgcaggtgcagtcctcatcgcgaaggggccagatatgctgctctctgcgtttctcggcgattgcttgttcagctacccgccgccgcctcttctacccgcaacaacggctgccccgagaccgagcacgcgtctcccggttccctttcctgctcgcctcaggcccgcgtccctcgtcgcccgacggctgacggcggaggcgggggaggcgctgagcgcgttatccgccgcggagggcgacgacgaatacgaagcggagctccaggaggaagggtttccgagctgggcgggcggcggcgaggaggaggactacgaccacgaccccgaaatcggagacattatgggggactacttcgacgaccccaagaagggccaaacccgcatggaggataggataagaaagaaacgccacaagatcgtgcaaaccaagaccggctctccaaaccccatgaaggtcgtcttcaacaatctctgcgatcatggcatatagttggccgtcttggtggctgcaattctatgaatatgcagttatcgcaattgcctttagattgtaaaaggctgacttatgatgctcttgaaggagctaacgtcactccgacgtccttttacaacattggtgatcttgagattcaagataatctagcacgagtatgggtagacattggtattcatgagccattgcttctggacatcctgcttaatgccttaacaacaataagttcagatcatgttggtattaagcaagtacagtttggagggtcagagtttttgaactggagtgaggacttgaagacagaagaagttggatatagtgtgtgcaaaatctaaatagcacaatcccgagatttgcagaagcagctacctttttagctaaacgcaaatgcaacatctggttcgaagttagggttttaaccaccttggtcctgcaaacgagaagaagaaaatggtgacaacacgatgaaaaattgacgtccaaacatattaacttctgcttgaaaagaggttgccgtccttacaggactctgctagctacacatcaacacatcattggtaatccttctgcatacatgtaataatataatataactagattgtctgatgtccaacgtgtattgactctacttagggctgaacataatacttatggctacttatggctcgttagttcgcttggctcgacttagtttattttaattttgttacgagccgagttagtattttagctcggtttgttaacgagccatctcgttagctcgaacgagctatcatttatcaacaaaataaagccttcacttatgttggatgaactaataagtgattagttatattaatttggtgttgaattcatgtggtatgttacaattatgagtattattactcttttc

SEQ ID NO: 3857 - DNA, 1548 bp, Zea Mays
tcgcaacatatccgaacgtctcccgtctccgtgagaatccaccccacttccacagcgcacctgttactgctgcacttgctgctttgcacacgcactactgcactgcactagccgcgcctcgcaggtcgcgtcaagcaagcgcaggtgcagtcctcatcgcgaaggggccagatatgctgctctctgcgtttctcggcgattgcttgttcagctacccgccgccgcctcttctacccgcaacaacggctgccccgagaccgagcacgcgtctcccggttccctttcctgctcgcctcaggcccgcgtccctcgtcgcccgacggctgacggcggaggcgggggaggcgctgagcgcgttatccgccgcggagggcgacgacgaatacgaagcggagctccaggaggaagggtttccgagctgggcgggcggcggcgaggaggaggactacgaccacgaccccgaaatcggagacattatgggggactacttcgacgaccccaagaagggccaaacccgcatggaggataggataagaaagaaacgccacaagatcgtgcaaaccaagaccggctctccaaaccccatgaaggtcgtcttcaacaaatttgacttctccaattcctatatatggttcgagttctacaatgttttgttgccaaaagatgttacgttgatttctgattctctgcgatcatggcatatagttggccgtcttggtggctgcaattctatgaatatgcaggagctaacgtcactccgacgtccttttacaacattggtgatcttgagattcaagataatctagcacgagtatgggtagacattggtattcatgagccattgcttctggacatcctgcttaatgccttaacaacaataagttcagatcatgttggtattaagcaagtacagtttggagggtcagagtttttgaactggagtgaggacttgaagacagaagaagttggatatagtgtgtgcaaaatctaaatagcacaatcccgagatttgcagaagcagctacctttttagctaaacgcaaatgcaacatctggttcgaagttagggttttaaccaccttggtcctgcaaacgagaagaagaaaatggtgacaacacgatgaaaaattgacgtccaaacatattaacttctgcttgaaaagaggttgccgtccttacaggactctgctagctacacatcaacacatcattggtaatccttctgcatacatgtaataatataatataactagattgtctgatgtccaacgtgtattgactctacttagggctgaacataatacttatggctacttatggctcgttagttcgcttggctcgacttagtttattttaattttgttacgagccgagttagtattttagctcggtttgttaacgagccatctcgttagctcgaacgagctatcatttatcaacaaaataaagccttcacttatgttggatgaactaataagtgattagttatattaatttggtgttgaattcatgtggtatgttacaattatgagtattattactcttttc

SEQ ID NO: 3858 - DNA, 1852 bp, Zea Mays
tcgcaacatatccgaacgtctcccgtctccgtgagaatccaccccacttccacagcgcacctgttactgctgcacttgctgctttgcacacgcactactgcactgcactagccgcgcctcgcaggtcgcgtcaagcaagcgcaggtgcagtcctcatcgcgaaggggccagatatgctgctctctgcgtttctcggcgattgcttgttcagctacccgccgccgcctcttctacccgcaacaacggctgccccgagaccgagcacgcgtctcccggttccctttcctgctcgcctcaggcccgcgtccctcgtcgcccgacggctgacggcggaggcgggggaggcgctgagcgcgttatccgccgcggagggcgacgacgaatacgaagcggagctccaggaggaagggtttccgagctgggcgggcggcggcgaggaggaggactacgaccacgaccccgaaatcggagacattatgggggactacttcgacgaccccaagaagggccaaacccgcatggaggataggataagaaagaaacgccacaagatcgtgcaaaccaagaccggctctccaaaccccatgaaggtcgtcttcaacaaatttgacttctccaattcctatatatggttcgagttctacaatgttttgttgccaaaagatgttacgttgatttctgattctctgcgatcatggcatatagttggccgtcttggtggctgcaattctatgaatatgcaggtataatggtcagaccacatttacacttcttgaatgtcatttttgacatttttgtattttattttcatatccttagtggatgagacgatactagtcagggtaagatataatccttctggcctccatccttttcatcaaaatgttggtaacatgaaggattccatcaaacttctatgttttgcactaaaggacttcaaaagtacttgtttattttgcagttatcgcaattgcctttagattgtaaaaggctgacttatgatgctcttgaaggagctaacgtcactccgacgtccttttacaacattggtgatcttgagattcaagataatctagcacgagtatgggtagacattggtattcatgagccattgcttctggacatcctgcttaatgccttaacaacaataagttcagagtaagaaccagacttttgagatgccaatattttgtcatgttggtattaagcaagtacagtttggagggtcagagtttttgaactggagtgaggacttgaagacagaagaagttggatatagtgtgtgcaaaatctaaatagcacaatcccgagatttgcagaagcagctacctttttagctaaacgcaaatgcaacatctggttcgaagttagggttttaaccaccttggtcctgcaaacgagaagaagaaaatggtgacaacacgatgaaaaattgacgtccaaacatattaacttctgcttgaaaagaggttgccgtccttacaggactctgctagctacacatcaacacatcattggtaatccttctgcatacatgtaataatataatataactagattgtctgatgtccaacgtgtattgactctacttagggctgaacataatacttatggctacttatggctcgttagttcgcttggctcgacttagtttattttaattttgttacgagccgagttagtattttagctcggtttgttaacgagccatctcgttagctcgaacgagctatcatttatcaacaaaataaagccttcacttatgttggatgaactaataagtgattagttatattaatttggtgttgaattcatgtggtatgttacaattatgagtattattactcttttc

SEQ ID NO: 3859 - DNA, 1626 bp, Zea Mays
gcctccggggctctcttgcgctcacactcccaccgccgcatatccgagtagagcgccacgaactccacgagctctccgcccagcgagactgtccgatgccccctccttcacccgcctcgcaagtgcgcacttgcgatgctggcgccgcgtagtcgcccacgcgcgggacggtgagtgagatggcgcgctacttccgcagcagcaacctcgcctctaggatcttcgaccgtcagctcatctccccgctccctggcgctaccccgaaaccatcaagatttgattgtataccgtccaatctggttcacatattcatgcaatgaagaatgtgaaactcatgagcttccgccaaaggcaaagaagtttgacagcttctttaagcagctttattcaattcctcttgcatctagcaatgagtatatttgcaaggactttttcctgtacatggaatgccatcgatttggtttatttgcaacatctactgcacaaagtaacgaatcaactgccactgagggtgcaatacatggggtgccattgattgagaaaataactttccatcttgtgaggctagaagatggtgtgatcctggatgaaaaggctttctgcaatgattttatcaatctggcacatagtattggtgcttacatgtatgaggacctgctttgtattgtttctttgcgataccaaacaatacatatcctacagatacgagattcaggcaaccttgttgaggtacgcaacattggtgcattctgtcgggaagatgatgagctatttcttcactcacatattcagactggttatgggggttcttttcttcctggcataaagcaacggttgttgtcatatattttttgcaagacgtggaatgaggttccagatcagactttgagggtccaacatctaaagaagaagttctattttcacttccaagattatgttgatcttatcatatggaaggtacagtttttggatcgccatcacctatttgtcaagtttggtagtgtggatggaggggtttctcggagtactgaccaaaacctagcattctttgccgtgtacaacatggagacaacagatatcgtttcacttcatcagaattcttcggaggatatctatgccttgtttgaacaattttatgatcattttcatgcaaatccacaagcttcatcacatggaaaatttatctcctctcattccaatgatattcatgctttggatcaacttcgggttataaaaaacaaagcaagtagctcctcacagtttgtgaaaaagatgatgacgtcattaccttacacttgccaatcacaaagtccttcaccgtacttcgacctgtctctttttaggtatgatgagaagctgatttcagcaattgatcggcatcggcattgcacagagcatccaataaaatttatgtcagtgaggcaaaatgttgtcaaatttaagatcaagccaggttcagattctggtgcttctgacagcagagcaaaaagaatctcgtccttcttgtttcacccatttttcccgcttgcactttcgattcagcagacttatatgcagccaactgttgtcaacatccatttcaggagatagaaaagtctatacagaaaggagttacagaatgaggga

SEQ ID NO: 3860 - DNA, 1520 bp, Zea Mays
caactatgttctgcctccgcaccctccgatcgcccgccgcgtccgattcccctgaccccgcctcgcccgcaatctccgccgccgcgcccgcgacatccatcacccccacccgcgacatcccgcctcgcacgccatcaactcgcagcggcccttctccgaacgtggtttgttttttcgtttgctcgagcagccagccgactcgtctccagcaatgcggccggggtcggctcgctggaggtgggcgtcgccgccgacacctccaacgcctccaggcagggattaggtgagccgtcggctaatcactcgtcattgggaggatctcctcctcccgttcagatttgggcaagaaaggcccgggcgcgatgtccatggccgaggaggggagtgaggccgaggaggggagtgaggccgaggcgctcgagaaagacggcagcaaggcttcttcaccttcggggccagccagtcgactcgtctccagcaatgcggccggggtcggctcgctggaggtgggcgccgccaccgacacctccaacgcctccaggcagggattagatttgggcaagaaaggcccgggcgcgatgtccatggccgaggaggggagtgaggccgaggaggggagtgaggccgaggcgctcgagaaagacggcagcaaggcttcttcaccttcggggccagccagccgactcgtctccagcaatgcggccggggtcggctcgctggaggtgggcgccgccgccgacacctccaacgcctccaggcagggattagatttgggcaagaaaggcccgggcgcgatgtccatggccgaggaggggagtgaggccgaggaggggagtgaggctgaggcgctcgagaaagacggcagcaaggcttcttcaccttcggggccaagcggtcttgaggacgaggagctacaggtgcaggatgcagttgccagtggttccaagaggagcaaagactccgccgccgccgccacacgcagcgccaatgtcagctcgccctctgtggttcactctcaccctgccatcctccctgctcccgcgcagcagattccagaggttaagcaagcagtatgtataccatacggatttcatagattaaagagtttggagtattcaaagcttgtatctcagtgcctaaacactgaatggacagctaccatagggcaaagtgaagaaacggaagagttgagcaagatcacattagagaataaggatattcagcttgatatcaatataagagaagaatctcggagttcttcacaacaagggaactttgacacagaaggtaccagctccagtgaggctttcttgcttggaacggttgcttcagaaaagatgcttgagaaactgaaacataaatctggaagatgtgagcctgctttagaaaaggctattgtggaactggagcatggtataaacggtttgaagtactttgtttgccttgatccacggttgcaggaggataaaggagacactaccttggtacatgcctgttgccacaatggacaaaagaagatt

SEQ ID NO: 3861 - DNA, 1810 bp, Zea Mays
gcgcggctggtccctggccgggcctcgtagccgtacctctcgatcgctgcatttagttggtctgttttgtctgcgtttctgcttggaaagcttcgagttcgtggtgtttcttctcaggctccgcagggccatgagcccatgaactgtgctcccctccccctgtggcctggcctatgcctgcaaaaactcagctttaggcatgtgtgttttctctgaaaggacccatcttgctacagagatatgctctgagtctgacctcgtgcccgagttcaaaattagggcctgaaacctttcaaaaactgacgctgatcctgagacctaggagcaccacaaagctattcaaactcttgttacctatatatccacccgccactcccctagtggatggtagtagtagtactagctaactgtcatgctcctgtctctcagttagatttctttaggctttatggatctcagaggtcgcgtttatgatcagaagaaggcaatgatcaacttatttgacctcagcgcagggatgtctagcacaaacatgctcacagatcgagctcgtatagatggttctccagcgtgtagaagcaggcaagatgccaagagaacagttgatcctgctaaagtttataccaacgataaagtaggagctagtaactggagctcatccagaaataaatcaaatgtgtctccattgaatgtggcgttagaaaaggagatgtccaaggaattggaatcaaagaagaagtcaccaagtgtggttgccagattgatgggacttgaagaagatctacctggtcaagagccagcattaccttccactaaaagaaatttgaagaaaagacacctaaatggcaacttggtcaaaacaaacaatctccatcgacatcaagagcagtaccattccagtatgacaacatgcgacaaacacataggacccaaagaaacagttgaatttaaggatgtttatgaagtcagtgaagaaccattgagaacataccattttcaggaccaaacttttcctagggaaatgtcttccaggagcaagagagacataaggatggaaattgttcgtcagaagttcatggaagcaaagcgtcttgctacagatgagaaactcctgcattcaaaggagtttcaagaagctcttgaggttctaagttctaacagagatttgttccttaagtttcttgaggaaccaaactctactttctcaaagcagctagctggacttcacagaagcccatcaccacctcagacaaagcgtattactgtgttgaaaccaactaaatttgttgagagcgattgcagaagggaaatcagaacacacagaataaatgaaggaaatgaacacgtgatgcggaggacacactggagatctcattcagcagaagataccttatcccagccaactaggatagtggtcctgaagcctagtcctggcaagcctagcagaacaatggctaggctaacaaccgaagcagccccagctcagttcgctgagcagataggtttttatggaggtttagaaggtcacaattacccatcagatgctctacatcggcgggatgagtctttattatcttctgtatactcaaatggctatggtggagatgaaagttctttcggcagatcagaagttgactacattgatgaagaagatagtaacctaagtgactcggagatcgttagcccagtaccgccgctgcattcatgggatcacttcaaaagatacagcagtcctcactcaggttcaacttttagcagaacatctcggtcgcccgagtcatctgtgatcacggaaagctaaaaaacggct

SEQ ID NO: 3862 - DNA, 1021 bp, Zea Mays
attccaacactacacacccacctagcctggcaaccagccgccgacctcctatctaccatggatatgtgccttggagccaaaagatccatcaccaatcttttccctcttctatacctcctcatgccgcggcatggatctccttgttcgtttgtcatctaggagtatctggctaggtcgccggccggaggaggaggaggagaaagaaatggaagtgtaactatggtgttggctcggctcactcagaagttgaagccgaatccaaatggtagctgccggcgtttctgattgagccgtgccaatatctcagtactctttcatgctgatctcgcgtcacacgtcgatctcttcctgaagtgctgtagtctctctcgtactctcatgcatcttggtcatgtgttcttatactgtctcttttgcttctgctgcctgccagtatgtggactgcacacgtacattgtttttttcgattcgtttataaagtttcatggcacggtttgtatcagtctgtgactaggctagctaaccattgacagtcttgcttgcgtgttgttgcaacagacaccagtcgtttggcgatgcagaaatcgctcgacagatcgagcaggagaaatagaaagagagacagcaggcagccaagcacatatgcaaattagcattcggttcaagctagccgcgcttcagagagctcagaagcatcatgaacgtcatagttgaaaccaacgccctaatttcattgcattgtttcttttcaggaaggacatggccggacgatatgatcaagctactagcatgtgtagtagtatatacttcgattagtttctgtaaccacatcatgcatgtgcccgtttcttaacttcttgagggagaaaaggagaaatgcataaattatggatgatctctgtacgttcatcatgtaccatcagttgtgagcatctgttgattctcttatgtattgcctgcagtagtcgtacacttgtactccatacatacaaaattcagtacaatatgaatttgttttcag

SEQ ID NO: 3863 - DNA, 1277 bp, Zea Mays
cacacacaccccaccacacagatgagatgacagacccatccaacctgcccctgcccctgcccctgcctttgcctttgaaaacctccactgcctgattggtcctttgaaaacctcccacgcacattcttggcagctactctactcaatggcgctgtcctcctccggccacccggcgacgacccgcctgctcttctcgcttctgctcgtgggctcggcggcgggcttgccggagcgggcggccatcgacagggtcaaccggcgaggcccttccctcggcctcgtcatgtcctacgtcgacgaggccaccgcgctgcaggcctccggctacttccagccttggcgtgccctccctttcgttgacctctacggacggcggtatcacatcggcagcattcggggcgtgaacgtgatatacgcactgacagggcaacgcaggctgaacgccgccgtcacagtacagacgctcatcgacgtcttcagcgtgtccggcattgttcactacggcacggcagggagctgcaacgactccatctccttcggcgacgtcagtgtccccaggctcgtcgcctacacgggtgcctggacatggaaggtggaacttgaaagatgcaacgacactttctgcttacccacagctccacggattgtctacgggctgaaggggtcgtcggctgacatgttcctcgacaacgcggaatacaggaagttccttttccaagagtttggggtgtctacaatggacgaggagagcgcagcggtggtgatgacagcaacgtcgcctggcatacctgtgatcgtgttccgaggagtgtctgacttggctggaggggagccgacatggtcgtccacaagcctgatgaacctggcgtccattaatgcattaaaagtggcggtagagttcatcgctgcagttggcaagcatagttcaaccgcatcagtaaaaagatgatcgccatcctcgtccgttgctgctccaaaataggcctgcggcagtaactggaagttacttatgttcagaatgatgtcaaaccttgtggcttcaagtcataatataatacgtcctctctaataaagcggtaggaagattgacgtacatatccacattactttgctctcagttgcgttgcgtcgatcccctgctttggggatgtgtacccattctcgaggctataaaatggacctctaaatgtatggaacaacacatcaaacattctaagagtacattataacttcgagactccgcgaccacgctgtttgaagagtttgagagatttgga

SEQ ID NO: 3864 - DNA, 1585 bp, Zea Mays
aatccacgacgcccatttccgattcttgccgttttcgggcaggcagccagtccctttaaagcaccactaggcaggcactaggccggtagtatataaaataatgtcctactcctaccccgccaccacgccgcggcagcacaagcccctctccgcccccagccagccctcctcagatctcaatcccggcgctccctccctccctcctcgcctcgggacagcgagcgccgccgtccgccgtccatggagcacgacgccgaggcgcgccgcgggttcgccaggatgggcttcgggtgcaagcactaccggaggcggtgccggatccgcgcgccctgctgcggcgacgtcttccactgccgccattgccacaacgagtccacgaaagacgggcacgagctggatcggcacgacgtccaatcggttatctgcctcgtctgtgacaccgagcagccggtgtgctgcaactgcggcgtctgcatgggggagtacttctgcgcagcctgcaacttcttggacgatgacgttgacaaggagcagttccattgcgacgattgcggcatctgcaggtgcgtgcgtgcgtgtgtctgtccctctttttttgtttcttgttttcttttcttccttccattgcggtcactgagttacaggatctgagtcgccgcgcacaaatcgcgattttagtaggaacccccccctctgattaactaactaagctactactacctattgatgatgatccaacaaagctgacagaaactgtggtgcatttgcatttgttcgaacagagtaggaggaaaggagaacttcttccactgccaaaagtgtggatcctgctactcgacgacccttcgcgacaggcactgctgcatcgagaactcgatgaagaacaactgccccatctgctacgagtacctgttcgattcgctgagggagacgtcggtgctccgctgcggccacaccatgcacctgcagtgcttccacgagatgttgaagcacgacaagttctcgtgccccatatgcgccacgcccatcttcgacatggacaagttcttcaaggccctcgacgcagagatggaggcaagctacttgtacacgggaaagggatgggtcgtgtgcaacgactgcagggacacgacgcaggtcttctccggcatggcgggccacaagtgctgccactgccagtcccacaacacctgccgggtggcaccccccgtcctcccgtagccaccaccaccaccacatcattgttgttggaattggatgcagccagccaagatacccccggccccagcagctacgctattattaccagtagcgcctgcgcttttacgcaccgctccgttccagtccatgatgaactgcataatttcgtgccatgcaggtatgtacgtacactgttattggagatcggaagatttatccgactcgggacgcattatttgtaccacaacaaaacacgtgttacactattgtaataccagatctggatacgaaactattttttaggatgcttgaacgagtggtatttccttggagtgtgtataacatttatttattagctcaaatctctctctctctctttgtgatg

SEQ ID NO: 3865 - DNA, 808 bp, Zea Mays
gcaagctgcctcacacgcaacgggccgccgcgttcctgccgccgaggccatcgctcaggcgccttccagtcccagcaggaggtgcgccgccgccgcggcgattggtggtcaggaggagatgccaggaagagaataagcagcagcaagaggccgaggagggaagcggcgctgacgagcaggagcagcagaagagaacgttcctgagcctggaggaggccgggctggtggagatgtccggactcagcacgcacgagcgcttcctctgccgcctcaccatatcgtctctgaacctcctgagagtgatctcggagcaggagggcgtcccgatagaggagctcaacgccgggcgcgtctgcgactggttcctcaaggacaagctcaagagagagcagaacgtcggcaccgccgtcttgcagtgggacgaccctggcttctagctagttccagcttcgttctgagccaatgatcatgctattctacactgcagcgcacgcaggggctatatatttcagggcttcaggcccttcacgggatgagcaaccaatgccacatgttcagtaatctcagaatttcagtttcaagaatgggcgcatcaatcctggccattccatttatatatctttcggtttggtttcatctttacaaattttctgtagcgacgaacatttttcctgtgcggaaaatgggaaaggaatttacgggtaaactgattttgggagatagatcgagtttcttgcaaataaattctgtcagctccaatttatctcctctgatcgttaatccggttattcaatcgaaaccaaagccg

SEQ ID NO: 3866 - DNA, 840 bp, Zea Mays
agaaagagagagataaaggaaagtgtgaggatattggcaaacaggcagtcggctcagaggtcacgagtgaggaagctgcagtacatctcggagcttgaacggagcgtcaccagtctccaggtgagagtatggaggtgtcggcgctgtcccctcgcgtggccttcctcgaccaccaccgctcactgctcaccgtcggcaacagccatctcaagcaaagaatcgcggcgctcgcccaggacaagatcttcaaagacgctcaccaagaggcgctggagaaggagatccagcggctgcgccaagtgtaccagcagcagcaggtcaaggtggccaccaccggcggcgccgacatcgccaccgccgcctcgccgtcgatgcaggccaggcaagagctgctcgcgtgcgagggcgctgctattcgatagcggaggcggcggcggcggcggcggcgttcacgcccctgttactgttagtagcttaattaacttttgtgcagtctgatcaatacgtgttggcttgtttgtttgctgcttcttaatttaattcgtatgtgatgtattctgctcaccctagcaaaaaaaaaaaaaaaaatgcatcgatgccaagttgtgaatgaattgtactattcagttatttggaccggcttagtcggaatatagtgagacggagtttgttggtgtgagttatccgttcttaatttattgttgtttagattgattttatttaaaacagagtgactctaaaaagaaaacttatgttcaaatttaagttatttggctcaccaaaatctattggatggttcgctaggatggagtcgctctatctcaactgactctgcaaacg

SEQ ID NO: 3867 - DNA, 1088 bp, Zea Mays
aaaacggtcatcgcccttgtcttcttcttcttcttcttcatctcaccaacctttcccttcccgtcccaaccgccgtccgcctgctcccttccgctcacctgcttcatctgttttgaagaaaaaaaggaaaacagaaggaagagagtaaaagaggcctgcgctgccctgcgccccagaggtcttcccccaacactttgtaccatcaaaagaagctatggagacacctgacggtctatcaacaattcatgtaagcgttcctggactccaagacgagttaagggagctgcatccattttgcatttattgtccattccccgcataagatggtctacaagcaatgaggatgatgacaagattgaattatctagagccgaagtagaaactttacgaaccgaaatagcgggtgccgaggaaagggaatctcacttaaaagctcggttggaaaacattgatgaagttttgagatatgcacggctttctggctatctctacattagaagtcgatggacccaactccctggtgaaccacctatattagatgatgctgatgtggatgactggcttcctcgctttgttgttctacaagggcagtgtttatactattatctgaaatgtacagatctgagcccacaggaatctacactcttatgtgatgttgttgaagtagggcagcttccagactttgtgccagaagatgaaaagacgagatatgcgttttacctgttgacccgtcaagggttgaggtttgaatgctccagtacctccgaaatacaggttgattcatgggtaagagcactgtcaagtgactgcaaattgcaggatggcgctggtgatgataagatgatgaatacgaggagtagccaagtagaagctgggtcatcatggtagacgatgtatggagtgctgtacagtacaatagtcaatgaaatgtacatacattacatgcatgtaaagggagcaacatagtagacgcattcaacacgagatgacatgttgctcgtggtatttttcaacttttagggagcacacaaatgatgtatttctgtagcaaaaaatccgtcgtccgtttgagtttgatagaccgtaag

SEQ ID NO: 3868 - DNA, 4570 bp, Zea Mays
atggggcacagctctagaaagaaaaagaagcgcggcgcggccggccgcaaggcagccaaggaccacgccgcgcagctcgaaggagacgagaccgccctcgacgaggagctcacggccctggcttcaattttaggggaggacttcaaagtaacatcagaatcacctcatacacgatgtaatatatgtattaggccttattcggatgacatgggctttgaagatctaaatatttcagctattcttattgtgatatgttttcctggttacccccacaagtgtccaaagttgcggatcctgcctgaaaaaaacttgtctaaagaagatacagatcggctcctttcgcttcttattgaccaggcaaacatttattcccgagaaggacgtgttatgattttcaatttgtttgaggctgcgcaagagtttctatctgagattgctccagctcgtgtttcagtgagcactgcttctttcttgggtttgagctcaactactgatgacaatgtggaagttggctttgacagtgatccttacctgggaatctcttacatatataactccttcgatctatatagtcagttatatgatgatacttattggagtcgacaaggttcagatctgacaacagatagtggcaggaaaaatattgtatctcaagttcaatccaatgttagaagcaagaggaagaccatcattgaaaaatcccacatctcagctgataaggtcaataatgctaaagagtcatctggtgataaagctgaacagcaacatgccacaaagcatggtgccatacgggaggcagctccaactttacatgttgtggatgaggaaactgaaatttacggcaaaagtttgtctgctagcaatacaggaaatacatcagatactcctgaaaggggttttagcagtctaaatgaacctgaggacactgaccttgcagatgaatcttggaatgaacaagattgtgattcggacttcagctcttcaaatgcactaccttatgtttcatacatgttagatgatgcttcacgaaacaagaaaagggatttagttctggtacatctgcttcggatagcctgtgcgtcgaaggattctctttcaagtgctttgccaacaatatcagcagagttgtgcaacataggggttctttccgaatgggctaaggatttaatttctgattctcctgctgtttttggagaaactttcagtcatgtttttgggcaacaaatgatctcttcagagtgttctctattttggagacctgataattcatcatctaagccaaattctcgttatttgaatgattttgaggagctccgttcacttggtcaggggggctttggtcgtgttgcattatgcaaaaacaagctagatgggcgccaatatgctgttaaaaagatacgtctgaaggatagaagtcctcaattgaatgagaagattttaagagaggtagccacactttcaagattgcaacatcaacatgttgtccgttattaccaggcatggattgaaactgaatacggtcatcataatattttgaatgctggcgggtcctgcactgctgagagctctatctttagttatgatgaagtcagcctatcggatgcaggtggtgggaataagcaggaatccacgtacttgtacattcaaatggagtattgtcctaggactttgcggcaggattttgagacatacatctcgtcttttgatgttgaccatgcctggcacctgtttcgacaaattgtggaaggtctagctcatgtccatagtcaaggaatcctacacagagacctgacacccagcaacatattttttgatgtccgcaatgatattaaaattggagattttggtttagccaaatttctgaagctggagcagctagatcatgaccaatatcttcctactgaagcactgggtgtatcaatggatggaacaggtcaagttggtacatatttttatactgcaccagaggtagagcagaaatggccacagattaatgaaaaggttgacatgtacagtttgggagtaatattttttgagctttggcatccatttgccacagcgatggaaaggcatcttgttctttccgatcttaagcagaagggagacccgccattgtcatgggaatcaaaatttcctcgtcagtcagtcctgttaagaagcttgctgtcaccaagcccgtctaaccgtccatctgctgtcgaggtcttgcaaaatgaactgcctcctcggatggaagatgagtggctaaatgatgtacttagaatgatacggacaccagaagacacatatgtttatgaccgggttatatctacaatatttaatgaggacaggttcgccaaaatgcaaggccaacatgatagcagcaaaaagtccactggtaacattgataacagtgaacttttggataccatcgttgaggttgccaaggaggttttcaagcggcattgtgctaaaaggttccaaatatcacctttgcatactttggagtggaattttaccaaaaacaggggaaacacagtgaaaatcttaactcaaggaggagagatgctagaactttgctatgaactgcgaacaccatttgttatgtcaattgcttctaatcagacatcatcattcaaacgttatgaaatatcatgggttcatagaagagccgttggccattcaactccttatcgttttcttcagggtgattttgacattattggcggtacttcaccgattccagaggctgaaatcatcaaggtggctttggacctggggacccgcttttatgattccaagacgctagtcatacgtctgaatcacggtaaacttgctgaagcaatttgctcttgggcaggggtttctcaggatcaaagacaaaatgttgctgagtattggccaaatgaagctgaccgcaagtcacagtggagtttgattagggggcaacttttacaggatcttcgtctttctgaagaagttgttgagaagctacataaagcagatcagcggttttgtggctctgcagatctagtacttgctagattaagagggaccctgttttatgatgaatctgcttgcaaggctcttgatgatctatccgcgcttctgagatgtttgagagtatggtcggtagaacaaccaattactactattgatgtactcatgcctccgtcagaatgttactatacaaatttgtttttccaggtatactcaaaagaaggtaatcatggaccgggtttccatgaaaagttgctggcagttggtggacgatatgattggttggtggaacaagcttgggatgagacatctaaatctaaacccccaggtgctgttggtgtgagcattgcacttgagaaatttcttcctaacaatccttcatctgatctgggattgcgaaggttactgtccagggttgaacctagcatcagtgtacttgtctgttcaaggggtggtggcggtctgttgactgaacgcatggaacttgtcgcagagctttggaaagctaacataatggctcagtttgttcctcaggaagatccaagtcttcaagaacagtatgaatatgccagtgaacatgatattaaatgccttgcaattatgactgaatcaggcctgtcacaaacagaccttgtgaaggtccggcatcttgattttaaaaaggagaaggatgttgaaagagagggactaataaagttcctgtctgatgcaatgtgttcacaatacaaaaatcctacgatctggagctgaccaacggccctcccaagtgcttagtgtatttgttttcaggttctagcagagcatcaaaaaatgtgtctttcgaacttccgggtgaaagcaatgtttgctgttcgaacatgtgaaggcaatcatgcgtgttggcttccgtgcatacggtgaggcagctgttggctctctgcaggttgttgccaaacgttacgccctggtctttactgaagatgggcgccgacgtgcggtgattggccaattggtataatcctggacctcttgattgttctcctgaggaccaatgccatgcaacaaggttgcttcagacacaaggtggcgtgtagttggtgcaattctgcagttttggggctgttggtattatatggatctgaaggtgcgcggttttctactacaacagatcctccgtttttgcctgtgttctctttcttgtgcatgtgattttctttttcttttccataggactaccttgtacatagttcgtttggcgtgagccatcatgtacatgcaaaatttttacattgttgggttactgacaatgaaatgctgaattttgcaactccctgatttaggacaaaacaaggcgtgcgtgctgttttgtcatgtcatgtcatatcctagtattgtttttgggcagtgccggatgtggccaactgaccgtgcatccccctagtacgcagcagcacgacgtctgcttgctgcttgggctctgcgtgacagtcatatccgggactggacttagcggtggtctgatgattgtagcaactctggtgtaaaaaggctggtgctactgttccgttggtatccggctatccacttcagtgtgagtgctcttcaaacttcc

SEQ ID NO: 3869 - DNA, 4663 bp, Zea Mays
cttcccgtttgtccttccggcgggcgagggtgacgcccgccacaccgcgagctccagctgctctaatcgatggggcacagctctagaaagaaaaagaagcgcggcgcggccggccgcaaggcagccaaggaccacgccgcgcagctcgaaggagacgagaccgccctcgacgaggagctcacggccctggcttcaattttaggggaggacttcaaagtaacatcagaatcacctcatacacgatgtaatatatgtattaggccttattcggatgacatgggctttgaagatctaaatatttcagctattcttattgtgatatgttttcctggttacccccacaagtgtccaaagttgcggatcctgcctgaaaaaaacttgtctaaagaagatacagatcggctcctttcgcttcttattgaccaggcaaacatttattcccgagaaggacgtgttatgattttcaatttgtttgaggctgcgcaagagtttctatctgagattgctccagctcgtgtttcagtgagcactgcttctttcttgggtttgagctcaactactgatgacaatgtggaagttggctttgacagtgatccttacctgggaatctcttacatatataactccttcgatctatatagtcagttatatgatgatacttattggagtcgacaaggttcagatctgacaacagatagtggcaggaaaaatattgtatctcaagttcaatccaatgttagaagcaagaggaagaccatcattgaaaaatcccacatctcagctgataaggtcaataatgctaaagagtcatctggtgataaagctgaacagcaacatgccacaaagcatggtgccatacgggaggcagctccaactttacatgttgtggatgaggaaactgaaatttacggcaaaagtttgtctgctagcaatacaggaaatacatcagatactcctgaaaggggttttagcagtctaaatgaacctgaggacactgaccttgcagatgaatcttggaatgaacaagattgtgattcggacttcagctcttcaaatgcactaccttatgtttcatacatgttagatgatgcttcacgaaacaagaaaagggatttagttctggtacatctgcttcggatagcctgtgcgtcgaaggattctctttcaagtgctttgccaacaatatcagcagagttgtgcaacataggggttctttccgaatgggctaaggatttaatttctgattctcctgctgtttttggagaaactttcagtcatgtttttgggcaacaaatgatctcttcagagtgttctctattttggagacctgataattcatcatctaagccaaattctcgttatttgaatgattttgaggagctccgttcacttggtcaggggggctttggtcgtgttgcattatgcaaaaacaagctagatgggcgccaatatgctgttaaaaagatacgtctgaaggatagaagtcctcaattgaatgagaagattttaagagaggtagccacactttcaagattgcaacatcaacatgttgtccgttattaccaggcatggattgaaactgaatacggtcatcataatattttgaatgctggcgggtcctgcactgctgagagctctatctttagttatgatgaagtcagcctatcggatgcaggtggtgggaataagcaggaatccacgtacttgtacattcaaatggagtattgtcctaggactttgcggcaggattttgagacatacatctcgtcttttgatgttgaccatgcctggcacctgtttcgacaaattgtggaaggtctagctcatgtccatagtcaaggaatcctacacagagacctgacacccagcaacatattttttgatgtccgcaatgatattaaaattggagattttggtttagccaaatttctgaagctggagcagctagatcatgaccaatatcttcctactgaagcactgggtgtatcaatggatggaacaggtcaagttggtacatatttttatactgcaccagaggtagagcagaaatggccacagattaatgaaaaggttgacatgtacagtttgggagtaatattttttgagctttggcatccatttgccacagcgatggaaaggcatcttgttctttccgatcttaagcagaagggagacccgccattgtcatgggaatcaaaatttcctcgtcagtcagtcctgttaagaagcttgctgtcaccaagcccgtctaaccgtccatctgctgtcgaggtcttgcaaaatgaactgcctcctcggatggaagatgagtggctaaatgatgtacttagaatgatacggacaccagaagacacatatgtttatgaccgggttatatctacaatatttaatgaggacaggttcgccaaaatgcaaggccaacatgatagcagcaaaaagtccactggtaacattgataacagtgaacttttggataccatcgttgaggttgccaaggaggttttcaagcggcattgtgctaaaaggttccaaatatcacctttgcatactttggagtggaattttaccaaaaacaggggaaacacagtgaaaatcttaactcaaggaggagagatgctagaactttgctatgaactgcgaacaccatttgttatgtcaattgcttctaatcagacatcatcattcaaacgttatgaaatatcatgggttcatagaagagccgttggccattcaactccttatcgttttcttcagggtgattttgacattattggcggtacttcaccgattccagaggctgaaatcatcaaggtggctttggacctggggacccgcttttatgattccaagacgctagtcatacgtctgaatcacggtaaacttgctgaagcaatttgctcttgggcaggggtttctcaggatcaaagacaaaatgttgctgagtttctgtcttcaactattgttcagtattggccaaatgaagctgaccgcaagtcacagtggagtttgattagggggcaacttttacaggatcttcgtctttctgaagaagttgttgagaagctacataaagcagatcagcggttttgtggctctgcagatctagtacttgctagattaagagggaccctgttttatgatgaatctgcttgcaaggctcttgatgatctatccgcgcttctgagatgtttgagagtatggtcggtagaacaaccaattactactattgatgtactcatgcctccgtcagaatgttactatacaaatttgtttttccaggtatactcaaaagaaggtaatcatggaccgggtttccatgaaaagttgctggcagttggtggacgatatgattggttggtggaacaagcttgggatgagacatctaaatctaaacccccaggtgctgttggtgtgagcattgcacttgagaaatttcttcctaacaatccttcatctgatctgggattgcgaaggttactgtccagggttgaacctagcatcagtgtacttgtctgttcaaggggtggtggcggtctgttgactgaacgcatggaacttgtcgcagagctttggaaagctaacataatggctcagtttgttcctcaggaagatccaagtcttcaagaacagtatgaatatgccagtgaacatgatattaaatgccttgcaattatgactgaatcaggcctgtcacaaacagaccttgtgaaggtccggcatcttgattttaaaaaggagaaggatgttgaaagagagggactaataaagttcctgtctgatgcaatgtgttcacaatacaaaaatcctacgatctggagctgaccaacggccctcccaagtgcttagtgtatttgttttcaggttctagcagagcatcaaaaaatgtgtctttcgaacttccgggtgaaagcaatgtttgctgttcgaacatgtgaaggcaatcatgcgtgttggcttccgtgcatacggtgaggcagctgttggctctctgcaggttgttgccaaacgttacgccctggtctttactgaagatgggcgccgacgtgcggtgattggccaattggtataatcctggacctcttgattgttctcctgaggaccaatgccatgcaacaaggttgcttcagacacaaggtggcgtgtagttggtgcaattctgcagttttggggctgttggtattatatggatctgaaggtgcgcggttttctactacaacagatcctccgtttttgcctgtgttctctttcttgtgcatgtgattttctttttcttttccataggactaccttgtacatagttcgtttggcgtgagccatcatgtacatgcaaaatttttacattgttgggttactgacaatgaaatgctgaattttgcaactccctgatttaggacaaaacaaggcgtgcgtgctgttttgtcatgtcatgtcatatcctagtattgtttttgggcagtgccggatgtggccaactgaccgtgcatccccctagtacgcagcagcacgacgtctgcttgctgcttgggctctgcgtgacagtcatatccgggactggacttagcggtggtctgatgattgtagcaactctggtgtaaaaaggctggtgctactgttccgttggtatccggctatccacttcagtgtgagtgctcttcaaacttcc

SEQ ID NO: 3870 - DNA, 1550 bp, Zea Mays
  misc_feature (1549)..(1550): n is a, c, g, or t
gcagcttactcgtaacggtaaagccaccgacccaactggtctcgtagccgaactgcaagagggaagagaagcatcgcatctctgagtctgaaaccctagccgcctgtctccctgtccggtctccactcgtccgggcgacgagacgacgacggagggtttctgcgggggatttgtttgtcgctgactcgccggcgaccaagatgaggccggttttcgtggggaacctagactatgatacccgccactcggagctcgaccacctcttctaccgctatggcagggtcgagcgcatcgacatgaagtcaggaaatcttttgccgtacagaacttggatagatgtgtttttaaactgggattgaagttgaaatgagtaagatactctgatactttgcagctgtgctgtactcgtgttacatctacttcataaagagcacagacttgcatgtgtgtgctgctccatgctaactggagttgcagtttgtgtaatagtaggcacagaagttttaatttttactctggcgcaggaactaccagggcaaaacatagctccccagggctcctcaactcctgaaatttcttccattcactgacctggccacctttttttcatttgaaaccatctgttcatgtgccctgatgcccactgttatgtctgctcgagcatgtttagcgggattgtgattcatgctatgtcatcagcaccatcatgccttaccatgtcacgatagaagtatcaccaacatgacaacatgctatgttactacattgataagcaagagagttctatttatggtgaagcatgttcaatgtctccggtcataatttcttactttggatataagttgttgaacaccattcttagccctcatcatgaatggagtctaccacactagtgctcttcatgccatcagaattatgcaggctttgcttttgtctactttgaggatgaacgtgatggcagtgatgccatacgtgctcttgatggttatccatttggccctggcagacgcaggctttcagtagagtggtcacggggtgatcgagctgctagacgtgatggcaacaaaccagaagtaaatactaagccaactaaaacattgtttgtcattaactttgatccaatggacacaagagtcagtgatatcgaaagacactttgcaccatttgggaacatatcaagtgttaggataaggaagaactttgcttttgtccggtttgaaacactagaagaagcccgtaaggctcttgaagctactcatgctaccatgcttttggatagggtgatttctgttgagtatgcctttagggatgatgatgaacggagtgataggtacgacagcccaagaagaggtggtggatatggtaggcggggggatagcccagcgtacagatcacgtcctagtccagactatggtcgcccagcaagtcctgtatatggttcgtatggcaggagcagaagtcctgttcgtgaccgctatcggaggtaatgccctaggattattttcattggtttgcatgttgtcttgttgtccatgtcatatgatcatann

SEQ ID NO: 3871 - DNA, 1038 bp, Zea Mays
cgactctctcaccagtcacccgtcaaaaacccccaccaaatctcaagttctcaacctccaatttttggccatgtcgtcgtctccgtggccttccctgctctcatcgccgctcccctcctccgccaccctcttctccaagaagccagcgtccttgcgccccgtctccacctcgaccgtcagggttcggtggccgcagcggcagcggtgtccgcggcgcgagtgcgaccgtcggccgcggaggtagcgcggacggtcgtggagttggccccgtctggtacgctctccgtggttggtcccgacggttggccgctcggtatcggcgcgcgcttcgtcgcggatgccgtcggtgcacccgcgctctgcctggccaccacgggggtcagcgctcccgatgcgccgtgcagcttccacgttgagttttggaagagtggggctaggacaccacaatgtactatgcttggtaccttaactaagcctactgatgagtcagtgttgaagaagctttccactaggcaggaaaggaaattcggggaagaaattaatcaagatcttttgtatttgatatctgttcaacgggtattgcacatggaggatttcaatgaggatggcatgtgggtagttccatcagaatacaccagtgcagaacctgaccctctacgcaattttgctgaaaatattgtggaggaatttaatagcaaacatgctgaagatgtccatagaatatacaacatatatgtcgaatcagatttacaggtggcagatgtaaagatgatatgggttgacaggctagggtttgacttgcatgttcattctggtgatggtgtctttgatgtccgtgtccctttttcaagggaagtctctgacgagaagggtgtgaaatcatcatttaacatgatgtctcatcattcatgggaggtggagaggagctatgccggtccagagtttgagaaggtacagttcttgaagaaggtcaggggagcgaatgaacgtgcgaagcaatacagttcaacgcacgtacaaaaaggtggagaagcgagt

SEQ ID NO: 3872 - DNA, 710 bp, Zea Mays
aaggcagtggccatgatgagtgcacaagcccacgtggacacaataggggccaagatgagtgatgagcagatggctctggctcgctcgctactctccacatccaggggtgtccaggaggtcccgaggagtggtgggctgatgacaacaatcggcacgctagcctctgcagtcgcacagtcaatttcagggccagtggacatctcccttgtttggaccacctagacaacaggcatgcaggcagccaaagtattagaaggaaaaagaatggcaccacagaatgtcttttggggctagtagaaggaaaaagaatggcaccacataatttgtcattttcttgaactgctacgaggctgcatcaggaaccaagaagactactcggactggcaccttacttgcgattttgttaaaatatatactcctacactgggtttctccgtctctattatgaaaactattgggtaatatgaccatattgtatttcataatttgggtcaaactcacaactctggttattaagattcaaatggagtcatctttcttgattgccattacaagatgttgagtctatggactgttgtaatactttgttacaattttttttatggaaattgctatattttaggtgcctggattttcaacctggcaataatcttatacaactaaactagtacaattaaaaagcgaactcaccagtatggaggactggaaac

SEQ ID NO: 3873 - DNA, 1652 bp, Zea Mays
gaaagaaagagaaggaaaaaaaaaaactttgcggatccgtcgccgctgcccttgccgccgatggtcgatgtggccgcgctcacggacgacgtcctggcggagatactcctccgggtgccgtcgccgcgggacctcgctcgcgcctctgtgtcgtgctcctccttccgtcgcgtcatctcaaacccccacttcttccgccggttcgtcgccctccacgcggcgcctccgctcggcgtcttctgctgctaccccgccttgggcggcggggttggtggatcccagttccagccagcgctgccgtcgcacccctcggcgcccctcgctcgcgcgctcgccagttcagcagacttctgcttcaacttcctcccgccgcccgccagcgactggctcgtccgcgacagccgtgacggccgctttctactcgaccgcgtgcgggacggctccaccgctttcacggaggttgcaatctgcgaccccctattccggagtaatgacagtgtcagtgagaacgatacgacgttcaccgtgatctggatggcatgctgtcgagggaagctggtagcattcttctactcttcagagtcacagcaatggtgtgcactttcaccgcctgaacactatgctttgagcaccagaagagtcatgggcgttcgactaggacagcgcaaccatgctcatgggtgcttctactggatgttagccctcacacataggtggcttgtgttggacacacacaaaatggacttctccatcgtggacatctcacctatcctgacaggccgtgcgatgatgttcagtaatcagattaccactctggagtcaagcaatggctggactaccattgtggtctctgatgttttccgttcagatagaagatgcattctgtatttttatgcattcttgaatttcagcgaccggtggcagcttctgaacagaatcaccttgcctgatgaatgggggtatcgatttagaggcataataggtgctgccgacggatacttatttataaagctagatgatcctaaggagaacctgaatgatcagattgagcgatatgttgaatatttttcgcttgatgtcaagacaatgcagcttgggagtttctgtcggacgaccctttttactgtgactgaatcctacctttattgtggttttcccccatcattgtcgatgccttctatatgatttgtattagaaggaaaaagaatggcaccacagaatgtcttttggggctagtagaaggaaaaagaatggcaccacataatttgtcattttcttgaactgctacgaggctgcatcaggaaccaagaagactactcggactggcaccttacttgcgattttgttaaaatatatactcctacactgggtttctccgtctctattatgaaaactattgggtaatatgaccatattgtatttcataatttgggtcaaactcacaactctggttattaagattcaaatggagtcatctttcttgattgccattacaagatgttgagtctatggactgttgtaatactttgttacaattttttttatggaaattgctatattttaggtgcctggattttcaacctggcaataatcttatacaactaaactagtacaattaaaaagcgaactcaccagtatggaggactggaaac

SEQ ID NO: 3874 - DNA, 2308 bp, Zea Mays
ttgcaatctgaagcaccctgttcgcaaaacctctcctgctcctgccgccgccgccatggagagtgcgccgcaaacccccaccatggcggccgccggcgatgtccttcgcgtggccgacctcccgggacgaggtcgcggtctcgtggccgcccgcaacgtccgcgagggtgaggtgctcctctccgagcctcccgtcctcctctacccgtcgaccctctcctccctccgctcatactgctccgcctgcttccgctccctcccccccgccgccacgattccctgcgtttcctgccgcgccgctgccttctgctccccggcctgcgccgccgcttcgcacccgcacctcctctgtgccgcgctctcccacggcggcggcgctggcctcgccgccgccgctcccaccgaggcgatccaagagccgctcctcttccttctctccgcctactccctcccggagtcaaccatgcgctccatgctctctctctcctcggcgccgcccccgcccccgggcgcgcaggacgccgcggggctccatgctgctgtggcagccctagcgccgccgcacatgcttccccagggattgtcgccagacctaacggcggctctcctcgccaaggaccggggcaacagcttcgccatcatggagccgtaccgacacgggatgtcgctcgagctcctgaaggcgcgggcctacgcagtctacccccgtgcttcgctgttcaaccatgactgcctgcccaatgcgtgccatttcgattaccccgacaggcctgggccagggaacactgacattgtggtgcgtgcactccatgacatacccgaggggagggaggtctgcatcagctactttgcggctaattggaggtatgctgataggcagcgcaggctgctggaggattatgggttccggtgcgagtgtgatcgctgtcaggtggagagtcagtggaaggatgatgatgataacaatggagatgatggggatgacaccatggaagaggagggtgaggatgatgttggagatagaggtgatgatgggattgaggaggaagagggggatggtgctaccaatggcggtgatgatgatttcccacatgcctacttctttgtcaggtacttatgtgacaatgagggttgttggggtatgcttgctccattgccaccctcaccaaacggcgacctgtcccatgtgtttgaatgcaatctctgtgggaagctgaggaaggaagaggatgtcattcctgatgagggcacttctggcatggtccattagtttgatgaaaacatactgatccgtgtgctgcttcttttagtgggagtcagggaagtctgttgtttaaatctactgactgaagtatcccagctccaatgagaggccgcataataaaaaatccaaaaggttaagagtgagtatggtcctaataaggcatcaaaatgtctttttttgtagagaagatagccatatgcagactgtaatagcttgaaactagtttccaaagaaggataattatgactcaattttaattaatgaatccctttatgttcatatacttggatgatcaactctgcagattactaattcttcatgggggactgtttatttatttactatgccgatgctggcaatagggcgaatttaaaatgttgatgaagccctaagcagtctactctcctgttgttattagttaatgtttgttttagatcaaatacataatctatgtccctagcatgagagaaacactactgtagtttatttattagctaatgatgatctattatacctttggtggcgacatcatttttcctgcttaaacaaggcattgtacggatccctgtgcagagtatgaacttacgacatgagcctttcaatcaaaggggagaaagttggaagatgatgtctagccatgtaaagagaatgagaattggccaatgtccataactcttccaagatttgagccagagggcagggggtgggggtggagttaaagagttcattgctggcaaaccatttagccttaggggatgatcattgctgctaatctccaccttaatttagtagtgttcatgttaattaggctacaaatcctgtggcgaaggtctaacacaagcttggataagtaagagaagtgagtgtcaaaatggcacattatttcatttttagtttcatggagatacccagtttgagcagtatctaggtacgaggagttacaaatttgtttatgttatgtattgtgctcttgcgtcatactgataagagaaccgtgatgacaaaatccacctgttttggtgtttaccttgagccttgtaaagg

SEQ ID NO: 3875 - DNA, 3689 bp, Zea Mays
gttttatactccccgccactatttatacaacacgcggtcgcctccggggacgctcatcatcactgccatctctctctgactctgtgtccgtctctaaactctagtctgtgcgaatctgctgccagcagcgaggaacagaacagtagccaatttgccatctcacagttgcgttcctccgattccccgtcccccgatggacctgtctcccagctcgtcggcgccatccgcgccgccggtgccgtgcgagtggtccggcgccgggctcggctccgcggcgtgcggcctcgcctgcagggtgctctgcgccgtcgccacctgcgtcttcgcggccgtggggtcgctggtcggggcggtgacggggtccatggtggggctggcgaccgagagcgggatgctgcgcggcgccggcatcggggccatctccggcgccgtcttctccatcgaggtcgccgagtcgtcccgcgacctctggcactcgggcgactccggcgtctggaccctcctctacatggtacgctacgcacattgatctgcgtccattccatcgtactctgccaaactggtcactggcacttcgggtcgtgtagtttggttgcaaatcgcagagagtacttgcccgcccgagcacaccacactcgtttccgcggcctgatggggggcttcagcttgatgttgaccaagacgattaggttaggtgtgccccatggattccgtgggggatggcctcattccgttcgtaaaagataaaatgattttcccccatttattatcttggcgcgctatccaaatggatgtgaaaatatcgtgttcttcacctgcatctgtgttgaatgtgctgaggtaggagtagctccggttttgctcggtgcctgtctctgacgtctgaccccaagtgtttttttgcgctctgcttctgtgcacgcaggtggacatcatctccagtctcttgagcggcaggctggtccgggagaaggtggggccggctgttcagagcgccgtgcagagccagatcagcgccatcagctcgccgttcgaggagacgagcgacctgttcgagaccggcagcgtgaggggcctccccgaggccgcggtgcgccggctgccggtgacggtggtcgcggaggacggcgccgtggacgcggcgggccaggcgctgtgctgctcggtgtgcctgcaggacttccgggtgggcgaccgcgcgcggaggctgcccggttgccgccacctgttccacgtgccctgcatcgactgctggctcctcaggcacggctcctgcccgctgtgccggcgagacatctgaaactcggtcgtctgctctgtgaaccgccacccacgtcgccggaaacgtggtgtagtgttgctgctttggacgagatggtcagttagttgagtagggttcctactttgtaggacggcaccctgatgcccgtaagggaaatggtgcgctctgacgctctgttaactaaaaaagaagaagagagaaaacagcccctcagcttcaaagaatcaaaaggggaaaaaaaccataatagtgaacaaacgttcaacgacaaaacggcacaactgacggtcgcatgcaggttcaggccgagcttatctgcggattcagaattattcgtagttagctatagttggagaatgaaaccctaatcagggtgattagggttgatagtgaatatatatagctgagtgttatgggtcaaagctaattaacgaaggtatatacagagacgtaaacaatactctaaaacccccgtagtctcaattatatcatgtacaagtgtcgataccggagcgaaactcagcgaaaacactcgacaacagtctcttggtggagatatcgtgaactctaaaacccccgtagtctcaattatattctgtacaggtgtcaataccggagctatatcctgtacaggtgtcaataccggagcgaaactcagcgaaaacactcgacgactgccccttggtgaagatatcgtgaactgtatggtggggatgctgagaacacgaacatcatcggcggcgacacggtcgtatgcgaagtgcaggttgatctccacgtgcttcgtgccctgatgctgaacgggattagtagagaggtagatcatgctaacgttgtcgcagtagacgagagtgatccactgaagagggttgtggagctcctcgagaagctggcgcacctaggaggtctccgccacgctgttgaccacatcgtagtacttagcctccgcgttgtagctgagagacgataggctgacgcttggcaatctaagagacaaggttgatggccagaaacatgtcataacagtaagtaagattgggtgtcagtgttgctttggacgagatggtcagtagggtttgtactttgtaggacggcaccctgttgctttggacgagatggtcggtagggtttgtactttgtaggacggcaccctgatgcccgttagggaaatggtgcgctctgttaactgaaaaacagagagaaagcagccccctcaaataacgaaaagaaaaaaaatatactccacaactgacggtcgcatgcaggttcaggccgcgcttatctgaggattcagaatttattcgtagttagctacacacctacacattcttcaagttacctacacctgaacaagcttgctattccagctgattggttagctggacgagtgcacccacgttctctcgatccaggctgaccggaaacgagtatttttggcgtaggagtggatgcagccaaagagactcaaaataatttgttttgcatccactcgtgcaacttatactccagatatgcaggcaaccaaacaaatactaacataaagtcaatacacgcagtgacgcaggatgagacgatacgaccaaccaatcagacatattgtgtctgccgacgagctggtttggagaaactgttagctcggttcaggtggcctggtgccgtgcccgattattaagggcttgtttgacatagcttccctccaatagagtgattttgagtaaatctctagcagaagtaaatctatttaacgaaaactgtttaggctgtaaagtgattcctgaggggttagagagtttggagtaggttgggagcggtgggaaggtgggaagcatgtttttttcccacactttgtagtacaaaatagagactagattcacttcactgccatcatggagcagtttagatttttaccgttagactctgcgggagtgattctcgctggaaacagagtcgtggaagctctaccaaacgtcccctaagattcagttttgggttataggcaatttgcacctgtaaaagtcatttgaggtagcttgttatttttggacttcagtttcaaggtataaacggggtaaaatagtggcctggatttttttggaaacatataccatctgtttggttattgggatgaatagagcccggttcaagtcgagatgcaggttgaacgtagcctgtataagcaaacaacaattgcaatgcaatgtgtgtttggttgtctgatcccaattagccagaatcaatatggtccatgtttggtttactgttttttgtaagttgcaccaacacaactcatgtttagtttggttcactgtctttgttcagcattgaaaattacacatgatcgacatggaaaaacttttactatgcacacacattttcaggtgactgcactaaatcaacaattgtaatt

SEQ ID NO: 3876 - DNA, 3905 bp, Zea Mays
gcctctctcccgcacgcccccgccccgaagacctcgcgacgccaaaaaggaggagagaccgccacccccacgcccgcacggcccactcagcgctctccacccccgtcccctcgcggcggcggcggagcccgagcctgagtcctgcccccccgggctaggttggtctccgcctccgccctccagtctctttggcacaacctgcagccgctggcgcaggtggacatggatctgccaagcctcgccgtcgtgctgcgcgccgcgctcagtcacgttcctgaggagcgcaaagctgcagaggagagtctcaaccagttccagttcacaccacagcatttggtgagattgttacagatcattgtcgatggaagttgtgatatggctgtaagacaggttgcaagcattcatttcaagaattttattgcgaaaaactggtcacccaatgatccagatgagtctccgaaagttttggaaagtgacaaggccatggttcgtgaaaacgtacttggttttattgttcaagtgccccctttgttaagagcccagcttggagaaagtatcaaaacaattattcattctgattatcctgagcagtggccaagtctccttcactgggtttcacacaacatagacttacagaatcaaatttttggtgctttatatgtcctaagggttcttgccagaaaatatgaaaaaatcctggctacgcctctgaaggcaaccaagttggagattccgaagcaactatttgatccaaatgtcttcaatgcatggatggttttgtttataaacttgttggaaaggccagttcctgtggaaggccaaccaatggatcctgagattaggaaatcttgggcctggtggaaagttaagaaatggactatccatatcctgaaccgtctctacaccagattcggtgatctgaagcttcagaaaccagagagtaaagctttcgctcaaatgtttcagaagacttatgcaggaaaaatattggcatgccacatgcagctgctgaatgcaattcgtagtggtgattacttgccagatagggttatcaatcttgttcttcagtatctaactaacagtgttacaaagaacagtatgtatcagatgatgcagcctcagattgatatacttctttttgagataatttttcctcttatgtgcttcaatgacaatgaccaaaagttatgggaagaagatccccatgaatatgttcgcaagggctatgatatcatcgaagatttgtacagtccccgaacagctgctatggactttgtgagtgaattgattagaaagcgagggaaaaacaatctccaaaagttcatccatttcattgtggatatttttaggaggtatgatgaagcacctgctgatcttaagccatatcgccaaaaagatggtgctcttctcgctattgggacactctgtgataaactgaagcaaacagatccatataaaacagagcttgagagcagcatgggttgctgggcagtatgcccatatcaacttttcagaccagaacaattttcgtcaggctatgcactgtatgtctcaggaatgcgtgatccagatcttcctgtgagggttgattcggtctttgcacttcgttgttttgttgaagcttgcaaagatttaaatgagatccgacctatacttcctcagctccttgatgaattttttaagctgatgaatgaggttgagaatgaggatcttgtattcaccctagaaaccattgttgacaaatttggcgaagagatggcaccttatgcactaggtttgtgccagaatttggctgctgctttctggagatgtatggctagttcagaagctgatgatgaagctgatgattctggtgctttggcagctgttggttgcttacgagcaattagcacaattcttgagtccataagcagcctcccacatctttttctgcaaatagaacctacattgttacctataatgcgcaggatgttgacatctgatggccaagatgtttatgaagaagttcttgaaattgtttcctatatgacatttttctcacctacaatttcactggacatgtggagcttgtggccactgatgatggaagcgcttaatgactgggctatagatttctttgagaatattcttgttccactggacaactacatttctcggggaactgatatctttcttgcaagcaaagatccagattaccagcaaagcctgtgggatgcactacaatctataatgatggacgaaaacatggaagattctgatattgaacctgctcccaagctcattgaagttgtttttcaaaattgcaaaggcaacgtggatcagtgggttgagcactacctcaggattacaattgcacggttacgtagagcacagaaaccatacttgaaatgcctccttgtacaagtgatcgctaatgcgctctactacaatcctgcgctgacccttgaatctttaaataaacttggggttgcagctgacatttttaaccattggtttgctatgctacaacaagttaaaaaaagtggagcacgggttaatttcaagagggagcatgataagaaagtttgctgcttgggcctgacctctcttatcgcgcttccagctgataagattccagcagaagctttggatcggatcttcaaagcaacacttgagcttcttgttgcttacaaggaccaagttgcagaagctaagaaggaaaatgaagaggctgctgatgatatggatggttttgatgctgatgaagaagatgatgatgaagttgactccgataaggagatgggtgttgatgatgaagacggggatgaaataagcagtcttcagctgcaaaaattagctgcagagatagctggtctgcaggggatgccagggcgctggtgtttgaagatggtgcactgcccatgcagcatgaagggcagcagcaaaaataatgctgttgacatgaagcaggcgatggaagctgggacagatctgcagcggaatctggcatggagacgtctgttgtcccgtagccctgcaagccatctgctgaacgaggctagaggcttccaaccagccgacgaggatgatgactcagatgatgatttcagtgacgatgaggagctacactcaccaatagatgaggtggatccgttcattttctttgtagaaactgttcaagctttgcaggcatctgatcctgccaggttccagaaccttatgcagacattggatttccgttatcaggcgcttgctagtggcataggacaacatgccgagcaaagaaaaattgaaattgagagagagaaatctgagaaggcaaatgcacagtgacataataaatcatttctggccgcccttgtttttgccattttgccagtataagccattggtgtctggtcaattccctgtgatttgcaggtcgctggtatgagttttgcagccttagccaacctttaagggtaggacaattttaggctcgcaaaattctatccttgtgaggaagcatcttggataatctgtcacgtcggccatgttcttcgtggcctgttgttgccgtcttggttgcgcaagaaagtttctctcgaggacagttgctccgtcttgttgaatttttttttgggggggggcttgtaagagcatttgttatagaaactcacctcaggtggtggggttgcattctccgagttgtcaaagtttattactggttcggagtagattgtatatggtttcggttggtaagacaacggttgtacgagctgcggtatatgtttttttttgtcaacaggacattgtaattgggttttgttctttggtcggcgagagcaagaaaaattggcattgttctgcggagttaccttgtttggtttcattgtccacttgcctgtgttgcaaaattatataatgttatagaaattggatggtgt

SEQ ID NO: 3877 - DNA, 2328 bp, Zea Mays
gcatagagagcagttggattggatcaaagagaggagggctttgctttccgttttccttctccaaatggctcattagctcgtgcttcttccttccttgctaccgagttcggggcgctaaccaatgcgcagcgacaagctgatctctctctgccacgggatggaggtggaggctctagagaaggggtacacagcttttgccaaggcggtgaagtcttttacttcttcagaacggtacaagcgatcagagagctattttgaggacatgtatggtacagatgctttgcgttcttcagacaagacaattgttctacctatgccagaagctgtaaaagctaaggtgaaaggtgatatcagcaaggaagctcaacctggaaggggagcacaaagcaccttgagaaaggagatccttgagcttgagaagcacttcagggaacaacaggttgtgagtggtgcactggaaaacgctttaggacctaacgccggttcagtcaacttttcaccagagaatccaatgccaaaggcagctaatgaactgatacgggagattgccacattggagctcgaggtgaagaacatggagcagtatctcctgacactctaccgcaaagcattcgagcagcaagcgccggcactctctccccctgattgccgggaagcttcgaagccgtcagtgagctcacgctttgggcagctccgagaaacacccgtggcggcgaagtcttgcaagagtggaggaggggatgcggcactccggaccagttacccgccgccggcgcataagaaactgaacgatccgttggcagactgctgcacatctgctcgctcccatagagcggttgattcagatgtcctccgctgccagtcagccctgtcgtaccgcggagtttgctcgtccagggtactgccttcagaagaggatgatgatagcctcgcgagggctcttcgctcgtgccactcacagccattctcattcgcagaggaaggagagggggccggtgcatctggaggagcgataagcttagcagagtatctaggaaccaacgtagccgaccacatcccggaaacccccaacaacctgtcggaggagatggtgagatgcatggcggggatatactgcaggcttgcagaccctcccttggtccaccacggctcgtcgtcctcgccgacattgtccttctcctcgaccaccagcgcagtctctccacagtacgtcggagacgacatgtggagtcccagctaccgcaggagagaagcgacgaccctggactcccgcctgatcaacccgttccacgtcgagggtctgaaggagttcagtgggccttacaacacgatggtcgaggttcctacgatcagccgtgacggtcggaggatgaaagaagccgaggacctgctccagacttacaggctggttttgtaccggctggaagccgttgatctgaggacgatgacgaacgaagaaaagatagcgttctgggtgaacgtacacaatgccttgctgatgcatgcttatctggagaacggcgtcccacagaacaaaacatccctgcttgctaaggccgcctgcaaaatagctggacgcagcatcaacgcggccgttatccagagcgttgttcttggatgtaccacgcactgccccggacagtggctacgacggacgctgctctaccccaggaccaaaagcaaagtgagcaaagcggggcatgagtggcgagcctttgccgtcgcacaaccggagcctcttttgcgctttgcgctttgctccggcagccattctgatcccgcggtgagggtgtacactccgaagcggctgttccaccagctggaggcggccaaggaggagttcatccgggcgacggccggcgtgtggaaggagcagaagctgcttctccccaagctggtggaggcgtacgccaaggacgtgaggctgtcgccgcagggcctcgtggacatggtccagcgccacctcccggagaccatgagggtggccgtgcagcggtgccagcagggcggcagggcgtcgtcgggcaaggtcgtcgtcgactgggtgccccacaacccggccttccggtacctgctcgcaagggacctcgcgttccctcacctcagctgacgctgacactgagcatatatcgatgggcatgggctcaagtagtatatgcatgtgtcaaagggttaggacttaggagtaaagaagggatcgtgtgcagtttttgtgtgggtggttatcaatggcgtggcgtgtaaagatgcttctgtagtctgtagatgatgaacaggaaaggaaacagttgacgaaatgatagaaagcacgtttgacggttgactcgc

SEQ ID NO: 3878 - DNA, 5523 bp, Zea Mays
cctccccgacgacgccattcacctccccccgtcccccgtatcgccttcgtcaagtacgcccctcccccttccaccccatgacggagtgctcgattccttcatctgatggcgccacccacctccccccgctctcctccgccgccgcggctgtcgaggctcacttccaggcgcactggtccgcgctcgacgctgccgcacgccaggacccggcgcgggtcatcgccgtgggggactggcggtccccgctcgagctccccttcctgtggcttggggatgtcccctggtgtcgtctccgtcaggctgcaagtccaccaattcggcctcatctgcgacaacctcgacgcagtcaacaagttcgagcccaattacaggcttatcagaaggtacactactattgctcctaccctttttttccaccctttggccaacaacggaatgttatgtcttcaatgtttaatccatactacccaagtctttgtaattgacaaactaaacagtgcactaattgagtagactacgatacaagagtaaccacatgcttctattcaacctgtcttcaattacatttgatgttagttactaaagaccaagtagactgagtcttttagattgcacattttttaactttcatggaaacgtttttaggaaaacaaattaggtgtgattctttttaaaattctataacatcaaataaaaaggaaaatagattgtaaataaatgctatagtcaagaactgaacgtgtctaataggttgatttcagtgtttcaagctttatcttatgtttattgattatatgagaccttgcaattggaatattcctgcagattggtatattatatgctcgagtggtgaaaacaaataataccatgaatcccgatgtctcatgcagattgatatatatcttcttcaacgatgttattcactacgggtccacttctagaaggtatgtatctgagaaatattttccccatcgcaaggtaaataatagttatacatctaccaagtttcagatgtagtcttattccttttttagtttttatcgttaatttttattgcactaatgatgtgttacctcttaagatatttgtcaaaccaataattttgaatgacatttatcttggtactttgtcaaatctataaacttgggagttaggatcacatctgttcctataaaccaagttcaaagattgttattttattttgaagatcacaactcactgtaattgttcatgataattatttgtaaactgaaaatccaattatctcgctatcaaacaccttcaaagaaataaattattctcgcgcgcagggcgcgcgttacctactagttctgataaaaaagaatgtgcccctgcgctgcgctgcccaatgtcctccacccgcattccccgttcagctaaaccctacccgtctccggcgccgcttagatccatcacagacgacgctcgccggtcctgaggagagatggccgacccgaactcgcagcccctcgccgccgctacggcggatgtttctgcaacctaacatcaagctgcgatgaccgcgccgcaatcgcaccgaggcgctgcggtggcggcggcgaagcagggagcatgcgcaagcgcaaccatggttgtgccgtcgtccccgcaaggcgctcccgggttcgcggtggtgtctcaagaggccgaggacgtggcggctttatcgtcccctctaggtcctcccgggttttgggtggtgcctcagcaggtagcggtcgcgccacagcaaggtgctccggtaatggcgccgccacagggtgcaaccatggtgcctccgcaacagcagcatttcgcgcctgagatggtgcctggctcctaggaagtcatgcacatgctcgttcaagctacgcccatgggcatgatgatggcctcgatgcccctgcaagcccaggctatggttgatcaccaacctgctcaaggtatggcgccatccgtccatgatggaggcgcagcaagctcaacctggacacacgacgcatgacgacaccacaacctctgccactcggcccttcgttgacgcagcagcagccttcacaagctgatacgattataatggcacaaccgcctctgcctttcggccctccacctgcaatgcttcagcaacagcctccacatgggagtatgggaccgcgatgatggtggcacaatcacttctcactaccggaatcgtgttctttgccgagtgtctaagaaactcggtaaaagctattttacactcggcaaagtgtttttttgctgaatacttttttcggtttgccgagtgtcaaaaaacactcggcaaattaagaatcgaaaaaataaaaaaaaacagcaaaacattttttaaaattctaggaacaactctccaacactgtctattatcaattgctctatcatttttcactattattttgaatcaaaatttatatgttttataaatgatgagattcgaactttcaacctctctctctcgcgcatacactcctataccactacactactacacaaattatgtctatattacgatttcatttcccatgtactataacaaatcgagagtaatttgactatttaaggcactaaatgagttcatttaaaaatgtgaccaactataaagttgcataactttttgagatctacaagttttattttaatagtttctacatccgagaccgtttacaaaatttgaattttaaatttgaaaacttcacacgaatttttcaaagataagatgatttcaaatcaaaaaaaattgtcaactacagagtttcattatatttcaagacctacaacttttattttggtggttttttcatccgagatggtttgaaaaattcaaatttcaaaattcaaacatagttttgtataacaagatgatttcaaaacaaaacattgtcaactacaaagtttcataacacttcaatgcctacaactttcatgttggtggttgtttctttcgaagtcgttttcaaaattcaaattttatttttttaaattcagacgtagttttcgttgacaatatgacttcaaatataaaagttgtcaactataaacttctataacttcttaagatctacaaagtttattttggttgtttggtcatttgtttatctcacatgatggttctaacaatatgcacaaattctatacgcctctctcgtagtttcataaactacgagagagatacgttttatgaacaaatttatttttattttgtcatatgaagaaatgttcaatatataaattgtacatcatgatgagttatacaaatttatagttgaaaaccttttcatttgaattaatttactatttaaaaatgtgatttttaaattgtttttgcctagtgttggagaaaaaacactcggcaaagagctctttgccgagtgttgtatttgtgacactcgccaaagagcctgccaagtgtcaaaaaaagacactcggcaaagaaattctttgctgagtgtcaaaaataaaacactcggcaaaaagtttctttgtcgagtgttttcttttaccgagggttttttgcgtggcactcggcaaataacttctttgccgagtgcccgaaaaaagcactcggcaaagaatatgacaatcggcaaagagccaaattatgccctccattagtgatgctgcaacacaatccacagggcaaccaggtgatggtggcacagccgcaattcgttgcgtcttgaccaatatggtttgtgatcaacttctagttatgcctgattactattttatttacgtgatatcagtcccatatgtatgattaacaaaagttctaccatatatagatgtattcaagctggtgtagactaggactagatttttacatttatttgttgtataaatctagaagaatagaagataagccatatcaaaaccataggcagtgtctgactggcttgtgtcatttgtgcaagacgacaggagcttttacgattgaggttcttatatgggctgattggaccagctgcccagaaaacaaaagctcatctcatattttgtctgttctgtattttctttccttttcccccttccatcttaggacagatatgcactcagcataagcatttcattaattttgaacctgcagttctctcactctcctcgtatgtgttcacatagtgggtcctaggcactgttttctgcggatctagttttcttctacagcatctcttgaattcctgatatcttgacgtggcaaccttgttcttgcttttcatcagcaacttgactttgtctattgctcaattgttgcaactggcatcagtacttaactactggaggttgccttgctgtatgatatgcttttgttataatggtgcaatgtgacaagtatgttctagtggatttcactctcaactggtgctgacattcttgggtcatccacttcactgattagtattgtcagctggagggctcagattatctgttgagggacgtgagctacaatttacaggtgtctcagtggttccagtctgtttgtgatcacattggttcgcatggttgccagggtcattttgatgtaaatggaatcatgagatttgcctgcagccgcaactgctgcagctgtagtctatagagataaaataacgtataagccgcccgcagtcggattaaagccgcaacgagaataaataggagaagcttacagtcgtcttagacacaataaacaagtaaatttgtaagagagataggtgggccaaatattagtagcgaagagctaactactggtctactggatgttattagtcttgctttaagtgcaacggatggacggatggactgatggtatctgcacttgctgtccacggaaagtatagccaggctatactgcaaaggtacatgactgtatattactctactggccaccggtggtcgtcgatgcaagcattgctctgcgaggacagagactcaagcaaaggattatattgcacgcacaaggcgtcgtcgtcgtacatgcggttgacgccgatacgttatcataagccattgctgagcacacgtgcttgttgctgctgatcagaattcagaactgaacaggacgtgcgttcatctccaaggccagaacgcgcgcgcaccgggacgacagcgtctgctgcccgtcggaagcagacgaagcttaactccatgcactgtcctcgcagctgcagcaaaggaatgaagctgatgagagctgctggtgagcttagacgtcgtcgaagggtgccgtaggctgctggtgagcttattagacgtccgcattgattccatactttgcctggggacgctgatgagagctcttgctcgctccatctcctcaactgtgcatgattggtctgagtcctaatcgtagcattaatccttgaaaaacgacagcgagtaacctccgctctggtacgtgtacccttgcctgtacaacagggttctgtggtaatgcttcgctctggtaatgcttcgatcagaggcatccaggctgagcctgagcttttcaccgttcaacagttgtgctcgctctgttgagtaataacctcg

SEQ ID NO: 3879 - DNA, 1458 bp, Zea Mays
gtccctctccctagtccctcccctcgtccgtcgtccacctctgccactacgagctcgtccccgtcttgtttcgtctcctctcgtctcgtcacgcgagatatttctacgggacgggacccgcgttgcttccccgcctcgccgtcccgcgcgcgccagccgggcccggggaagccatgaactgcctccagaacctgctcaaggagcctccaatcgtggggtccaggtcgatgaggcggccctctccgctgaatctggcgatggtccgcggcggcagtcgccgatcaaacaccgtcaaaactgcccctggggcgtccacttccggtgccgagagcagcgccgtggagatgggcaccgagaagtccgaagtgtacagcactaacatgacgcaggctatgggagcagggattttgatgcttttgatttgcgattgaggcttcctgctgtggttagcaaattgcacaaacttatcaactgtaatggtggtgtaacatatatacattgtactgctggacttggaagagctcctgctgttgcattggcttatatgttctggattcttgggtacagtctcaatgaaggacatcggctgctacagagtaaaagggcttgctttccgaagttggaagccattaagttggcaactgctgacattgattatccaaaaacacaatcactttgaagtgggaagctgatggttcttcctctgttgaaatttctgggctcgacattggctggggtcagagaattcctttgacatatgatgaggagaaaggagcttggtttcttgagaaagagttgcctgacggtatgaatacaaatacgtagtggatggcaaatggctatgcaacgagcatgagctgataacgaaaccgaatgctgacggccacgtgaacaactatgttcaggtgagatcctcctgtcccgtcaaatggatgccatagctgagggctgagagtgcacgcgtttttcttggctgcaggtctccagagacggcacgagcgatgaagagaaggagcttagggagcggttgactggtccggaccctgatctcacggaccaggagaggctgatgatcagagagtacttggaacagtacgcggatgccgccgagcgctaggagaagaatgatgatgactgaggaagagaagagacacaccatgagacgacggaccgaagccgacctgaccgcaccttcctttacggagaggtcgggcttcccctctcttgtcaatcaaatactcgtagcttaaccgtgcaaaagggcacgttctgctcgcatacttggagaatgatgatgaaggagcaaactgtacgtattgttgaacagcagctgtgcagaaataacaaaggtagtagcgtaaaactactgtactgaccataatgttactactgtatgctccttcttggctatgaataataataataataataaaagagtaaataaacctcatcgatccc

SEQ ID NO: 3880 - DNA, 1655 bp, Zea Mays
tgcccgcccgtccccggtccccgtcgtccctctccctagtccctcccctcgtccgtcgtccacctctgccactacgagctcgtccccgtcttgtttcgtctcctctcgtctcgtcacgcgagatatttctacgggacgggacccgcgttgcttccccgcctcgccgtcccgcgcgcgccagccgggcccggggaagccatgaactgcctccagaacctgctcaaggagcctccaatcgtggggtccaggtcgatgaggcggccctctccgctgaatctggcgatggtccgcggcggcagtcgccgatcaaacaccgtcaaaactgcccctggggcgtccacttccggtgccgagagcagcgccgtggagatgggcaccgagaagtccgaagtgtacagcactaacatgacgcaggctatgggagcagcgttgacatatagacatgaactcgggatgaactacaatttcatacgcccagacttgattgtaggatcctgcttacagagtccacttgatgttgataagcttcggaagattggtgtcaaaactgtattctgcttgcagcaagattcagatcttgaatattttggagtcgacatccgtgccattcaagattattctctacaattcaaagatattgtgcactgccgtgcggaaattagggattttgatgcttttgatttgcgattgaggcttcctgctgtggttagcaaattgcacaaacttatcaactgtaatggtggtgtaacatatatacattgtactgctggacttggaagagctcctgctgttgcattggcttatatgttctggattcttgggtacagtctcaatgaaggacatcggctgctacagagtaaaagggcttgctttccgaagttggaagccattaagttggcaactgctgacattctgacaggattatccaaaaacacaatcactttgaagtgggaagctgatggttcttcctctgttgaaatttctgggctcgacattggctggggtcagagaattcctttgacatatgatgaggagaaaggagcttggtttcttgagaaagagttgcctgaaggacggtatgaatacaaatacgtagtggatggcaaatggctatgcaacgagcatgagctgataacgaaaccgaatgctgacggccacgtgaacaactatgttcaggtctccagagacggcacgagcgatgaagagaaggagcttagggagcggttgactggtccggaccctgatctcacggaccaggagaggctgatgatcagagagtacttggaacagtacgcggatgccgccgagcgctaggagaagaatgatgatgactgaggaagagaagagacacaccatgagacgacggaccgaagccgacctgaccgcaccttcctttacggagaggtcgggcttcccctctcttgtcaatcaaatactcgtagcttaaccgtgcaaaagggcacgttctgctcgcatacttggagaatgatgatgaaggagcaaactgtacgtattgttgaacagcagctgtgcagaaataacaaaggtagtagcgtaaaactactgtactgaccataatgttactactgtatgctccttcttggctatgaataataataataataataaaagagtaaataaacctcatcgatccc

SEQ ID NO: 3881 - DNA, 1894 bp, Zea Mays
ccccgtcgtccctctccctagtccctcccctcgtccgtcgtccacctctgccactacgagctcgtccccgtcttgtttcgtctcctctcgtctcgtcacgcgagatatttctacgggacgggacccgcgttgcttccccgcctcgccgtcccgcgcgcgccagccgggcccggggaagccatgaactgcctccagaacctgctcaaggagcctccaatcgtggggtccaggtcgatgaggcggccctctccgctgaatctggcgatggtccgcggcggcagtcgccgatcaaacaccgtcaaaactttgcaggcccctggggcgtccacttccggtgccgagagcagcgccgtggagatgggcaccgagaagtccgaagtgtacagcactaacatgacgcaggctatgggagcagcgttgacatatagacatgaactcgggatgaactacaatttcatacgcccagacttgattgtaggatcctgcttacagagtccacttgatgttgataagcttcggaagattggtgtcaaaactgtattctgcttgcagcaagattcagatcttgaatattttggagtcgacatccgtgccattcaagattattctctacaattcaaagatattgtgcactgccgtgcggaaattagggattttgatgcttttgatttgcgattgaggcttcctgctgtggttagcaaattgcacaaacttatcaactgtaatggtggtgtaacatatatacattgtactgctggacttggaagagctcctgctgttgcattggcttatatgttctggattcttgggtacagtctcaatgaaggacatcggctgctacagagtaaaagggcttgctttccgaagttggaagccattaagttggcaactgctgacattctgacaggattatccaaaaacacaatcactttgaagtgggaagctgatggttcttcctctgttgaaatttctgggctcgacattggctggggtcagagaattcctttgacatatgatgaggagaaaggagcttggtttcttgagaaagagttgcctgtgagtatacaatgtttatgttaggaaccatctaaaagtttatggaatgttgatagtttcattgtggaacgtaggcagctcttgaccatacctggtacatgtagaccatatctgtgtgcgacatcctgcttgatcatttatgatattacattcgaataacctcctcttagggaattttgaaagcccagaaagattgtaagccagtatggctatatcttacacctttgggatatctgtttcctgaaggaaggacggtatgaatacaaatacgtagtggatggcaaatggctatgcaacgagcatgagctgataacgaaaccgaatgctgacggccacgtgaacaactatgttcaggtctccagagacggcacgagcgatgaagagaaggagcttagggagcggttgactggtccggaccctgatctcacggaccaggagaggctgatgatcagagagtacttggaacagtacgcggatgccgccgagcgctaggaggtccaaagaatgatgatgactgaggaagagaagagacacaccatgagacgacggaccgaagccgacctgaccgcaccttcctttacggagaggtcgggcttcccctctcttgtcaatcaaatactcgtagcttaaccgtgcaaaagggcacgttctgctcgcatacttggagaatgatgatgaaggagcaaactgtacgtattgttgaacagcagctgtgcagaaataacaaaggtagtagcgtaaaactactgtactgaccataatgttactactgtatgctccttcttggctatgaataataataataataataaaagagtaaataaacctcatcgatccc

SEQ ID NO: 3882 - DNA, 489 bp, Zea Mays
aacactaggtcttatcccatcaaacacacaaggtatgacaaagaagctgtctattttgatgaagctgtaaggaaaggaaaacgacagcatttggagtccagaatactgaatcttgtccaacctgcattccagaaaatgttgactcatctgcgtgtgaaggctctagaaaaatttaaaactggtcttaattcatctttggagagtggaaaaggattcgcagtatctgctcgagacaatactgaatgctctctcaaagaatttgaacaaggctgtgcagatgctataatcaagcaagcgaactgggactgctctaaaatgctagagaaagttcggcgtgatattgaagatcatgcactttcaattcgtgaaagcaagctatccgaaatgacaagacacgctaaggttatgtatggcaagctgaaagagattttaatcactagcttagcaatgcataattttcttctagatttatttgcatatctgatatta

SEQ ID NO: 3883 - DNA, 1528 bp, Zea Mays
tcccatttcccccacgagccctaggcgcgtccacggcggcacggaaccggagatggaggagagcgacgcggcggagggggtggcggtgcagctgatcgacggcgagggcgagttcgcggccgagggggcggagcggttcatggcggccgccggcgtcgccgggtgcgggctctcctacgccgtcgtctccatcatggggccacagagcagcggaaagagtaccttgttgaatcaattatttggtaccaattttagggagatggatgcattcagaggaaggagtcaaactactaaaggtatctggatagcacgctgtgttggtgttgagccttgtactgttgtattggatcttgagggtaccgatggaagagagagaggagaggatgacactgcatttgagaagcaaagttcgttatttgctcttgcaatttcagatatagttctaattaacatgtggtgccatgatattggccgtgagcaagctgccaataaaccactcctaaagacagtatttcaggtcatgatgcgtttgtttagtcctcggaagacaacactgctatttgttatacgtgataaaaccaggactccacttgaacatctagaaccagttctaagggaggatatacaaaagatatggaactctgttgccaagccagaggcacacaaagacacccctatcaatgaattcttcaatgtgcaagttactgcattgtccagttttgaggaaaaagaggaccagtttagggaacaggttcaacaacttaggcagagattttcaaattcaattgcaccaggaggtcttgcaggtgatagaagaggagtagttcctgcttcaggttttttgtttagttcacaacagatttggaaagttatccgagagaacaaggatcttgatcttcctgctcacaaggtaatggttgctacagttcgatgtgatgaaattgcaaacgagaagtttggatgcataacctcagacacagaatggttggatgtggagagtgctgtccaatctggtccagtacctggttttggaaaaaaacttggcaatatcgtcgacgttcacttgcaagagtatgacaaagaagctgtctattttgatgaagctgtaaggaaaggaaaacgacagcatttggagtccagaatactgaatcttgtccaacctgcattccagaaaatgttgactcatctgcgtgtgaaggctctagaaaaatttaaaactggtcttaattcatctttggagagtggaaaaggattcgcagtatctgctcgagacaatactgaatgctctctcaaagaatttgaacaaggctgtgcagatgctataatcaagcaagcgaactgggactgctctaaaatgctagagaaagttcggcgtgatattgaagatcatgcactttcaattcgtgaaagcaagctatccgaaatgacaagacacgctaaggttatgtatggcaagctgaaagagattttaatcactagcttagcaatgcataattttcttctagatttatttgcatatctgatatta

SEQ ID NO: 3884 - DNA, 4573 bp, Zea Mays
gcgtcgcgagataaaaaaagatcgggagcagaagagaagagagcaggagcagccgggcctaaacagaacagaacagaaaggaaaggagagacgcgtgtcctcccagccactgccaccctcccccacctctgcctctctcgaccccacccgacccggcgcggaaccggagccgcccgcccgcccgcagccccgccgcgccccgaacggtgccgacgagctccagcagcgcccaatggcggcggccttcctcgccctggagccccgcgtgacatgatccctggcttggctcccgagcaggggaatatccgcgcgagcacccccacccccacaccccagccatagggccccccaattctcgccttccccaccgcaaatccttctcgactcccgtatctcccctctcctcctccgccgcctcgcgcgccgcaattggcgttgtgctcgcgtggacccagatcgccgccaggaagtgtctaattggtggtgcgcataggactggctggatttcaatcgtgataatactgatatacggagactcattgctgatccagtgagcctattcgcgccaacttgattacagcctttctcacacaagtatggcgccctctgctgccgtcccgggtggctctgaggttgaggggtcaccacgcatggccaagttcctctgcagctttggaggcagtatccttccccgaccactcgatggctgtcttaggtatgttggcggcgagacaaggattgtcatgttgccgcgtgacatatcatatgccgacctggctgcacggatgagagagctctataaggatgctgatatcatcaaataccagcaacctgatgaggatttagatgcgctggtctcggttgtgaacgacgacgatgtggtgaacatgatggaggagtatgacaaggtcattgcgacaggggaggcgttcactcggctcaggatcttcttattttctcagcatttggatgatgatgctgcatcagtggatgtgcattacaatgtagacgagcgggaaacagagagaaggtatgtagatgcgcttaacagccttggtgatgttaagtcaccttcctcccctgtgtctgtggagcagctttttggcattggaggcaatgattcaggaattcctgattttgctggcttgagacatttgaatgtccctcgtccaacacatagtcagaggtatggagagatggattctccttggagccctgcctatgtctcaccaggccagtacggggtacatgacccaagggattttccaatttcaccatcatctgcaaggtttcaagtaggagcggaggattttgatgagaggactcctgacgactttgtaaggcagtcaccaaaatatcgtcattatgaggcgcattcaccatcacatatggataatttagtctggcttccacctggtgctgtaattcagcaaaatgcaggctttcctggtaatttgagccggtccaacaatttcttggatgggagcaatggatgtgatcactgccgttcaccattccataaggttcaaggttcagtgaatgatcctatctatatgaaccctcgttggactcggccagtccaacaacattttgaccaaccaagcatgattaatgattatcccggtcaccatgctaattcttgtccagattactgccgccctggtgatcattatgtgggaggtcaagatgttagattggaaaatggtgtttatgttaaagagcaaaatggtggtcatcctcccatgttctataatgagtcacatcctcacgatagagtctggcatgtgcataccaagcaaagtcatcagcgatacgaggatccaaggctgcatcatcctgctaatggtagagtgatcgagccatacattatggatgccaacaaagtatatgaagttcattcagcatctcttgctcgttctagccatgagagtcctcactattatcacggtagcagtgaggtcataaatgacacgtatcacaaccaacaagttggaggcagtgggtcgtatgtgcagccagcagggtttgaagaatcccctagccaccattacaaccactcttcggcctatggtgcagattccttttaccaaatgcagcagaatttgccacccattcaatctctgagaaggagagcgaacagccctgttcacactgcctcaccatatgattccccacacctgccaatatcaaatgggaccattaacacaaacttcgtaagaaatacaggtgatgtcagtccgaggataccagggctacctggatatgatcgaatgccaaacacatggactcctcccaacggcagcataccatatagagttgttgggcatgatgttcatgctgcctccatggaaaacactagtgcctttggtcctaggtctaatccaactgctgctcagtatgttcagcatttcattgctcctgaatcaatccagcatcaacctggagctccattgagggaggttcatcctgaaagatcataccctgaacccatgccgtcgtcatatgttgatggcaaagtagctgtttctgcattgcctctcactgatcaattatccaggttggatacaaacacaataaagaaacctgaaggtccagatgatgttaactcaactcaaaatgtgaatgaaacaactcctttgcatgctgtggatgaaccaagtaccttaccccaccatgttgtagttgtacatgaagttgatactaagcaggggaagccaaccgaacatgaaagcaggcaaaagcaacatgaagctggggctacagcactgcaggaatgtggggatatttcagaggatagattgaatttccttcctgaattgattgcctctgttaaaaaggcagcactggaagatgctgctgagacacggatagcccaatcagatgctaatggtgctgtttcacctgttcctgatgatgatgatgataatgaaaagaagttggatgcagcagctgctggtactacagatgcaaatcaggaccctgatttgcaaggaagcattgatcggcagaagagctccaagattgagtctacaactgctgaagctgaagctttgtctaaaggactacagactataaaaaatgacgatttggaggaaattagagagctgggttcaggtacttatggggcagtttatcatggtaaatggagaggatgtgatgtcgctgttaaaagaataaaagcgagttgctttgtaggaagaccatctgagagagagcgtttgttcgtgatggtccagatggaagcttagcaactgttactgagtttatgatcaatggatctctaaaacagtttctgaggaaaaaagacaggacaattgatcgccggaagagagtaatattagccatggatgctgcatttggcatggagtatttgcatgggaagaatatagtccattttgacctgaaatgtgagaatctactggtgaacatgagggatccgcagcgaccaatttgcaagatcggtgatcttggactgtcaaaggttaaacagcatactttggtatctggtggtgttagaggaaccttaccatggatggcaccagagcttctgagtgggaaaagtaatatggtgtcagacaagattgatgtctattcgtttggaattgtcatgtgggagttgcttactggggaagagccatactctggcatgcgtgctgctgaaattattgggggcattgtaaacgattccctacgtcctcaaattccttcatggtgtgatcctgagtggaagggattgatggaaagctgttggtccagtgatccagctgagagaccgtccttcacggatatatctcaaaggttgaggaaaatggccgccgcaatgaatgtgaagtaaagcatcgcagttgatgaccctactccaagtgataatttaacaagtgctgacttcatgggagaaaatctatgtcatggagattccaaagcatgtttgatgttttcttttaatcctggagtaaaccggctaccatttgccttccgccgaaaacaagtatgctatatggcgcattgtcttgatgggagctgttgcactgtcatgtaaataagttttgacttgctggcccgtagtagatgtgcaaagtaataggcacgatcacacagttacttttttttttcccatataaattgtgttctaggataggtagaacgaacatgactggagcgatccttgttcagattgtaaagaaaaggacagacccagtgctgacggttcttatatgagtggggtctggttaaagaataaccaaaacaagtcttatacttttatcttgcagagaggttgcatcgaatctaggactttggctcggtagaaaggtttttcaccactgcgttaggcctatacttttttcagtttaaccactgtgctagacctgcccccttttttgagtttgtacttggtctaaaaataagagtatactgttttccatgtgtatatatcatcacttcctatttgaatgccccaaaaaacaagagtacactgtttgtcatgtatacaccatcacttccaaatacttgcaggcatataattttgcaggcatagtggagagtgatgggcagtgtgacgtatggctgtcgc

SEQ ID NO: 3885 - DNA, 4720 bp, Zea Mays
gcccaggcaacgtgaccagccgagccgagccggagcggacgagcccccggcgtcgcgagataaaaaaagatcgggagcagaagagaagagagcaggagcagccgggcctaaacagaacagaacagaaaggaaaggagagacgcgtgtcctcccagccactgccaccctcccccacctctgcctctctcgaccccacccgacccggcgcggaaccggagccgcccgcccgcccgcagccccgccgcgccccgaacggtgccgacgagctccagcagcgcccaatggcggcggccttcctcgccctggagccccgcgtgacatgatccctggcttggctcccgagcaggggaatatccgcgcgagcacccccacccccacaccccagccatagggccccccaattctcgccttccccaccgcaaatccttctcgactcccgtatctcccctctcctcctccgccgcctcgcgcgccgcaattggcgttgtgctcgcgtggacccagatcgccgccaggaagtgtctaattggtggtgcgcataggactggctggatttcaatcgtgataatactgatatacggagactcattgctgatccagtgagcctattcgcgccaacttgattacagcctttctcacacaagtatggcgccctctgctgccgtcccgggtggctctgaggttgaggggtcaccacgcatggccaagttcctctgcagctttggaggcagtatccttccccgaccactcgatggctgtcttaggtatgttggcggcgagacaaggattgtcatgttgccgcgtgacatatcatatgccgacctggctgcacggatgagagagctctataaggatgctgatatcatcaaataccagcaacctgatgaggatttagatgcgctggtctcggttgtgaacgacgacgatgtggtgaacatgatggaggagtatgacaaggtcattgcgacaggggaggcgttcactcggctcaggatcttcttattttctcagcatttggatgatgatgctgcatcagtggatgtgcattacaatgtagacgagcgggaaacagagagaaggtatgtagatgcgcttaacagccttggtgatgttaagtcaccttcctcccctgtgtctgtggagcagctttttggcattggaggcaatgattcaggaattcctgattttgctggcttgagacatttgaatgtccctcgtccaacacatagtcagaggtatggagagatggattctccttggagccctgcctatgtctcaccaggccagtacggggtacatgacccaagggattttccaatttcaccatcatctgcaaggtttcaagtaggagcggaggattttgatgagaggactcctgacgactttgtaaggcagtcaccaaaatatcgtcattatgaggcgcattcaccatcacatatggataatttagtctggcttccacctggtgctgtaattcagcaaaatgcaggctttcctggtaatttgagccggtccaacaatttcttggatgggagcaatggatgtgatcactgccgttcaccattccataaggttcaaggttcagtgaatgatcctatctatatgaaccctcgttggactcggccagtccaacaacattttgaccaaccaagcatgattaatgattatcccggtcaccatgctaattcttgtccagattactgccgccctggtgatcattatgtgggaggtcaagatgttagattggaaaatggtgtttatgttaaagagcaaaatggtggtcatcctcccatgttctataatgagtcacatcctcacgatagagtctggcatgtgcataccaagcaaagtcatcagcgatacgaggatccaaggctgcatcatcctgctaatggtagagtgatcgagccatacattatggatgccaacaaagtatatgaagttcattcagcatctcttgctcgttctagccatgagagtcctcactattatcacggtagcagtgaggtcataaatgacacgtatcacaaccaacaagttggaggcagtgggtcgtatgtgcagccagcagggtttgaagaatcccctagccaccattacaaccactcttcggcctatggtgcagattccttttaccaaatgcagcagaatttgccacccattcaatctctgagaaggagagcgaacagccctgttcacactgcctcaccatatgattccccacacctgccaatatcaaatgggaccattaacacaaacttcgtaagaaatacaggtgatgtcagtccgaggataccagggctacctggatatgatcgaatgccaaacacatggactcctcccaacggcagcataccatatagagttgttgggcatgatgttcatgctgcctccatggaaaacactagtgcctttggtcctaggtctaatccaactgctgctcagtatgttcagcatttcattgctcctgaatcaatccagcatcaacctggagctccattgagggaggttcatcctgaaagatcataccctgaacccatgccgtcgtcatatgttgatggcaaagtagctgtttctgcattgcctctcactgatcaattatccaggttggatacaaacacaataaagaaacctgaaggtccagatgatgttaactcaactcaaaatgtgaatgaaacaactcctttgcatgctgtggatgaaccaagtaccttaccccaccatgttgtagttgtacatgaagttgatactaagcaggggaagccaaccgaacatgaaagcaggcaaaagcaacatgaagctggggctacagcactgcaggaatgtggggatatttcagaggatagattgaatttccttcctgaattgattgcctctgttaaaaaggcagcactggaagatgctgctgagacacggatagcccaatcagatgctaatggtgctgtttcacctgttcctgatgatgatgatgataatgaaaagaagttggatgcagcagctgctggtactacagatgcaaatcaggaccctgatttgcaaggaagcattgatcggcagaagagctccaagattgagtctacaactgctgaagctgaagctttgtctaaaggactacagactataaaaaatgacgatttggaggaaattagagagctgggttcaggtacttatggggcagtttatcatggtaaatggagaggatgtgatgtcgctgttaaaagaataaaagcgagttgctttgtaggaagaccatctgagagagagcgtttgattgcggatttctggaaagaagctctgatcctaagctcactccatcatccaaatgtggtttcattttatggtgtagttcgtgatggtccagatggaagcttagcaactgttactgagtttatgatcaatggatctctaaaacagtttctgaggaaaaaagacaggacaattgatcgccggaagagagtaatattagccatggatgctgcatttggcatggagtatttgcatgggaagaatatagtccattttgacctgaaatgtgagaatctactggtgaacatgagggatccgcagcgaccaatttgcaagatcggtgatcttggactgtcaaaggttaaacagcatactttggtatctggtggtgttagaggaaccttaccatggatggcaccagagcttctgagtgggaaaagtaatatggtgtcagacaagattgatgtctattcgtttggaattgtcatgtgggagttgcttactggggaagagccatactctggcatgcgtgctgctgaaattattgggggcattgtaaacgattccctacgtcctcaaattccttcatggtgtgatcctgagtggaagggattgatggaaagctgttggtccagtgatccagctgagagaccgtccttcacggatatatctcaaaggttgaggaaaatggccgccgcaatgaatgtgaagtaaaggtccggaagccatatttgtcttcatcgcagttgatgaccctactccaagtgataatttaacaagtgctgacttcatgggagaaaatctatgtcatggagattccaaagcatgtttgatgttttcttttaatcctggagtaaaccggctaccatttgccttccgccgaaaacaagtatgctatatggcgcattgtcttgatgggagctgttgcactgtcatgtaaataagttttgacttgctggcccgtagtagatgtgcaaagtaataggcacgatcacacagttacttttttttttcccatataaattgtgttctaggataggtagaacgaacatgactggagcgatccttgttcagattgtaaagaaaaggacagacccagtgctgacggttcttatatgagtggggtctggttaaagaataaccaaaacaagtcttatacttttatcttgcagagaggttgcatcgaatctaggactttggctcggtagaaaggtttttcaccactgcgttaggcctatacttttttcagtttaaccactgtgctagacctgcccccttttttgagtttgtacttggtctaaaaataagagtatactgttttccatgtgtatatatcatcacttcctatttgaatgccccaaaaaacaagagtacactgtttgtcatgtatacaccatcacttccaaatacttgcaggcatataattttgcaggcatagtggagagtgatgggcagtgtgacgtatggctgtcgc

SEQ ID NO: 3886 - DNA, 2537 bp, Zea Mays
cccatcccttcctctcctcggtcaaaccgcctttctctcccctactcttctccctccctccccgtctctctctctctctaaaaaaagtggcgcccggagaaccgagaggccggagaaagaaaggcggaaagagggagcaaaatctcactttgctgggagttctttcctctgtttccgactcctttgttctcttagtgttcttggttggtggaatggaagctcagcagctccatttgtgttccagagatcttcgtcgttctcgttcccctcgtgtgtagcctttggaggaattcccgttcacatgatccgtgcctggacgtgacggttttgccacgctctgctgcttccctttcggggagaagaggactcgactcaaatcatttggtatcgcagacgtcgcccttcccagttcaggtgccagttgcagttgagagagatttctggcatgtccggcgcaagtaactatggatccctcatcgatgaatggttgctgccccctacaccaagcccaagaactctcatgtctagcttcctgaatgaagaattcagctctgcgccattctctggtccccatgatcaatctgaaaagagcagagaagttttgaattcgagcgatgaggttccttcacatgctgtcaaaggcccatttcaaaatggtttcccaaatttgttcagtgctaaatcaaactccaatggtggtttggcggagcgcagggctgcgagagcaggtttcagtgtcccgaaaattgatacttctcgagttggttcatccacagttattcgatctcctgtgtcaattccacctggtctaagtccaactacacttcttgagtctcctgtttttctttacaataaaatggcacaaccgtctccaaccactggcacattgccatttttgatggctacgaatgataagtcaacaatatcaccagctgccaagataactgaagattctacatttgataatgatgtgttttctttccaaccccacttaggttctgaacaaacagggttctctactgcagaaaaggactatggtgcctatgagagaaagcagtccttgtcgaatattcatcagcaggaatccagtctccagtcaagctttaccgcagtcaaggataacactagtgcaacaattgttaaagcgaagccatcttctagttccatgttcagtgatagtcactattcagctgatcaacagcaagctgacgagacaaacataaaggtgcaaggcaaaggtgtggaggctagatcagctgcttttgctcctgtatcagcgcacagtgatgcatctctcctggagtctcaagaagcacttgatgtctcctcaacactgtctaatgaagaggacgagagggcaacgcatggcactgtttctatagagtgtgatggtgatgaagctgatgctgtatctaaaagaaggaagctggaactagatgctttagaagctactgctactgctactacctccaccaccaataccatcgacatggggcctgcagcctcaagagctgtccgggagcctagggttgttgttcagaccacaagtgaggttgacattcttgacgacggttatcggtggcgcaagtatgggcagaaggttgttaagggcaatccaaatccaaggtctcactttcactaacatttcttacactactaaactgtactccatcccctgaaattagcaggcattgattcacttgtctgcaggagctactacaaatgtacaaacccgggctgttcagtgcgcaagcatgtggaaagagcatcacacgatctgaaatcagtcatcacaacgtatgagggaaagcacaaccatgaagttccagcagccagaaatagtgggcaaggcagttccagcgctccatctgcatcacaagctgttggttctcatcgtaggcaagaacctgcacaggccagctttgctcactttggtacggcctctttcagctcgttcggtctcccaccgagtggtcagttgggaccaacaactggcaatttcggcttcgggatggttccgccaggcatgacgatcccagtgccctctctaggatcacttgcccctgtaaagatggttggaaattcatcaactatgcagggctacccagggcttatggtgccgggagaaccaaaggcagagcctgtctcgcaaccacttatccaaatggcaaatgcatctccaccagcttaccaacagatattgagcaggcctcctttcggtcatcagatgtaaataataggaaagagaaaggggataatagatttgcttcagcttgtatacatgatagctacgctgcaacatggctttagtgttcatggatcgtccaattttttatttctattttatttttctgcccacgcatgtctttgaagcaaagaatgctgaggatgataccctgtcgtgcctgttgtaatcacgtaaaggatacctttcgtctttttgagactcgaaattggaaaacgaccaatcaaaatttctggttgcgaatgcaaatctgatgaattgtgctgccggacttgcagtatacaactgttct

SEQ ID NO: 3887 - DNA, 1032 bp, Zea Mays
acatgtttttaccgattaatcgtgattaaacggaaatcggcgggggctggtttttgaggggttaccggtttggtgcgttttcatttccccgccgcctccagatcacgactctgtccttcccaattctcaggcaaccccgtcgtcttccgccatgatccggttcatcctgctgcagaaccggcaggggaaaacacggctggccaagtactatgtcgctctcgaggactccgagaagcacaaggttgagtacgaggtgcatcggctcgtggtcaaccgggaccccaagttcaccaacttcgtcgagttccgcacgcacaaagttatatataggagatatgcaggactttttttctctatatgtgtggacatcaccgacaacgaattggcatacttggaatgtatccatctgtttgttgagatattggaccatttcttcagcaatgtgtgtgaacttgatttagtatttaatttccacaaggtttacttgatattggatgagttcattcttgctggagagcttcaagaaacaagcaaaaggctcctagacttctcgttccagaatccagacttcactagtacaccggctgaccggcgaccatctgtgcgcgctgtgcggttttagttccagaatccagagttccagacttcaccggcccagatttctcgtccagacacgcgcgaacaacaggtggaaggggagctacaggcaattatagagaggatgggcgagcttgagaagctggaatgaaaagaaacaatggtgtagtgtacattagcaatttagcataggtccggagctagttctgcccaatcgacaaattacctccatatttttcacaattctttgtacctgttgtgcatcatctttgcttcacttaaacctttatcaagccgtgaatcggtgtatgtctttttaacgtttcctgaggttactgagggtttttgaactgcatgtgaggattttagtttgatggcaaagcgaaagatccaccgcatgaagaaaggatatgtgtctgtatgctgatttgatgt

SEQ ID NO: 3888 - DNA, 1375 bp, Zea Mays
gtcctctgtcgctgaaggacagggagcggcagctagggtttcgcagtgcaaatattcgcggtgctgtggcggccggcggccgtcttctactatccgcggcgactgttgtctgctatccacgtgctgtggcggctggcctgtgctcctatccgcggttgccgagcaatatggattttaatgccattgggaggacattgggtgcaagatcaattgagcaaacttgtgacagcaagtgagaagagcacaacatccgttgagtctttggcaagaaaggaggacattgggtgctccattagagatatcatggcattggtgaaggagtgtggtgcagttctaggaacaaaagaacacttcatagcatctcaagtttttgtcaagagggcagagagggaaatgtttatgactttggacacactggaagaacgcttcaactggcttacaatgaaacatgattgggtcactaggatgattcactaggatctgtaattttttgtagcactgctgtgttgtaccatgcgcttgaagctgacgaagatttatttccacacccccctctaggaaagtactatgttgttgatgctggatatccaaatagggatgggtacttggcctcgtacaaaggacaacggtatcatgttccggaatggagaaatggtcctccacctaatggtgagcaagagctcttcaatcatttacactcaagtctacggaatgttgttgaacgcacatttggtgtatggaagatgaaatggagaattcttcttaagatgccaacttatcctatggacaaacaaaaaatgattgttgttgctacaatgtgtcttcacaatttcatccgtgagaatagtgcattggatgaggattttcagagatgtgatcgagacccagattatatccctactattccatcccgttataggcgacatgtccctcagaatgcatcagatacatctaccacagggtcgagtagtaggaacatgaataggttctgcgatgatgtatcgaaggtactttgggagtcgaggtgattagaaaaggtggttcgtgtcatattttggatatcgtgtcgtgctagttttatgcaatttatggattaaacatttgagaccattttatgcactaatatgatgggaatattttatatgttattgtttcatattttttctgtatatgcatcttacttattggtttgtaacaaagttgaactacaaagggtaaaacagacaatcgccacagaccaccaactttcaacatacaagaatcagtttacttgtcaaacggttttaaaaatgattctgattctctaggagaatcaggaggatcagctcctcaggaggatcatgatctggagctaaagaagctggagcttgtgcat

SEQ ID NO: 3889 - DNA, 917 bp, Zea Mays
aaacaaacgaggccaatgatggagtcacatatctagtgggcacctggcggaggcagcaagacgacgaaggtgcgccaacatcccttgagaatctccattactggcactactagcagtttatccactgggaaaaaggacgtgatgtgtttgaaaggctactgatagattctgactgggccattaacaacggcaactggctgtggctctcttgctcatccttcttctaccagtaccacagaatttactcccctattacattcgggaagaagtatgatcctaacgggaactacattaggcatttcatcccagtgctgaaagacatgccaagggagtacatttacgagccttggactgctcccactagcatccagaagaaagccaattgtattattggcaaagactacccaaaaccagtggttgatcatgagactgcaagcaaagagtgtagaaagaggatgggagaagcttatgcgttgagtcgcgttgatgccaaacctagcaaagggaagacgttgaactcacgccgaaaaatgctacatggtgaccgagacacgtctaactcaaccattgctaagcgactgaagaggaatagccgagctgagtgatgcgcagctcctcccgtgacaactttacactacttgttccaccttcagcattttttttttattttcagttgtgttacctgcatctgtcatatgtagctcgtctgacattttaccaaagtagtctgaccgtaaggaaatgacttgagcccgtagctagtgtgatatcctacactgaaggacatatctgtaatatatgctcatgtaataacaggtgtaataataataactgccgcccatgtactctaggtcttatttggaaggtgtgtgcagcaaatgaacagttcaagtgcaatccattaaagcaggtcgttt

SEQ ID NO: 3890 - DNA, 2323 bp, Zea Mays
ctcgacttgcaatatacaacacgcttgtggcctgaagaacggaagaactcggactcgagcaccccgaagcgagccaccgccgatctgctcctcctgagtcctgaccctcctccgtgcgctgcgcaggcatgaggctcctcctcgtcggcgccctactcctatgtgccaccgcggcggtggagtccaagccgcccctcgacaccctgggcatacccccgcaagatgaggcgtactacagaggcggcgtgattaaatgcagggacggatcaggcaggttctcccgggagcagctcaacgacgacttctgcgactgccccgacggcaccgacgagcccgggacatctgcgtgccctgaggcgaagttctactgcaagaatgcaggccacactccagtcacgatcttctcatcacgagtgaatgacggcatttgtgattgctgtgatgggagtgatgaatatgacagcaatatcacctgtaagaacacttgctgggaggctggcaaagcggcaagggagaaattgaagaagaaagtcgctacatacaaaagtggtgtagttattcggaatcaggaagttgagagggcaaaagaggcttatgctaaagacgaagcagagttagcaaaattgaagggtgaagagaaaatactccaaggacttgttgacaaactcaaagagcaaaagagacttatagagaaggcagaggaagaagaacgtttaagaaaagagaaggaagagaagagaataaaagaagctgaaaagcaagctgctgatgaaaagggaacacctgatgcctctccggatgtagattctaaggaaactcatgaccatgtgcaagaagatgaaaacaaggtagccgaagagcatgatgtacatgcaacggaccatgataatcatgcaacagaccatgataatcatgcagcagaaagcggagcatctgttgagcagcagggttctgtaaacaaagatgacattagcgttgaagctggaactttagatgaattgctgcacaaggagtctgcagtacctacattagagaaggatcatagctctgacaatcctgagggtttatcaagagaagagttaggtcgcatggtagcttcacgttggactggagaaagtgtaagtgaggttagtaaagatgataagaagggacatgaagatgagcaagaaataccagaacctgcaaaagaagcacttgaagacgaattagaaattccagaacctgctgaagaaaattatgatggttatcattcagaagttgaggatgacaggcataaatatgaagatgaagagtttgatcatgagtcagaagatgaatatgttgatgaccatgatgagcatgttgagtcctataaatctgatgatgaccagaaagatttaactgagccaggacatgcatcgtggttggacaaaattcagcagactgtacagaatgttttccaaaaattcaacttttttaggacccctgtagatttgtcagaggcttctcgtgttcgtaaggagtatgacgatgccaactcaaagctttcaaaaattcagtctaagatatccaatttagctgagaagctaaaacatgattttggcaaagacaaggagttctattccttttatgatcagtgctttgagaccaaggaaggaaagtatacttacaaggtctgtgcatataagaaagcatcacaggctgaagggcacagttccaccaacctggggagatgggacaaatttgaagaatcgtacagagtaatgcacttttcaggtggagacaaatgctggaatggtcctgaccgaagcctaaaggttaggcttagatgtgggctgagcaatgagcttaatgacgttgatgagcctagcagatgcgagtatgttgctgtattgtcgacgcccgcactctgcgtcgaggagaagctgaaggagctgcaaaacaaactggatgccatgtcttcgaagcagcccgggcatgatgaactttaaacggttccggcgtggacaaagaaaatttcaccaggaagcatagattgacagttacactcataaccttaagggtggaagtcaatgggggcatatggacaggaaagggccaagctgaagaaatgggaatgctcatcccgagttgtttggtggaggcgactgcaaccgtgcttttctttgtggtttaacattgctctatttaattagggagagacgctaggcttttgcgtctccagcttcattgccagccattacacatttgatggaatatatagtaagaaacagtacactctgaaccatcataatttgaagatgctagttaaccccgggttgttacatgatacaagtactttgtt

SEQ ID NO: 3891 - DNA, 1931 bp, Zea Mays
ggaattatattaccaaaaaaaaaaaaatatgccacaacatcagtatcacatgtggtgcagaggagcgtactttttgatggacaattgaaagaaaaaagaaatagtttaaggaggtttctagaagcaacgggtttcataactgaccatgagagggcattggaagaactttttagtgaaaatgcagaaggatctcacaagtataatgcttgtctgaacacaatggctactcgtatatccacagtatttgcatcaatgagggaattccctcgtgtacactaccgtattgccaagacgattgatgcttctacaatgacaacactacgagacttagtccccacaaagcttgctgccagtgtatggaattgtcttgcgaaatataaaacgacaatacctgaatttcctcaaacagaaacttgtgagctacttatagtagaccgttcaatagatcagattgcaccaattattcatgaatggacttatgatgctatgtgtcatgatctgctttgtatggatggcaacaagtatgttcatgaggttccaactaaaaatgggtcggcaactgaaaaaaaggaggtcctgttggaggatcatgaccctgtctggcttgagcttaggcatgcacatatagcagatgcaagtgagaggctacatgataagatgaccaacttcatttcaaagaacaaagctgcacaattgcatcaagcacgaaccgatggagaattatcgacaagagatttacaaaaaatggttcaggctcttccacagtacagtgatcaaattgataagctttccctgcatgttgaggatcatcgcacacgggctgtgattgggactggccgtcgtcgtgattgcaggaaaactcaataacataataagggaacaatgtcttcgggatgttggacagctagagcaagatcttgtgtttggcgatgctggaaccaaagaactaatcaactttttgagaacacaattggttgtaagtcgtgaaaataaattacgcttgctgatgatttatgcagcacttaacccagagaagtttgaaagcgacaagggtgcaaaattaatgcagttggcaggattatctgctgatgacatgattgctgtaaataatatgcgttgcttatgtgggcctgataccaaaaagtcttcagtagggggttttacactgaaatttgatgttcacaagaagaaacacacaaatcgaaaagagcgaacaggggaagaatcaacatgggcactctctcgattttaccctattttggagcaattgattgaaaatcttagcaaaggtgagctgccaaaagatgaatataactgtatgaatgaccctagtcctactgttcatggactgccaaccagtagctctgcccgaacaagccccgctcactcaatgcgatccagacgaacaggtggcacatgggcaagacctcgtggctctgatgatggatattcaagtgattctgtgttgaagcatgcctccagtgacttcaggaaacttggtcagcgtatatttgtttttgtaataggcggtgctactcgatcagagttacgtgctgcacacaagctttcatccaagctgaagcgagacatcatccttggttcatctagccttgatgatcctccccagttcatcacaaaattaaagttgatgtcagtagaagaattgacacttgatgaccttcagctgtaaatggtgtccgcccacacggagtgtaaccttttattttctctgttctgtcagctcttatttgtgggggcctgtcatattcattcggtgaaatgcattcttaataccacttttactggtgaatgtaagaaaaaaactgttatgcaattaatcttttcatgcaattattgtgcaaccaaaataccagaagtcatgagaagttctcaaaattttattgatgaattttatttactcaatcgatcta

SEQ ID NO: 3892 - DNA, 2571 bp, Zea Mays
aaaaaaaaaaaaacagcatcagggcggtagcgtaatttccctggccggttgcggccgacgacctcttcgagagaacgaacgattcttcctcccgtttgcttcccctgcccgcactctgcctcgtcaatctcgctccgcgtcccgcttccgctgttgctttcgtcgccatctcgctccggtccccgccgctgctccaagtgggagccaagtcatctctctggccgaagatccaggttgagtcggcgtcgccggcagaggcaagagactccggcgcgatgtcgttggactcggaggcttcctcgcagggtggggactaccgtagcttccgccagatcacgcgagatcgtttattatttgaaatgctcagatcaactaggaagaattcgaaatcaacatggaaggttcttatcatggataagtttacagtcaagattatgtcatatgcatgtaagatggcagatattacagaagaaggtgtttcattggtcgaagatttatataaacggaggcaaccattgccttcactggatgccatatatttcatccaaccaactaaagagaacattgtcatgttcctatccgacatgtcaggaagaagccctttgtacaagaaggcatatgtgtttttcagttctcccgtacataaagaattagttgctcaaataaaaaaggattcaagtgtactacctcgtattgccgcacttagtgagatgaatttggagtactttgctattgattcccagaggagcgtactttttgatggacaattgaaagaaaaaagaaatagtttaaggaggtttctagaagcaacgggtttcataactgaccatgagagggcattggaagaactttttagtgaaaatgcagaaggatctcacaagtataatgcttgtctgaacacaatggctactcgtatatccacagtatttgcatcaatgagggaattccctcgtgtacactaccgtattgccaagacgattgatgcttctacaatgacaacactacgagacttagtccccacaaagcttgctgccagtgtatggaattgtcttgcgaaatataaaacgacaatacctgaatttcctcaaacagaaacttgtgagctacttatagtagaccgttcaatagatcagattgcaccaattattcatgaatggacttatgatgctatgtgtcatgatctgctttgtatggatggcaacaagtatgttcatgaggttccaactaaaaatgggtcggcaactgaaaaaaaggaggtcctgttggaggatcatgaccctgtctggcttgagcttaggcatgcacatatagcagatgcaagtgagaggctacatgataagatgaccaacttcatttcaaagaacaaagctgcacaattgcatcaagcacgaaccgatggagaattatcgacaagagatttacaaaaaatggttcaggctcttccacagtacagtgatcaaattgataagctttccctgcatgttgagattgcaggaaaactcaataacataataagggaacaatgtcttcgggatgttggacagctagagcaagatcttgtgtttggcgatgctggaaccaaagaactaatcaactttttgagaacacaattggttgtaagtcgtgaaaataaattacgcttgctgatgatttatgcagcacttaacccagagaagtttgaaagcgacaagggtgcaaaattaatgcagttggcaggattatctgctgatgacatgattgctgtaaataatatgcgttgcttatgtgggcctgataccaaaaagtcttcagtagggggttttacactgaaatttgatgttcacaagaagaaacacacaaatcgaaaagagcgaacaggggaagaatcaacatgggcactctctcgattttaccctattttggagcaattgattgaaaatcttagcaaaggtgagctgccaaaagatgaatataactgtatgaatgaccctagtcctactgttcatggactgccaaccagtagctctgcccgaacaagccccgctcactcaatgcgatccagacgaacaggtggcacatgggcaagacctcgtggctctgatgatggatattcaagtgattctgtgttgaagcatgcctccagtgacttcaggaaacttggtcagcgtatatttgtttttgtaataggcggtgctactcgatcagagttacgtgctgcacacaagctttcatccaagctgaagcgagacatcatccttggttcatctagccttgatgatcctccccagttcatcacaaaattaaagttgatgtcagtagaagaattgacacttgatgaccttcagctgtaaatggtgtccgcccacacggagtgtaaccttttattttctctgttctgtcagctcttatttgtgggggcctgtcatattcattcggtgaaatgcattcttaataccacttttactggtgaatgtaagaaaaaaactgttatgcaattaatcttttcatgcaattattgtgcaaccaaaataccagaagtcatgagaagttctcaaaattttattgatgaattttatttactcaatcgatcta

SEQ ID NO: 3893 - DNA, 1644 bp, Zea Mays
caaaagtgggaaacgcacacgcatccggaacagagcaacaagagccagaaatatcttcgccactcctgcgcttttgcgctttttctccccccgcaccccagaaccagcacgccggtcctcctgatggccgccgccggcgagggcgaggctgagcgtgtgtcagcgctgctgcgggaaataacgggggagggcgggttcgctttcgttgcctcggcggagaaggcgggggcgggggacctgcgcgcggcggaggcggcgcgggagatggcgtgggagcagctccactcgggcccctggagcgaggtcggcaccgcctggagggacgcctacgcgctcgcctgcctcaacgtcgcgcggctccgcacccacgcggccagcggcggagatagcgaccgctccgcggcgctccgggcactcgacatggggctcatcatgggaggcaacctactgcgcgccgacctcgaggcggcactggcgcgcatctccgcggaagcgtgtggcggaagcgaaggtggcgagggggtcgtggataaggagaaccagaggtggagggaagcgctcgacaggaaccgagacatcgctgatgcactgaaaattcttccagcgaactctttatcctgtaagaaagttgagaggcgatcatgcatttccttggaggagttcatatgtaattactttttgcgcgacacccccgtcataattagtggcaccatcgaccattggcctgcaaggacaaaatggaaggacattgagtacctcaagaagattgctggagatcgtactgttcctgttgaagttggaaagaattacgtgtgtagtgagtggaagcaggagcttatcacattttctcagttcctggatagaatgtcgtcaactgtctgtccatcaaacttgacatatctggctcagcatccattgtttgagcagataaaagagctcagtgaagacataattgttcccgaatactgttacgctggtggaggtgcactccaatcacttaatgcttggtttggtccagaggggacagtgacaccattgcaccatgatccacatcacaatatcttagctcaggtattgggcaggaagtatattagactctatcctgctttcatagctgaggacttgtatccacacacagagactatgctaagcaataccagtcaggtagatcttgacaacattgatttgaaggagtttccaagggttgaaaacctggaattcattgactgcatattggaggagggcgacctgctttacatccctccaaaatggtggcactacgtcagatctctctccaccagtttctcggtgactccgcttttgaatggatgtacacacgtcatcaccaatgtccattgttagttttacttttaccacagtgattaaaatgttgaaattgcttatatgccgaccatcatgctatcatgtgattcttgaaagcagaggttgaaggatgtcttcactgctacaatgtcaaattcttgaaattgtaaaggtggacttactagctccgagaatttaatttagatgtattctcgatctgactaaataggtagataaaagtattaatttttataacatcaaatatatattatataagtatgtttcattacgaacctaatggtatttattttgtatgataag

SEQ ID NO: 3894 - DNA, 1934 bp, Zea Mays
atgaataaagacatccttgtagcagccgatgaccacgaaggtggtctctgcctgcccaaatcaagcgctcgcctgactcaggagtcaggagtcgggtacaacaaggcgtcatcactatccttttctgctgaatccagaagacaaatacactactgccgtgcccccctcccttctctctctcttcgccgcagcgtcagccgacggcaaaaccctagatctctctccctcttaaaccctctcaacaagtgcgggaggatgtcagagccgtccaaggtaatccacatccgcaacgtcgggcacgagattgccgagtctgatctccttcagctgctgcagccgttcggcatggtctccaagatcgtcatgttgcgtgccaagaaccaagctcttctgcagatggaagacctccatgcttccgtgagcgcgctgcaatattacacttctgttcaacctagcataaggggaaggaatgtatacatgcagttctcatctcaccaagagcttaccactgaccagagctctcatggaaggaattctgatcagtggagattctacatcaagtattcaaagcttatggatttgtggagaagattgtcacatttcaaaagtcagctggttttcaagctcttattcagtatcactcgcgccaagaagctgtggaagcatttggttctttgcatggaaggaacatatacgatggttgctgccaactagatattcaatattcaaatctcagtgaactgcaagtccactacaacaacgaccgatctagagatttcacaaatccatcgttgcctacagaacaacgtcctagggcctctcagcaaggttatcttgacccagctaatctctatgccttccaacaagctggagcttcatatgcacagatggggagggttgcaatgattgcggctgcatttggtggaactttacctcatggagtgactggtaccaatgaacggtgcacactcatcgtcagtaatctgaatactgataaaattgatgaggataagcttttcaatctgttttccttgtatggaaacatagtacgaatcaagatactgcgtaacaaaccagatcatgcacttgttgagatggctgatgggttgcaggcagagctagctgtgcattatttgaaggggtctatactatttgggaagaaactggaagttaactactcaaagtatcctaacatcacacctgctcctgacgcccacgactacttaaactcaagcataaaccggttcaacagcaacgtggtcaagaactaccgacattgctgctctccaacgaagatgatccacatttctgccctccctcaagatatctctgaggaagcaatcctgaaccatgtgtctgagcacggcactgttctcaacacgaagctattcgaggtgaatggcaagaggcaggctctcattttgttcaagagcgaagaggaggctaccgaggccctcgtgtcaaagcatgccagcacgctcgagggtaacacgatccggatctctttctcccagatgcagagtatataagccacctcaagggaaagcccctgccgtcctcactcgccccacttcgagctctatttaggaagcatttcagactaagatgtgaatcctgtgcaccattctccaagactgatgctgtctgagctgtacctcccctgaccttgttttttttttcacgcaacactggactttcaccaaaaggtttgtgtttctttccaaatcctgttggttaggatatcatttactccttaatcttcatgtcctgacattctaagttggaaggcctgttaattgcgtgtgaattatattatccttttgcctgtttggcatgtttaatgtaccctctagtgcagctgaaacttacctgcaactgcgattgcgattgacttattatgagcaattgcgatggtaggctaggtgttacaagag

SEQ ID NO: 3895 - DNA, 1030 bp, Zea Mays
tgatctagcccgtccgaaggaaccacttcacactactctccgcggctctgccgtccgttctcctctcgccgccgccggccgcgcctccaccctcgcggcactcgcatggcggcgccggctctccgtatcactgcgcggctgggacttgcacttgacggtgccaccgccgcgagacggcgcgaggcctcggcgcctgtggcggtgccggccgcgccgtggctgaagaaggcggcggtccggtgtcagcgagccgtcggtgccgctgttgccgagaagaaggatgcgccggtatcggttgcgcaggatagaagcggcgacgggggcgcggcgccggagctcaccgtcgtgatgaagttcggcgggtcgtcagtggcctcggccgagcggatgcgggaggtggcagacctcatcctcagcttccccgaggagcacccggtcgtcgtgctctcagcgatgggaaagaccaccaacaaactcctcatggctggggaaaaggcagtgggctgtggtgcgaccaacgtctcggagcttgatgagctctcctttgtaaaggaattgcatcttgggacgcttgatcagcttgggctagatagatcaattgtttgtggtttgttggatgaacttgaacaacttcttaagggaattgctatgatgaaagagctgactcttaggacacgagattatctagtttcatttggtgaatgcatgtctacaagaatatttgctgcacttttaaacaaaattggagtaaaagctcggcagtatgatgcatttgatcttggctttataactaccgatgatttcacaaatgcggatattctggaagcaacttatcctgctgttgcaaggaggctacatgtggaatggattaatgatcctgctatacctatagtcactggctttcttggcaagggatggagatctggtgcaataactaccttgggcaggggtggtagtgacttgacagctacaaccattggcaaagccttgggattaagagaaatccaggagttactatccattggcccaa

SEQ ID NO: 3896 - DNA, 2242 bp, Zea Mays
tgatctagcccgtccgaaggaaccacttcacactactctccgcggctctgccgtccgttctcctctcgccgccgccggccgcgcctccaccctcgcggcactcgcatggcggcgccggctctccgtatcactgcgcggctgggacttgcacttgacggtgccaccgccgcgagacggcgcgaggcctcggcgcctgtggcggtgccggccgcgccgtggctgaagaaggcggcggtccggtgtcagcgagccgtcggtgccgctgttgccgagaagaaggatgcgccggtatcggttgcgcaggatagaagcggcgacgggggcgcggcgccggagctcaccgtcgtgatgaagttcggcgggtcgtcagtggcctcggccgagcggatgcgggaggtggcagacctcatcctcagcttccccgaggagcacccggtcgtcgtgctctcagcgatgggaaagaccaccaacaaactcctcatggctggggaaaaggcagtgggctgtggtgcgaccaacgtctcggagcttgatgagctctcctttgtaaaggaattgcatcttgggacgcttgatcagcttgggctagatagatcaattgtttgtggtttgttggatgaacttgaacaacttcttaagggaattgctatgatgaaagagctgactcttaggacacgagattatctagtttcatttggtgaatgcatgtctacaagaatatttgctgcacttttaaacaaaattggagtaaaagctcggcagtatgatgcatttgatcttggctttataactaccgatgatttcacaaatgcggatattctggaagcaacttatcctgctgttgcaaggaggctacatgtggaatggattaatgatcctgctatacctatagtcactggctttcttggcaagggatggagatctggtgcaataactaccttgggcaggggtggtagtgacttgacagctacaaccattggcaaagccttgggattaagagaaatccaggtttggaaagatgttgatggtgttttaacatgtgacccaaatatccatcctaaggcaaaacctgtgccatacttgacatttgatgaggcagctgaacttgcctattttggagcgcaggttttgcatccacaatcaatgcggccagctagagaaggcgatgtacctgtgagggttaagaattcttataaccgtcgagcccctggtacccttatcactaaagcaagagatatgagtaagactgttttgactagcattgttttgaaatcaaatattacaatgcttgatatagtcagcacacgcatgcttggccagtacgggtttctagctaaggttttttcgatatttgaagacttgggcatctctgttgattgtgtggctaccagtgaagtcagcatatctttgacactggatccatcgaaactatggagttgtgaattggttcagcacaaaaatgtttgggcatcaatttattcattgaacttgatgatgtcattgaagagcttgagaagatagcagttgttcatctactgcagaacaggtcaataatatctttaattggaaatgtgcagaggtcgtctttgattcttgaaaaggctttcaatgttctacgaagaaacggtgtcaatgtccagatgatatcgcaaggggcgtccaaggtgaacatttccttggtggtccatgacagtgaggcaaaacagtgtgttcaagccctccactccgcgttctttgagaatggtttcttgttggaagctgatgagttggatgttctgcatgatggctttacatcgcattccaatggcacaatccacagccattagccgaggatttgatattcatctgtttggctactgtagtgccacttgtgatcaaatcctgatctttggtcgatatctaatgtttttatgaggctacgaaggattcggctttagagctactacccatcagaagtctaggaatttgttcagagccactacttaggattttggttagagattaatgatactgtttggttttctgtacaattgattgaaagtatatacttagttatcttggccaacctatcaaaccacggaggatgcaagcggatttgtccgtaaacctttaaggttagtttggaaacctcatttttgcaagggaaattagttcatttttttttgtgaaaataggaatcccaaaatggagtttctaaactagccataattgttacatgttactacataagccacaaaaaaaa

SEQ ID NO: 3897 - DNA, 1768 bp, Zea Mays
  misc_feature (1768)..(1768): n is a, c, g, or t
atttctccgtgagcggaagatccgatcaccacttcggcgccgcgcgtccgaaccccaacccaaccgcgctgtctatcctcctcctccctttccgcacttggtccggcgatcctgatcgaattggaaccgccttcacccccacccagtgcagtgctcgcgtgctccgctctgcgccggcagcccgcccggaccggaccaggccgtctctgcatttgcgcggatccgccggcgcggtccctgattcgggccgcgctctcgcagatgatggtggcggagaagcccgcgctggggttccaggcgcacggggacggggacgacgagctggagctggagctagcgtcgccggcgccgccgccccggaagatgcactcgctggaattcgagcacatcggctcgctcgccgccgtggccgagtcgctcgcgcccgggagcaggtggcagagggcgctcaccagcgtgcgcgtcgtcatcttccaggccaagatcaacgtgctcctccccttcggcccgctcgccatcatgctccactacctctccggaacgcaccaaggatgggtttttcttttcagcttaatcggcattaccccgttggccgagagattgggatacgcaactgagcaacttgcttgctacactggcccaacagttggggggctactgaatgctacatttggaaatgcaacggaaatgattatatcaatatacgcactgaaaaatgggatgattcgggtcgtccagcagtcactactaggctcaatattgtcaaatatgctgctggttcttgggtgtgctttctttgctggtggtcttgtccattctgacagggaccaggtcttcaacaaggcatcagctgttgtaaactcaggactactgttgatggctgtcttaggccttatgttcccagcagtgcttcatttcacacattcagaagcgcagtatggaaaatctgaagtagctctttcaaggtttagcagctgcatcatgcttgtggcctatgctagctatctattttttcaactaaagagccaccgcagtatgtacagcccaattggtgatgaagaagccgccgctgaggaggaggatgaaaaggagattacacaaggggaagccatctgctggcttttcatattgactatttggatttcagtactctcagggtacctggttgatgccattcagggtgcgtctgattcattaaacttgccagtggcctttattagtgttattctgcttcctattgtggggaatgctgctgaacatgcaagcgccatcatgtttgccatgaaaaacaaattggacattacattgggagttgcgatagggtcatcaacacagatctccatgtttgtgattccattctgcgtggtaattggctggatgatgggacaagaaatggacttgaattttcaactgttcgagacagcgactctctttataactgtactagtggtggcattcatgctacaggaaggcacatcaaactattttaaaggtcttatgctcatcttatgctacctcatagttgctgcaagcttttttgtccatgtcgaccctgatgcaacatacctgtgaactgaatggagaggctacgacctaactgcagagttagccaatagcattgccctgcgtagacaaggacctgcaagagtcctgaatttggaagcaacttgtgggcagaatctcggaccgagggtttaacttggggctcaagattacaaggagctgatgcagcttttttaggatagcaacagcatcgcccgttgaggan

SEQ ID NO: 3898 - DNA, 1322 bp, Zea Mays
atgcgcgcgaaggggcgcgtaagatactagtatttctctctctacgggagttccctctccttcggtccttcgcgagtccaatggccgcctcgccctcttcacccttgacagcgccgccagagccggtgaccccgccgtccccatggaccatcacagacggagccatctctggcacgctcccagcagccgaggccttcgcagtgcactacccgggctacccctcctctcccgcccgcgccgcccgcaccctcggcggtctccccggcctcgccaaggtccggagttccgatcccggcgcccgcctcgagctccgcttccgccccgaggacccctactgccatccagcctttggccagtcccgcgcctccactggccttctgctgcgcctctccaagcgcaaaggagctgcggcaccttgtgcccatgtggtcgctcgtgtccggactgcttactacttcgaaggtatggcagattttcaacatgttgttccagtgcatgctgcacaaacaagaaaaagaaaacactcagattctcaaaatgataatgagaattttgataagacaggacatgatgaagcagatggagatgtcatgatgttggtaccccctctcttttcagtgaaggataggccaacaaagatagcgcttgtaccatcgtccaatgccatatctaaaaccatgcacaggggagttgtacaagaacggtgggagatgaatgttggaccaactctggcgcttccgttcaacactcaagttgtcccggagaagattaattgggaagaccacattagaaagaattctgtagaatggggttggcaaatggctgtttgcaaattgtttgatgagcgccctgtgtggccaaggcaatcactttatgagcggttccttgatgataatgtgcatgtctctcaaaaccaattcaaaaggcttctgtttagagctggatactacttctctactggaccctttggaaaattttggatcagaagaggatatgaccctcgtaaagactctgagtcacaaatatatcagagaattgattttcgcatgcctcccgagctacgatatcttctaaggctgaagaattctgagtctcgaaagtgggcagatatgtgcaagcttgaaacaatgccatcacagagtttcatctacctgcaattatatgaactgaaggatgattttattcaagcagaaattcgaaaaccttcttatcaatcagtttgttcagatcgcaaaacaggggatgtgattgggactggccatcgccgtaaatcttcgcctcgcctctacatcttggacactttgcgtcttctttcatcccct

SEQ ID NO: 3899 - DNA, 978 bp, Zea Mays
tctctacagttccgaggcccaggcctaacacatgacttccttcattcttgcctcagaaatattaatatttatgctacttgcctgaagagatgaggaacccagattcgttcaagtggatgctgcagaatccaatgtaccggcaacaactacaggatatgctaaagaacatgggtggatctcctgatcaatgggataaccgtatgcttgatcacctgaagaactttgaccttagcagtccagaagtgcggcagcagtttgcgcaagttggcatgactcccgaggaagtggtatcgaaaataatggcaaacccagatgtagctgtcgcattccagaacccaaaaatacagacagccatcatggactgctcgcagaaccctcttaacattgtaaagtaccaaaacgacaaggaggtcatggatgttttcatgaagatatcacagatctttccccaaatcaacggctagctggtcttcactgcgggattgcagtcttgattttttttgtcggcctatcatcccctgtgtctggagggcctgctgcggtaaccatctttgaaggaaaagggaacacctgttgctgttgggccgtgacgctctggatacaccctccctgtgtcgagctttttgagtttcatatgtagtagtacatcgtgtgatgtagcggccttggtctagctatgagtatgattgacccaccctcttcccgcttcataaagtcaggctagtgagcgtagcaggggcaaatatttgttatttacattgcatgggcagccagccggtctgcgctctgacgttgcatggtttatctcgtaggatgtgaaaggcgcagcagacagacatggttcgtatcagatcaattttgatatatactaattgctattgttagtgtgtaatacgtcagtgacacaatggcaatgcaagtaatctgtttcgagacttgctgaccatgtttgaccagggttgcgatgcaacgtattcc

SEQ ID NO: 3900 - DNA, 3266 bp, Zea Mays
aagttgggttgtccgttgtcatggagccattggagtacaagtgagcatactacctgaggacgcaaacctacctatttcagtagattggttagagttttctcacttgaggatggcccatgtggtaacatctggggagccattggagtaccagtgagcatactacctgaggacgcaaacctacctatttcagtagattggttagagtttgtttgcattatttctgcagctatgatggcatacttgtcaattctattgaggcaagaccagtattctcaagtcttctgcatgagcctttcaaatctatacctatcatttggactgtgcatgaatattctcttgcacatcgtgctaaagaatataatgtgagtggaatgattcagctcataaatgcttggaaagatgtattcagcaggacaaatgttatagttttcccaaactatatattaccggtgatgtatgctgcatttgattctggtaactatttcgtgattccaggccccccatcagaagcatttcaggttgacagctttattgctaaaagttaccacgaagacgtgaagatcagcttgggcttgaatcctaaagattttttaattgctattgttggtaattcattttcatacggtgataatttgatggaagaggcacttgtcttgcaagcattgagtcctctgttacagagatatcgctctgagaatagcgcacaatctgaactgaaagtaaagatcttcactgggaacataactgagaagcataggatggcccttgaggtttatttatgtcttcatgccctgtctgatcaagtgaactgttacttacagtctgagtgctttaaattgtatctaaccgtgtattagttttctgatttctgatagtctgttgctctaagtgttggcttcccaagaggtgcagtggagcatgttgctgctgaagataaggacaacctccttggtacagctgaccttgttatatattattcttgtctcgaggagcaattattccccagtgtgctagtccaagccatgagtcttgagaagctggttatagccccagaccttgcaattattagaaaacatatcaatgatggagtaaacggacttctgtttccaagaaagaatattggcatgttagctcaagttcttcttcgagcagtgtcaaatagtaaagtgtctctttcagggcaaaaaattgcttcagctgggaaggctcatgccaagaatcttatggcttctgagaccattgaaggctatgctatgctattgaaaaatgttgtcaagctccccactgatgcactaagccctttaactgctgatgagatacctttagctctgaaacaagagtggaaatggcacctatttgacgacgtgaagcatttacaccgtgtgaatacgagtttgtctggctacaagatactccagaaactagagcaggagtggcatagcaaccaaatggaaaactcttctttgagtacaaaaaatatcaatgacgcattctctgcaattgcctgggaggaacagagagtaaatgaggttatggacatcaaaagaaaaatggaggaagacgagttgaaggacaggaatgaccaacctcatggaacatgggaggaggtgtacagaaatgtgaaaagggtagagaggttaaaaaatgaattgcatgaaagagatgacaaggagcttgagcggacaggtcagccactttgtatatacgaacctttctttggggaggggacctggccctttctgcaccagagctctctttatcgtggagttggtctgtcttcaaaaggtcgaagaccaggagcggacgatattgatgcttcttctcgtcttccacttctcaataatgtttactacagagatattcttggtgaatttggagctttctttgctcttgccaacagaattgacagaatacataaaaattcttggatagggtttcagtcctggagagctacagcaagaaaggcaaacttgtcaaccaatgccgaatctgcaatcttagaagccattcaatctcaaaagcatagagattccttttatttttgggttcggatggatcaagatccaagaaaccacgctaataaagatttttggtccttctgtgacgtgatcaatgctgggaactgcaggttagctgttctggaggcctttcaaaggatgtatggtgtacatcttgatcgtgacctggatactctgttacatatgcctaatgatggagacacgtggtctgtgatgcaaagttgggttttgcctacacggtcattcctagaatttgttatgttctcaagaatgtttgttgatgcactggatgcacaaatgtatgacaagcaccatcaaactgggcattgcatcttgagtctccacaaggaccagcactgctactcccgtcttctggagttgattgtgaatgtttgggcattccacagtgcacgacggatggtctatgttaatcctgcaactggtcaaatgcaggagcagcaccatctcagcggcaggagaggtcaaatgtctgtgcagtttttctcctacgccactctgaagagcatggacgaggagcttgcagaagagtttgacttggatcacccagacaggaggtggctctggccacaaactggagaggtcttctggcagggtctctatgagagggagcgtagcatgcggcagcatgagaaggagcggcggaagcagcagagcagagagaagatccagagaatcaagagtagagctcggcaaaagacgttggggaagtatataaagccaccacctgatgatacagttgtctcgaacgatacaacgactgtagatttatagcattttgaccatactttagggtgataattcttaccgtggaaaattttggttcattctttcattgttacggctaatgtcctcggtcctcactgagtacccccggcaggtgtgaatatttttggtcagttttatcgtgccctctggtgttcagggtgctttacaggcgattttgtaacatatctaggccattaagtttaaatttgggttcccgtagcgtagatgcttttgttcttttcgcttacgagcttctcaataacaggcaacagctgctccgcgtttgcagtctccttggtacaaattgagttgacttgattgtgtcagtctgtcagatatttggttgaacctgcgctattatctacgtttcggtgttgagaattttgttcaacatcctgtaacatgaaaaaccacattatatcttcgattgttttggtgtcttacacaaaatctgtcattatg

SEQ ID NO: 3901 - DNA, 3746 bp, Zea Mays
tatttcagtagattggttagagtttgtttgcattatttctgcagctatgatggcatacttgtcaattctattgaggcaagaccagtattctcaagatgtttgatttggaccatgtgtctgtggcttcctacagtcttctgcatgagcctttcaaatctatacctatcatttggactgtgcatgaatattctcttgcacatcgtgctaaagaatataatgtgagtggaatgattcagctcataaatgcttggaaagatgtattcagcaggacaaatgttatagttttcccaaactatatattaccggtgatgtatgctgcatttgattctggtaactatttcgtgattccaggccccccatcagaagcatttcaggttgacagctttattgctaaaagttaccacgaagacgtgaagatcagcttgggcttgaatcctaaagattttttaattgctattgttggtaattcattttcatacggtgataatttgatggaagaggcacttgtcttgcaagcattgagtcctctgttacagagatatcgctctgagaatagcgcacaatctgaactgaaagtaaagatcttcactgggaacataactgagaagcataggatggcccttgaggtttatttatgtcttcatgccctgtctgatcaagtgaactgttacttacagtctgagtgctttaaattgtatctaaccgtgtattagttttctgatttctgatagtctgttgctctaagtgttggcttcccaagaggtgcagtggagcatgttgctgctgaagataaggacaacctccttggtacagctgaccttgttatatattattcttgtctcgaggagcaattattccccagtgtgctagtccaagccatgagtcttgagaagctggttatagccccagaccttgcaattattagaaaacatatcaatgatggagtaaacggacttctgtttccaagaaagaatattggcatgttagctcaagttcttcttcgagcagtgtcaaatagtaaagtgtctctttcagggcaaaaaattgcttcagctgggaaggctcatgccaagaatcttatggcttctgagaccattgaaggctatgctatgctattgaaaaatgttgtcaagctccccactgatgcactaagccctttaactgctgatgagatacctttagctctgaaacaagagtggaaatggcacctatttgacgacgtgaagcatttacaccgtgtgaatacgagtttgtctggctacaagatactccagaaactagagcaggagtggcatagcaaccaaatggaaaactcttctttgagtacaaaaaatatcaatgacgcattctctgcaattgcctgggaggaacagagagtaaatgaggttatggacatcaaaagaaaaatggaggaagacgagttgaaggacaggaatgaccaacctcatggaacatgggaggaggtgtacagaaatgtgaaaagggtagagaggttaaaaaatgaattgcatgaaagagatgacaaggagcttgagcggacaggtcagccactttgtatatacgaacctttctttggggaggggacctggccctttctgcaccagagctctctttatcgtggagttggtctgtcttcaaaaggtcgaagaccaggagcggacgatattgatgcttcttctcgtcttccacttctcaataatgtttactacagagatattcttggtgaatttggagctttctttgctcttgccaacagaattgacagaatacataaaaattcttggatagggtttcagtcctggagagctacagcaagaaaggcaaacttgtcaaccaatgccgaatctgcaatcttagaagccattcaatctcaaaagcatagagattccttttatttttgggttcggatggatcaagatccaagaaaccacgctaataaagatttttggtccttctgtgacgtgatcaatgctgggaactgcaggttagctgttctggaggcctttcaaaggatgtatggtgtacatcttgatcgtgacctggatactctgttacatatgcctaatgatggagacacgtggtctgtgatgcaaagttgggttttgcctacacggtcattcctagaatttgttatgttctcaaggtatgggttttgtttttaggaatcttactgacaatcaagcaagtgttattacatgtataactagataaaatatgtatgcactggtttattatctgatgttatatgcatatatcaaacatactgtgaatgagcacttggatatagctgatctaagcatatttatgtcagcattgctagcagtatattgctaatgataatttggggttgtgtactttgtggaaaaattacctgttaaagcacagccttgctttaattgactcggggtccaaaaaagattagttttcaactagtatctggtcatttgatcatttcgaaggattatgttgttataacaggcatccagcatcctagatgtcaacaaggttaaagtctttttggtcgctatttgcttgcttacattgttctatgttcattccttttacctgataggactgtcatatgccatagaaattcaggcttttctatatgcttcattagggctagtttgggaactccaattccccaagggatttctattttcttaaaggaaaataaactaatttcccttggaaaaatgaaaaccccttagaaaaatgaggttcccagattagcccttagtgtttacattatgctgttgattttcagaatgtttgttgatgcactggatgcacaaatgtatgacaagcaccatcaaactgggcattgcatcttgagtctccacaaggaccagcactgctactcccgtcttctggagttgattgtgaatgtttgggcattccacagtgcacgacggatggtctatgttaatcctgcaactggtcaaatgcaggagcagcaccatctcagcggcaggagaggtcaaatgtctgtgcagtttttctcctacgccactctgaagagcatggacgaggagcttgcagaagagtttgacttggatcacccagacaggaggtggctctggccacaaactggagaggtcttctggcagggtctctatgagagggagcgtagcatgcggcagcatgagaaggagcggcggaagcagcagagcagagagaagatccagagaatcaagagtagagctcggcaaaagacgttggggaagtatataaagccaccacctgatgatacagttgtctcgaacgatacaacgactgtagatttatagcattttgaccatactttagggtgataattcttaccgtggaaaattttggttcattctttcattgttacggctaatgtcctcggtcctcactgagtacccccggcaggtgtgaatatttttggtcagttttatcgtgccctctggtgttcagggtgctttacaggcgattttgtaacatatctaggccattaagtttaaatttgggttcccgtagcgtagatgcttttgttcttttcgcttacgagcttctcaataacaggcaacagctgctccgcgtttgcagtctccttggtacaaattgagttgacttgattgtgtcagtctgtcagatatttggttgaacctgcgctattatctacgtttcggtgttgagaattttgttcaacatcctgtaacatgaaaaaccacattatatcttcgattgttttggtgtcttacacaaaatctgtcattatg

SEQ ID NO: 3902 - DNA, 911 bp, Zea Mays
ccgcacccgccaccaccccagatcccctggcgcgatgtgagggaacggcaaccgtgcggcttcacacctgccacaaccccccgatccgcgaccagaagagctcgagtcgcgcgtcggcacaggtgagtcgtcctgctcctctccccattcagccctcaacaacatcgggatggccgatggggaggacatcggccacgcgagacctcaacaccccatgaagcagtcacgcttcgacttcaccaaggtggatgccgcatttctccccaccatcactagccgttcgtgggcctctcctcccccacaccgtcacttgttgtgccctcccctccaaccctggtgctatcttttggatccgaccatcggcgctggttattatccccgatagttcggccctctcctctccctcgccctaacctcccatcaatccggtcccctgttaggtttgcactcatcagtctcctctcatgtattaagctgtgaaatgagtctccttaattgatgaggaatttggttctatactcatgccctatgatgcaatccctaatgactgcatatgtgttgacggttactacacactgagggatgtgtgatatatgagggagttgtgtttgtgaaagagctgaactgcacatttgacagaaagagcttaactgcatatgtggtgtgtgtgcacttatggttgccctgacatgtaattgtgccctgataactgatttgctatgttctttttgatcaaaagaggtgatgtacctaatttgccctgtgatgctataatgaaaattattgagctagatactatacttgatcacttgatgaaaataaattagctgagggccctttcctccgcctgcgacactcacccaccaggctgttgttgaaaaagctgcatattatgctcttgtatggatcaa

SEQ ID NO: 3903 - DNA, 2458 bp, Zea Mays
gtggcctcagcgattttgctgccccccatctcctttttttagcacatcgcttgcgttctctctctggtttcctcctctgctctgcgctccgcttcccaccgctcctcccctgccgtctctcctaccacaaagccgtggcccgtgggcgctgttcgcggcggcgacgggtctctcatctcctctaccctctctcgcgcgcaacggcctaaaaaaaccctagcgactcggtcggcgctcgacttggatcgtgccggggggctaggggcaggggcagctctcttctctcgtcgtcgtccaggacattgttgataacttgatactggattttcttccttctcgaacctgtagagggctctgctttatttgattagaccttatatggtttgagtgccacaactgaaactttgcacctaaaacccgaggccaagttcactactttattatatccttccatacacagaaagtggagagacatggatcgtgatgatatagctggtttcgtcagtggaggttgctatgagtcctgaatttctaacccagtatatataacagagttatgatatccagaaggcagacaattgtttcttttcgttttctagttggtttgcatttgatgtttcataattggaatggatacaactactcaaggccttgagtttggtggtggtatcaactctccgaagccatattgctattggagcacaactcaagacactactgtgcacaaagatagtacaccagaggcatattccaccttttctatttccaactcaaaagcgtcaaaaaggaagcaaggtgccatgtctggagcaaaaggtggaaaccctttactcactttgggtctaggctgctcaccaagttcatcttataacagcaagctaagttctggcactgcttgcataacatcatcatctttattaaaggagattgatgaagagtcttcaatagatcttggccttaaccttgggttgtatattggaaatgatattggacactgccaacagaaatcccatgctggttttgaaaatgtgctctcgacaaactctcctaaactggatcttcagttgagtttgtctaccagttcgcctgaatcagttgtcattgatgcaaataggtcaccagatggcttggcgatgccgatggccaattcaccactcgccattgtagaagaaggatcagtaccacatagttgggttttcgagcattcaattgtttcatcatcacatgcttctaaggcaacgcatggctttccattatcaaagaaaaccaatggaggcaatgcctctgtgccttctcatgtcatgtcatcaactatgtttacaagtgtgaaaggtccagttgcctctgcttctgagacaactaactcccaacaacgcaacagtaacgctaaaagctgtcagtttccaggatgtgtgaaaggagcaagaggggcatcagggcgttgcatagcacatggcggcggtaggcgttgccagaaacctggttgtgagaagggcgctgaagggaggacaatctattgcaaggcccatggtggaggcaggagatgtcaatttctcgggtgtacaaagagtgctgaagggcgcacagaccactgcatagctcatggtggtggccgccgctgcagccatgaaggttgctcccgagctgctcgtggaaaatctggcctgtgtatcaagcatggtggtggcaaaaggtgtcagaaggagaactgtaccaaaagtgcagaaggccattctggactctgcattgcccatggtggtggaaggcggtgccagtttccagactgcacaaagggtgctcagggaagcacaaagttctgcaaggcacatggtggaggaaagcgctgcacattcgtcggatgcaccagaggggctgaaggcagcacttcattttgtaagggccatggtggaggcaagcgctgtgcctttcagggcggtggcgtgtgcccaaagagcgtgcatggtggcactcagtattgtgttgcacatggtggtgggaaaaggtgtgctagctttggttgcactaagagtgctagagggcgcacagagtattgtgtgcgccatggaggtggcaagaggtgcaagttcgagagctgcaccaagagtgcgcaggggagcactgatttctgtaaggctcatgggggaggtacacgatgcctgtggggccaggcggacacaagctttggtgctggtgcacagcaatgcgataaatttgttcggagcaagaccggtctctgctcagctcatagtgctttgatccaggaccactgtgttcatggcggtggtacattaggttccgctatctaccagtctgtgcatgtcaaaccgactgagatgatcaatggtgataaaactttactggatccggctatccctgttacaaacagtggtgttcatcctcctgtcctagctcagtctatgatcgatccgctgccagagggcagagttcatggtggtgg

SEQ ID NO: 3904 - DNA, 1365 bp, Zea Mays
caggcaggcagacaggcaggcaggaggctatatgagaggaagtttcgtgacttgaggaagaatagtctactgcttgggaagggaaaacgggggtgcatttgttgggatttttccaactcaattccatccaatccaagagcaagtttcaccggattgattccccaccgcacccgaccacaaatcccaccaagcaaaccctaatccgtcggccatgtcgtcctcccccgcggcgctgcgcttctactgccaccagtgcgaccgcaccgtctccctcgcccctcccgcatccccggacgccgacgtcttctgcccccgctgcggcggcggattcgtcgaggagcttcctcccaaccctagccccgcgcctccggccgccgccttctttgccccgccctccttcgacatccgccaccccagcgacctctccgctttcttcggccccgcctcccccgagccgctcgccccaggcctcttcgatccctccaacttccttcacgaccacttcggcggcctcctctccggcggcgccaccatccagatcgtcctcgagggccgacggcggcgctcagtgtgccgtctgcatggacgacttccacctcggcgccgccgccaagcagctcccctgcaagcacgtcttccacaaggactgcatcgtcccatggctcgacctccacagctcctgcccggtctgccgcttcgagctgcccaccgacgaccctgactacaatcacacccatcagcagcacgcgatgcagctggtggccctcagtctcagactggatatgatgatctcgactgaggcctcaatagccgatcttggaaacaaataggctatacaccaaagatgagagatgataccgtcgtgtaccaaattaataaatgtgcatcagaagtatggagtcctttaggaacctctgctgactgttgatggaatatggttggtttgttgacactgtcagtgcattgtttctgaagggatatgggcctgttaatttaaaatttgtattcactaatggttgggggaggaacggtggagaaactgagtcatgtatagttgttccttttgcaattgctgcatggtttttttcctgttccataagtcatttggcctttggatacttgatttcaaatgattcctgggttgtgtgggagtgaaatgtaggcaaattactagagatggcaatgggtaaatacccaccgggtattactactccatacccacgacaaaaaaataatcccgccgggtcattcatatacactggtgggtcacgtgggtatgggtcacccatcgggtcacccgtacccacaaaaattaaatatctatcaaaatagtatattatacaaatatcaagtatatccatctaa

SEQ ID NO: 3905 - DNA, 2465 bp, Zea Mays
cctcctctcacgcacgcggcccaaccaacctgccccaaaacctagctagatttagaaaaacaaaaaacctgtccccaacccgaaccgtgagatggctgagtacggcgagcgctaccagggcaacggcgaccaggccacggccgagggtggctatgcgcagaccgagtacgccgccggcgccggtggctcgccgccctccgacagcaatccctccgtgttctccgaccacgccgacggccgctcctcccagccccagcatgagacccaatcacatgacagtggttcctccaaatctcaagaaagggaccgagaacgtgataagggcaaggacagggagcgaggcagagaccgtgtccgcgaaaaggagaggggccgagacagggacaaggatcgtgaaagaggtgacagagacagggatcgtgatcgccaccacagggatcgtcgcgagcgcagcgagataagggaacaccgtgatcgttctgatgatcgtgaccgtcgcaggagtcatgattctgagaggagaagagatcgtgacagagatggccatcgtaggcatcgctcccgttccccttctaagggtcgtgaccgtgaccgcagatctagttctcattcacgctctagatcgaagagcaagcgtgtgagtggttttgaccaagcacctacacaacaggcagttcctattgttgctgctggtgttatccctggaggcaaacttggcccacattgtcatcggcttccactggattgagctgactgctgtagctttaatgtcagctgcctggtgtcaccgctcctattcctggggttggggtgcttccaaacttgtataatttggctgcaggacagttcaacccccatgttattcagccacaagccatgacacaacaggctacccggcatgctcggcctgtctatgtgggcggacttcctccaactgctaatgagcagaccgttgccatattcttcaatggagttatggctgctattggaggaaacacagctggtccaggtgatgctgttcccagtcaaccaccgctatggcctaggggcttcattcagcagcatcctttggattgcaacatgatgagaaacattaatttttctaatgcatcctatggtccaacaacaatgtgggctcccattcagacaggaaatataagttccgaatcaaccatgctaccagccacacaatctgcagtatattggaatcattatatgaactttgtcaggaatcctcttggttcagttcaaggaaatccttttccagattcgttttcaggtacaaatactagtacacctttgcagggttcgaatacaataccttcaatacctgtcaacttggagtccgctgctgaacatagtgttcaggacatcaatagtcctataaagacttctgcccctgttacaaaaccaaagaaaacaaaggaacaaaattatactgctgctgaagaccttctactttgcacaacctggttgcaaattagcagtgatcctattgtccacactggacaaaggaagaagggactttgggcacgaatagaaaaaaggtacaacgaacaaaggggcgagtacccttgtagaatgaatcgagcccttagcagcagatgggacaagattagagcagatgttggtaagttctcaggctgttacgcaagagtgctgcgagagaaacaaagtggtttgacagacgacgataagacttccaaggcggcaactttgtttgcacatgaggagaacaaaccatttcattttatgcattgctggcataagctgaagggggaacctaaatgggagagcatttgtcaaggacctttccgaggattacatggaaaagcaattggatcttctggtggtccttttattggtgtagaagaatcagatagtgggtctgctggtttgactggtaaacggcctctctgtcgtgattcttctaaatcagagagaaagaaggctgcgtcatcaacgacgacggaatacttaagccgtcttcaagaattaactgaaaaactaattcagcgcatcatagaaaagggtgagaagaaatataagtacaatgaacaggacatggagctagagaagaagaggttggacttggaagcaaaaaaattaagcattcgtaaaagggaattgagattaaaagaactaagtatggccgaacaacaactcgagatgctggagcgtactcgtgaagacgaggtcgatccagaagtatggagtatgatgaaggagcgcaaaaaacatttgcagcagttcatatttagtttttgctaaatttactgttgtttaacatgtcgtgcttctgtttccatatccggtttgcgaagaaatttataagtgcattgtcttatttgctttctaaaacattataaagttgttgtatgcttatgtcttgcaagacatgtcagtgttattaaagtttgtaacgttaattctgaaaggaaatgggcattaactattttctataa

SEQ ID NO: 3906 - DNA, 2596 bp, Zea Mays
cacgcacgcggcccaaccaacctgccccaaaacctagctagatttagaaaaacaaaaaacctgtccccaacccgaaccgtgagatggctgagtacggcgagcgctaccagggcaacggcgaccaggccacggccgagggtggctatgcgcagaccgagtacgccgccggcgccggtggctcgccgccctccgacagcaatccctccgtgttctccgaccacgccgacggccgctcctcccagccccagcatgagacccaatcacatgacagtggttcctccaaatctcaagaaagggaccgagaacgtgataagggcaaggacagggagcgaggcagagaccgtgtccgcgaaaaggagaggggccgagacagggacaaggatcgtgaaagaggtgacagagacagggatcgtgatcgccaccacagggatcgtcgcgagcgcagcgagataagggaacaccgtgatcgttctgatgatcgtgaccgtcgcaggagtcatgattctgagaggagaagagatcgtgacagagatggccatcgtaggcatcgctcccgttccccttctaagggtcgtgaccgtgaccgcagatctagttctcattcacgctctagatcgaagagcaagcgtgtgagtggttttgaccaagcacctacacaacaggcagttcctattgttgctgctggtgttatccctggaggcaaacttggcccacattgtcatcggcttccactggattgagctgactgctgtagctttaatgtacgaggacactatctggtgtgatatattgtttatcttcatatcagcatgtggtacatttttggtagtttcatagtttgattttcttgaagcaatacgccacaactgatgtggagttttgaggaaaagggtttcctatgtcagctgcctggtgtcaccgctcctattcctggggttggggtgcttccaaacttgtataatttggctgcaggacagttcaacccccatgttattcagccacaagccatgacacaacaggctacccggcatgctcggcctgtctatgtgggcggacttcctccaactgctaatgagcagaccgttgccatattcttcaatggagttatggctgctattggaggaaacacagctggtccaggtgatgctgttcccagtcaaccaccgctatggcctaggggcttcattcagcagcatcctttggattgcaacatgatgagaaacattaatttttctaatgcatcctatggtccaacaacaatgtgggctcccattcagacaggaaatataagttccgaatcaaccatgctaccagccacacaatctgcagtatattggaatcattatatgaactttgtcaggaatcctcttggttcagttcaaggaaatccttttccagattcgttttcaggtacaaatactagtacacctttgcagggttcgaatacaataccttcaatacctgtcaacttggagtccgctgctgaacatagtgttcaggacatcaatagtcctataaagacttctgcccctgttacaaaaccaaagaaaacaaaggaacaaaattatactgctgctgaagaccttctactttgcacaacctggttgcaaattagcagtgatcctattgtccacactggacaaaggaagaagggactttgggcacgaatagaaaaaaggtacaacgaacaaaggggcgagtacccttgtagaatgaatcgagcccttagcagcagatgggacaagattagagcagatgttggtaagttctcaggctgttacgcaagagtgctgcgagagaaacaaagtggtttgacagacgacgataagacttccaaggcggcaactttgtttgcacatgaggagaacaaaccatttcattttatgcattgctggcataagctgaagggggaacctaaatgggagagcatttgtcaaggacctttccgaggattacatggaaaagcaattggatcttctggtggtccttttattggtgtagaagaatcagatagtgggtctgctggtttgactggtaaacggcctctctgtcgtgattcttctaaatcagagagaaagaaggctgcgtcatcaacgacgacggaatacttaagccgtcttcaagaattaactgaaaaactaattcagcgcatcatagaaaagggtgagaagaaatataagtacaatgaacaggacatggagctagagaagaagaggttggacttggaagcaaaaaaattaagcattcgtaaaagggaattgagattaaaagaactaagtatggccgaacaacaactcgagatgctggagcgtactcgtgaagacgaggtcgatccagaagtatggagtatgatgaaggagcgcaaaaaacatttgcagcagttcatatttagtttttgctaaatttactgttgtttaacatgtcgtgcttctgtttccatatccggtttgcgaagaaatttataagtgcattgtcttatttgctttctaaaacattataaagttgttgtatgcttatgtcttgcaagacatgtcagtgttattaaagtttgtaacgttaattctgaaaggaaatgggcattaactattttctataa

SEQ ID NO: 3907 - DNA, 1568 bp, Zea Mays
gtcagcttggttattttgaggtgaagaaacaaagttcatgtgttgtctgcctaaccaacaagtccaacgaatatgttgcttttaaggttaaaacgacatcccctaaaagatactgtgttcgaccaaataccggggttatccttccgaggaaaacatgtgaattcacagttaccatgcaagcgctccggactgctccaccagacatgcaattaaaggacaagtttttagtacagaccacagttgttccttatggcacatctgatgaagaactcgttcctgccgttttctccaaagaaactggcagatacatcgaggaaagcaaattgagagttgttcttgttagttcataccaatccctcgaagagcaacccactaatggaattcatgacactgagccaggagcgaagtaccagatgttgcaaaagaaattcctgcccctctggtacaaggtccagcaattgtgaccggaataccttcacctgtcaaagaggttccaggcctgagagaaattcctgtgccactgaacgaagcaccaactttattggcagaatttccttcccctcaaaaagatccctctgctattacagttgaacatgcctctaatgttacaattgagcatgcccctgctatttccattgaatccccacctttgaaacaaagtgttccagtttttaaggaatctcctctgaaacaaagcgttgcagtttttaaggaatctcctcctttgaaacaaagcatttcagtttttaaggaatctcctccactggaggaaactactcctaaagaagctgttatgctaagtgaccgagggcttttcaatgtgcagaatcatcaattatcccatgtaacagaagatgttcagaatatgaaatcaaagctcaacaatcttgaatcaaaattggaagaggctgaaaagatgataataaggctaagagaagagagcagaaataccacccaggagcgggatgagctacagcaagaaatggtattcctaagaaagaagggaaccgcaaggagtcaaatgggtttccccctgctctttgtggtgtacgtggcgcttcttggtacctgtatcggttacctgctccgcatatgagttccaaacttcaaaaaagttcagcagatgggatatgcttcgtatgtgggcaagacaattgaacggcagttgcactccaaaatgttgaggggtgaatttattagcattattagttcggaacttcatatggttttgcacataacagcagtgccaaactaccatctgcctgtatgtatagaacagttactttttttcgcgttttatagaacccacccaaaagatgtctgctgcctcgtagactaacctgggattcttcttccatctacctaagatttttttttacactttactggattcgcttgccctgaatcggtattggtcttttgtgtaactatttttacacctggtttcgttccagtctaatatcctggcctataaaggcacaaaacagtgtaccaaaaatccaagaaagtcaggaattcatggttgcgtagttcgtgtcaagataccaagatgtagtaagagccagtct

SEQ ID NO: 3908 - DNA, 2409 bp, Zea Mays
gaaaccatccctgcaggtccctgctccctggttatattaagcagctcccaatctttggcatttgcaggcacacaacacaacacagttctccctttccactccagtccaaccaaccgtccatgggtttcttcatcccgccgcccaaggtgtacaagccggcggcagaggtcgacctcgggccggacagcgacgagcactacatcagccccaacgtgaaaggtccctcgctccctgaccagacctctcccatcccagctacagcggtgcacatgcatgcatgagaatgattgattgttcaattgagtagatggtcggaggcgatctccgtctccgcgcgcgcttgcttgctttcttccgctgctgatacatgcgtggaccgtcttgcagcgccccgcgtggccgggttcctggtgaagatgctggcctgggtgctggagacgccggtgcttggctggatcgtgctcggcgtcctcaagagggacaacctcgtctacaagctcgtctcggacgctgagatcccggagccgccgctattcacggccacccacacatggcaagcgatccaggagcagagcgtgcgcgtgacggagtcgaggctgtcgccggcggagcgcgtgcaggaggccgtcgcctgcgtcccagctgctgcccaggcccagttggagccggcggcggggttcaggcgctggacggtgcgggacttccacagggcgtacagatcaggacaggctacccctaccatggtggcgcggcgattcctggcagccgtggaggaatgttcagggccggacctgaacatgggcttcttcatcagctgcgaccctgcggacgtgctgcggcaggccgaggactccacccgcagataccagcaaggggcgccgctgtccgccatggacggagtactggtcgccgtcaaggacgagctcgattgcctgccgtacccgaccagcggcggcacgcggtggctggggtcggcgcggcggtgcgcggcggacgcggcgtgcgtggcgcagctgcgcgcgtgcggcgccgtgatggccggcaaggccaacatgcacgagctgggcgcgggcaccagcggcatcaacccgcaccacggcgccacgcgcaacccctacaacgtgggcagggtgtcgggcggctcctcgggcgggtccgccgccgccgtctgcgccgggctctgccccgtcgccctcggcgccgacggaggcgggtccgtgcgcatgccggcggcgctctgcggcgtcgtcgggttcaagcccactgccggccgcctctccaactccgggcttcttcctctgaactggaccgtcggcatgccggggatcctagcagcgacggtcgaggacacgctgatcgcgtatgcggcgattgctgatcagtcaaaaccaagccctttgcagcagcctgaactgaacctgcccatgctgacacgcacgaggtccatgcccagcatcaggctcgccaaatacgcaaagtggttcgacgacagctcggaggacatcaggagcctctgcgggaaggcgctgcagatgctgcgcacgcactacggctgggagagcgtggacgtcaccgtccctgagatcgaagagatgcggctggcgcactacgtgaccatgggctcggagtgcactgcctccctcgccgccaagtacctggacagcatgtccgaggtcgggtgggacgtgcggatcgcgctcagcgcctacgggtccttcagcagccgagactacctcagcgcgcagcgtctccgatgccggcagatgtacttccacgagaagatcttcgagactgccgacgccatcgtcacgccgatgacaggggtgacggcgtacgcgctgcaggacgacgcgctgagcacgggggagctggactacatcaacggagctgcgctggtgaggtactcgatcgcgggcaacttcctggggctgccagcgatcaccgtgcccgtcgggtatgacaggggagggctccccgtggggctccagttcatcggccgcccgtggtcggaggccacgctgctgcacctcgcctacgccatgcaggaggcgtgcgggaagaaggtgctccggaagcccaaggtgcactacgacctcctcaccaaagagtagctccagcgagcatcgatccggcagattgctctctatgaggcgcgcggttgctgattgcatgcacctctagtgtgattgattgtttgtttgattgattgagcttgtgatgagagagtgggggaagttgaatggaatgccgtcaatgtcggacaactctcaactaggagaagaaaaaaaaacatggttgccagcaccatgcatgtgcaccaccattcgttttttaatgtcgtcctcattgaaacattatgtaagtattgtgtatacgtgtgctttagattcgtttttcactgcccaccgg

SEQ ID NO: 3909 - DNA, 2500 bp, Zea Mays
gttcaaccaaacaagctcactcccggccatcaggcgcacaccgctctcccgccgccgtcctgcgtcggagcgatatccctacatccccacctcatttgcacccggattggcttcttcttctactactactgtacagaactttttatgtggctgcaaagttctgtaattctagaggagcaaaatggagattattatcattatctcacttgtcattcttttggcactaggagctctctttgcgatcccaaaatcgcaaaataaaggtaaatcaaaaggaaccgacttaggagctggaatgacatctaggagctttacgaaggaagagatctctaaacataacacaaggaaggactgttggatcgtcatcaaggacaaggtctatgatgtcactccttatgtagaggagcatccaggcggagatgccattctaaataatgctggtggtgattccacagagggcttttttgggccacagcacggcactagggtcttcgatatcatcgaggatttctgcatcggtcagttgaaggcatagggtagcttgtattgaattcgtggaattttccggaaatcaagttttgagaagctacatgttatccaacattttaagcattgcaaccttcaagcatttgagatgtcagtgtaattgttccacaattgtcatcggggctgctaggagctgtgatgtagcactgcgtttttattctgctgttgtgtgactgtgtctttacatttctgttgttggacaagactccaaaacgcttgtaattgttctggctaagggcccgttcggttattcaggaatctactccagaaaggatttcagctggaataattgtataatttgtataacaattagtaacctggaatagttcctagttttgttccagcctaaccgaacggggcttaaatcagaatctgtttcacacgatcatttctcgagtgatgttacattgaagatgtcccgagtttgattttaacttggctgttgaatgcgttatttaagatttgtcgtgctctaaggaattgatggtatgcaaacatgaaagtgaacagtatgaagagaacataatttctgagattgagctgattgttccgtgagtagtaaaaattaacttttctcttgctgagtgaaatcaacaaaacccaacccatgaaagggaaagaaagaaagaaagaaaagataatgagacattaaaatgtatcctaaaagctttgctggcttctgctactgcacagttctcaggaataggctcctctgctgcagctctgctcctccctcctgtcttggagaagtggacagtgctgccgatcagttgctcttctcatggatagtagaggcttggcattgcggtgtcaatgtcgaagttctggtcgaatacgtattcgacgcattcgagaggcatgaattcgtcgtcaggcaccggaaggggcgcaaccgacgagacggcggcgaacgccgatgacaccacctcctggaggtccacgtccgaggtccagtccctgtacccgggcaccgggcaaggcgagatgccctggtgcaggcagccgttgaagtcggagccgacgggcgacgcgagggaccacggggacgaggcgccccgcacggggcagctctcgggcgtcatcggcgggagcccggcggcgttgtccgtggtggtggtggccaccgtgagccgcgcggcgaggccctgcagcgcggcctgcgcgtgcgggttgtgctgctgcgccctcttggacccgccgccggcggcggcgggcctgcaggtgtgctcgccgtggtagacgacgtcgaagagcgcggggtggtcgtcggcgcgctgcacctgcttggtggccaggcagttctgcgagttgcggtgcgtgcagcggtagtaggcccgcgggtgcctggcgccgaggatgtccttctggccgtacttgcgccagctgtggccgtcgtcggcgctgacgcgcacctgctggctggtccagcgcgccgtggccttgcgcttcttggggctggcgccggcggggcggaaggggtggtggtcggaggcggcgtcactgcttatcgggctccccgtggcggtcagcggcgagggggcgaggtccggtgacgagtggagcatgccgatggagcggtcggtgagcgcgacgatctgttgcacgaggcagcggcagaggtcgacggagtccgcgtccgcgggcgcgcgcagctgcagctcgagctggctcaccaggtcctgcacgcggcccaactccgagaccaggagcgcccgcccgccgctctccacggcttcagccattgctgcttcgaggataggtgagagctggagcaggggagtccggtcgtgaggtggcgagcgatcggagatcaggactcaggagtggcttggctcgacgtggaggaagaggaggatgtttttatagcaagcgaaagcgagggagggaggccggagggggaagcgcgtccgcgtgggggaatttcaagtgagctgaggcgaggcgaggcgagcag

SEQ ID NO: 3910 - DNA, 1428 bp, Zea Mays
acgacctctcctcgtgccttttccaaatcagattgatggcgatggagggacctgttttctgccgtcctgcaatgcaagcgaaactgcctgctgctgcgctgatcaacaactccctgaccaaatccgggcagcttgggactgcattgtttggtgccatttcaaaatacagaaacatttcaagattcatttctcccatctctcaaacatctacgaagaacataggtccatgctgtagcttcagctcgtcttctgatggtaatggatacatggctggaaactctagcgagagtgatgaagactatgttaattctactgtgctagaagcagttgaggtgagaagtggatcagaaggatatgtgataaagatgcgagatggaaagaacttgcgttgtgtccatagtaattttcaagggagaaatattccagagaatacaccacaacctgctattgttttgaggattgaagatggaagcggaactttactcccgatcattgttttggagatgccaagcgttcttctgatggcagctattcgtaatgtccacattgcacgaccgaccatatatcaagttgtcaaggaaatgattgataaaatgggttatgaggtaaaacttgttagggtaaacaaaagaattcaagaagcctactgtgctgaactttatttaacaaaggtcaatgatcctacagacaacatcaccttcgatcttcggccttcagatgccataaacattgctgttcgttgcaaggttcctgtacaagtccatagaagtcttgcatacagtgatgggattagaccagtcgagccagcaagaatggcagtaacagctggcctatcagatgggttgttatttacagagcttgacagacctgatggacagccatgtgtggaggctcaagagtttggactggtgaggaacatgctcattgcagctatcgaagagagatacaaggatgctgcatcatggaaggacaaactgattcggctcaggtctaagcgggagaactgggcctgagagcgtcgcatgtctggatggtgtaaataaagatgacgctcagctgaattccagtatgcactccagacaattgatactgtttatggctctatgtaactagctgtacatattgtaactagctgtacatattgtacgtactatgctcaggtctcagctaaattcagactaagatttgaagtgaaaaactaatccttttgtaatcttggccgtattaatttgtatgttagtctgttaggttgaatgtttggcatgaatttttagctcatcgacctgcggtgagatatgcagaatttcggttgtacacggaactaagcagcgctaatattttcacaggctgctgttaagaagagagattgctgctttgtttccattacagggaacgtacaaaagcacatatcactctcccacattagcg

SEQ ID NO: 3911 - DNA, 1540 bp, Zea Mays
ccgattcttgtggcttccattcactctcttgggattcttttaccatttcgtggactcttttgtttcttctcgttttctccccccgttaattggagcagcgacggcttgctcctcttcgtgtaacgagatttagtttccttcggattgatggcgatggagggacctgttttctgccgtcctgcaatgcaagcgaaactgcctgctgctgcgctgatcaacaactccctgaccaaatccgggcagcttgggactgcattgtttggtgccatttcaaaatacagaaacatttcaagattcatttctcccatctctcaaacatctacgaagaacataggtccatgctgtagcttcagctcgtcttctgatggtaatggatacatggctggaaactctagcgagagtgatgaagactatgttaattctactgtgctagaagcagttgaggtgagaagtggatcagaaggatatgtgataaagatgcgagatggaaagaacttgcgttgtgtccatagtaattttcaagggagaaatattccagagaatacaccacaacctgctattgttttgaggattgaagatggaagcggaactttactcccgatcattgttttggagatgccaagcgttcttctgatggcagctattcgtaatgtccacattgcacgaccgaccatatatcaagttgtcaaggaaatgattgataaaatgggttatgaggtaaaacttgttagggtaaacaaaagaattcaagaagcctactgtgctgaactttatttaacaaaggtcaatgatcctacagacaacatcaccttcgatcttcggccttcagatgccataaacattgctgttcgttgcaaggttcctgtacaagtccatagaagtcttgcatacagtgatgggattagaccagtcgagccagcaagaatggcagtaacagctggcctatcagatgggttgttatttacagagcttgacagacctgatggacagccatgtgtggaggctcaagagtttggactggtgaggaacatgctcattgcagctatcgaagagagatacaaggatgctgcatcatggaaggacaaactgattcggctcaggtctaagcgggagaactgggcctgagagcgtcgcatgtctggatggtgtaaataaagatgacgctcagctgaattccagtatgcactccagacaattgatactgtttatggctctatgtaactagctgtacatattgtaactagctgtacatattgtacgtactatgctcaggtctcagctaaattcagactaagatttgaagtgaaaaactaatccttttgtaatcttggccgtattaatttgtatgttagtctgttaggttgaatgtttggcatgaatttttagctcatcgacctgcggtgagatatgcagaatttcggttgtacacggaactaagcagcgctaatattttcacaggctgctgttaagaagagagattgctgctttgtttccattacagggaacgtacaaaagcacatatcactctcccacattagcg

SEQ ID NO: 3912 - DNA, 2339 bp, Zea Mays
ggaagtttctagtttctgccccattttacgcaagcgacgacgttctcctccccgtacacaacacgcacgccatctctctcgaagcttccgcttcctccagccgccaccgacccgaacccaccccggacgcggcgcctcccccgcaccctatattgttccccgagctccagccgccaaggattggcgaaaggagccgggcagatattgaaactcgtttcagatcggatccgaggactcgagaaattgcagggaaggaatttgaggatggatttcgagctgcggcaggcgcgggagaagctggagcgcgagcagcgggagcggatgcagcgcgccaaggccaaagcggagcgcgagagcctggccaaggcagaggcggcgcgccgccaggaagcgctcgaggcgtcccaccgcgagcgacgactcgatgccgcacgggcccaggaagaggctgaccggacaatggaagaggtgatgcagctggggaaggggatttcattctcgcacatgtttgaggcacttcgatatgatggccctggggataagatcaagttgccaccatcttcgtttaaggagttgtctgatgaaggagctctcgataaaggtcccatgtacttcaggttgtcgaaggttagggacacagtcccaggtgctgctatggaacaagatgctgggacaacctgttgtggtgttcttgaattcacggcaagggaaggctctgctgaactcccgctgcatgtttggaacaacctgtttgggagtgacaccccagaggtccctctaattgaagtcaaatataccagtttgctcaaaggaacatatgcaaagttgaagccagaaggaggtgggttttcagatctccctaaccatagagcagtcctcgaaacagcgctccgcaatcatgcaacactatctgaaaatgatactgttgtggtaaactatggacagctgcagtacaagttgaaggttcttgaactgaagcctgcctcaagtgtatctgtcctagagacagatgttgaagttgacatcgtgggatcagattcggttttggacaacgaagatgaccaacatgtgcttgtgcctcttgtaattggaaatatagaatccagtgttgtggaagaaggaaagttcaggtactacaaattttcagttgaaggaaatgtgagtgagaaagtagcttctgggcatgcaaatatcgagattaaaatagatacggacgcgagcggtggtgacactgatatctatgtttcaagacatcctttagtatttccaactcagcaccgacatgagtggtcttctcatgaaatgggatcgaaggttcttatactcaaaccacgggatgctacattggtcagtggtgtttacagtattggagtttatggtttcaaagggacttctaagtaccagctctctgtagctatcaaggatgttagtggccaaaggattggtgaatatgctagtgcctcgggaagtgttgattttgattctgtgctgtgtagaaactgtaagcgccatatagccagccagtctgctcatcttcatgaggcatactgcatgagacacaatgtagcctgctcacatgatgggtgtggagttgtccttcggaaggaagaagcagcagatcatgtgcactgcaacaagtgcggacgagcttaccagcagagagaaatggaaaagcatatgaaagtcttccatgaaccgttgcagtgcccctgtggggtggtcctggagaaggaagatatggtatgtgttcgcttctcttcgtggtctaggggcacactgctgactcagtttctaaaagatttctttctttcaagctggtggagagccttctgatgttcgtgacaggatgcgaaacatgtctgagcatgagagtatctgcggatccaggacagcaccatgtgactcctgtggacggtcgatcatgcttaaggagatggagattcatcttattgctgtgcatcagaagagctaatcacctactgacgctgggctggtctgaacttgagcctctattgtcatttggtcaacagaagctgtgaactttaatgtgccattccagggttgttggattgaaaactacaccttgggactgggagctatatgtgattcgtaattcgtggtgttccatgggattaaacatactggtgttatctgtattttatttctctgtatacattatttataaatctgattttacattcggtattacctatttcctaagtgggtgttttgctgactaaagtttgttcacgtcacgtcaaaggtttgatttgaatatcaattatggttattaaatatatgtttaattagatttaataaatttgtctctgtttttagtc

SEQ ID NO: 3913 - DNA, 2483 bp, Zea Mays
tcccgccgggtcgcagacgcgaggtcccggagccgcgcgccccgcctataaaaaggcagccattctcgcctggttcccgcatcccagcacgtctcgtctccctcccaaaaaaaaaaaaaaaactgctcggttgctgctcctgctccgccgcgccggcatcatgtgtggcatcttagccgtgctcggttgctccgactggtctcaggcaaagagggctcgcatcctcgcctgctccagaaggttgaagcacaggggccccgactggtcgggcctctaccagcacgagggcaacttcctggcgcagcagcggctcgccgtcgtctccccgctgtccggcgaccagccgctgttcaacgaggaccgcaccgtcgtggtggtggccaatggagagatctacaaccacaagaacgtccggaagcagttcaccggcacacacaacttcagcacgggcagtgactgcgaggtcatcatccccctgtacggcgagaacttcgtggacatgctggacggggtgttcgcgttcgtgctctacgacacccgcgacaggacctacgtggcggcgcgcgacgccatcggcgtcaacccgctctacatcggctggggcagtgacggttccgtctggatcgcgtccgagatgaaggcgctgaacgaggactgcgtgcgcttcgagatcttcccgccgggccacctctactccagcgccggcggcgggttccggcggtggtacaccccgcactggttccaggagcaggtgccccggatgccgtaccagccgctcgtcctcagagaggccttcgagaaggcggtcatcaagaggctcatgactgacgtcccgttcggggtcctcctctccggcggcctcgactcctcgctcgtcgcctccgtcaccaagcgccacctcgtcgagaccgaggccgccgagaagttcggcaccgagctccactcctttgtcgtcggcctcgagggctctcctgacctgaaggccgcacgagaggtcgctgactaccttggaaccatccatcacgagttccacttcaccgtacaggacggcatcgacgcgatcgaggaggtgatctaccacgacgagacgtacgacgtgacgacgatccgggccagcacgcccatgttcctgatggctcgcaagatcaagtcgctgggcgtgaagatggtgctgtccggggagggctccgacgagctcctgggcggctacctctacttccacttcgcccccaacaaggaggagttccacagggagacctgccgcaaggtgaaggccctgcaccagtacgactgcctgcgcgccaacaaggccacgtcggcgtggggcctggaggtccgcgtgccgttcctcgacaaggagttcatcaacgtcgcgatgggcatggaccccgaatggaaaatgtacgacaagaacctgggccgcatcgagaagtgggtcatgaggaaggcgttcgacgacgacgagcacccttacctgcccaagcatattctctacaggcagaaagaacagttcagtgacggcgttggctacaactggatcgatggcctcaaatccttcactgaacagcaggtgacggatgagatgatgaacaacgccgcccagatgttcccctacaacacgcccgtcaacaaggaggcctactactaccggatgatattcgagaggctcttccctcaggactcggcgagggagacggtgccgtggggcccgagcatcgcctgcagcacgcccgcggccatcgagtgggtggagcagtggaaggcctccaacgacccctccggccgcttcatctcctcccacgactccgccgccaccgaccacaccggcggtaagccggcggtggccaacggcggcggccacggcgccgcgaacggcacggtcaacggcaaggacgtcgcagtcgcgatcgcggtctgacgagagtacgtgctcgcgcacctccctgctagcttctaccgggctgcagcctgcagcatgcactgtgcgagcacagccgatcagcgccaataaactggaggataagaacgactggtaggtgtgtgtgtgtgtcgtgcgtgcccaccggccatatcccggtgcggcagcacgtgctattgttacgtgttgtactgccgccagcgtacgtgtctgtgtgtctcgatcatatctgtacgtttttagatttagaagaaaaaaaaaaggcatgtccgtgtctgtatgtctggatcatatctgtacgttcttagatttagaagaaagaagaaaaacattatatacgtacgtccatgtctctatgtctggatcatatctgatttacagaaaaagtatatatgtccgtgtattcgtgcgagcaggcgtgacgcgctccgacaagcagtacagctcaggcattttccggccgagtgatatttgaacgcgacctctgaattgaactgccatacggattaatctacaattattatctggatttccgtgtacctgttcgcgcaagctgaaccttcga

SEQ ID NO: 3914 - DNA, 1080 bp, Zea Mays
agctttattggtctgattagacatatagttgatatgagctgtaaggtacaagctcaagagaaggtttgatcgtgggtcgtacggtgaagtctggttggcatttcattggaattgttctgaagatacagatgttcataaagagcctccacactttacaaatatatctcaatcagagatgtataattgcacaagttcaggcagaatgtcatctgatgaagatcatggttcaggcacagtaaatggtgatttattcatactgaagcgcataatggtggagaggggaaatgcagcttacttgagtggattgcgggagaaatactttggggaattattttcaaatgcttccaggactcttgaaggtttgtcgaggatagaatcatcgactatctcagtggacatgctatatgatcctgatatccatctagaaaagaacttgtcagctactgaagaaccacttaagcatgtggctaggtttatagaatcttttgaatcagaatcaagggaaatttggctggtgtatcacaatgaaggccactcattatcaaaattgatatatacagctgaagaaacgaagttagtcactggcaacaataatgagagggtcagacatatccaagttttgcacccatcgaagtggtggcattggctaaggacaacaaaagctgggctaaagcagatgcaaaacctcttatggcagctgaacatgatcatttgctttgaggacatggagactggaaagtgtctaagagaggttccatctgaagcaaagcaaaataagctgaacatgcgtctgattgacttcggcagtgccattgatgattacacgttgaagaatctttatggtccaggacctactcgatctgaacagacatttgagtacactcctccagaggcactccttaattcaaactggtttcaaggatcaagaagtgcaaggcttaaataagtgaccgtacacgcattttaatggatcagcatctcggagggtggagtgaacaaacaaaggagcttgcatacaactttccttggtttcctgttctgatgttaggttgaggtcatacatggagttgtgcattttag

SEQ ID NO: 3915 - DNA, 2303 bp, Zea Mays
aaagcaccgaagtccaaactggacgctgattccagatagtaacaccaggaacattctggaggtttactgttcaaagatacacaccataagctgggtgtcaatcgtaacactgtgaatttgctggagagaacatgagaattaaggaggttgatgtgggagtggtggcaatatttgacggtcataatggagctgaggctagtgagatggcttctaagctttttctggattacttcttgctccatgtttattttcttctcgatggcatacactctctgcggttcagaaaatctactgggaaactgacatatagggaagttactatttttaacaatgtatttaatctgtacaagcatggccaatccgaccatgcagagaggtcatgttgggcatcaccagccattctagaccggtcatttcatacggaaattctgaaggaatcactaatgagggcagttcatgatattgatttaacattctccaaggaggggaaacgaaggagaaagagaaactcaattaatcacgaggaatttgctttggcaaattatgatggaccgttgtatcatgcaagggagttgacaaaggaccatcatcctaatagagaagacgagagaaaccgtgtggaggctgctggtggttatgttcttgagtgggctggtgtatatcgtgttaatggcgagctagcactatcaagagctattggtgatgttccttacaaaagatacggtgtaatatcaacacctgaattgacaggctggcagattctgtcagaaaatgacagttttcttattgcgtcatctgatgggatctttgagaaaatgactatgcaagatgtttgtgacctaatgctgcatgcaaaaattcgtgttaaacatgattttggatcctctgccataacacaacgtaatttggcagattacgtagttcatgttgctttacagaaaggcacaacagacaatgtggctgctgtggttgttccattgggatcacctggtagcactggtactacattaaaagattcgtcccagttcgaagaagatctcaagatatctatttctccaatgttgaatgttccatatggattgaagcctgatcatggacatagttcagctgtcattgacatggagtatttcaagcgctcatcaataaagttccagaggttcttggttgaagcaaaacctaagaaacttggttgtttctatttatccgagagtctggatgaagatatggactatatatttagggtgccggaagcataccagcgtgaagaagtccatgacttcaaccacataccagctgagactgccttatattctgatggtaatctggaaaaatacaaggacaaacacttttgcttgtaccttggtcccgaagatggcgaaatgggacagtgcaatggtcctgaagcttttgcaaacttttttggtctacttgactcccttccgcataatggaagcaaaccaaatggttcacactcctttggcaacacgatcgatttcaggtacaagctcaagagaaggtttgatcgtgggtcgtacggtgaagtctggttggcatttcattggaattgttctgaagatacagatgttcataaagagcctccacactttacaaatatatctcaatcagagatgtataattgcacaagttcaggcagaatgtcatctgatgaagatcatggttcaggcacagtaaatggtgatttattcatactgaagcgcataatggtggagaggggaaatgcagcttacttgagtggattgcgggagaaatactttggggaattattttcaaatgcttccaggactcttgaaggtttgtcgaggatagaatcatcgactatctcagtggacatgctatatgatcctgatatccatctagaaaagaacttgtcagctactgaagaaccacttaagcatgtggctaggtttatagaatcttttgaatcagaatcaagggaaatttggctggtgtatcacaatgaaggccactcattatcaaaattgatatatacagctgaagaaacgaagttagtcactggcaacaataatgagagggtcagacatatccaagttttgcacccatcgaagtggtggcattggctaaggacaacaaaagctgggctaaagcagatgcaaaacctcttatggcagctggcgtctgattgacttcggcagtgccattgatgattacacgttgaagaatctttatggtccaggacctactcgatctgaacagacatttgagtacactcctccagaggcactccttaattcaaactggtttcaaggatcaagaagtgcaag

SEQ ID NO: 3916 - DNA, 2431 bp, Zea Mays
agaaaaccaaacgaagcaagacactgttctgggctcgggcccaccatttgtcctcctccgccggcgactcgccgatgcccttgccggactgcggccgccgcggcttccccaccctaccgctcctccttctcgtccttcacgcgctccccaggcggctcccgcggtgcgcggccgagtcggcgacgtgcctcgcggtgtaccgggaggggggcgcccccgcggtgttccagtccgcgcactgcccgcgctggaccctccccccgcacgacggccaggggggtggcgggggaaagagcatccctatggggtgccacgtggcggcggatcgcggccgccgccggtcccaggaggaccgtgccgtctgtgccctcggcatccgcatccccttcgtagagaacatgagaattaaggaggttgatgtgggagtggtggcaatatttgacggtcataatggagctgaggctagtgagatggcttctaagctttttctggattacttcttgctccatgtttattttcttctcgatggcatacactctctgcggttcagaaaatctactgggaaactgacatatagggaagttactatttttaacaatgtatttaatctgtacaagcatggccaatccgaccatgcagagaggtcatgttgggcatcaccagccattctagaccggtcatttcatacggaaattctgaaggaatcactaatgagggcagttcatgatattgatttaacattctccaaggaggcattacagaacaattttgaatctggttcaacagcgaccgtggtcttgatagctgatggacaaattatatctgccaatgttggagattcaaaagcttttctgtgctccgaaggatataatctgcaccatcgaaataatacggtgtaatatcaacacctgaattgacaggctggcagattctgtcagaaaatgacagttttcttattgcgtcatctgatgggatctttgagaaaatgactatgcaagatgtttgtgacctaatgctgcatgcaaaaattcgtgttaaacatgattttggatcctctgccataacacaacgtaatttggcagattacgtagttcatgttgctttacagaaaggcacaacagacaatgtggctgctgtggttgttccattgggatcacctggtagcactggtactacattaaaagattcgtcccagttcgaagaagatctcaagatatctatttctccaatgttgaatgttccatatggattgaagcctgatcatggacatagttcagctgtcattgacatggagtatttcaagcgctcatcaataaagttccagaggttcttggttgaagcaaaacctaagaaacttggttgtttctatttatccgagagtctggatgaagatatggactatatatttagggtgccggaagcataccagcgtgaagaagtccatgacttcaaccacataccagctgagactgccttatattctgatggtaatctggaaaaatacaaggacaaacacttttgcttgtaccttggtcccgaagatggcgaaatgggacagtgcaatggtcctgaagcttttgcaaacttttttggtctacttgactcccttccgcataatggaagcaaaccaaatggttcacactcctttggcaacacgatcgatttcaggtacaagctcaagagaaggtttgatcgtgggtcgtacggtgaagtctggttggcatttcattggaattgttctgaagatacagatgttcataaagagcctccacactttacaaatatatctcaatcagagatgtataattgcacaagttcaggcagaatgtcatctgatgaagatcatggttcaggcacagtaaatggtgatttattcatactgaagcgcataatggtggagaggggaaatgcagcttacttgagtggattgcgggagaaatactttggggaattattttcaaatgcttccaggactcttgaaggtttgtcgaggatagaatcatcgactatctcagtggacatgctatatgatcctgatatccatctagaaaagaacttgtcagctactgaagaaccacttaagcatgtggctaggtttatagaatcttttgaatcagaatcaagggaaatttggctggtgtatcacaatgaaggccactcattatcaaaattgatatatacagctgaagaaacgaagttagtcactggcaacaataatgagagggtcagacatatccaagttttgcacccatcgaagtggtggcattggctaaggacaacaaaagctgggctaaagcagatgcaaaacctcttatggcagctgttgatgggactgaaggcttgtcatgatcgtaatatcacccaccgggatatcaaacctggtagaaatgatgtcactgcctattttttccttgttttctatacttcttga

SEQ ID NO: 3917 - DNA, 2570 bp, Zea Mays
agaaaaccaaacgaagcaagacactgttctgggctcgggcccaccatttgtcctcctccgccggcgactcgccgatgcccttgccggactgcggccgccgcggcttccccaccctaccgctcctccttctcgtccttcacgcgctccccaggcggctcccgcggtgcgcggccgagtcggcgacgtgcctcgcggtgtaccgggaggggggcgcccccgcggtgttccagtccgcgcactgcccgcgctggaccctccccccgcacgacggccaggggggtggcgggggaaagagcatccctatggggtgccacgtggcggcggatcgcggccgccgccggtcccaggaggaccgtgccgtctgtgccctcggcatccgcatccccttcgtagagaacatgagaattaaggaggttgatgtgggagtggtggcaatatttgacggtcataatggagctgaggctagtgagatggcttctaagctttttctggattacttcttgctccatgtttattttcttctcgatggcatacactctctgcggttcagaaaatctactgggaaactgacatatagggaagttactatttttaacaatgtatttaatctgtacaagcatggccaatccgaccatgcagagaggtcatgttgggcatcaccagccattctagaccggtcatttcatacggaaattctgaaggaatcactaatgagggcagttcatgatattgatttaacattctccaaggaggggaaacgaaggagaaagagaaactcaattaatcacgaggaatttgctttggcaaattatgatggaccgttgtatcatgcaagggagttgacaaaggaccatcatcctaatagagaagacgagagaaaccgtgtggaggctgctggtggttatgttcttgagtgggctggtgtatatcgtgttaatggcgagctagcactatcaagagctattggtgatgttccttacaaaagatacggtgtaatatcaacacctgaattgacaggctggcagattctgtcagaaaatgacagttttcttattgcgtcatctgatgggatctttgagaaaatgactatgcaagatgtttgtgacctaatgctgcatgcaaaaattcgtgttaaacatgattttggatcctctgccataacacaacgtaatttggcagattacgtagttcatgttgctttacagaaaggcacaacagacaatgtggctgctgtggttgttccattgggatcacctggtagcactggtactacattaaaagattcgtcccagttcgaagaagatctcaagatatctatttctccaatgttgaatgttccatatggattgaagcctgatcatggacatagttcagctgtcattgacatggagtatttcaagcgctcatcaataaagttccagaggttcttggttgaagcaaaacctaagaaacttggttgtttctatttatccgagagtctggatgaagatatggactatatatttagggtgccggaagcataccagcgtgaagaagtccatgacttcaaccacataccagctgagactgccttatattctgatggtaatctggaaaaatacaaggacaaacacttttgcttgtaccttggtcccgaagatggcgaaatgggacagtgcaatggtcctgaagcttttgcaaacttttttggtctacttgactcccttccgcataatggaagcaaaccaaatggttcacactcctttggcaacacgatcgatttcaggtacaagctcaagagaaggtttgatcgtgggtcgtacggtgaagtctggttggcatttcattggaattgttctgaagatacagatgttcataaagagcctccacactttacaaatatatctcaatcagagatgtataattgcacaagttcaggcagaatgtcatctgatgaagatcatggttcaggcacagtaaatggtgatttattcatactgaagcgcataatggtggagaggggaaatgcagcttacttgagtggattgcgggagaaatactttggggaattattttcaaatgcttccaggactcttgaaggtttgtcgaggatagaatcatcgactatctcagtggacatgctatatgatcctgatatccatctagaaaagaacttgtcagctactgaagaaccacttaagcatgtggctaggtttatagaatcttttgaatcagaatcaagggaaatttggctggtgtatcacaatgaaggccactcattatcaaaattgatatatacagctgaagaaacgaagttagtcactggcaacaataatgagagggtcagacatatccaagttttgcacccatcgaagtggtggcattggctaaggacaacaaaagctgggctaaagcagatgcaaaacctcttatggcagctggcgtctgattgacttcggcagtgccattgatgattacacgttgaagaatctttatggtccaggacctactcgatctgaacagacatttgagtacactcctccagaggcactccttaattcaaactggtttcaaggatcaagaagtgcaag

SEQ ID NO: 3918 - DNA, 2821 bp, Zea Mays
agaaaaccaaacgaagcaagacactgttctgggctcgggcccaccatttgtcctcctccgccggcgactcgccgatgcccttgccggactgcggccgccgcggcttccccaccctaccgctcctccttctcgtccttcacgcgctccccaggcggctcccgcggtgcgcggccgagtcggcgacgtgcctcgcggtgtaccgggaggggggcgcccccgcggtgttccagtccgcgcactgcccgcgctggaccctccccccgcacgacggccaggggggtggcgggggaaagagcatccctatggggtgccacgtggcggcggatcgcggccgccgccggtcccaggaggaccgtgccgtctgtgccctcggcatccgcatccccttcgggttgataagatggaaagcaccgaagtccaaactggacgctgattccagatagtaacaccaggaacattctggaggtttactgttcaaagatacacaccataagctgggtgtcaatcgtaacactgtgaatttgctggagagaacatgagaattaaggaggttgatgtgggagtggtggcaatatttgacggtcataatggagctgaggctagtgagatggcttctaagctttttctggattacttcttgctccatgtttattttcttctcgatggcatacactctctgcggttcagaaaatctactgggaaactgacatatagggaagttactatttttaacaatgtatttaatctgtacaagcatggccaatccgaccatgcagagaggtcatgttgggcatcaccagccattctagaccggtcatttcatacggaaattctgaaggaatcactaatgagggcagttcatgatattgatttaacattctccaaggaggggaaacgaaggagaaagagaaactcaattaatcacgaggaatttgctttggcaaattatgatggaccgttgtatcatgcaagggagttgacaaaggaccatcatcctaatagagaagacgagagaaaccgtgtggaggctgctggtggttatgttcttgagtgggctggtgtatatcgtgttaatggcgagctagcactatcaagagctattggtgatgttccttacaaaagatacggtgtaatatcaacacctgaattgacaggctggcagattctgtcagaaaatgacagttttcttattgcgtcatctgatgggatctttgagaaaatgactatgcaagatgtttgtgacctaatgctgcatgcaaaaattcgtgttaaacatgattttggatcctctgccataacacaacgtaatttggcagattacgtagttcatgttgctttacagaaaggcacaacagacaatgtggctgctgtggttgttccattgggatcacctggtagcactggtactacattaaaagattcgtcccagttcgaagaagatctcaagatatctatttctccaatgttgaatgttccatatggattgaagcctgatcatggacatagttcagctgtcattgacatggagtatttcaagcgctcatcaataaagttccagaggttcttggttgaagcaaaacctaagaaacttggttgtttctatttatccgagagtctggatgaagatatggactatatatttagggtgccggaagcataccagcgtgaagaagtccatgacttcaaccacataccagctgagactgccttatattctgatggtaatctggaaaaatacaaggacaaacacttttgcttgtaccttggtcccgaagatggcgaaatgggacagtgcaatggtcctgaagcttttgcaaacttttttggtctacttgactcccttccgcataatggaagcaaaccaaatggttcacactcctttggcaacacgatcgatttcaggtacaagctcaagagaaggtttgatcgtgggtcgtacggtgaagtctggttggcatttcattggaattgttctgaagatacagatgttcataaagagcctccacactttacaaatatatctcaatcagagatgtataattgcacaagttcaggcagaatgtcatctgatgaagatcatggttcaggcacagtaaatggtgatttattcatactgaagcgcataatggtggagaggggaaatgcagcttacttgagtggattgcgggagaaatactttggggaattattttcaaatgcttccaggactcttgaaggtttgtcgaggatagaatcatcgactatctcagtggacatgctatatgatcctgatatccatctagaaaagaacttgtcagctactgaagaaccacttaagcatgtggctaggtttatagaatcttttgaatcagaatcaagggaaatttggctggtgtatcacaatgaaggccactcattatcaaaattgatatatacagctgaagaaacgaagttagtcactggcaacaataatgagagggtcagacatatccaagttttgcacccatcgaagtggtggcattggctaaggacaacaaaagctgggctaaagcagatgcaaaacctcttatggcagctgagaacatgatcatttgctttgaggacatggagactggaaagtgtctaagagaggttccatctgaagcaaagcaaaataagctgaacatgcgtctgattgacttcggcagtgccattgatgattacacgttgaagaatctttatggtccaggacctactcgatctgaacagacatttgagtacactcctccagaggcactccttaattcaaactggtttcaaggatcaagaagtgcaaggcttaagtatgacatctggagcgttg

SEQ ID NO: 3919 - DNA, 2955 bp, Zea Mays
gctgccaccacccacctcctctctcttcacctcccattctctctctccgccccctgcttgcctgctctacccacctcataaacttccccactccttcctccatttccatccattcttctccccaggctgccgccgctggcagccgcatatgctgctgctggtgctctgctactccttcgtcaatctctgctgccgtttggcattagacggattccagtcaactccatccattttgatggttaaactatcaaagatactgccggtgctgtgaatggctgctcaagttcctcagattctttaaattctgagttcatcctcaattcggggctcttggtttaagccgttggacgattcattgtaccgcggaggattttttatggctcatgttgcctcgtgacattgtggtctgaccaaaagctgcttttacatctccttcatgggctgttcagcttccaagtgttgttcacaattgaagtgctctttgtgctcaaatgggtgcctggggcaggcacctgactccccgagggaatccaggggaaagtcaagtcgggggagagggagggtagattctagtggttcagatgattcttctggtgatgatctcggggaagatgacgatgcttttaaccatatgaatgctacaagggaatcaactgctggcatcagccgactgtcaagggtgtcgtcacagtttcttcctcccgatgcttcacgcaaggttcaggtccctttgggtaactatgacctgagatactccttcctgtctcaaagaggttactacccagaatcactggacaaggcaaatcaagatagctactgcgtacataccccatttggacctagtcctgatgaccacttattcggtgtgtttgatggccatggggaatatggagctcaatgctcgcaatttgtgaagcgaagattatgcgagaacctgctcagagataacaggtttcgtaccgatgctgtgctggctcttcattctgcttttgtggcaacgaacacacagctgcatgccgacaacttggatgactccatgagtggtactactgcagtcactatcttggtcaggggtaaaactatttacgttgcaaataccggtgattcgcgtgctgttatcgccgaaaaacaaggggatgacattgtcgctgttgacctttccatagatcaaaccccttaccggtttgatgagcttgaaagggtcaaggaatgtggtgctagggttctaacgttggaccaaatagagggcctaaagaacccagatgtgcagtgttggggtactgaagaaagtgacgatggcgatcctccaaggttatgggtgcaaaatggcatgtacccaggaactgcttttacccgtagcattggagattctgttgctgagtcaattggtgtcattgcagatcccgagatttttgtcctggatctcaattccaacaatccatttttcgttcttgctagcgatggcgtttttgagttcctttccagtcaaacagttgtcgacatggtttctaaatacaaggatcctcgagatgcatgtgcagaaattgtcgctgagtcctatcgtctttggctacagtatgaaactcgtacagatgacattacaatcatactcgtgcatattaatgggttaactgataaggaatctacccagactgttacgaaggtgactttacaaccttcacaacaagtagtaggactggcaggccctgaatcgccactaatagtaagttccaacaccaataatcagcgctccaagcatgatttatcacgggcacgattgagggctcttgaaagttctctagagaatggtcaattatgggtccctccatctccatcgcatcggaagacatgggaagagcaagcgcatattgagcgggtactacatgatcatttcctatttaggaagcttactgactcacaatgtcatgttctacttgattgtatgcaacgagttgaggtgaaacctagggatatagtagtacaacaggtgactgcttctatgtagttggtagtggtgagtatgaagttctggctattcaggaagaaaatggaaaggaaataaccaaggttctgcatcggtatacagctgacaagttatcttcttttggggagctagcactaatgcacaataagccgcttcaggcttcagttcgtgctgtgaccagtggaacattatgggctctaaagagggaggacttccggggtattttgatgtcagaattttcaaacataccatcattgaagttgctccgatctgtacaactgtttacaagatttacagtgcttcaactaagtcaacttgccgagtcacttgttgaagtatcttttgcagatgggcaaataatagtagataagaatgataaattctcttctctgtatatcattcaaagaggtcgtgtgagacttatattggctactgatcaaatgacttcagatacttgggatctcattagtgctgaaacaaagcaggcacaaagtagtcgggaaaatggtaattatgtgcttgatatagatgagggagggcacttcggagagtggtctctcattggtgagactattgctttcactgctattgctgttggtgatgttacttgttctactatcatgaaggagaaatttgactcaattgttgggccttttcctaaactttcgcaagctgattccaagattaaagaatctctggtaactctggagaatgttgcagatggtgatttcccttttaggagggtgaagctctcagatttggaatggaaaatgtgcatatatgctgctgattgcagtgagattggtcttgtccaagtcaggggctatgaagagaatttttacaatggtttgaaaaaatgtggaccatccatcaatataaattgaatggtgcaaacacgagaggtaccaatagaaaagtactcggaagtactaaaacagtagggatgataccaaaatgtgtgggagcagtac

SEQ ID NO: 3920 - DNA, 3043 bp, Zea Mays
tctgctgccaccacccacctcctctctcttcacctcccattctctctctccgccccctgcttgcctgctctacccacctcataaacttccccactccttcctccatttccatccattcttctccccaggctgccgccgctggcagccgcatatgctgctgctggtgctctgctactccttcgtcaatctctgctgccgtttggcattagacggattccagtcaactccatccattttgatggttaaactatcaaagatactgccggtgctgtgaatggctgctcaagttcctcagattctttaaattctgagttcatcctcaattcggggctcttggtttaagccgttggacgattcattgtaccgcggaggattttttatggctcatgttgcctcgtgacattgtggtctgaccaaaagctgcttttacatctccttcatgggctgttcagcttccaagtgttgttcacaattgaagtgctctttgtgctcaaatgggtgcctggggcaggcacctgactccccgagggaatccaggggaaagtcaagtcgggggagagggagggtagattctagtggttcagatgattcttctggtgatgatctcggggaagatgacgatgcttttaaccatatgaatgctacaagggaatcaactgctggcatcagccgactgtcaagggtgtcgtcacagtttcttcctcccgatgcttcacgcaaggttcaggtccctttgggtaactatgacctgagatactccttcctgtctcaaagaggttactacccagaatcactggacaaggcaaatcaagatagctactgcgtacataccccatttggacctagtcctgatgaccacttattcggtgtgtttgatggccatggggaatatggagctcaatgctcgcaatttgtgaagcgaagattatgcgagaacctgctcagagataacaggtttcgtaccgatgctgtgctggctcttcattctgcttttgtggcaacgaacacacagctgcatgccgacaacttggatgactccatgagtggtactactgcagtcactatcttggtcaggggtaaaactatttacgttgcaaataccggtgattcgcgtgctgttatcgccgaaaaacaaggggatgacattgtcgctgttgacctttccatagatcaaaccccttaccggtttgatgagcttgaaagggtcaaggaatgtggtgctagggttctaacgttggaccaaatagagggcctaaagaacccagatgtgcagtgttggggtactgaagaaagtgacgatggcgatcctccaaggttatgggtgcaaaatggcatgtacccaggaactgcttttacccgtagcattggagattctgttgctgagtcaattggtgtcattgcagatcccgagatttttgtcctggatctcaattccaacaatccatttttcgttcttgctagcgatggcgtttttgagttcctttccagtcaaacagttgtcgacatggtttctaaatacaaggatcctcgagatgcatgtgcagaaattgtcgctgagtcctatcgtctttggctacagtatgaaactcgtacagatgacattacaatcatactcgtgcatattaatgggttaactgataaggaatctacccagactgttacgaaggtgactttacaaccttcacaacaagtagtaggactggcaggccctgaatcgccactaatagtaagttccaacaccaataatcagcgctccaagcatgatttatcacgggcacgattgagggctcttgaaagttctctagagaatggtcaattatgggtccctccatctccatcgcatcggaagacatgggaagagcaagcgcatattgagcgggtactacatgatcatttcctatttaggaagcttactgactcacaatgtcatgttctacttgattgtatgcaacgagttgaggtgaaacctagggatatagtagtacaacagggcggtgaaggtgactgcttctatgtagttggtagtggtgagtatgaagttctggctattcaggaagaaaatggaaaggaaataaccaaggttctgcatcggtatacagctgacaagttatcttcttttggggagctagcactaatgcacaataagccgcttcaggcttcagttcgtgctgtgaccagtggaacattatgggctctaaagagggaggacttccggggtattttgatgtcagaattttcaaacataccatcattgaagttgctccgatctgtacaactgtttacaagatttacagtgcttcaactaagtcaacttgccgagtcacttgttgaagtatcttttgcagatgggcaaataatagtagataagaatgataaattctcttctctgtatatcattcaaagaggtcgtgtgagacttatattggctactgatcaaatgacttcagatacttgggatctcattagtgctgaaacaaagcaggcacaaagtagtcgggaaaatggtaattatgtgcttgatatagatgagggagggcacttcggagagtggtctctcattggtgagactattgctttcactgctattgctgttggtgatgttacttgttctactatcatgaaggagaaatttgactcaattgttgggccttttcctaaactttcgcaagctgattccaagattaaagaatctctggtaactctggagaatgttgcagatggtgatttcccttttaggagggtgaagctctcagatttggaatggaaaatgtgcatatatgctgctgattgcagtgagattggtcttgtccaagtcaggggctatgaagagaatttttacaatggtttgaaaaaatgtggaccatccatcaatataaattgaatggtgcaaacacgagaggtaccaatagaaaagtactcggaagtactaaaacagtagggatgataccaaaatgtgtgggagcagtaccaaaatagttaagacaaaaaccagatttttattatttaatagtcatctcattatcttcctgaggggtaaaactgg

SEQ ID NO: 3921 - DNA, 4258 bp, Zea Mays
gctgtattaatgctcatcaccgattccgacttgccctcaccttgtagcctaaacttgcggctactctgctgccaccacccacctcctctctcttcacctcccattctctctctccgccccctgcttgcctgctctacccacctcataaacttccccactccttcctccatttccatccattcttctccccaggctgccgccgctggcagccgcatatgctgctgctggtgctctgctactccttcgtcaatctctgctgccgtttggcattagacggattccagtcaactccatccattttgatggttaaactatcaaagatactgccggtgctgtgaatggctgctcaagttcctcagattctttaaattctgagttcatcctcaattcggggctcttggtttaagccgttggacgattcattgtaccgcggaggattttttatggctcatgttgcctcgtgacattgtggtctgaccaaaagctgcttttacatctccttcatgggctgttcagcttccaagtgttgttcacaattgaagtgctctttgtgctcaaatgggtgcctggggcaggcacctgactccccgagggaatccaggggaaagtcaagtcgggggagagggagggtagattctagtggttcagatgattcttctggtgatgatctcggggaagatgacgatgcttttaaccatatgaatgctacaagggaatcaactgctggcatcagccgactgtcaagggtgtcgtcacagtttcttcctcccgatgcttcacgcaaggttcaggtccctttgggtaactatgacctgagatactccttcctgtctcaaagaggttactacccagaatcactggacaaggcaaatcaagatagctactgcgtacataccccatttggacctagtcctgatgaccacttattcggtgtgtttgatggccatggggaatatggagctcaatgctcgcaatttgtgaagcgaagattatgcgagaacctgctcagagataacaggtttcgtaccgatgctgtgctggctcttcattctgcttttgtggcaacgaacacacagctgcatgccgacaacttggatgactccatgagtggtactactgcagtcactatcttggtcaggggtaaaactatttacgttgcaaataccggtgattcgcgtgctgttatcgccgaaaaacaaggggatgacattgtcgctgttgacctttccatagatcaaaccccttaccggtttgatgagcttgaaagggtcaaggaatgtggtgctagggttctaacgttggaccaaatagagggcctaaagaacccagatgtgcagtgttggggtactgaagaaagtgacgatggcgatcctccaaggttatgggtgcaaaatggcatgtacccaggaactgcttttacccgtagcattggagattctgttgctgagtcaattggtgtcattgcagatcccgagatttttgtcctggatctcaattccaacaatccatttttcgttcttgctagcgatggcgtttttgagttcctttccagtcaaacagttgtcgacatggtttctaaatacaaggatcctcgagatgcatgtgcagaaattgtcgctgagtcctatcgtctttggctacagtatgaaactcgtacagatgacattacaatcatactcgtgcatattaatgggttaactgataaggaatctacccagactgttacgaagcgctccaagcatgatttatcacgggcacgattgagggctcttgaaagttctctagagaatggtcaattatgggtccctccatctccatcgcatcggaagacatgggaagagcaagcgcatattgagcgggtactacatgatcatttcctatttaggaagcttactgactcacaatgtcatgttctacttgattgtatgcaacgagttgaggtgaaacctagggatatagtagtacaacagggcggtgaaggtgactgcttctatgtagttggtagtggtgagtatgaagttctggctattcaggaagaaaatggaaaggaaataaccaaggttctgcatcggtatacagctgacaagttatcttcttttggggagctagcactaatgcacaataagccgcttcaggcttcagttcgtgctgtgaccagtggaacattatgggctctaaagagggaggacttccggggtattttgatgtcagaattttcaaacataccatcattgaagttgctccgatctgtacaactgtttacaagatttacagtgcttcaactaagtcaacttgccgagtcacttgttgaagtatcttttgcagatgggcaaataatagtagataagaatgataaattctcttctctgtatatcattcaaagaggtcgtgtgagacttatattggctactgatcaaatgacttcagatacttgggatctcattagtgctgaaacaaagcaggcacaaagtagtcgggaaaatggtaattatgtgcttgatatagatgagggagggcacttcggagagtggtctctcattggtgagactattgctttcactgctattgctgttggtgatgttacttgttctactatcatgaaggagaaatttgactcaattgttgggccttttcctaaactttcgcaagctgattccaagattaaagaatctctggtaactctggagaatgttgcagatggtgatttcccttttaggagggtgaagctctcagatttggaatggaaaatgtgcatatatgctgctgattgcagtgagattggtcttgtccaagtcaggggctatgacaagatgagaactttaaaaaggttttacatcaagagagtacaagatctccataaggaagtacaagtatttgaggaaaaggaccttatgaaaagcttgagcaaatcaacttgcgtgccagaagttctgtctacttgtgctgatcagtcataccttggaatattactgaattgttgcctttgttgctcactggcttcaatacttcatacaccactaaatgagacatctgcaagattctttgcagcctcagttgttgttgctctagaagaacttcatcagaagtccattatctatagaggtgtttcggcagacattcttatgctcgacagatcaggacatctgcagctggtggattttaggtttgcaaagaagttggaaggtcaaaggacatacacaatatgtgggatcgctgactctctggcaccagagattgttcttggtaggggtcatggatttcctgctgactggtgggcacttggagttttgatctatttcatgcttcagtcagacatgccattcgggtcctggagggagagcgagctggaacctattacaaaaattgccaaaggccaccttgttatgccagtgtctttcagtgcagaagttgttgaccttataaccaagctactcgtggtcgacgaaaacgcgcgccttggaaccagtggtgctgaagctgtgaagaaacacccctggtttgatggcactgattgggagcgaatagcatctgggacttgtgcagcacctgaagaaatcactgagcgcatcaactactgtatagaaactcttaatgaggacttatccgcatctccttccgtgccgattgaagacccagatgatctcactgctccagagtggatccaggattggtgatctcaatagttgcatgactgtccaatgatgaattgttctagttgaggaaaacgtctctagtttttcaccgagcattctcatatcaaatggaagaaggtatacataagagttgatcgaactgacaagttgtacataccaaagattattccttctgtgatcatagatcagaatttgagatgccaagcaacagagactttggtctatgtttgctgcatagttcctggtaagaaggatctggatagtttgttggtgatccatgtaattatatatccaatttgtgcactcccttgctgtttcggaaatggatactggtcgggaggaaggtcaataattatcgttgtgaatacggacatttctttcatctgccactgtcaatcgatttgtacaagatcaagttttccaaatataattatgaaggttaccaaaacaagagcttgttatctcatatacacggtgcaaataacctgcgacgcgacatttggcatctggacactacacctacctaaaacaaaacttgatgcataatttaaataaaatacgtaaaatacaaaaaaatacataactcataaaaaagactacataaa

SEQ ID NO: 3922 - DNA, 2957 bp, Zea Mays
aaaacccttctctacgcgtctcggtgcctcgccggctcgccgctcgcaatcgccggttcgccgtcgccatttgtccccttcccccccctcgcgaccgcccgcttcgagtgtcccccaaacaaaaaatccctcccgcctgcacggccctcgctggacgcggagcatggcggaggagcagatcgaagaggcgtccatggccgcggcggcggccacgccgttccagctccagttcgacaagcccatcccgttccagataaaaatggcagaatggaatccagagaaggatctgcttgctatggttactgatgactccaaggttctcctccatcgcttcaattggcaaaggctttggacaatctctccagggaagtgcatcacatcaatttgttggagccctgatggtaaaataatagcacttggcacagaagatggtttgattcttttgcatgatgtggagaatgggaagatgctaagaactacaaaatcccacgatgttgccattgtatctttgaattgggcagaagacgatccactgtcaaagtctgacaaggatgagtttttatcctatgaagaccgcaccacacgtttctttcctcctcctcctgtgatgcctaggataggtggactacgttctggagatactggtcttgcggatgagaacgaagaagctattccagaattttctagtgcttcctgtcagcgttttaacattctgtgcagtggtggcaaagatggttgtgtttgcttcagcgtttttggaatatttcctgttggaaagataaacataactaaaatcccaatcaatgttggatcctctagaaagagttaccaactccaggatgcttcagtcagcaaggtctctttatcaagaaacctccagaaatttgttattctgtgctttggaaagttggttgataccgacaacctctctgacagctgcgaaaattctggattacattgtctctacctagatacttctatcttcttcaaccgaaaaaatgagctgcatcaggtgtcccaacaagcatcaagtattcaagatatggttgaagttgtccgtgcttctgtatctttaatatccaaacaatggtcaaacgccatgagtttattccatgagaaatttagtgccttgcccaatctgatatctacacatggagtggaatctagttctgaggatgagtttcttagccttttgtttgggacacgaacaagtccagcccttcaccattttttagctagttcacttggtgaagcgggtctcaagaggatagccaaggctgttgacagtgctggaagagatattcgtggcattatcactgagcatcttcagcctgcagtggagattatttcattcagactcgcagaattaagaggcctttcaagatggcgttcacgatttcaaactatcgggttagatggaaaccttattgatggtgtaactgagagtatagggatgctagttgttcaagtggagcgcttttcaagggtggcagccactgttgtttatctgtttcaaaatttctttgcctgggttttaaagtctgttagaatattattaaatgaacctaccgaccaagttccagcagcaaacagtgaacttgtggtgatttttcttaagtttcttcttgataaggatccaatcaaacaactacttgaagcagatgagagaattgagtgtgatatcttgaaggaggctttcttgatgccatttactgctatctcttcgcagatacaatgtcaaggattgcttcctttatatcctgttacatcatcagctaccttgtcatcatcctgctcgccaacatcaatatcattttataaggatgaagattcatcgcatgaggaatcctcctatagcttgactgactatgtatgcttgaagatacctgatggatcattaaataaagtaaattgcatcggtgtgataaagggctctggtaactgttgtactaccctcagcatgatgtcactttcaggttttctgttgcatatacctgacggatatgagtgtgttgacctgtcactttataaggacaaccaggtagttttactactgagtgaaacgtcttgttctgatagccctggaaaatcttggatggtgatgctgcaaatagagaacttttcctttatgccactctcaggaacattccctgcaaatatttacagtttgcaaaaactggtggcactcgatctgcaattggacacagattatgggaaagttcgtagcatacctcacaccgtatctactccatttgcagttagtgcatcgagaggagtagcctgtgtcttttcatcccggaggcatgccttggtttatatccttgatgaggatgaggaagcggagggggatgaaacttccgatatggagtgattattatccgattccttcaccttcggctcagccatttcagcttcaggcttcagcattgtcttatgtcttgttgcaatggaggcagaggcccggagatatcaatatgtacggaaacgtcgtctcattttcacggcaatgcatgcccgggttcagaagctacgtcgcgtggtaacagcctaacaggtcaccacgcacgcgcagccgcttttagagctcatgaaattgtcagtcgtcaccctgatgtgtgtaggccctgcaggttggacttcatcgtggttatttggaaagcgagcaaaattgtacacccatttctgatcgtgttgtgttatacgagtgcttgctagttgtgtaaaaaatctagaggtaacgtcaacgtgcaaaaaaaaagggtctgtcgcaaatcttgacggtcactagagctatcgcatttctaatcgtgtttgtgttatgtggattcattattttattgttcgagctgctaatgtacttggtaaaatacattgttgactgaactcgtgttgcgccttcaactcatgtttcctttcatcaaaccataggcatatctaagaacaagaaaacatgcctc

SEQ ID NO: 3923 - DNA, 1957 bp, Zea Mays
atgcagtttgtacccgggctttataccaggcttgcgtgttcattcgttgtgtcctcttcttctttctgttctccccgcgtgctctgtctctctcttcctctctgcctctctctctctctctcagcggcgactagggacagccgctgcctccctacgcctggtgcccaggtatcctttgccggcgacgagcacccggtaggggtatgggaatggaggtcgttggtgctgaagcagcaccagcagaggtcaaaatatccgatggagaagtgaatctattccaagagaaggaaagcaaagcaactgcaaaagaacgtgaggaggcagctgtttttggttcagagacaactgcgaatgtcactgatctggcacctccaaaggatgcgaaggatgagtggcctgaaccgaagcaaacttatgtcttctacttcatcaagatccgctcatttgaggatcctaaactgagggtaaaactcgagcaggctgacaaagaattccagaagaagatccaagctcgttctaaacttattgaggcagtaagagccaagaaggcagagcgttccagtattatcgcagagttgaagccattgagtgctgagaacaaacaatataatgaagttgtgaatgagaagataaaagagatggagcctcttcgaaacagcttgggaaagtttcgtgaggaaaacaatgccatgagggcacagagtgcaggcttatgctcttccatcgaagagcttgacctaacgatcaagatgctgaatgatcgcatggtacatgaaagcatacctttatctgaggagaagcgtctagtgaaagaaattaaggaccttgagaaaaccagatcgaaagtcatctctaatgctgctaacagggctaaattgcaaggtacagtggttgaaaaagaggctatacaggaccaggtcaaaatcatcggggagggcattgatggaataaagaaggaaagacaggcagtaagatctaagattaaggtcctggaggatgagctaaaacttgttgatgctgagattggattgcttcaagaagatttagatgcagcaactgccagaaaggataaggcatatgaatcgttgcaagaattgagagcagtgcgtgatgcaaaaaacgcatcctccatgcataaccgtacagttttaaccagagctagggattattcttcaaggaatatgctgacagaattgcaagagctccacaaaactgaggtcgacaagttcatgacccaatggtgtgaaagtaaggccttcagagaggactacgagaagagaatcctcacatccctaaatagccgacagctgactcgagatggtcggatgaggaatcctgatgagaagcccatatttatcgagtcacaggcgccagctccagctccagagcccatccctgtaaaattgcctgcaaaacaagccaaggaagtgcctgctccccaggcagatgatgctcccaagactgaagctccttcgaaaggacctgtcaagtcgcacaaggcaaaagctgctcttgatgctgatgatgattatgaggccgagcccctgaaggagaaggcaaagcctacggaggctgatgtggctaagttgaaagagatcaagaggcaggaggagattgagaagaacaagcttgcattggagaggaagaagaagcaggctgagaagcaagcagcaaaagccgcggcccgggcacagaaggaagctgagaagaagctgaaggtgagaagaaagagtgcaaggtctgcttgagacgtgaaggaccagaggagagtcttgttcgctttcgatgttgttagttggagccgaagatacagttgtttttggttgcgactttgctagatctctctctatatactgcgactgatatatcccgtgtacttttgaagtgatgcgtatattgacatctggaataacaatgcctttcagtttcattatctcaataatggcccttcctgtgc

SEQ ID NO: 3924 - DNA, 1325 bp, Zea Mays
atgttctgccggttccagcctcggtcgcggatcgcccactctcctcccccacggacgcagatcccccgcctcgattcctcattccttcaatggcgcatcccttccttcgatggcgctcctcgcatcccgcctgcccgccgcgctcgattcctccttccttcaatggcgcatcccgcccgcagccaccaatcaacgcccgcggatcctcgtcaatcaactcccgcggatcctccaccctcctccccaccgcggcggatcctccaccctcctcgtcaatcaacgcctgtggtcctcccccacgcggatcctcgcaccacccactcccccgcgtgcgtccctggcccctcgagctcgcgcaggccagaggaccgcgctcgcccccctgaagattactccctccccaaggagctggcggcggcgtgactgtgtcgggagaaggaggccgtagaggacgctgcgcgggggctgcggcaggagctcgactccgagcggtcctccccggagatggcagccagatctgaccattgagccccctaatcgagcggatccaaggtctgtgcgctgggctgaaggcggacgcgcttgctcatcaaccgcgtgcggtcgagtgctagagccaccgattcaccgtcgagtgcatcacccgctacatcgctgggctacagcagaagtatacacaaagtggtggagtccgctccctttggcttcgaacccgacaccaataagccagcgctgtaccagaccgatccatcgggtaccatctctgcttggaaggccaatgccatgggaaggaactccaactctatgtgtgagtttctgaagaactacaaagacctccggcaaggagaccatcaagtttgctatctgtgcacttctagagattgtgaactgaacttaaatcatgcattcagtattggtctctagagaggaagctctgccaagcattactaagaactgatcaggtatacttatccatggtggaaagaaaaggtgattgactcagacttgaaaagaaaagatggcctttgcccattgacgcctgaggagactactcttgtcctcagagcacttgacatcgatagaagtatgcaaatatacattgctgctggggaaatatacggtggaaagcacaggatggcttctctaacttcagcatacctaaatgttagccattcatgctgttggacgccttggatgaactaccttttcttcaacaaagatggagctcatgcagattgatttagtccatttcttgcaatgtaacatatatgtttcatacgaattttgtactcccgtcgcatcgcacgggcactcacctagtatat

SEQ ID NO: 3925 - DNA, 1325 bp, Zea Mays
tgcatgttctgccggttccagcctcggtcgcggatcgcccactctcctcccccacggacgcagatcccccgcctcgattcctcattccttcaatggcgcatcccttccttcgatggcgctcctcgcatcccgcctgcccgccgcgctcgattcctccttccttcaatggcgcatcccgcccgcagccaccaatcaacgcccgcggatcctcgtcaatcaactcccgcggatcctccaccctcctccccaccgcggcggatcctccaccctcctcgtcaatcaacgcctgtggtcctcccccacgcggatcctcgcaccacccactcccccgcgtgcgtccctggcccctcgagctcgcgcaggccagaggaccgcgctcgcccccctgaagattactccctccccaaggagctggcggcggcgtgactgtgtcgggagaaggaggccgtagaggacgctgcgcgggggctgcggcaggagctcgactccgagcggtcctccccggagatggcagccagatctgaccattgagccccctaatcgagcggatccaaggtctgtgcgctgggctgaaggcggacgcgcttgctcatcaaccgcgtgcggtcgagtgctagagccaccgattcaccgtcgagtgcatcacccgctacatcgctgggctacagcagaagtatacacaaagtggtggagtccgctccctttggcttcgaacccgacaccaataagccagcgctgtaccagaccgatccatcgggtaccatctctgcttggaaggccaatgccatgggaaggaactccaactctatgtgtgagtttctgaagaactacaaagacctccggcaaggagaccatcaagtttgctatctgtgcacttctagagattgtgaactgaacttaaatcatgcattcagtattggtctctagagaggaagctctgccaagcattactaagaactgatcaggtatacttatccatggtggaaagaaaaggtgattgactcagacttgaaaagaaaagatggcctttgcccattgacgcctgaggagactactcttgtcctcagagcacttgacatcgatagaagtatgcaaatatacattgctgctggggaaatatacggtggaaagcacaggatggcttctctaacttcagcatacctaaatagccattcatgctgttggacgccttggatgaactaccttttcttcaacaaagatggagctcatgcagattgatttagtccatttcttgcaatgtaacatatatgtttcatacgaattttgtactcccgtcgcatcgcacgggcactcacctagtatat

SEQ ID NO: 3926 - DNA, 1498 bp, Zea Mays
atgttctgccggttccagcctcggtcgcggatcgcccactctcctcccccacggacgcagatcccccgcctcgattcctcattccttcaatggcgcatcccttccttcgatggcgctcctcgcatcccgcctgcccgccgcgctcgattcctccttccttcaatggcgcatcccgcccgcagccaccaatcaacgcccgcggatcctcgtcaatcaactcccgcggatcctccaccctcctccccaccgcggcggatcctccaccctcctcgtcaatcaacgcctgtggtcctcccccacgcggatcctcgcaccacccactcccccgcgtgcgtccctggcccctcgagctcgcgcaggccagaggaccgcgctcgcccccctgaagattactccctccccaaggagctggcggcggcgtgactgtgtcgggagaaggaggccgtagaggacgctgcgcgggggctgcggcaggagctcgactccgagcggtcctccccggagatggcagccagatctgaccattgagccccctaatcgagcggatccaagatttaggcggtggtgaccaatctgaacggcgcacactcgacatggccattgctatggcactaagggagagcaagcccgtgtacctcagcatcagttgcaacctccctgggctacctcattctacctttagttttatgttcaagtacatgattatcgggagaaaccaagatatggtctgtgcgctgggctgaaggcggacgcgcttgctcatcaaccgcgtgcggtcgagtgctagagccaccgattcaccgtcgagtgcatcacccgctacatcgctgggctacagcagaagtatacacaaagtggtggagtccgctccctttggcttcgaacccgacaccaataagccagcgctgtaccagaccgatccatcgggtaccatctctgcttggaaggccaatgccatgggaaggaactccaactctatgtgtgagtttctgaagaactacaaagacctccggcaaggagaccatcaagtttgctatctgtgcacttctagagattgtgaactgaacttaaatcatgcattcagtattggtctctagagaggaagctctgccaagcattactaagaactgatcaggtatacttatccatggtggaaagaaaaggtgattgactcagacttgaaaagaaaagatggcctttgcccattgacgcctgaggagactactcttgtcctcagagcacttgacatcgatagaagtatgcaaatatacattgctgctggggaaatatacggtggaaagcacaggatggcttctctaacttcagcatacctaaatgttagccattcatgctgttggacgccttggatgaactaccttttcttcaacaaagatggagctcatgcagattgatttagtccatttcttgcaatgtaacatatatgtttcatacgaattttgtactcccgtcgcatcgcacgggcactcacctagtatat

SEQ ID NO: 3927 - DNA, 2069 bp, Zea Mays
tgcatgttctgccggttccagcctcggtcgcggatcgcccactctcctcccccacggacgcagatcccccgcctcgattcctcattccttcaatggcgcatcccttccttcgatggcgctcctcgcatcccgcctgcccgccgcgctcgattcctccttccttcaatggcgcatcccgcccgcagccaccaatcaacgcccgcggatcctcgtcaatcaactcccgcggatcctccaccctcctccccaccgcggcggatcctccaccctcctcgtcaatcaacgcctgtggtcctcccccacgcggatcctcgcaccacccactcccccgcgtgcgtccctggcccctcgagctcgcgcaggccagaggaccgcgctcgcccccctgaagattactccctccccaaggagctggcggcggcgtgactgtgtcgggagaaggaggccgtagaggacgctgcgcgggggctgcggcaggagctcgactccgagcggtcctccccggagatggcagccagatctgaccattgagccccctaatcgagcggatccaagatttaggcggtggtgaccaatctgaacggcgcacactcgacatggccattgctatggcactaagggagagcaagcccgtgtacctcagcatcagttgcaacctccctgggctacctcattctacctttagttttatgttcaagtacatgattatcgggagaaaccaagatatggtgcttacactatttttgtaaatccttttgtagcaatgtatgcattgctcttacgtttcctccagttatatttatgagttcccttgtatattgatggactttaggtgcaaaatatttattagttatgtgagaatttatggccaatatctggtttgtttaatggttttacacactaacttcaaatacagcatgaattcctgtcactagcccctataaggctattggagatcgatattcaaataaaaactcttaccgcacagtgcacattgtatagttgaagaagtgcacactctttatgtttttaaaaggaaaaacatttcaagggtgtttagtagccatggtactgtaaacctgtgcattctcttgcaaattaatgcacaaaggttgtgctaacttgcccctaatttttttttatcccacttggcctgttatacttatacaagctaaagtagacttctaagttaaggcacacatgcagaattgttgccactttctcattttgcccttaattttttaccctccatagcatccatttattgctctgatgatcaaactattggtatgatataattaagtactgaagaaaaaaagtttcaaccattttagaaataatatctctgacccgaattttcgtctccccaggtctgtgcgctgggctgaaggcggacgcgcttgctcatcaaccgcgtgcggtcgagtgctagagccaccgattcaccgtcgagtgcatcacccgctacatcgctgggctacagcagaagtatacacaaagtggtggagtccgctccctttggcttcgaacccgacaccaataagccagcgctgtaccagaccgatccatcgggtaccatctctgcttggaaggccaatgccatgggaaggaactccaactctatgtgtgagtttctgaagaactacaaagacctccggcaaggagaccatcaagtttgctatctgtgcacttctagagattgtgaactgaacttaaatcatgcattcagtattggtctctagagaggaagctctgccaagcattactaagaactgatcaggtatacttatccatggtggaaagaaaagagcacttgacatcgatagaagtatgcaaatatacattgctgctggggaaatatacggtggaaagcacaggatggcttctctaacttcagcatacctaaatgttagccattcatgctgttggacgccttggatgaactaccttttcttcaacaaagatggagctcatgcagattgatttagtccatttcttgcaatgtaacatatatgtttcatacgaattttgtactcccgtcgcatcgcacgggcactcacctagtatat

SEQ ID NO: 3928 - DNA, 1935 bp, Zea Mays
ctgggccttttgtgataagcacgaggacgtgggcacacgtgcagctgtccccaacccaaggaccgacccatccaaatcagttccgtcacgtctcttcctctcccgtctccgcagacgcctcccttttcttctcactccactccgccgcccggattcagagcgagaggaggcggagagggcggacatggcggcgatgttggtgggcgcgctgcggaggggaagtggatgccgcggcggcttgcgccttatcgctcattcgcttcgcagattcgtgagcacgctcgtcgtagcggagcacgaaggcgggttcgtcaagccgtcgtcgctgagcgcattggccgccgcggaggccattgccaaggacaacaaagtttctgtcctgctgggtggttccgggccggcgcttcacaaggccgccgaccatgccgcgtgcagccatccactggtgtctgaggtgctcgtggccgattcggaagccttggcgcatcctctggctgaaccctgggccgagctactccgttccgttcagcagaaaggaggctactctcatgtcatagcttcatccacatcattcgggaagaatttgcttccacgtgctgcggctctccttgatgtgtcccctgttactgatgtcaccgctgtaaaggagccacacgtctttgtgaggccaatttatgctggaaatgcactttgtactgtgaaatatactggagaggggccttgcatgatgagtattagatcaacttcattttccccagctactgaggctatgtctgaaacaaaggttgcacctatcacccagggaaatctacatgggtgaatctgacatcacaagacacggagcggcctgatcttgcaaatgcacccgtagtagtcaccggaggcagaggtttaaaaagtgctgaaaattttaaattgttggagcagcttgctgagaaacttggcgcagcaggtttgactttatatctcaattttttcctcttccctgtccatactattatttatactccatctgttctaaattataagatattttgacttttctatatacattgtttttatatctagctacaatgtatgtttaaatgcattagcaaatctatgtatctaagaaagccaaaacttcttatgatttgaaccaaagggggtatcatggtggcatgtaatcttgcaaaattcactccctgtagactatttttctgattggttagttctcttctctgtagtgggtgcgactcgggctgctgttgatgcaggttatgttccaaatgaccttcaggttggtcagacggggaaaatcgttgcgccggatctttatatggcttttggagtatccggagcaatacaacacttggcaggaatgagagactcgaaggtcattgtggctgttaataaagatgctgatgcccccatatttcaggttgcagattacggactggttgctgatctgttcgaggttctggatgagttattgaagaagatcccagagaagaaataagtggccgttattagctcttcactcctgcatgttcatttgcccatgtggcgctaataagatctcacgatgtcaatcccgtaaaatctgtaatgctctatttggatgtcgatattgaaaggtatgaattgaattgggttcaatactaaatcagctatggtattaaaattagatgtaattcaaactctattgtttggatgtctctgaattagagtttggaattatgtggtctaattatatgcaatacagagagctcaagctctgtattgggagtgcgagtttgtttttagttatagttcaaatccagagaattgggtctctgattctaaattcaatttcacgtgcaatcaaacaatagtattctagaaagttgatttcaattcttaatttcttactctaatacctacatccaaacgggatacaatgttttgttttctggt

SEQ ID NO: 3929 - DNA, 2576 bp, Zea Mays
gaacagacaggggcgatcagaaaagacaagcagcgtcgtcacaacacaattcagaaatcgtcaagtcctatcgtgctcgccgaaagaccgccgcctcgaacggctcgacacgacgaccttcgctctctccgccaccgaatccaccacaaaaaccaccatatccacttgttggccggccggtcaagaagaccaaggacaagggagaaacgaggggtttagttgggcgcgcgggcgatctcttcagtaaggcgttgtgtggtggtggtgtttggacggagcggagatgtcgtcggcgatggtggagcgggcaaccagcgatatgctcatcggcccggactgggcgatgaacttggagatctgtgacatcctcaaccgcgaacccggacaagcaaaagatgtggtaaagtccctcaagaaacgcattgcacacaagaacccaaaagtccaacttcttgctctcacgttgctggagacgatgataaaaaattgtggggacgttgtgcatatggttgttgctgagagagacatacttcatgagatggtcaagatagtaaagaaaaggcatgattatcatgttaaagagaagattctcacgctgatagatacttggcaagaagtttttggtggtgcacgtgcaagatatccacaatattatgcagcatatgaggagctcttgcgtgctggagtggtatttcctcaaagattgaatggttctgtgccaatcatcactcctccacagactcagcctctccaaaactatccctcatctttacacatttcacagcaggaggaacttgaattaccagtttcagatttccctgcattaagccttacagaaattcagaacgcacgtggcatcatggatgttctttcagagatgctggatgctttagatccaggggcttagacaggatgtcattgcagaccttgtggatcaatgccgttcttacaagcaaagagtagtgcagcttgtcaacagtacctcgaacgaggagttgctcaaccagggtctttctttgaatgatgatatgcagcgtgttctggcaaaacatgatgctattgatgcaggtctagcagttcgagtggagaagccgaaatctctgcagtcccaaattggaagttcttcaacaagaaagccagataccatggaagaaacaattcagaggccttcagcaagtacaactgccaccagtcagtctccctttgggattttagcacttcctgcacctccatccagtagttcaaaagcacctgcaatacctgcttctagtatcgacctacttagtggagatgattatgtcaaacccgaacctgcaaactccctagcacttgttcctgtcactgaatattcagctgcagacaagaatgtcttagcttttgctgatatgtttgaacaaaatacagccaacaatagcaaccataaccttccatattcttttctatcttcgacttcaaattctactatctctacatcacaaacatatcatgcaccggtgcgacctgtattgcctcagcattcagctgcttatccaaatggggccagatccaatgccattgtaccttatgatcagcaggcccaatcgaactctacaggttcgcggaatgggcaaacagcctatggaggaaatcaccaaaagcaagcactaaattatggcacaggtgatcaaaatggagacattccaccagcaccatggggaactaagagatccactaacccatttgacgacgatcagcttggtggaatggcagtgcaaccaaaaggcatgcaaccccaaccagtgcaacccagtcagcatgggaacaaattcatgtcagcaccaccaatgccgaggggacagccaggaagaatgcagttgcaacaggtgcctggtgctcagcttggcgctctacaaccaacacaggctacactgaacatgcagtacaggggcatgcatccatcgatgcaaatgaatcatggaatgggcatgtattcccaaccaacgttcggaggatattatggaatgaaccaaacacagctttacggcgttcatatgtctggttatggatatggtcagcaatctgggggctactatattccgaatgctgcatatgcctatactagtgcaaacgaacttgcccagaggatgaatgacctttcagttcaaaacggtgatccaaatggagccgcagcaaataagcagagcagacctgaggatgcactctttggtgatctcttgagcatcgccaagatgaagcaaaacaaacctgcagctggcaaggttggcggctaagtttgagtaaagaaggtacataattttatcttaattgccagcagcagaaacctttcctgacagcgcatataattattttgccacgttctatgcaatgccagatggcttctcgatgtaagctcatttggtagaaattcatattgggaactggagattaggatgcttgtggggagcctcatagcaaatatgtctataactctactatatatgaaattcttgagttctcagtagcaatatgtattgtcataatttccctctgcaaatattaaggcagaatcagagattcctgttctccctagccatata

SEQ ID NO: 3930 - DNA, 1571 bp, Zea Mays
aatgagtcttgctctcaggtgtgcaaagctatcaatttccgttgcggcttgtgtttttaccttggatgaggaatagtactgcatgaaggttgattcaactgcttgcgaatcatcaagacgagttaccaaccttaagtcccaggtgtcatcattggagagagagaatgttgaacttaggaggcagattaatgaattatccatgaagcttcaaatcgctggacaagggaaaaatgagactttgtacaagcctggtccttttggagctgtcaaggctttgagaacaaatccaactgtaatccctgataactctgttaaccccaggttggccaagatattggaagaggttgctgtgaaaaaggaactcattgttgcgttggcaaacaccaatgtgagggagatgcttgaagtttggtttagcaatatcaaacgagttggtattccaaactacctggttgtggcattggatgataatatagaaagcttatgcaaatctaaaggggtgccagtctaccggcgtgatcctgatgaaggcatcgacaacattgcaaaaactggtggaaaccatgccgtttctggactcaagtttcgtgttttaagggagttcttgcaacttgggtatagtattctcctatctgacattgatattattttcttgaggaatccatttgatcatcttcatagagattctgatgtggagtccatgagtgatggccacaacaacatgacagcgtatggtttcaacgacgtgttcgacgaaccttctatgggttgggccagatatgctcacacgatgcggatttgggtgtacaactctggatttttctatataagaccaacggttccttctattgaacttcttgatcgtgtggctggccgtctttctcgtgagccaaagtcatgggaccaggcagttttcaacgaggagctgttcttcccgtcccatcctggttatgaaggcctccatgcatccaggagaaccatggatttttatcttttcatgaacagcaaagtcctcttcaagacagtgaggaaagacgccgggctcaagaagctaaagccagtgattgtgcatttgaactaccaccctaacaaactagagcgaatgaaagcggttatcgagttctatgtcaacggcaaacaagatgcactggatcatttccctgacgggtcagaatgaggaaattacagatagttgcggatgtgggatctccacacgtgcgagaatgtttggcgagtgcaacatggatggatgcattggctttgaggtaaccacgatgtatcctttttcttgcagtttcagttggtaagttctaggtgttaagggcagtcgctctgtctgtttcttttattttcttgctcgttagtactattttagatcgcttgccactagtttggtgatttatattatagtctacaaggaactctgtccaagagctagtttgggaaccacaatgtaccaagagatttctattttcgaatggagaaatgaactaatttcccttggaaaaatataaattccttgggaaattgtggttcccaaactagccctaattctgttaatgaaacacgag

SEQ ID NO: 3931 - DNA, 1782 bp, Zea Mays
gccgctgctccctgcccgcattcggtcctgcagtgcatggtataactgaggttgacagcttgatgtggaccgagtcctggtccaagtaagccctgagaacatcctacccgcccgtcacagcttctcgtggaccgagtccacagcacaccgaccgccatggatcgcgaggcgctccgcatgctgtgctcgccgcagttctggcggatggcagtcctctgggccctctccctcctccactcctacctcctcgtgttccactgcggccgggcggatgcccctcgccgccgccggccgcggccagccgaaggacgttgccccatctgcgttgtcaccggggcgacatcggggctgggcagggcggcggcggcggcgctcgcgcgggagggctaccacgtcgtgcttgctggacgttccacacagttattatatgagacagttcaagaaattcagaggcaacagccagatgcccatctcaaagagtttcaggtcgacttggcatccttcaagtcgattaagaaatttggaagttcactgaagcaatgggttcatgagaaaaatgtggagccttctattcagcttttggtaaataatgctggaatattagcgaagtcgcatcgaattactgaagatggccttgatgagatgatacagacaaactacattggtccatttatgctgaccaacattcttttaccattgctgaagaacagctcggtaccttctcgagtggttaatctaacttctttcacacacaggtgtgtgtcaggtcttgatgtatgtgaggatgcgctgagagggatgaaatttggtcggtgttcgataggggaaagttaccccttagcttctacttatgagtataccaagctttgtatgctgatgttctcatatgagcttcatcgacagctgcacatgtcatctggcgtctctgtaattgctgccgatcccggtgtcgtggagacaaagattatgcgagagctccctgaatgcctctcttggttcgcgttcttggctctgcgctcccttaaactcctgcaagaacctgacacgggggttggtgctgtcctcgatgctgctttggcgctgcctagtctgggaagtatttctttggagggaaagggagaacgatcagatcgtcccgactgtcctatgacgccgaggtagccaagaagctgtgggcagagtcgtcagcagtgttcaaggagctgcagcttagaggaggcgattttggggatagttaaagaaaaacacagacaaatagatgagcctgacacccttgttttatgtatggtcctattttggcccttcgttttagcgtactcgaattttggtcctatatacgggaaaatatcctatgcaatcacttatcctggtgcaagcatgcaatcgagcgatctggtgcatccgatctagatctaatgatgactgttattttatatttaactccttccacctaaaacatagtacttattttacttttaacccctttcatatgaaaccgttggatctagattagatgctctgaatagtttgattgcacgcttgcaccaaaatgagtgattgcacaggatatgtcctccctatatacatgaggcagactggcagagcaagcaaggtcttgttctgtaggcggagccgcctgttaactgaaaaccagcaatgttacgagttacaagcttgtaatgtcacttccacttgtgtcgttgcttgcctccgttgtgaaaggaggcattggatacgggatgaacctaatagtagcgttgagcaaatgcagtatatgcacac

SEQ ID NO: 3932 - DNA, 1393 bp, Zea Mays
gaccacacaagttggtagacagtctagtgaactgagaccacacaaacaaggcacggagctgtcggcatgaatcacgttctagtgttctacagttcgtcatagttcccgtgatggtcgactgattgacactgccaacctcccaacttcccaaatatatcgtcgtcggtcaatgtcgacgagctcgcagtgcacgctcatggaaggcgctatctcccttcctcgcaacacaagcagaattgccgtggttaccggcgcgaacagaggtatcgggctagaggtgtgccggcagctggctggcaatggcgtcaccgtcgtcttgacagcagtggacgaggagctaggcgcgaaagccgtcggcaatctccaagggctagctctctccgatgttctttctcaccagctggatatcacggatgcttccagcatcgctcggttggccaacttcttgaaggcccgattcgggaagttggatatcctggtcaataatgctgcggttgctggggtcgtgtactctcaagatcatttggatgatctagaaccgagagaggaaaagttcaatctcatggatagggatcagaggcttgaatggctgtggaggaactgccgggagacctaccatgctgcaaaggaatgcctgcagacaaactactacggcacaaagcatgtgatcgaagccttgctgcctctgctgaaagcctccgatgatggaagaatcgtcaatatatcctccgactttggaaacgaggatctgaagcaagtgctgaacgacgtcggcaacctcaccgaggagcggctggacgaactgctggaccagttcctgagagacttcaaggtcggcacggcagaagcgcgcgggtggccagtggcgttcgcggcgtacaaggtgagcaaggcggccgtgaacgcgtactcgaggatgctggcggcgaagcagcccgcgctgcgcgttaactgcgcgcatcccggctacgtcaagactgacataaccttacactcggggctcctggcgccggaggagggcgcgagtaatgtggtgaaggtggcgctgctgccggacggcggggtgaccggcgccttctttgaggagggcaatgagctggcctccttcgtgtgatgtcaggatcggcctggttcgctagctgcggctgtttgccatcgcgtgagctcacggagtgtttggacccctcggtctgatgtttaagtgtgtggtagcaggatgcaagacgattctggtaataaactgattatgtttgtgaacggtgataacctgatgatgtatgtgttgtaaatttagagaacggtgataacctgatgatgtatgtgttgtaaatttagagaaataagtgacatgcttccttcagatttaaataaattaaatattctaattccgaat

SEQ ID NO: 3933 - DNA, 4129 bp, Zea Mays
cctagtgcagtcagccaggccaggatggcgctgacgagcggcagcatgaagctgacgccgttccagcccgccaccgggctgcagccagcagcctacatgcaaatctatactctcgcccctggctccgatctgctgagctcaggccgcaattacgaataaaaaattagcctctacatcaaactgcagcttaaactaatcgcacggcgatcgcaggatccgacgagccaccccgcatctcgtgctcctcttcgcttcccaccgaaccccgcttatcgagatccaaatccagcgccagaatgcccgaggcggcgccgcccccgccgctgccgctcctggcggcggcgagctccccggcggctgctgcactgccgcgggcgaggcggcggcagcagcggagggggtggcggcgcccgcgcaggttgctggtctggggcgtcctcgtggcattcttcttcatcatgaactggtggatgttctcccgacttcaggacccctcggcgcgcccgcacttccggttgaggcgccacccaccccgcgcgcccgctactgtcaattcgtcgctctcgactctggaagaggtggctaatgctgctaaggggaagagggcacatagggttatgctcactcgattgcttgctttggcaggccatgctttggcagaggcagagaccaggcctgaacctaaggatttgtgggaagagccgataaatgctactttgtggcgaccgtgttctgaccaaagggattggaaagcctcagagggaaccaatggctacatcatgatcagtgcgaatggtggcataaaccaacaaagggttgcgatttgtaatgcagttacaatctcgcggttgctcaatgcaactcttgtcctcccaaaattcttgtacagtaatgtttggctggacaaaaggtacacttttctaaaaaaatacaagtctgtcttacgtttaatgttttagatagcttatttcaataaatggttattatattctccataaataacaatttgagttcaacatcttagtcagtttggcgatatatatcaggaggaatattttatcaaatatctgaaatctgatattcagattgttaaggatcttccagtagagctgcagtcattagacttggaggcgattggtagcctagttaatgatacagatgtcatgaaagaggcgaagcccagtttatacatgaaaaaaatactgccaattttactgagaaacagagttgtgcactttataggattcggcaatcgcttatcttttgacccaataccttctgaccttcaggtattgctccaactagttacgtgacgtaagttcattctggacactgaacagttctctttaacatcatttgggttgccaatttatttgtgatatatctgtagaatcttataaaactatgacagtaggtaagtattttctgagacaaatttactatgcagtaccattgttaacctatttatgtattcaataaagatattatttgtcataaaaaatattcaactgcgcttgttctagacttctagtacactcttaccccctccatcccaaaataattctccatctcgcatttcgagaactcaaccaatctaaatttttactaagtttatactttatagataatagtatcaaaatttgtaccttcaaaatccaaataggtttactgtgaaaatatatgacataattaacctaatgatgtttatttatcacaaatatttgtatatattcagtcaaaattgagattgtttgacaccttgaaatgtgagatggagacttattttgggacggaggggagtactttttactggaggagttgccatattgtgctgattgctaccaataccatttagctacataccagagtttgttaattttcttgaattgtttctcggtatgatgtgtttacactctactgagataggaaattgttattttgtaccatagtttagaatcgtgtactactctagtgaaacttacttgatgatctgtcacgatatgattattgacactaaactctacgatgcatttacacttttactgggacaggaaatggttattttgcaccagtattatagaatcttttagtacgctagtcaacttatatgatgtactgtcaagatgtgaatgacttagagctgatagtactacagatgaatattggttaccgtgctgctgctttcttctctttgttctgtttctcccataaggaaaaaatatcaagtgcatgctctgactgtatgggtactgttccacagagattgcgatgcagatgtaattttcatgctcttcgttttgtatacaaaattcaagaaactggtgcagttcttgtagagaggttgcatggccatagggcctcttcgtcacctttgaaggataatcttttaggccagtttgccgttaagtctgaccccagggcgaacaagagtgatgcatccaaatatctggctgttcatctccggtttgagattgatatggttgcatactcattgtgttactttggtggtggcaaagatgaggaagacgaactagaagcttatcgccaaattcactttcctgtgttgtcagaactcaagaagatgacaaagttgccctctgctgctttcttacggtccgaaggcaaatgtccccttgcacctgaagaggctgtgcttatgctagcagctattggtttcaagcgcagcacaaatatatacgttgcaggtgctgaaatttatggagggaaggataggatggctgccataagtcgtctttatcctgctttagtaactaaagaaacccttctgtctccatcagagctcgaaccatttaggaacttctcatctcagttggcagccctggacttcattgcatgcgcagctgccgatgcatttgctatgactgacccaggaagtcaattctcttcccttgttcaaggttaccgcatgtactacggtggtggggatcttcccacgataaggccaaacaagcgccggctagccagcatacttgtgaagaatgccacaattgagtggaatggatttgaaaatagagtaagaaaactcatacagcaaactaagcaagttcacgagaggcctgttgcaagaagcgtatttagacatccacggtgtccagagtgcatgtgcagaacagagcactaagatctttttttatagtttcttgtgtctataccaatactcctttttcacaagaaacactataccaatgagatcgccaaaggtagttcttttgtgctttggccgaaatctggatatgtctcttgctcttgaactactttggaaccaaaccataaaagaaaagaaaatacagtgattgagctcttgtttgtatcagagaagcaatatagcagactagcccatccattctcttactgacatgatctactgctaggcatcatgttggattttgagtattaggcagaattttgtttcatgtttgacagaagaagtggaccggggactgatttttgcatctggacaacaatgctgccatattttttttattgagatcagctataccattctgtgtatgaaggtgcatcatctgcagttgactgtcgaagtaatatattggccaaactgagcaacagcattctcatcttttaagagtgcttcaattctactcgggctaccattcaacaaatcaggctgccagagttctgtcaaccgtgtattgccatctccattgttgctaccgttgtgatggagctaagtggcatattgaccccttttttaccattcttttgcccattgtagtaccataaagagatgtatttagttaggtcgtaagtttatatcaactgaaagctttcattatcagcgagagaaacgttccttttttgtgcatgctttatacgtgctcgtccaagggcactcttgcatattaatgctttgactattttctttggtttccaatctttctttggcaatgccccgaaactgcgaatgaactcggtcagattcgtggttcgcagagtgatttacagaaccacctggtgtctggtgttgtgatggagacctttggattggtagttattacagttctgattctgaaattgacgtgttccatacttcatgcctactgctaaagatcagccttgcataactcatgatgcttagatagtggaa

SEQ ID NO: 3934 - DNA, 2662 bp, Zea Mays
atccaccatgtgaccatgtcttctccgctccatccctaaaactgccttccgctcatggtcatgggctcatggcgctcacgtcgttcccgttcgcgccatccaacacctcgctgtcctactcctcccgcgcctcaaccgccgccgcgttcgctcctcgtggggttcactttgccgcgcccggaaggagcggcggcggccaaccgctcgcgtgcgctgcgcctcggtgccgcggacgggctccgaggcggcggcgcggagggggcctgctggtctgggcagcggctgactactacgcgacgctgggcgtgccgcgcgccgcgagtaacaaggacatcaaggccgcgtaccggaagctcgcgcgccagccgggtccgcgcaagcctggccagccgcatacgcaggattcgagcgtaccggtggatgcagaaaaatagcagtaagatgaattattttgcatctactcgtgcagctcacgtctggcacatacagtaccatcctgatgtcaataaggagccgggagcgaccgaaaagtttaaagagataagtgcagcatatgaggtgctgtcagatgaaaagaagaggacgttgtatgaccaatatggtgaagctggggttaagagtgcggttggaggctcgggtggagcttacacaaccaacccatttgatttgtttgagacattctttggaggcagcatgggtggtttttctggcatggaccagagcacgtttaggacaagcaggcaaaatactgttttacagggtgaagacatcagatatgatgtggttttggggttcacagaggcgatatttggaacagagaaatatattatactatctcatttggaaacatgtgatacatgtggtggttctggatcaaaagctggctccaagatgagaatatgttcgacatgtggtgggcgagggcaagtaatgcgaactgagcaaacaccatttggtctgttctcccaggtttctatttgccccacttgcgcaggagagggcgaagtcatctcagagtattgtaggaaatgttctggagaggggcgtatccgtgtcaggaaggagatcaaagtaaaaatccctccaggagtgagcaaaggcagtactcttcgtgtacgtggggaaggtgatgcaggatcaaaaggtgggcctcctggagatctctttgtttgcctcgatatagaggagccatcagatatcaagagggatggtataaacttgtattcaactgtgtcaataagctatcttgaagctattttgggcaccattaagaaggtcagaacagttgatggaaccaatgaccttcgaatacctccaggtacccaacctggtgatgtaattgccttagcgaagcaaggggttccatcattgaataagccgactatacgtggtgatcatctgttcactgttaaagttgcaatacccaagcgcataagtgggcgcgaaagggaattactggaggaacttgcatctttgagtaatggtggctttgttcgaacagatgccaagccaaaacctgcccagccaaaacgtgtacatctagagaaagaagttggtgctagccaagaagatacagacaaatctaaagcagcgggtgattggttgaagaaacttacacattttgctgggtcaattgctaatggtgctgcaaagtggctgaaagaaaacctgtaggctgtaaatatttactgcaggatagaagatttcttcagttaccatggtgctgtagtccaatctccaattcttagattcattggggtccccaagagctcttacatttttgttttgttttgttggagagtttcaagattttcaggctgtgagtaacaaccgagggagtgagaattgtctactaatactgtcggcatattggtcccttgtcattcttgcaaagcaattattttttatgtagttggagttattttcagtttggcaagtgcatgcagcagtctgaaagagtgaaagttcgccctgaaagttatgggatgctgctgctggtcccaaaccttgagacttagacaacactgtaaatatgtctctgttcctgattctgtacttgaggttttgggttaatcaaattcaagatcaacgggcgttctttttctgatttcttctggagctgcaaagcttgcatcgagcgatgccaaaaaaagatcattcagcagagttcaaacattttcatcttacaatgaagctatcattagaaacaagtttcagtaatctcgaattctaggtttcgtggagtcctcgcgtcgtatcactatcaatccaccgagctcgctttgagcaaagccaagactgcggctaccacgggcagggacaccatcagcagagctaccacaatgtttggcctcgtgatgtccgggagcaggatgcttccgtacttgataaccgcggcgccaccaagggacccaagcaccaatgtccacagatagccggagtcatcaccctattcatcaacacatcataacaaaggaaggaaacggactataaaattctttgcatccaaataaatgttgctatcgaactagtcgctcacaaggatgaaggatctacagccacaatggttgctgttgctgaatgttgacaagagaatgcagaggtaccttgaggatttgccccacgcccgcgtcggtcccggcctcgccggggtcgcgcccgg

SEQ ID NO: 3935 - DNA, 1998 bp, Zea Mays
gcgttatggagctttcattaaactagtgtcatcagtcagcatcagcatcatgttcagccaggactcatgatgggagacaagggaggcgagcagtgcctgccccccctgcattgtagccttaaaacgagtatatagctccacccctggatatgttagatacatacaccacgtttttgagaaatcggagcagagatacacaataatggaggcggcaggtggagagcagcacgaaacacgacgacgtgcaggtgcaggcctcgccctcctgggcgtcgtctactcatcgctgctcctgaacgccatcttcgtcgcgcaccacttcctctcgccgtcccggctgctgctccgtgacgacgggtgcgggtgcgggctcacctggtctctgcaggcggccagggaggccgaggcggtggccgccgtggagtgctcgggccacgggcaggtgttcgtcgatggcgtcgccggcgaggacgggcggcccgggtgcgagtgcaacagctgcttcggcgggccggactgctcccttcgcacgcccaactgcaccgccgacgccgacagcgggaacccgttgttcctggagccgtactggcggcgtcacgcggcggccagcgccgtggtgttctccgggtggcaccgcatgagctacaccaccacgggcgggttccagtcggtggagctggagcgccagatccggcgcctgcacggggccgtcggtaacgccgtcgcggacgacaagcacctggtcttcgccagcggctccctgcagctcatcaacgcgctggtgcacgcgctgtcgccgtactacccggcgtacagacagcaaacctccatgttcgacggccgcgagtacagatgggccggaaccacggccttgtgggccaactcgtcacgggcgaactccaccgacggcaccttcatcgagttcgtcacgtcgcctaacaacccagacgccctgctccgcgagcccgtcctccgcggctcggcggcggcgatcgtcgaccacgcgtactactggccgcacttcacgcacatcccggcgccggccgacgaggacatcatgatgttcaccgtctccaagccatccggacatgctggaagcagattcggatgggcgctgatcagggacgacgaggtggccaagcgggctttagagtacctgagggacagcaacatgggcgcgtcgcgggacacccagctgcggatgctggggatcttcaagttcatgctggccaacctgcgcggcaaggacgacatcttcgccttcggccacgacgtgatgaggagcaggtggctcaggctgagcgccgccgtgtcgcggacccgccgcatcacgctgcagaagatcgcgccccagtactgcacgtacttcggccgggtcagagagccatccccagcctacgcatgggtcaagtgcgagatggaggaagacgaagactgctacgaggcgctgctgaaggcgaacatcatcacgcgcagcggcgtccagtatgaggcgagcagcaggtacacgaggatcagcctcctcaagtcggacgacgacttcgacgtgctcatggagaggcttgaagatcttgtcgatgccgacaagtacgacgattccaacggttcgagctcaatgtagcaacggtaatccacggaagttcggaagcttggggcggtttagatccacctctctaaattttaagaacactctagctcacattgtatgaggtgggctaaattaaaatgcatatgatcagctaggcgctgattgttctgcgaatgtagtggaacagtcaactagaagttgactgtgttcccacaataaaactacctatattggattggcgcaaattatgcggtcagtatatcattccatatttatagtacaacttacagtttgttggattatttggttcatgttattacaattattctatctttttaggccagttttaatgaatagttttcgtaacacagttactaactccaaaagagagtcttaaactaggtccaagt

SEQ ID NO: 3936 - DNA, 937 bp, Zea Mays
gaatttgatatactgaaccgacggctttcaatcggaagggcccctgtccccctcctaagtcctaactcctatccacaatggcacaatattatcgctgccctcccctttcgtcatccatgacttccctccccgccgcggtcatggccaccgcgacgacgctgcccctaggcctcctcccctccaaaacgctgaccctctcccctctcccttctgcgcgccgatccctctccatcgccgccgtggagccccggcgctggctcctccgagccgccgctgaggaggcgcctgaggccgtggaggttgagttcgtggagcccgacgcggaggcggaggaggagcccgcggtaccggagcccgtagaggcgcagctcgccgccgcgggggctgggaaggacgccgacatcttcgctgttgtcatgattggttcaagacaatacattgtgatgccgggcaggtatatatacacacagagactgaaaggtgccaatgtcaatgatcagatcatattaaacaaggtgctactggtgtcaactagagaaaaagcttacattggcatgccagtggtgaccaacgctgctgttcacgcagtggttgaagaacagggacgtgatgataaagttatagtcttcaagtacaagaagaagaagaagtaccagaggaaacttggtcacagacagccaaacacaaggttaagaatcacaggcataagtggatacgaagagtaccctgctgacccaatacttgaccctgctgcagcttaagctaaattatgagaggacctcatgagaacggtggataagagtgcttgcaggtgtggaacgcttttaagtaacgaaagttctgcagacttgtagatttgagtaccagacagtgcaggcattgtaaccttggggactacagactattcgatcagcggttttataacgttcaaacagtg

SEQ ID NO: 3937 - DNA, 1254 bp, Zea Mays
cccagtagtgtccattcggtgtctgtctgtccactctcgtgtcctcaagctaggtccagtgaacctgccccagcgccatcccttatttaagtgcttgtccagggagccctgctggatccttgggcatctctgtggtggtgtgtgcaagcctgagttcatctccttagcctctgcgtcggctttgttcagttcatcaagtgccattccattgtctggtactctggtgccacaacaaccatccttccacctccccgtggtcagagtatctcaagaagtttgttgcccagaacagagttgttccaccgcagaccggagccgtgagcagcctctgtgttgaccgaacaactcacgctttctccggtcgattccttgtgagcaccaaagtttagaagtgggaagaaatacaagcgacgtctatgaggttgttccctgcagttgcattaagcgacccagttgtgtatcaacaccaggcccgattaatggaaagcattcccattgggcaggattctgttgaatcggcatctgcttgagttttgatggctatgctagagttgcagcttactcgagggcacagtcgtcaaatgtggcagcagttgtacactgggagttatgcaacatttaagatgacggaaatggccaagaatagggcttgtactcaggcacaagaatggttgaagaaacaaagattcaagctgggcgaattgttggactagagcatcagcaacaagaagatactcactcgtatgctattacggttagggaagaacttaaggaaaccatgggcttcctaggtcatcatgatcaggtgcttgaggagttgcatcatacctatccgatggaatttcaaacagtgcagcgactgatcaaccatctgcaacaaacggtgcatatgctcaatgttgccttttattctgccccaacaccaacagactaaaaggtacctatggagcatggaaacagacatctggcagatgtgataatcggagaagatgtagcaggcaacttaattctcgtcaggcaatatacctatgtaaattagttttgaaaggtagatgtaaggtagacccatatagtaatgttagctagtaaaaataggttaaactttgttgtaaagagtttttcctgtttcacctggatcaggtaacctgtgagcatgtctatggctatggtgtaataaagaactacctgtctcagtggcaactattggatgtttgtagtagtttgccaaatcctaaaagttaaaatggataaacg

SEQ ID NO: 3938 - DNA, 1832 bp, Zea Mays
ttgttgttgttgttgattggcgcaattccaaagcgggtaatcaactgtaggacagttcatgaagcaattgttagtgcctaatggatttctgatatcagaggagctttgtcagtgggggttttgacagattaccttcagctttggcctttgggatttgatatctggcatcgagctgcagccggaggttgacgacaagcatatcttcagtattgccccaaatggtgtgtactcagccaaatcagcatatgaaggtctgtttctgggatctgagacatttggacactataaaagaatatggaaatcttgggcattgccaaaatatcgtttcttcctttggttggttgcccataagagatgttggacaactgatagattggcaaagcgaggcctgaatcatccagagaaatgtcttctatgtgatcaagaggaagaaaatatggaccacctccttgtgcaatgttccttctcacgggaattctggtaccttttactcaggaaattcggtcttcactctcttgcaccatagctgactgtaaactctttcctgggatggtgggaagtggtgggaggagcagtccttggtctcacaaaaaaggccttaactcatcattttgggagcttggactttatggaatcatcgaaataaatgcatttttgatggctgcaatacaagtatgtccttatgtctcagagctgctgatgaggaaagaagatgggaagtagctggggcaaaaggcctcgctcatttggctgcacccttggtcaatatcctcacacatactgatgaaataaaactcaaagcaaaaaggattgccgcggtggaaaagaagaagcggtgtttaggaatgaagattctatctaccaaggaagcaagtggaggccttcaacggtgtgcagattattttggtatgccaacagctcccagtgaatctaacaaggagccaaggcctgaagagtgtgtaaatgaactgggcattaaacaaccagtacagcatgttgcttccgaggagcaggaaggagttcaagatgatgccaaggcagatgcaaatgttatgaatgtttcttttggtaagggaaaatcagaagattcttttggtacaattaatggtaccaacagtggagataaaatagaatctcctagtggtttagcagaaagaacattgactcagcctaccactaagggttgcagtaagcagcgtggccgtagttctaatggtagaggaaacaggactaaaaaaatagaagaggggaatgcgtctggactaattgctgtggctcccgagtcagaagatgatgatgatgatgccgcatttatagatggaaaccaagcagagggtggtgcactgtgggatatttttcgacgggaagatgtgagcaaactgcatgattatctaatgaagcatgcacatgagtttagacattgcaactttgagccagtgaagcaggttactcatcctatacatgatcagtgtttttatctaacaattgagcacaagagaaagcttaaggaagaatatggagtcgagccttggacatttgaacagaagctaggtgaggcagtatttatcccggcaggatgtccccaccaggttagaaatttgaagtcttgcataaaggttgcactagattttgtttctccggaaaatgtccgagagtgcatcaggttaacagaaggtttccgtctgctgccgaagtggcataaggtgaatgaagataaactggaggttaagaagatagctcttcatgcattcaatcaagctattaaagatatcactgatgaatcatctaatagcaatgaaagatgtctgaatgtagaagtaatgttacaggag

SEQ ID NO: 3939 - DNA, 4045 bp, Zea Mays
ctctgcccccgccgtacgccccacgccctcctccccgcgaggagccaccagcccaccatctacgccgcctgttctgatgccgccgcccacgcgaggccgaggccgaggccgtggccgcggccgcgggcgcgggcgcggtcgcggtcgcgggaggccaagtaaggacaccgttgctgaggactccgcgcacgccaccgaggaaagtggcgaggaaaacctccaggagaaggtgcaggaaggtggcaaggtaaacctcacggagaaggtgcaggaaggtggcgaggaaaacctcacggagaaggtgcaggaaggtggcgaggaaaacctcacggaaaaggagaatgaagggatagtggaggtctcaaaacccccccaaaggcgtcggaaggatcctgttgcagacccctcttctcttgagtctagtggtttcatgcgatttcgggagaggaggaatgcttcagcggttcaggagcaggggcctaagaagagaaggattactgaggattcaaacatgtgccatcagtgccagaggaatgatagcggaagagttgtacggtgccaaggctgtgtcgtccgaaaaagaaaatacagatattgtgtgaagtgcattaaacgctggtatccacatttatcagaggatgattttgcgaacaattgcccagtttgtcaaaataattgcaattgtaaggcttgtctgcggggagacataacccgagccaactcgaggaaaaaaaagaagttactgcaaataaattctggaggatatagtgtgtctgaacaagataaaattaaattctcaatgcgtatcgtgcactttttgcttccttggctgaaacaattccatcaagagcagatgcaagagaaaagtgccgaggctgcaactaaaggtattgatgcagacaaactggaggtccctctaaccatttgtggaaaaaaggaacgtatatactgcaacaactgcaggacatctattgttgacttccacagaacctgcaataaatgtaactatgatctctgtctccagtgctgccaggagcttcgtcgaggccttgtttctggtaatgatgccaaggttgatggtggaggcaagcaagattttctatcgggagttagtcatgataaaatcataagcaaagggccatccgatggacagaatgacatgttgatagatagtgtagttcctggtgaaaacaacacttctagcttgagacagtggagtgtgaataaagatggaaccataccttgcccaccaaatgcatttggtggttgtgggagctctcttcttgaactgaagtgcttgtttaaagagaagtttattgctgaattactggagaaagctaattcagcgctcaataatgaaatggaggtgaagatagaaggatcaaaatgtccctgcttcactgaatccggtgacatggatgatggtatatcacggaaatcatcttgcagggagaattcctgtgataactacatatattgcccaaccgctacagatgtccaaaatggaagtttagaccatttccaggagcattggttgaagggtgaacctgtaattgtccgtgatacacttgcgttgacttctggattaagctgggaaccgatggttatgtggcgtgccttacgagaaaagaaagagaaagttgagaggctctcagttcttgctcttgaatgcttgggttggtgtgaggtcgatgtaaatattcatatgttttttgcggggtattcaagtgggcttgttggtccagacgatttgcccctgttgcttaagcttaaagattggccaccacatagttcttttgaggagcggctcccaaggcatggtgcagagtttatgtctgcattgccatttcgtgaatacactgatcctaaatggggacctcttaatctggcagtaaagcttcccgataatgttaataagccagaccttggtccaaagacttatattgcatacggtgtttccaaagagttgggaattggtgattctgtcaccaagcttcactgtgatatgtctgatgcggtcaatatcctcacacatactgatgaaataaaactcaaagcaaaaaggattgccgcggtggaaaagaagaagcggtgtttaggaatgaagattctatctaccaaggaagcaagtggaggccttcaacggtgtgcagattattttggtatgccaacagctcccagtgaatctaacaaggagccaaggcctgaagagtgtgtaaatgaactgggcattaaacaaccagtacagcatgttgcttccgaggagcaggaaggagttcaagatgatgccaaggcagatgcaaatgttatgaatgtttcttttggtaagggaaaatcagaagattcttttggtacaattaatggtaccaacagtggagataaaatagaatctcctagtggtttagcagaaagaacattgactcagcctaccactaagggttgcagtaagcagcgtggccgtagttctaatggtagaggaaacaggactaaaaaaatagaagaggggaatgcgtctggactaattgctgtggctcccgagtcagaagatgatgatgatgatgccgcatttatagatggaaaccaagcagagggtggtgcactgtgggatatttttcgacgggaagatgtgagcaaactgcatgattatctaatgaagcatgcacatgagtttagacattgcaactttgagccagtgaagcaggttactcatcctatacatgatcagtgtttttatctaacaattgagcacaagagaaagcttaaggaagaatatggagtcgagccttggacatttgaacagaagctaggtgaggcagtatttatcccggcaggatgtccccaccagtcttgcataaaggttgcactagattttgtttctccggaaaatgtccgagagtgcatcaggttaacagaaggtttccgtctgctgccgaagtggcataaggtgaatgaagataaactggaggttaagaagatagctcttcatgcattcaatcaagctattaaagatatcactgatgaatcatctaatagcaatgaaagcaaatggatccggagataatgaggatcatgaaggccattgaatccatgcttgatgtcatggaagttagcaccacccgcattcgacatcttgctatcgagaacctgaatgaaaaccgtagtggcttatcggatgccgacaagataacaaaacctgattttagtgtactatgcatgatattagtaccttatataatacgtagcttggagaaaaggccattcaccgtttctcattgttgggaggttctaaagaatgaagccaaatggttacacttggagcagggctcacaaaatattgatgtgctggtgaacaaaggtgtagggttttctccaagatgtcggatttgacactgaagaagattgagtattggaagaggtccgattgaacatttggcactgacattcaccaacttgttcaaatagaggaaaagaatatggaaatggagaaagagcgcatgtatgcatgtgtaggtcagggagtggctcggatcagccttgagtcaatttccactgcgttttcttcggttatggatgagcacgaggagtaaaagaaacagaagaaggctgagtgtgattctcatatgcttattttcttgtcctgtgtaatggatgtgtgtatgtgaaccatatgcgaacttaaacgtctttgtttgtaccggtcaggccattctgagtgagggttccgtctcttctttttaggactccactgcgaggtgtcggtgtgtgagaaatggtgcaaacgtgtgtatgaaactctacgaggcatactcttatctagtattgtgtctagtgaagaatgggacacatccgatgctactgtaaactcacttgttgcactcactttttgagttggatttttctttcaaacttttttgtatgctctcttgagtttatctaacactagatttcataagtgtgcaccattgtccataactagactcacttaggtaaagctatccattccatgtcctctttataatgtgacataaataaggattttatcact

SEQ ID NO: 3940 - DNA, 906 bp, Zea Mays
atggtcaaatggagggattctgcaataacaccttaaaactagtgccagatcgacagaatcaagattgcattgtactttggagttgtcttccctcttggagtttggggagagcgttatactatacgctggggtttggggaaagggtgcattttcatggcagccttgtaaccatccatccatcatctatttgccgatttgctttagctgcagagagcaaggatcccgcaaaagttcctcggcctagtaaccgccttccactctcagaattcgtcggcgtggtcctcggcagctcacttcctcctgctggtggtgatggtgaggcgctcgaggctgcggaacgtcgtgttgtcccgcgaggcggagcctcccctcccggccgcgttccgggccacgggggagcgcggggacgacctgctgttctcggcgcctcccgagtggtggagcctctgcgcgggggacgggcgcccgctgccgccactgctgccggagacccaccggcggttctggtcactgcagtcccccgaagaggtcggccgggtggacggagctgcgggcattttcgacgagctccctccccgggacaagatgcgcgttttctctgatgagtcggcaacctggcgagaacaatggtcacattagcggggtcactcagaagaaagggagcgacaatagtggaaatatgagacgaactccggcgggattacaatgttcgtgttggcaaaaagaagtacctctgccgaggaattaaacaaatcttccaagcttgggccaagaagatcgatcaccataacattgtactccccctcaacaccataccacttgaggctcctgacagatcaaaccaaagaaaaggtgaggccttgaaccaaacgcttcagcaaagaggatccggtcactacagttccg

SEQ ID NO: 3941 - DNA, 1195 bp, Zea Mays
atggtcaaatggagggattctgcaataacaccttaaaactagtgccagatcgacagaatcaagattgcattgtactttggagttgtcttccctcttggagtttggggagagcgttatactatacgctggggtttggggaaagggtgcattttcatggcagccttgtaaccatccatccatcatctatttgccgatttgctttagctgcagagagcaaggatcccgcaaaagttcctcggcctagtaaccgccttccactctcagaattcgtcggcgtggtcctcggcagctcacttcctcctgctggtggtgatggtgaggcgctcgaggctgcggaacgtcgtgttgtcccgcgaggcggagcctcccctcccggccgcgttccgggccacgggggagcgcggggacgacctgctgttctcggcgcctcccgagtggtggagcctctgcgcgggggacgggcgcccgctgccgccactgctgccggagacccaccggcggttctggtcactgcagtcccccgaagaggtcggccgggtggacggagctgcgggcattttcgacgagctccctccccgggacaagatgcgcgttttctctgatgagtcggcaacctggcgagaacaatggtcacattagcggggtcactcagaagaaagggagcgacaatagtggaaatatgagacgaactccggcgggattacaatgttcgtgttggcaaaaagaagtacctctgccgaggaattaaacaaatcttccaagcttgggccaagaagatcgatcaccataacattgtactccccctcaacaccataccacttgaggctcctgacagatcaaaccaaagaaaaggtgaggccttgaaccaaacgcttcagcaaagagagacaatgtgagaattaggagtgaaagatcgaacatgtattttatggagatagatacagaggctgttggaatgcaaaataatgatttagaggatgcggagtaagatagccagtgttgctggaattggtcttaccctgccatcgccgcctcctgccgccaccgacgcacgcggctacgcccgtgaatcccacaacctgtaccccggtagcagagatggccgacgctcgcacctccgtcagcctccgtgcgtccgagtccttcactacgtcgttcctcgccgccatctcaaccgtttaagtgagtgcatttt

SEQ ID NO: 3942 - DNA, 1613 bp, Zea Mays
gtttctacagctgtgtaggctgctgagcgatttagcatggtacatttttttctgcacaattgtacatggaagcattagtcataggatatcggttgttgaagtacgtcgtcaagtgtacatggaagcattagtgcattgaacggccgaagaatcaccgcaggtacatggctgatgtgttcatcttctagaggatatcttgcaccagagtacaccattcaagggcagctgaacaaaaagagcgacgtctacagctttggtgtgctgctgttggagattgtcagtggcagatgccacactgatcctagattacccgttgacgagcagttcctcctagaaaaggtctggacactctatgagttcgatgatctcgagagcatcattgataggacactaaagcgcgattttgacaccgaggaagcactctggttgcttaaggtaagtcttgtgtgcatcccggatagccctaagatcaagtcctccatgtcaatggttgccaagatgctgcaagggtcctcaattaaggtcgaatggatgcaatcaaaactagaagggtgtgcgccatcgaggatcactgcagctaaggcaatcgtgaaggctggaatcgttgttatggcaccgcaagctattagtgtgctaggtggatttaggcctcaagggaaaacgattgacaatgttgtaaaggtcttcttcccatgggcggatcattgtcgactggtggtgtcaggtcttcttcccatgggcggtgccctggagcgcctgattgtctcacgtatttgaccagcaacaagggacgaagattggagctgtgtggattgtgtggaggcgacacgggtcaggagcatttcatctgatttacagagaagtaaagagaagttgtttacatttagtcatcctctgtatctgaaacaagactatgtttctaccttgtctttctcatggttcttagcctatggccgaagcttccatgcttgattcttcaaacatccaatgcagatcccttttctctgatggatatgctgatattcaaggctgtggaagagcaggtcaagaagagagtagagaataaggcaatgatcttcgagcagaatgccactgatagtgagtgcaaggtcgatcctaaagtgctctccaagctatatgatcattgggtggatgccacacaccaaggatgtctgccttgactaatcaccgattagctgtagctgtaaattttatgtatacatggtttcagttgcgctcgatccaattgtcttaaccttgaatggacattttgatgtttctttcatgaatgttcaggtcaacggcaagataaaccaattgcgttgtatgagttttagatcataactcaagttttttgtagatcttggtgctatttcatatgatgtgtcatgtttcagtgattgctttatagtgaacccgtaagatgtaaaatgacctttatgacagaaccatatgtaataacagagtattctgaggaacctttgttgaagtaaatgtaatcgagtttcctagcaatcttgttcctgcagacgagcattggaaaataacagagtattctgaggaaccttagtcgtattaagtttgtgtagaaagaaactgatcataatataatg

SEQ ID NO: 3943 - DNA, 1720 bp, Zea Mays
gtttctacagctgtgtaggctgctgagcgatttagcatggtacatttttttctgcacaattgtacatggaagcattagtcataggatatcggttgttgaagtacgtcgtcaagtgtacatggaagcattagtgcattgaacggccgaagaatcaccgcaggtacatggctgatgtgttcatcttctagaggatatcttgcaccagagtacaccattcaagggcagctgaacaaaaagagcgacgtctacagctttggtgtgctgctgttggagattgtcagtggcagatgccacactgatcctagattacccgttgacgagcagttcctcctagaaaaggtctggacactctatgagttcgatgatctcgagagcatcattgataggacactaaagcgcgattttgacaccgaggaagcactctggttgcttaaggtaagtcttgtgtgcatcccggatagccctaagatcaagtcctccatgtcaatggttgccaagatgctgcaagggtcctcaattaaggtcgaatggatgcaatcaaaactagaagggtgtgcgccatcgaggatcactgcagctaaggcaatcgtgaaggctggaatcgttgttatggcaccgcaagctattagtgtgctaggtggatttaggcctcaagggaaaacgattgacaatgttgtaaaggttgtggagacaacacttgccatgcaggaggctggatgcttctctgttgtgtattagttgttggcagatgatttataagatattgagatcaaaatcaggatgtttccaaactgtctataatcaggatggctattgtagcttttacagtaggtcttcttcccatgggcggtgccctggagcgcctgattgtctcacgtatttgaccagcaacaagggacgaagattggagctgtgtggattgtgtggaggcgacacgggtcaggagcatttcatctgatttacagagaagtaaagagaagttgtttacatttagtcatcctctgtatctgaaacaagactatgtttctaccttgtctttctcatggttcttagcctatggccgaagcttccatgcttgattcttcaaacatccaatgcagatcccttttctctgatggatatgctgatattcaaggctgtggaagagcaggtcaagaagagagtagagaataaggcaatgatcttcgagcagaatgccactgatagtgagtgcaaggtcgatcctaaagtgctctccaagctatatgatcattgggtggatgccacacaccaaggatgtctgccttgactaatcaccgattagctgtagctgtaaattttatgtatacatggtttcagttgcgctcgatccaattgtcttaaccttgaatggacattttgatgtttctttcatgaatgttcaggtcaacggcaagataaaccaattgcgttgtatgagttttagatcataactcaagttttttgtagatcttggtgctatttcatatgatgtgtcatgtttcagtgattgctttatagtgaacccgtaagatgtaaaatgacctttatgacagaaccatatgtaataacagagtattctgaggaacctttgttgaagtaaatgtaatcgagtttcctagcaatcttgttcctgcagacgagcattggaaaataacagagtattctgaggaaccttagtcgtattaagtttgtgtagaaagaaactgatcataatataatg

SEQ ID NO: 3944 - DNA, 2431 bp, Zea Mays
cccgtctcacgaacccgtcccctcacatccctcgcgttgccattgcttggtcctctccgcgcccgccgcccctgctcggctgctccccatgtcccgcgccgcggtgacaaggatccgagaacacccctgcggacgcatccgggattcaaggcctcccctcccttcccctgcccccaccccctcggtgatgcccggatccacgactgctaccgtccagcctcgttctccgtccgcgaccgcttcacggtggcgcagacgctggaggtgtccacagggggcgacaccgtgaccctgcctccgttcgacatcagcgcccctccccccaccaccgtcgatttgtagaagctcctcgcccgttcttgcttcaccagcgattcggggaggccatgcccccctcggccgcaccccttctcctcctcgccgcatcccgcctctgggcagccgcgccacccctccctccacctcgccgtctcctacctcctccccctcgaccgcatctgcctccctctgtggcctcgctaccaaggtcaagatcgtcgagatttgttagggtttggggtttttgcggttgactctgaatcccgccgccgctgctcgcgcaggaggcctcgagctcccagtgctcccctcctcaaccaccctgggtaagtggctcccagattgatagggaaagagttcggactgtaggggctattgaatacttgattgatgccacaagatctggaaatgtgtcccgctatatcaatcacagaagttgttccccaaatctcagcacccgattggttttggtagagagcaaagattgccagcttgctcacattagcttgtttgctaatcaaaacattgccgtaggagaagaactcgcctatgattaccgacaaaagcttgtagcaggcgatggctgcttctgccattgtgggggccttagtgtaggcgtacaatctacgtcgacgccaaaattaaatcaccttcctacatccatagttgatatgaactggacatgcttaatccagggtacatggctgatgtgttcatcttctagaggatatcttgcaccagagtacaccattcaagggcagctgaacaaaaagagcgacgtctacagctttggtgtgctgctgttggagattgtcagtggcagatgccacactgatcctagattacccgttgacgagcagttcctcctagaaaaggtctggacactctatgagttcgatgatctcgagagcatcattgataggacactaaagcgcgattttgacaccgaggaagcactctggttgcttaaggtaagtcttgtgtgcatcccggatagccctaagatcaagtcctccatgtcaatggttgccaagatgctgcaagggtcctcaattaaggtcgaatggatgcaatcaaaactagaagggtgtgcgccatcgaggatcactgcagctaaggcaatcgtgaaggctggaatcgttgttatggcaccgcaagctattagtgtgctaggtggatttaggcctcaagggaaaacgattgacaatgttgtaaaggttgtggagacaacacttgccatgcaggaggctggatgcttctctgttgtgtattagttgttggcagatgatttataagatattgagatcaaaatcaggatgtttccaaactgtctataatcaggatggctattgtagcttttacagtaggtcttcttcccatgggcggtgccctggagcgcctgattgtctcacgtatttgaccagcaacaagggacgaagattggagctgtgtggattgtgtggaggcgacacgggtcaggagcatttcatctgatcccttttctctgatggatatgctgatattcaaggctgtggaagagcaggtcaagaagagagtagagaataaggcaatgatcttcgagcagaatgccactgatagtgagtgcaaggtcgatcctaaagtgctctccaagctatatgatcattgggtggatgccacacaccaaggatgtctgccttgactaatcaccgattagctgtagctgtaaattttatgtatacatggtttcagttgcgctcgatccaattgtcttaaccttgaatggacattttgatgtttctttcatgaatgttcaggtcaacggcaagataaaccaattgcgttgtatgagttttagatcataactcaagttttttgtagatcttggtgctatttcatatgatgtgtcatgtttcagtgattgctttatagtgaacccgtaagatgtaaaatgacctttatgacagaaccatatgtaataacagagtattctgaggaacctttgttgaagtaaatgtaatcgagtttcctagcaatcttgttcctgcagacgagcattggaaaataacagagtattctgaggaaccttagtcgtattaagtttgtgtagaaagaaactgatcataatataatg

SEQ ID NO: 3945 - DNA, 2626 bp, Zea Mays
cccgtctcacgaacccgtcccctcacatccctcgcgttgccattgcttggtcctctccgcgcccgccgcccctgctcggctgctccccatgtcccgcgccgcggtgacaaggatccgagaacacccctgcggacgcatccgggattcaaggcctcccctcccttcccctgcccccaccccctcggtgatgcccggatccacgactgctaccgtccagcctcgttctccgtccgcgaccgcttcacggtggcgcagacgctggaggtgtccacagggggcgacaccgtgaccctgcctccgttcgacatcagcgcccctccccccaccaccgtcgatttgtagaagctcctcgcccgttcttgcttcaccagcgattcggggaggccatgcccccctcggccgcaccccttctcctcctcgccgcatcccgcctctgggcagccgcgccacccctccctccacctcgccgtctcctacctcctccccctcgaccgcatctgcctccctctgtggcctcgctaccaaggaggcctcgagctcccagtgctcccctcctcaaccaccctgggtaagtggctcccagattgatagggaaagagttcggactgtaggggctattgaatacttgattgatgccacaagatctggaaatgtgtcccgctatatcaatcacagaagttgttccccaaatctcagcacccgattggttttggtagagagcaaagattgccagcttgctcacattagcttgtttgctaatcaaaacattgccgtaggagaagaactcgcctatgattaccgacaaaagcttgtagcaggcgatggctgcttctgccattgtgggggccttagtgtaggcgtacaatctacgtcgacgccaaaattaaatcaccttcctacatccatagttgatatgaactggacatgcttaatccagggtacatggctgatgtgttcatcttctagaggatatcttgcaccagagtacaccattcaagggcagctgaacaaaaagagcgacgtctacagctttggtgtgctgctgttggagattgtcagtggcagatgccacactgatcctagattacccgttgacgagcagttcctcctagaaaaggtctggacactctatgagttcgatgatctcgagagcatcattgataggacactaaagcgcgattttgacaccgaggaagcactctggttgcttaaggatcatgaggctggcctgatcacagacgtcatggacctgaaagtcaggatggtagagccggttcagttcagcttgacatcatgctcgagcactatcgcgttgtggcctggggcgcgatgcgcccactccttgttggggatttcccattcagctactacgagtcatgccgtgtaggtacgcggttgttgattcaatcgtgagggtcctcaattaaggtcgaatggatgcaatcaaaactagaagggtgtgcgccatcgaggatcactgcagctaaggcaatcgtgaaggctggaatcgttgttatggcaccgcaagctattagtgtgctaggtggatttaggcctcaagggaaaacgattgacaatgttgtaaaggttgtggagacaacacttgccatgcaggaggctggatgcttctctgttgtgtattagttgttggcagatgatttataagatattgagatcaaaatcaggatgtttccaaactgtctataatcaggatggctattgtagcttttacagtaggtcttcttcccatgggcggtgccctggagcgcctgattgtctcacgtatttgaccagcaacaagggacgaagattggagctgtgtggattgtgtggaggcgacacgggtcaggagcatttcatctgatttacagagaagtaaagagaagttgtttacatttagtcatcctctgtatctgaaacaagactatgtttctaccttgtctttctcatggttcttagcctatggccgaagcttccatgcttgattcttcaaacatccaatgcagatcccttttctctgatggatatgctgatattcaaggctgtggaagagcaggtcaagaagagagtagagaataaggcaatgatcttcgagcagaatgccactgatagtgagtgcaaggtcgatcctaaagtgctctccaagctatatgatcattgggtggatgccacacaccaaggatgtctgccttgactaatcaccgattagctgtagctgtaaattttatgtatacatggtttcagttgcgctcgatccaattgtcttaaccttgaatggacattttgatgtttctttcatgaatgttcaggtcaacggcaagataaaccaattgcgttgtatgagttttagatcataactcaagttttttgtagatcttggtgctatttcatatgatgtgtcatgtttcagtgattgctttatagtgaacccgtaagatgtaaaatgacctttatgacagaaccatatgtaataacagagtattctgaggaacctttgttgaagtaaatgtaatcgagtttcctagcaatcttgttcctgcagacgagcattggaaaataacagagtattctgaggaaccttagtcgtattaagtttgtgtagaaagaaactgatcataatataatg

SEQ ID NO: 3946 - DNA, 3399 bp, Zea Mays
cccgtctcacgaacccgtcccctcacatccctcgcgttgccattgcttggtcctctccgcgcccgccgcccctgctcggctgctccccatgtcccgcgccgcggtgacaaggatccgagaacacccctgcggacgcatccgggattcaaggcctcccctcccttcccctgcccccaccccctcggtgatgcccggatccacgactgctaccgtccagcctcgttctccgtccgcgaccgcttcacggtggcgcagacgctggaggtgtccacagggggcgacaccgtgaccctgcctccgttcgacatcagcgcccctccccccaccaccgtcgatttgtagaagctcctcgcccgttcttgcttcaccagcgattcggggaggccatgcccccctcggccgcaccccttctcctcctcgccgcatcccgcctctgggcagccgcgccacccctccctccacctcgccgtctcctacctcctccccctcgaccgcatctgcctccctctgtggcctcgctaccaaggtcaagatcgtcgagatttgttagggtttggggtttttgcggttgactctgaatcccgccgccgctgctcgcgcaggaggcctcgagctcccagtgctcccctcctcaaccaccctgggtaagtggctcccagattgatagggaaagagttcggactgtaggggctattgaatacttgattgatgccacaagatctggaaatgtgtcccgctatatcaatcacagaagttgttccccaaatctcagcacccgattggttttggtagagagcaaagattgccagcttgctcacattagcttgtttgctaatcaaaacattgccgtaggagaagaactcgcctatgattaccgacaaaagcttgtagcaggcgatggctgcttctgccattgtgggggtaccaattgccgaggccgtgtctattgacttcgcaggaagacactaaactgttcaacgcttggttgcagaactcgaggtttctacagctgtgtaggctgctgagcgatttaggccttagtgtaggcgtacaatctacgtcgacgccaaaattaaatcaccttcctacatccatagttgatatgaactgcatggtacatttttttctgcacaattgtacatggaagcattagtcataggatatcggttgttgaagtacgtcgtcaagtgtacatggaagcattagtgcattgaacggccgaagaatcaccgcaggtacatggctgatgtgttcatcttctagaggatatcttgcaccagagtacaccattcaagggcagctgaacaaaaagagcgacgtctacagctttggtgtgctgctgttggagattgtcagtggcagatgccacactgatcctagattacccgttgacgagcagttcctcctagaaaaggtctggacactctatgagttcgatgatctcgagagcatcattgataggacactaaagcgcgattttgacaccgaggaagcactctggttgcttaaggtaagtcttgtgtgcatcccggatagccctaagatcaagtcctccatgtcaatggttgccaagatgctgcaaggtgagtgtgttgtgggtgataggatcatgaggctggcctgatcacagacgtcatggacctgaaagtcaggatggtagagccggttcagttcagcttgacatcatgctcgagcactatcgcgttgtggcctggggcgcgatgcgcccactccttgttggggatttcccattcagctactacgagtcatgccgtgtaggtacgcggtaggtacgcgatctgtcccctctgttctggataagacgttctgatgtgatagtgatagaaatagaatagaacgatgtggtggtgccacacagcccacaatgtagacgacacttggctatcacgttcgttcgtctcactacagaagggtgtgtcgcggttttcttttttttcactaagcaaatgtgatgcttgttagatttggataagaaaccttttgttttacaatataattcactaattgtatcggccgatattcgattgtttttggttcaatattagatgttcaacaacatggttttttttgcttaaccaaataataatgttgcaaaagtactaaggttagcttgtttattgttgttgatgtgcccacacaaatacacatgtatgaggaatattgttagtattttccatgttcttttaggttgttgattcaatcgtgagggtcctcaattaaggtcgaatggatgcaatcaaaactagaagggtgtgcgccatcgaggatcactgcagctaaggcaatcgtgaaggctggaatcgttgttatggcaccgcaagctattagtgtgctaggtggatttaggcctcaagggaaaacgattgacaatgttgtaaaggttgtggagacaacacttgccatgcaggaggctggatgcttctctgttgtgtattagttgttggcagatgatttataagatattgagatcaaaatcaggatgtttccaaactgtctataatcaggatggctattgtagcttttacagtaggttggtattatatgtttccaatttgtgtttttattaaaccattgtctaattggtgtcaggtcttcttcccatgggcggatcattgtcgactggtggtgtcaggtcttcttcccatgggcggtgccctggagcgcctgattgtctcacgtatttgaccagcaacaagggacgaagattggagctgtgtggattgtgtggaggcgacacgggtcaggagcatttcatctgatcccttttctctgatggatatgctgatattcaaggctgtggaagagcaggtcaagaagagagtagagaataaggcaatgatcttcgagcagaatgccactgatagtgagtgcaaggtcgatcctaaagtgctctccaagctatatgatcattgggtggatgccacacaccaaggatgtctgccttgactaatcaccgattagctgtagctgtaaattttatgtatacatggtttcagttgcgctcgatccaattgtcttaaccttgaatggacattttgatgtttctttcatgaatgttcaggtcaacggcaagataaaccaattgcgttgtatgagttttagatcataactcaagttttttgtagatcttggtgctatttcatatgatgtgtcatgtttcagtgattgctttatagtgaacccgtaagatgtaaaatgacctttatgacagaaccatatgtaataacagagtattctgaggaacctttgttgaagtaaatgtaatcgagtttcctagcaatcttgttcctgcagacgagcattggaaaataacagagtattctgaggaaccttagtcgtattaagtttgtgtagaaagaaactgatcataatataatg

SEQ ID NO: 3947 - DNA, 4885 bp, Zea Mays
gtgatacttgataggctataagctgctagtgcttgtggaatggaagagccacagaaggacagtgggcaaccatcaaaaagttctgattctgagctagaagctatggtattggatgataatggagcgggaaaatcccatagtatggaggaaaacagggattctcctatagatgtcgatggtgggcagtcatctatggatgtggatatcaagggaaaatcatccctcagtgatgatgttaatggaaagtcttcttccgagccatattccaatgctccaattgacatgagtgtcgaaagcctagagaagttttgcaaagaagcgtcaaggtccttctttgatgaagttggtctgattagccatcagataaattcctacaatgagtttgtctcgcatgggctccaggagctttttgattcgcttggggaagtgattgttgaacctggctatgatccttcgaagaaaggatcaggtggctggaagcatgccatcatcaagtttgggagagtgaagcttgaaaagcctgtgttttggactggcaaggatgaaggttctgttgattttaaaccttggcatgctcgtctccagaatatgacatatgcttcaagacttatagtagaagtgactattcaggtttattctttggagaaaagtgacaaatctaaaacagggaatgatggttttgttcaaaaaaggaacttcatgaatgaaactcattggatatttattggcctccttccggttatggtcaaatcaaacttatgtttgctgcatagcctcaacgaaagtgagtgcctgttcgacgcaggtggatactttttggtcaagggaatggagaaggtattcattgctcaagagcaaagatgtctaaggaggctttggattagtgaccgaccttgctggactatctcttttatgtctgaaatcaagcgtagacgtatatatattaaactagttgaatctacaaggagtgaagatttcagtgagagcaaaatcattaccatttcctttttgtatgcgacaatgccagtttggttgttgttctttgcacttggaatatcatcagataaggaagtgtttgatatgatagatatgcaagattgtgatgcttctgttatcaacacgatatctgcaactatcaaagaatctgataaactgtgtgaagacttccgtaaatcagataaagctcgtcaatatgttgatgagttggtaaaaagttcgagatttcctccagcggagtcctttgatgactatattgctaggtttctctttcctgatattagtggaaatagaaacaaagcacttttcttagggtacatggttaaatgtctgctaatggcttttactgggaagcgtaaatgtgataataaggatgatttcaggaacaaaaggctggacctacctggtgaattgcttggaagggaacttagggcacagcttaggctggcagagaaacgcatggttaaggccatccaaagagatttgaatagtgaccgtgagttacaagatcttgaacgttatatagatgcatcaattgttactaatggtctaaatcgtgccttttccactggttcttggtgccatccgtacaaaagagctgaacgatgctcaggaattgttgcgactctaaggagaactaatcctcttcaaatgatgtctgacttgaggaaaacccggcagcgggttgcttacgctgggaaagctggtgatgcaagatatccgaatccatcctattggggaaagctatgctttatgtccactccggatggtgaaaactgtggacttgtaaaaaatctagctgttactgctattgttagctcaagggtgatgcagcccttgattgagagcttcatttcttgtggaatgagtaagctgaatgacattcctactgaacacattcaaagaatggataagatctttttgaatggcaattgggtgggatcttgtgaaaattcagcttcatttgtatttcgattgaggtgcatgagacgcagcagtctgattgatcctcagggcgaatcctcagaccccttcttgtggttgagaatctgaataaaatcagaaaacctaaggggcgctcattctctttccatgaattaatgcaacaagaaataattgagttcattggtgttgaagaggaggaagatatacaatgtgcgtggggaatcaggcatttgtttgagagtgaaggtgcgatatctagttatactcactgtgaactggatccttcctttcttctgggattaagctgtggtatcattccttttgcaaaccacaattttgctcggagggtattgtaccaatctgaaaaacactcgcaacaagctattgggtactcaacgacaaatccacacatcagagttgatactctttctcatcaactatattatcctcagaggcctcttttcaaaacagttatagccgactgtcttggcagatcagattatgcttcttttggaagaaaaaatgatttcgcgagaccagaatattttaatggacaaaatgcaattgtagcagtcaatgttcatcaggggtttaaccaagaggattccctggttatgaatagggcttctcttgaacgaggtatgtttaggactgaacacctcaggagctataaggcagatgtagaaaacaaggatggaaccaaacgactgaaattgaaggaaaaaatagactttggaaaaacagaaagcaaaagaggacgtgttgacaatcttgatgatgatggcttaccttacgttggtgcaagtcttcagaccaatgacattgttattggcaaagtctcagaatctggagaagaccacagtattaagctgaagcatacagaaaagggaatggttcagaaagtattgctttcagcaaatgatgaagggaagaattttgctgtggttactctaagacaggttcggacaccttgccttggagataagttttccagcatgcatggccaaaaaggtgttgttggttttctagaatctcaagagaacttcccatttactcacgaaggtatagtcccggatattgtgataaatccacatgccttcccaacacgtcaaactcccggacagctgcttgaagctgctctggggaagggaatagcttgcaaaggtacaatgagatatgcaacaccattcaccacagcatcagttgacgttattgcagaacagttgcacagggctggttattcacgatggggatctgagaacgttctaaatgggcgaacaggtgaaagagtgcaatccttggttttcatgggccctaccttttaccagaggctgattcatatgtccgaagataaggtgaaattccgtaacactgggccggtgcaccccctcacgaggcagcctgttgccgacaggaaaaggtttggtggagttaagtttggagaaatggagcgtgactgcctcctcgcccatgggtcagctgccaacctgcatgaacgcctcttcctgcttagtgacttctcccagatgcacatctgccagacatgcgagcgcgtggctaatgttgtcatgaggtctgtccccggaggcaagaagatccgtggcccctactgcggcttctgcaagtcttcggagaacatagtgagaatcaatgtgccctatggcgcgaagctgctctaccaggaactcttcagcatggggatctgcctcaagtttgagacccaagtctgctagaacttgtagacctgcttgcatccagttattacatatgtacatacagctagcctatgaggatctccaagctggtgtgccggtgtgtgatgctggcatagtaaggatgggcgagctagaaaccctgttgtgtttatgtgctgttttctccctgctcatgtggtaaactatgctaaagtgaatgaacactcgtttcctgttccctctttgaatgcgctgtgttagcatgcccttttgtttgaagattgcgtcttttgtggagcaccttgtattgctccgtagggatcacaccccttaccgccggcgatggccgacgatttgagataagatataatatttctggtcgtccttgttaaagagttcatgcatatacagtacacaagaaatgtcgatcgaatatagctagtaaaacaacttcaagaaacatgtacatgcggttggatggatcctttctcatcgatgatttgtctgcattgattcatccaaatcaagatacaagaggcagcatgagatgatctgtctgtgtctgcattgatccaaatcaagacacaatagagggacagcatgaggacgaacagagacaaatccatcgccccgtgcttgagtttctccacgagctagtaagagatcagcaagatcctctctagctaactacctgagggaaacgaacagcaggggaggaccaagaagtgatgagtgggggaactccatgcgagccctctggcctctcctcccacaggctacatcttgaggacgaagaagaacagtcctcgatgcgtcttcacctagctgctgcttaatttacgagtgatgctcttcgatccaaaggtacttatactacaaatacccctccccctctctctctctgtctccatcgccccaatgcaaagccggtctttctatagctcatagctgctggaatttggacctggctttgaaacatgtcgtgcactcgcgttgggtttgaaagagatgacttgcgttgcagcgagcgagcgacacaggtcaggtcacactgcaggggggaagcgaagcacgagtgtacatgcattgaacctggacgccctctttagcttttgcgtttgggcatacagtatttttattttggccttctgggatttgggaatacgagtcatcgattccctcagtgtcgtcccgtcacagctttttttttccgttgcctttatgctgcatgcccattcagcagtcacgca

SEQ ID NO: 3948 - DNA, 2156 bp, Zea Mays
acctggagcgcgcgcttccctcggaaaaaaatccagacaaaacaatctcgaaatccagttaaccaatcaaccccacgccgccgccggctgcgcctcgttggcctcgccccacgtcacatgccaaattccgcggcgagaggaagccccgagcaggaggccacgcgacgagcaggcgggacgcgcgggaggaagggagacacagaggagggagcgagaacctccggcgtccggcctcgtcggctccccagcgatcaccggcggcgagggggcgcggcgatcggacggagcaggggggcggagggcggagccgagcgagcgccaagcgttgcagatttgggggccgggcctcgggctcgcccggttcttgtagtgaccaaaccggcccgtgaaccctgtgcccgggcccgacccgcggctgaaccagcacgcggcagaggcatctcgtaagcagcagcagagagctgaaattgagagaggcgaggggcctttgcggcggctgcggagacggcgatggcaggcgcggaggggagaggtccgaggcggagccgcgtggcgttcgtgctggtggacgggatcggggacgtgagcgttccgtcgctgggcgggcgtacgccactggaggcggcgtgcacgccgcggctggacgcggtggcggcggtcggggtgaccgggctcatggaccccgtggagccggggctcgcctgcggcagcgatacggcgcacctatcgctcctcggtcaaacttcgctacactggatgagagcactggagttatcatcagcaggagggcggatcggcattttgaagaggaaggccctatcctctgtgcggcgttggatgggatgaggcttccgtcatttcctgaatatgaaattagagtaagatatgctactgagcacagatgtggtgtggttgtcaaaggaccaaagctgagtgggaacatttctggaaccgatcccttgaaggacaaccgcttgcatctgaaggctgaaccgttggatgactcgcaagaagctaaaaacagtgcagctgtgatcaatgagctttctaaagagataacgcacatactggtttctcaccccatcaatgcacagcgtgcagctgaggggaagaacatcgcaaacgttgtgctgttgcgaggctgtggtattcggattgaggtgcctgcctttgaaaccaagcatggacttgcaccttgcatggttgctcctactaagatcatagctggcttggggttgtcactggggattgatatccttgaagcacctggagcaactggagattaccgtactctcttaacttctaaagctaaagctatagccaaggcattatcttcccctatgggtacaccacctcgtgtttttgtgcctggagaggatgaatacaaagctggaaaagaaaatggatatgactttgggttcctgcacataaaggccattgatgatgctggtcatgataaggctgtcaagttaaaggtacggggtctagaagctgttgatcgagcttttggtcagcttgcaaggcttctttgggaagctgaaaatgccggacactaccagtactttctgtgtgtcactggagaccattctactcctgttgaatatggtgaccatagcttcgaacccgtcccatttgcaatatgcagactgagagattatgcaggagccgttggggttgataatattataaatacacagcttgatgctttccccctcccttcagtaaaatccggagaagatttgcttgacaatatagaatcacttgatcacaagcctgatcaacttaaagctttcagtggtgacactgtgtgtgagttcaacgagattgccactgcgaggggctgccttggacgattccctgggagtgagatgatgggcattattaaaaagtttatcaaggcgaagaatgattaatgctggttgaagtgctaaccttttgcgtgatctgtagaccataaggcttttctatgtaataaacttgttggcgcttgtttggacaaacactaaccatccctaggtcgccctcgtagtgagtccggaccttgaagatgatccctaggtttcgcccacagatggtcgagaggagggagataataaataatatgtaagacaaataacactacctcgaatgtgatcttgaaagaaaaccttggaacc

SEQ ID NO: 3949 - DNA, 880 bp, Zea Mays
gttcttagtctgctgctttgatgactgcaaggcatgccatgttcagtgaccgcatgaattgaggtggacaataagcggtacttcagcaaggaatactctgaatttctggatgagtttatggccgcagttaggcagaactatggacaaaaggtccttgtccaggtatggaaaataattgaaaatatattatttgtttcctaacgaactgtagcagaccactttctaaaatttgtttggcattacagtttgaggactttgcaaaccacaatgcttttacacttctcgagaagtacatgacaaaccatcttgtatttaatgatgatatccacgtaatcaaatcagatgctagttaatttatcttgcttttcttaaaagccaatgaattttattccagacaacagtactaactctttagccctgatatttaccgggcacggctgctgtagttcttgcagggattattgctgctctgaagtctgttggtgggactctagctgatcatacattcttgttcttcagtgcgagttatacgatcaagtgactagtgatgtgatttgccatggtgagaaaacttcttacaagatgggcgcaagagctttcctagtggccattcgcgcttacacagacctgttttgataagacctgagcagcgatgcttccatttcggaccacggccttagctaaggctaatggttcgaaatgtctgaagtaccgaagacagggctagctcctcgttttttgtcatgtcaaataaattgtgtatgattgcaacaatattggcaaaatatcgttgtactttatattttgatatactgtgaacaaaacaagtgccctatgagaccatcgtgatttatgcattttcaaactaaattttacgaca

SEQ ID NO: 3950 - DNA, 5058 bp, Zea Mays
ggcgatggcggcgccggaatcggaatgcggcgggagtgacggctaccgcgacctccgcggcgtgcgcgtcgacctggacacgggagcagccggagccgatgggggaggaggcttcgccgtctccttctggctctacctgtccgtctccgccagaccgtcctcagtgatcctccaccagatcacagcgggagatgacaccaagttgccgtttcttgctttaggtgaaggaaacaaactgcttctcttcccgttgatgaggctgcacagggaagctcctgctcctgctagttcctacccatggactgacacaaccaatctatcatctacgagtgtatgccctcttgagaaatggttccacattgggtgtgaggtatggtgcaaataactgtaggcattccccccttacccccttgcatttgtagcccgcaaatgaaagtgcaaatggcaacatgtttggcactttcccctgctcttacctcttatttcttttgtgtttgtgtgtacctctatttttagaggaaaaaaacacaacatgcagcatccatcaagagctttatttcctggtatctccacatgttagtctaccctccactttttgtcgaaatggcggttttatgacattggtttgtacctacccatgtcaggttactgaaaatgttatgtgtcttcacgttgatggtttcctaactgctgaggcccccctttgttcactgtttgatgagccagaccgtcaggatgattcaaaccaaattagcttagttggaaatgatggcaagcttgaaggctatatctataatattgaggtttcatatgtactaggagctataaaagaacaatacacaaagaacccaccttttaagttatctattgactattcatgctctgatggaatcgaagagggtgatgacggcatttggagcatcgttggtgggaagctctcttccaaatgtgacaataagctcttccgtattaaattctctacacttcacatgcaaagatattcttttctggaagcatattccaaaccgattcgctgtatatctcgaagccgcactgtccgccccttgggtcctacaaagcgggcgagttctgcaacagcaaatgaaattgacatgctcagtaatggccaagggtttgttagtactgacaaagtaaatagtcgtggacattcagtgtgtctgcatacgcccatgtttcccaagatagaaggtggaatggtggaggtagtagaggcccccaaaataaataagaatgccagaaaggtggtagtaagcaaagaagcacagaatgtcatagggactgattcctcaacatccaactatgacagttttgattcaggaagttcttggagtggatcagaaggagatgatggtattgaaaccttttcagacgctgtggttttcagatactgtctagacagcacatatgaccggtcaaagtttcttagaggtgcatctcttactgttaacaaagatgacttggtaaaacttgcagaccgagtctcgttatatagtggatgctcccaccacagagagggtgctgacacttggaacatgatctcaaagaacaatgaacgtgctctttggtcatctgccattccagagatcataacaaaatttacgaacattgtccattctgtgcgtaggggtttatcagagcaggatcttgaggttttaagaggcattgctggttgtggtgaggacataggaagagatgaatttgataggctatggtgctggttatacctagtggttgtttcattatcgagagagagaattaaaaagctgtgggattgcacagcacctagatggatagagggcttgattacaacagaagaagctgagaatgcactaagaagttccagggaattgttaaaggaggcaggaacatttgttctcagatttcctatcacccgaagctggccacatccagatgctggaagcctagttgtcaattacattggctctgatagctcaattcatcataggctactctctcttgattccagtgatgctagcgctgagaaactgcaagatttgctgctccaggaaccagaactatcacagttgggcaggtaaagcattatagactccaaatcacaggtgctattcctttcagtacttactaaatggtacatatattcaaatgcagggttgatcgggtctcaatcaccatccggagatgaccaaggcttcaaacggttaaacttacattcaaaagcaggatttaggatgctgccacgagaagagggtcaaaagcatccaagagcatagcccataacacccattgcctgttgttaccatgcacaggttgtaaattggttcccttcgtagttcgtacaaagaggatgttttgccgtactagtgaggtctagtctagttgcttcagaaaaccaacagtaacatcagctatcatgtgtgttgcaaaaagaaagaagctgtcatcatgtgcctcgagactggaggattttcagtggctaacatgttgcatataaagctgacagttgatttacggagtacaaattatttttgggttccttttcaatcctctcatttgggccgagagaaggatagtgtcgtcgtagcccatgtcaattttgaggtcaaaagcatcggtccgtccactatccaagccccgaattacgtcacattctccaaaatggctgcgggtcgcacccggcgctcgtccctccctgccgcaaccaacgccaccgcttcggcgcttacccatcagatcagacagacaaacaaggcaaacgagaccctagcgcagcatggcttggacggctgcgggcacagtttgctggcgcctcctccgcctcccctccgtccgctgccctctctcgtcccgggcccggtgttccgctgcgcagagcctagacgccgtggacaaggagtatgccgacctcaacctccggcctctgtaccccaacgtctgtcgtcacccttcttctcttcgtccctacccccggtgctattccaatcttaccactgattcatctatgtacgcagaggggccatcacatgcgcatacggtagcacgtgaacccgctcagctcatccttctcggagcccacggggccgccagagtggaaggaggtgttcgacgaccccttgcttcccctcatggtcgacatcggctgcgggaatcttgatgtccagggagtgggaggttcttgatttggcacgcgaagaattctggcaagagtcaaaactaccttgggctagaaatccgccaaaaggttttattggttttaggttttagcttgttaatttggtttctggattggatgatttttcctttttttaatgtataaatgcccggatctctgactttcagtttaagagagaaaagagaagatcagaacagttttagaaacaaagcactgggaacctcaagctcaagcagccccccgccccaaagcatgacacagcacacagactgcaccctcataacacggaacaaagataatgaactgcagaatcgcatgccatcatttcgctttcaaagacacttgctttgctgtttggaacaattctcgaagatgattcagtttcattctttcctgagtcccacattacatagattgccaggccgttgaaatattttggcataaaagatataagcgtatgccagtatcacacggtccattgcgcataatgcaattatcttgatgtggccagccccttaaatccaagttgtctgctgcagaattttgtcttgtataagtgtccaagcaaaccatttaaatgtgcctttgaactgcacccggtacttatgcattgttaaatttgtagtttggtgacactctacttgttttgtttctgtagttggtggagcgggcacagttctgggtgaatgaattggagcttatgtacgtgtaggttgcctggcatccgaatttggcacttgctctttcttatcagtgcagtaatgtagcatcacttgaaattattctctttcaacagctattttatgtttgcaaatgcaacgatgtcttttgagaaaatcatatcgtcataccctggtcccctgtcacttgtttcaatactgtgtcctgatccacacttcaaaaagagacatcacaaaagaagagttctgcagcaaccattggtcgattcaatcataaataatctatgtttaggcggacaggttttcatacaatcagatgtactggaagtagcggtagacatgagggaaaggtttgatgggtactctggtattttggcacatgttaattatgtcgatcaagatcttcagtgtgacaatgaaggatggcttctggacaacccaatgggaatccggacagagcgagaaatccatgcagagcttgaaggagcaacgatatacaggagggtgtaccaaaagttgggaaaaaacaaagcatccaagtacaaagcctggcgaaccaaaacgaagagaagcccaagcaattagccaatgcttttgatgaagatgacaactggcaaaagtgttcctttgttggtcaaattgtacttatggtgtttagcatcaggtgttgtcttcgttctgtccataattcaggtctggaattggtcaccatctatcggtatgcagagagtttgtagaggcaatccagatgaggcaatttgatgtgcgctaggattgttcaaactttggtccgctcaacgttctcttgacttggtagatatacaagaatggacaacgttttcttgacttggtaaagtttggtcattagtttgtgaaacagaatgctgcattgctcttggcatttgataagtgacaggtggataagacgacaccgaggtgtgggcactttttagtgtttgatgtttgctaagtcctctaccatcaggtcaatacatatgttaatcaatttgaataactccttaattgaaattttgttgctaatggtatcgaattaactcaccattgtattcggcgaataatgtttcgttgcaacacagtcatattgtactagtgatagctgatattgttgggttgcccgtgtattttgtaataagacacataaatatatgttctattggttagatgagtgtgaatgctaacaatcaa

SEQ ID NO: 3951 - DNA, 2542 bp, Zea Mays
atgcgcggcgcgtaccctgtcctgcctactttgctctgctctcgacgctttgctctcctcccttccccacccgcccacccggacttggttcttccgccattcccgttatcgcggagcgcaggtgctcctcgtcttctgcggcggcatcgagagggtgagctcctcgtctctcttgctgagctcgacgcggcggtccggtgctcgctgcgaagctggtggatggcgaatatggattcggttgttgtgatggaggtggcgccggtgccgatcccgacgttcatggacgccactcccctgaaccccccactgccgcttgtggtggaggagctcgtgctgcgccgcagtgctcgttacctcaacaggccaacccggcctaactacgcggaccaggagcctccaaaaaaccccggcggccggggccggggcaagcgaaagagggatgaggagaagccggagctggcggcgcagcagggtaccaagaccccaggcaggaatgactccaatgttgaggcgggtgagaggaagccgatgcccgtgactgcggcggtgccggcctgttgcgctggcgttgctgcggaagacgatgcgacgccgactgggaagagcgccaagctgagggtgaaggagacactgagggcgttcaacagccactacctccactttgtccaggaggagcagaaaagagctcaggctgcgatacaggagattgaggctaagggtggcctcaaacgtcagaccaaggggggtaaaaagaagagcagtaagcaagaggctgaagctgaggagaaagagaaacgcccatcaaagcgacctgacctgaaggcaatcaccaagatgcaagaaatgaatgccgtgctttatcaggagaagacgattgggcatctaccagaaggagtatgccaacttaactttcccattggccacatgtattgtaatgtcggggatatatgaagatgatctagacaaggctgatgaaattatttatactggtcaaggaggaaatgatttacttggtaaccaccgccaaattggctctcaacagttgaaacgtgggaatttagcattgaagaatagcaggaagaatggtaatcctgtccgagttattcgaggtcatttatcaaagaatagctatactggaaaggtctacacctacgatgggctttacaaggttgtagatgactgggtgcagaacggtgtgcaaggccatgttgttttcaaatttaagttgaagcggcttgagggtcagccatcattgacaacttctgaggtgcgatttactcgtgcagaagctccgacaactatttctgaattacctggactggtttgtgacgatatctctggagggcaagaaaacattccgattcctgccactaacttggttgatgatccacctgttcctccatctggtttcacatacttgaagtctctaaaaattccaaaggacatcaagatcccatctagtattattggctgtgattgtgaaggagattgtgctagcaacaaaaattgttcatgtgctcagcgcaatggttctgatctgccttatgtatcatataagaacattggcaggttggtggagcccaaagcagttgtatttgaatgcggggctaactgcagctgcaaccatgattgtgtaaacagaacatctcaacagggtttgcagtatcacttagaggtatttaagacagcttcaaaaggttggggagtcaggacttgggacactatcctccctggggctcccatctgtgagtacacgggggtgttgaggaggactgaagatctggatggttcacagaacaactattgttttgacattgattgtcttcaaaccatgaaaggtttggatggaagggagaaaagagctggatctgaaatgcacctgcctaatctttatccagagaatgactcagatgcaccacctgcacctgagtactgcatagacggcagttccattggcaattttgcaagatttataaatcatagttgccaacctaaccttttcgtccagtgcgtcatgagctcacacaacgatgttaaactagcaaaagtgatgctttttgctgctgacacaatacttcctcttcaggagctatcctatgactacggttatcgcttggacagtgttgttgggcctgatggtaaaattgtgaagctgccatgccactgtggtgctccagattgccggaagcgcctctactagacctgcagtgtgtttccattttgattttgcaggaaacaacctatattgtaggaaagcattcatgttatttatgtagttggcatgctctgatatatagcgaaagaggagcaacttaatctccttttagagcattcttattttgtgataattggaggacatgctggtcatggtagcatattttgcaggaaatcaattaactgatatgtctgggcatggatctatgttttttctattatgtgctgtcgtgtttttttaatcaatggatactacattactgttatggccactgaattgatacaatgttatcgatttatatagcattttctcctgttaaaataggta

SEQ ID NO: 3952 - DNA, 2647 bp, Zea Mays
atgcgcggcgcgtaccctgtcctgcctactttgctctgctctcgacgctttgctctcctcccttccccacccgcccacccggacttggttcttccgccattcccgttatcgcggagcgcaggtgctcctcgtcttctgcggcggcatcgagagggtgagctcctcgtctctcttgctgagctcgacgcggcggtccggtgctcgctgcgaagctggtggatggcgaatatggattcggttgttgtgatggaggtggcgccggtgccgatcccgacgttcatggacgccactcccctgaaccccccactgccgcttgtggtggaggagctcgtgctgcgccgcagtgctcgttacctcaacaggccaacccggcctaactacgcggaccaggagcctccaaaaaaccccggcggccggggccggggcaagcgaaagagggatgaggagaagccggagctggcggcgcagcagggtaccaagaccccaggcaggaatgactccaatgttgaggcgggtgagaggaagccgatgcccgtgactgcggcggtgccggcctgttgcgctggcgttgctgcggaagacgatgcgacgccgactgggaagagcgccaagctgagggtgaaggagacactgagggcgttcaacagccactacctccactttgtccaggaggagcagaaaagagctcaggctgcgatacaggagattgaggctaagggtggcctcaaacgtcagaccaaggggggtaaaaagaagagcagtaagcaagaggctgaagctgaggagaaagagaaacgcccatcaaagcgacctgacctgaaggcaatcaccaagatgcaagaaatgaatgccgtgctttatcaggagaagacgattgggcatctaccagggctcgatgtcggagatcagttttattctcgcgctgaaatggtagtgttgggcatccacagccattggctcaatggcattgactatatggggatgaaataccaaggaaagaaggagtatgccaacttaactttcccattggccacatgtattgtaatgtcggggatatatgaagatgatctagacaaggctgatgaaattatttatactggtcaaggaggaaatgatttacttggtaaccaccgccaaattggctctcaacagttgaaacgtgggaatttagcattgaagcaggaagaatggtaatcctgtccgagttattcgaggtcatttatcaaagaatagctatactggaaaggtctacacctacgatgggctttacaaggttgtagatgactgggtgcagaacggtgtgcaaggccatgttgttttcaaatttaagttgaagcggcttgagggtcagccatcattgacaacttctgaggtgcgatttactcgtgcagaagctccgacaactatttctgaattacctggactggtttgtgacgatatctctggagggcaagaaaacattccgattcctgccactaacttggttgatgatccacctgttcctccatctggtttcacatacttgaagtctctaaaaattccaaaggacatcaagatcccatctagtattattggctgtgattgtgaaggagattgtgctagcaacaaaaattgttcatgtgctcagcgcaatggttctgatctgccttatgtatcatataagaacattggcaggttggtggagcccaaagcagttgtatttgaatgcggggctaactgcagctgcaaccatgattgtgtaaacagaacatctcaacagggtttgcagtatcacttagaggtatttaagacagcttcaaaaggttggggagtcaggacttgggacactatcctccctggggctcccatctgtgagtacacgggggtgttgaggaggactgaagatctggatggttcacagaacaactattgttttgacattgattgtcttcaaaccatgaaaggtttggatggaagggagaaaagagctggatctgaaatgcacctgcctaatctttatccagagaatgactcagatgcaccacctgcacctgagtactgcatagacggcagttccattggcaattttgcaagatttataaatcatagttgccaacctaaccttttcgtccagtgcgtcatgagctcacacaacgatgttaaactagcaaaagtgatgctttttgctgctgacacaatacttcctcttcaggagctatcctatgactacggttatcgcttggacagtgttgttgggcctgatggtaaaattgtgaagctgccatgccactgtggtgctccagattgccggaagcgcctctactagacctgcagtgtgtttccattttgattttgcaggaaacaacctatattgtaggaaagcattcatgttatttatgtagttggcatgctctgatatatagcgaaagaggagcaacttaatctccttttagagcattcttattttgtgataattggaggacatgctggtcatggtagcatattttgcaggaaatcaattaactgatatgtctgggcatggatctatgttttttctattatgtgctgtcgtgtttttttaatcaatggatactacattactgttatggccactgaattgatacaatgttatcgatttatatagcattttctcctgttaaaataggta

SEQ ID NO: 3953 - DNA, 2326 bp, Zea Mays
caggaatcatcgcgtcgtgctcaagccaccccgccgtcatcgcctcacgcaccttccttcggcaaccttctataggcgcaatcacaggaatccccgcggcctcgccccagatccctaaaccccgcctcgtctctcatggaaagtgcgtcctctgcgctcggctctctccgcgtctgcgacagcccgctatccatggaacgtgggtcctctgccctggatcgtcacgtcggccctcgattcgcgtccgcgacagcctaatcccgcacgtggattgggtacccctctgccccgaatcgtcgctcccgcccggcatcagcgtccgcgtccgcgttgtggtgtccgcagtctccatggaaggcgatcccgcgtgtggattagcattagcagatgaagaggcggaatgttcttcttgggatagcgacgatgagtaccagaaattcatccaaaatatgaaccctccaagggtcaccatcgacaacacctcatgtccaagtgctatagttattcatgaaagtgtccaccgacgaaggagaagccaaagcacaggagcatggtgctatgttcatggagaccagtgcaaaagctgggttcaacgtcaagcccctattccgcaagatcgctggatcccttctaggactagacgcactttcgtcaggaaagcaggaagacatggtcgacataaacctcagacctgccagcggttcgtcggcttcaggtgcagccgcgcagctggagcagaaatcaggcggttgctcctgttgagacttcgacagttttgtgttcagagaagctacaacagtactgcaacatcgacatcgacattcaatttcacagcaggaacttctccattccattccaatccaacatcgacaggcattccatttcacacagctaatcggtggagggaaaaatattcatcaggaaaccagctaatcgtggaaggaaaaaatattcatcaaagtggatgtcactggatgttttagtggatgtcaactttgtcatctactcgtgtttgataccaggatgcagtgcaaccatttccacatatgtattggctagcattgaactgaggctttgtacagtagtaataagaaatgagaaatgtcgaattcttttagggccctgatttggcatcaattgaaaagacattgactgtatctatctacagggttccacatgcacattcagcgagtcaatcctgggatcgtgtggcttccatactgggctgttcacctcaccacatttgatggatgttagagagcgatttcagctagatgggtgctatgaaatttatgatcgcactgacctagctcctcctttctgagggcatcggggttaatatttctgaagagaaaattttgaagtactcctggtggtgctagaacaagttgaaggtaagtgtcttgatttgttgttccatataaagtcactctgcgctcgacgtttactacctagaagtgacaaagctcaaactactgaattgattccatcaggaacttttttgcatttgtcatataatctgtctgatctcatcatgctgcttttattctatataaactggtggatgatgagataaatgggcttacttccatgagaagactgatgatgatattcccatgccagcctatttcaggttcctcgcgctgctcgcattcaagatattttctgctgagcaggtagatgttgctattctcgaggttggcctaggagggaagttcgatgcaactaatgtggttgttagttctcgtgaatgtcctgttgtctcgaaatacaaagcttctgttcgcacctaatcgcctaaaatggaaatgtttgactcattgtttaattcggggggaagctgaaggtggtctgatccgttctaggaagagaaaggctgaccaagtcatcatctccagggacgatgttagcgaaagtcaatttaatcaggtgttgatcattgggttgcaacaaatcatcggtggagactgagtcaccgcggccagaaaaccacggtctcaatttgaggagtttttccatctatgtttgttagaaggcataatgcctatttatctcttgtattcgaacatttggcaattaagaaatagaagattacttccccaatatcccttattcctaatctcacctttcacggcttgtggtgaacaatcacttgctattaccgactgacatgtccactcctcatatgtgcgatattggggttgatatatatgttgttcgtttccatgtaattattgtatactaacatttatcgaataatttttacaccgtcgcaacgcacgggcacacacctagtagtagttgatgatgcctttgcaggtttgca

SEQ ID NO: 3954 - DNA, 2386 bp, Zea Mays
cgtggttctgccatcctccccctcgcgcatccaggaatcatcgcgtcgtgctcaagccaccccgccgtcatcgcctcacgcaccttccttcggcaaccttctataggcgcaatcacaggaatccccgcggcctcgccccagatccctaaaccccgcctcgtctctcatggaaagtgcgtcctctgcgctcggctctctccgcgtctgcgacagcccgctatccatggaacgtgggtcctctgccctggatcgtcacgtcggccctcgattcgcgtccgcgacagcctaatcccgcacgtggattgggtacccctctgccccgaatcgtcgctcccgcccggcatcagcgtccgcgtccgcgttgtggtgtccgcagtctccatggaaggcgatcccgcgtgtggattagcattagcagatgaagaggcggaatgttcttcttgggatagcgacgatgagtaccagaaattcatccaaaatatgaaccctccaagggtcaccatcgacaacacctcatgtccaagtgctatagttattcattttttgtttgaacatcaccaacaagtatggcatactgttggaggtagtgcaggtcctcactaacctcaagctcatagtcacgaaggcatacatatcctcagacggaggatggttcatggatggtaggagagccattggtttctttccttttcgtcaaaatggaaagtgtccaccgacgaaggagaagccaaagcacaggagcatggtgctatgttcatggagaccagtgcaaaagctgggttcaacgtcaagcccctattccgcaagatcgctggatcccttctaggactagacgcactttcgtcaggaaagcaggaagacatggtcgacataaacctcagacctgccagcggttcgtcggcttcaggtgcagccgcgcagctggagcagaaatcaggcggttgctcctgttgagacttcgacagttttgtgttcagagaagctacaacagtactgcaacatcgagttaagtactttcagagagattgtgacgaagagtgttttcgcccaaacgtccagtagtgatatactgacatccatagcgagaagccaatttctgtgtacagatttgtttagcaagttatcatatgctaggatataactgtttgatacacaagggacaaaatctgtggagcatcgacattcaatttcacagcaggaacttctccattccattccaatccaacatcgacaggcattccatttcacacagctaatcggtggagggaaaaatattcatcaggaaaccagctaatcgtggaaggaaaaaatattcatcaaagtggatgtcactggatgttttagtggatgtcaactttgtcatctactcgtgtttgataccaggatgcagtgcaaccatttccacatatgtattggctagcattgaactgaggctttgtacagtagtaataagaaatgagaaatgtcgaattcttttagggccctgatttggcatcaattgaaaagacattgactgtatctatctacagggttccacatgcacattcagcgagtcaatcctgggatcgtgtggcttccatactgggctgttcacctcaccacatttgatggatgttagagagcgatttcagctagatggagaaaattttgaagtactcctggtggtgctagaacaagttgaagcctatttcaggttcctcgcgctgctcgcattcaagatattttctgctgagcaggtagatgttgctattctcgaggttggcctaggagggaagttcgatgcaactaatgtggttgttagttctcgtgaatgtcctgttgtctcgaaatacaaagcttctgttcgcacctaatcgcctaaaatggaaatgtttgactcattgtttaattcggggggaagctgaaggtggtctgatccgttctaggaagagaaaggctgaccaagtcatcatctccagggacgatgttagcgaaagtcaatttaatcaggtgttgatcattgggttgcaacaaatcatcggtggagactgagtcaccgcggccagaaaaccacggtctcaatttgaggagtttttccatctatgtttgttagaaggcataatgcctatttatctcttgtattcgaacatttggcaattaagaaatagaagattacttccccaatatcccttattcctaatctcacctttcacggcttgtggtgaacaatcacttgctattaccgactgacatgtccactcctcatatgtgcgatattggggttgatatatatgttgttcgtttccatgtaattattgtatactaacatttatcgaataatttttacaccgtcgcaacgcacgggcacacacctagtagtagttgatgatgcctttgcaggtttgca

SEQ ID NO: 3955 - DNA, 2856 bp, Zea Mays
gccatgtgtctttggttccaaccgatgttgaatctgatgtttcgattggtgaaattcagttgcttgatttcgggagcccaatttacctgctttctccagtagccgcaagcctgcaaccacccattagcagatgaagaggcggaatgttcttcttgggatagcgacgatgagtaccagaaattcatccaaaatatgaaccctccaagggtcaccatcgacaacacctcatgtccaagtgctatagttattcatgtcctcactaacctcaagctcatagtcacgaaggcatacatatcctcagacggaggatggttcatggatgtgtccaccgacgaaggagaagccaaagcacaggagcatggtgctatgttcatggagaccagtgcaaaagctgggttcaacgtcaagcccctattccgcaagatcgctggatcccttctaggactagacgcactttcgtcaggaaagcaggaagacatggtcgacataaacctcagacctgccagcggttcgtcggcttcaggtgcagccgcgcagctggagcagaaatcaggcggttgctcctgttgagacttcgacagttttgtgttcagagaagctacaacagtactgcaacatcgagttaagtactttcagagagattgtgacgaagagtgttttcgcccaaacgtccagtagtgatatactgacatccatagcgagaagccaatttctgtgtacagatttgtttagcaagttatcatatgctaggatataactgtttgatacacaagggacaaaatctgtggaggtaagggcatctcacattttttttgatgaaacattagcaggagctctgccatatcatataagaagagcaagctagagtgtcacagtctttattacatgaatgatcaaatacttagagtccatagggaaaaagtgaaaactgttgactatatggctaagagacaatcatgatccatgaaaaattctaatggactcatatacacagagggggctagcgtgcttgagagaataatattagccgccaccgcatctctctatagaggtgtacgtgctcaagtcgccaccgttgtttctgtcgtggacatggaaattatatggcggattgctggacatgtagtattggcttatctggtggacgatagactgcctagaccacatgaattaccaaatacttttgagtctttgacatgcaaaaaagggtgaaaactccattagaaaactttagaagctgaaacaaatattcccttcagtattgagttatattagggtatttcatatccccttcaatattcagttttattagagtacttcattctaataaatcacatccaatttcattctgccaatcatattttctttttatgcaattttattctattgatcctattttctttgttttgtttttggcaatgaggtgtttcagcatcgacattcaatttcacagcaggaacttctccattccattccaatccaacatcgacaggcattccatttcacacagctaatcggtggagggaaaaatattcatcaggaaaccagctaatcgtggaaggaaaaaatattcatcaaagtggatgtcactggatgttttagtggatgtcaactttgtcatctactcgtgtttgataccaggatgcagtgcaaccatttccacatatgtattggctagcattgaactgaggctttgtacagtagtaataagaaatgagaaatgtcgaattcttttagggccctgatttggcatcaattgaaaagacattgactgtatctatctacagggttccacatgcacattcagcgagtcaatcctgggatcgtgtggcttccatactgggctgttcacctcaccacatttgatggatgttagagagcgatttcagctagatgggtgctatgaaatttatgatcgcactgacctagctcctcctttctgagggcatcggggttaatatttctgaagagaaaattttgaagtactcctggtggtgctagaacaagttgaagcctatttcaggttcctcgcgctgctcgcattcaagatattttctgctgagcaggtagatgttgctattctcgaggttggcctaggagggaagttcgatgcaactaatgtggttaaagcacctgtagtttgtggcatatcttcccttggatatgatcatatggaaattcttggtgaccaaatcctgttcttggtgataaacttggtgtcgataaacgggttaattctgttggcaaaattaggatgacacaggttgttagttctcgtgaatgtcctgttgtctcgaaatacaaagcttctgttcgcacctaatcgcctaaaatggaaatgtttgactcattgtttaattcggggggaagctgaaggtggtctgatccgttctaggaagagaaaggctgaccaagtcatcatctccagggacgatgttagcgaaagtcaatttaatcaggtgttgatcattgggttgcaacaaatcatcggtggagactgagtcaccgcggccagaaaaccacggtctcaatttgaggagtttttccatctatgtttgttagaaggcataatgcctatttatctcttgtattcgaacatttggcaattaagaaatagaagattacttccccaatatcccttattcctaatctcacctttcacggcttgtggtgaacaatcacttgctattaccgactgacatgtccactcctcatatgtgcgatattggggttgatatatatgttgttcgtttccatgtaattattgtatactaacatttatcgaataatttttacaccgtcgcaacgcacgggcacacacctagtagtagttgatgatgcctttgcaggtttgca

SEQ ID NO: 3956 - DNA, 2943 bp, Zea Mays
ctcgcgcatccaggaatcatcgcgtcgtgctcaagccaccccgccgtcatcgcctcacgcaccttccttcggcaaccttctataggcgcaatcacaggaatccccgcggcctcgccccagatccctaaaccccgcctcgtctctcatggaaagtgcgtcctctgcgctcggctctctccgcgtctgcgacagcccgctatccatggaacgtgggtcctctgccctggatcgtcacgtcggccctcgattcgcgtccgcgacagcctaatcccgcacgtggattgggtacccctctgccccgaatcgtcgctcccgcccggcatcagcgtccgcgtccgcgttgtggtgtccgcagtctccatggaaggcgatcccgcgtgtggattagcattagcagatgaagaggcggaatgttcttcttgggatagcgacgatgagtaccagaaattcatccaaaatatgaaccctccaagggtcaccatcgacaacacctcatgtccaagtgctatagttattcattatggcatactgttggaggtagtgcaggtcctcactaacctcaagctcatagtcacgaaggcatacatatcctcagacggaggatggttcatggatggaaagtgtccaccgacgaaggagaagccaaagcacaggagcatggtgctatgttcatggagaccagtgcaaaagctgggttcaacgtcaagcccctattccgcaagatcgctggatcccttctaggactagacgcactttcgtcaggaaagcaggaagacatggtcgacataaacctcagacctgccagcggttcgtcggcttcaggtgcagccgcgcagctggagcagaaatcaggcggttgctcctgttgagacttcgacagttttgtgttcagagaagctacaacagtactgcaacatcgagttaagtactttcagagagattgtgacgaagagtgttttcgcccaaacgtccagtagtgatatactgacatccatagcgagaagccaatttctgtgtacagatttgtttagcaagttatcatatgctaggatataactgtttgatacacaagggacaaaatctgtggaggtaagggcatctcacattttttttgatgaaacattagcaggagctctgccatatcatataagaagagcaagctagagtgtcacagtctttattacatgaatgatcaaatacttagagtccatagggaaaaagtgaaaactgttgactatatggctaagagacaatcatgatccatgaaaaattctaatggactcatatacacagagggggctagcgtgcttgagagaataatattagccgccaccgcatctctctatagaggtgtacgtgctcaagtcgccaccgttgtttctgtcgtggacatggaaattatatggcggattgctggacatgtagtattggcttatctggtggacgatagactgcctagaccacatgaattaccaaatacttttgagtctttgacatgcaaaaaagggtgaaaactccattagaaaactttagaagctgaaacaaatattcccttcagtattgagttatattagggtatttcatatccccttcaatattcagttttattagagtacttcattctaataaatcacatccaatttcattctgccaatcatattttctttttatgcaattttattctattgatcctattttctttgttttgtttttggcaatgaggtgtttcagcatcgacattcaatttcacagcaggaacttctccattccattccaatccaacatcgacaggcattccatttcacacagctaatcggtggagggaaaaatattcatcaggaaaccagctaatcgtggaaggaaaaaatattcatcaaagtggatgtcactggatgttttagtggatgtcaactttgtcatctactcgtgtttgataccaggatgcagtgcaaccatttccacatatgtattggctagcattgaactgaggctttgtacagtagtaataagaaatgagaaatgtcgaattcttttagggccctgatttggcatcaattgaaaagacattgactgtatctatctacagggttccacatgcacattcagcgagtcaatcctgggatcgtgtggcttccatactgggctgttcacctcaccacatttgatggatgttagagagcgatttcagctagatggagaaaattttgaagtactcctggtggtgctagaacaagttgaagcctatttcaggttcctcgcgctgctcgcattcaagatattttctgctgagcaggtagatgttgctattctcgaggttggcctaggagggaagttcgatgcaactaatgtggttgttagttctcgtgaatgtcctgttgtctcgaaatacaaagcttctgttcgcacctaatcgcctaaaatggaaatgtttgactcattgtttaattcggggggaagctgaaggtggtctgatccgttctaggaagagaaaggctgaccaagtcatcatctccagggacgatgttagcgaaagtcaatttaatcaggtgttgatcattgggttgcaacaaatcatcggtggagactgagtcaccgcggccagaaaaccacggtctcaatttgaggagtttttccatctatgtttgttagaaggcataatgcctatttatctcttgtattcgaacatttggcaattaagaaatagaagattacttccccaatatcccttattcctaatctcacctttcacggcttgtggtgaacaatcacttgctattaccgactgacatgtccactcctcatatgtgcgatattggggttgatatatatgttgttcgtttccatgtaattattgtatactaacatttatcgaataatttttacaccgtcgcaacgcacgggcacacacctagtagtagttgatgatgcctttgcaggtttgca

SEQ ID NO: 3957 - DNA, 3717 bp, Zea Mays
cgcgcatccaggaatcatcgcgtcgtgctcaagccaccccgccgtcatcgcctcacgcaccttccttcggcaaccttctataggcgcaatcacaggaatccccgcggcctcgccccagatccctaaaccccgcctcgtctctcatggaaagtgcgtcctctgcgctcggctctctccgcgtctgcgacagcccgctatccatggaacgtgggtcctctgccctggatcgtcacgtcggccctcgattcgcgtccgcgacagcctaatcccgcacgtggattgggtacccctctgccccgaatcgtcgctcccgcccggcatcagcgtccgcgtccgcgttgtggtgtccgcagtctccatggaaggcgatcccgcgtgtggattagcattagcagatgaagaggcggaatgttcttcttgggatagcgacgatgagtaccagaaattcatccaaaatatgaaccctccaagggtcaccatcgacaacacctcatgtccaagtgctatagttattcatgtcctcactaacctcaagctcatagtcacgaaggcatacatatcctcagacggaggatggttcatggatggaaagtgtccaccgacgaaggagaagccaaagcacaggagcatggtgctatgttcatggagaccagtgcaaaagctgggttcaacgtcaagcccctattccgcaagatcgctggatcccttctaggactagacgcactttcgtcaggaaagcaggaagacatggtcgacataaacctcagacctgccagcggttcgtcggcttcaggtgcagccgcgcagctggagcagaaatcaggcggttgctcctgttgagacttcgacagttttgtgttcagagaagctacaacagtactgcaacatcgagttaagtactttcagagagattgtgacgaagagtgttttcgcccaaacgtccagtagtgatatactgacatccatagcgagaagccaatttctgtgtacagatttgtttagcaagttatcatatgctaggatataactgtttgatacacaagggacaaaatctgtggaggtaagggcatctcacattttttttgatgaaacattagcaggagctctgccatatcatataagaagagcaagctagagtgtcacagtctttattacatgaatgatcaaatacttagagtccatagggaaaaagtgaaaactgttgactatatggctaagagacaatcatgatccatgaaaaattctaatggactcatatacacagagggggctagcgtgcttgagagaataatattagccgccaccgcatctctctatagaggtgtacgtgctcaagtcgccaccgttgtttctgtcgtggacatggaaattatatggcggattgctggacatgtagtattggcttatctggtggacgatagactgcctagaccacatgaattaccaaatacttttgagtctttgacatgcaaaaaagggtgaaaactccattagaaaactttagaagctgaaacaaatattcccttcagtattgagttatattagggtatttcatatccccttcaatattcagttttattagagtacttcattctaataaatcacatccaatttcattctgccaatcatattttctttttatgcaattttattctattgatcctattttctttgttttgtttttggcaatgaggtgtttcagcatcgacattcaatttcacagcaggaacttctccattccattccaatccaacatcgacaggcattccatttcacacagctaatcggtggagggaaaaatattcatcaggaaaccagctaatcgtggaaggaaaaaatattcatcaaagtggatgtcactggatgttttagtggatgtcaactttgtcatctactcgtgtttgataccaggatgcagtgcaaccatttccacatatgtattggctagcattgaactgaggctttgtacagtagtaataagaaatgagaaatgtcgaattcttttagggccctgatttggcatcaattgaaaagacattgactgtatctatctacagggttccacatgcacattcagcgagtcaatcctgggatcgtgtggcttccatactgggctgttcacctcaccacatttgatggatgttagagagcgatttcagctagatgggtgctatgaaatttatgatcgcactgacctagctcctcctttctgagggcatcggggttaatatttctgaagagaaaattttgaagtactcctggtggtgctagaacaagttgaagcctatttcaggttcctcgcgctgctcgcattcaagatattttctgctgagcaggtagatgttgctattctcgaggttggcctaggagggaagttcgatgcaactaatgtggttaaagcacctgtagtttgtggcatatcttcccttggatatgatcatatggaaattcttggtgaccaaatcctgttcttggtgataaacttggtgtcgataaacgggttaattctgttggcaaaattaggatgacacaggtgacatgaaaatgccaagtcggtgcatcgatactaattgcgacttaggtctgtttggacctctggtaaaccacgtagtaggtttggagacctggaactacaaatcaatagtattgggacttaggtgacaccctgaacaagtttaggaacaactggtgcatgttactcttttatatttattttaaattcatatagctggaaaacctactatcaaaccttgactaagttacatagttgcctgaaagcaaaatttcactttattatctttaaatcatttgatgcttatcactttggcgtgatttcaataactaggaaggcatgcacattttcaacctttaaaagccagaatacacacgtctacttgctggaaaatttttatgctttctaccaatcttacaacgacaatttgaaagttgatatttgtgatacttatttggtccaggaactagattttttgtacattctttcggatctggattgaacaacgctctctttgtatatgaacaatgctctgtaaatatacgtttgataattttatatgatatttaataaatagtagctactgtgactgtttcattttgtttttcttaggttgttagttctcgtgaatgtcctgttgtctcgaaatacaaagcttctgttcgcacctaatcgcctaaaatggaaatgtttgactcattgtttaattcggggggaagctgaaggtggtctgatccgttctaggaagagaaaggctgaccaagtcatcatctccagggacgatgttagcgaaagtcaatttaatcaggtgttgatcattgggttgcaacaaatcatcggtggagactgagtcaccgcggccagaaaaccacggtctcaatttgaggagtttttccatctatgtttgttagaaggcataatgcctatttatctcttgtattcgaacatttggcaattaagaaatagaagattacttccccaatatcccttattcctaatctcacctttcacggcttgtggtgaacaatcacttgctattaccgactgacatgtccactcctcatatgtgcgatattggggttgatatatatgttgttcgtttccatgtaattattgtatactaacatttatcgaataatttttacaccgtcgcaacgcacgggcacacacctagtagtagttgatgatgcctttgcaggtttgca

SEQ ID NO: 3958 - DNA, 2292 bp, Zea Mays
ggcgcggggcagctccgcaggccgcagctgagggggaggggatccgcgacgtggacatgctgctcgggcctcggtggtcactcgaactggatcgctgtgtccacctctgatctcttcatcctcgggtcgggactcctctgtctccttgccctgtccccaaacaacctctgaataaagggaggcggacagaggcaggcaggaaggcactcacttctccaggagcccggagtcggcagcaagagagaatggccgccgacgccgccgccgccgccacccttcgtactgctctctcccaaggtctggtgctgtggcatgtttagtgcaatcttcattgcttgctgtcttgctgcatttaacacagcacgagcttcagagaatagtccaagcctatctgtgttgccaagagatctcatccaaggtttacggcaatgaaccatttctaaagcacaaagacgtgatgtctttatcaattcatcaggagagcaaatggcgtcaacaggaggtcaccgacgagcggttcgtcgacatacccgaggaggtcatcgacgtgtacaagctctggcgcccgacgcccctgatcagggccaggaggctggagaagctgctcggcacgccggcgaagatctactacaagtacgaggggaccagcccggcggggtcgcacaagcccaacaccgccgtgccgcaggcgtggtacaacgccgcggcgggggtgaagaacgtggtcaccgagaccggcgccggccagtggggcagcgcgctgtccttcgccagcagcctcttcggcctcaactgcgaggtatggcaggtgcgcgcgtcgttcgaccagaagccgtaccggaggctgatgatggagacgtggggcgccaaggtgcacccgtcgccgtcgacggcgacggaggccggcaagaggatccttgaggcggacccgtccagcccgggcagcctcgggattgccatctccgaggcggtggaggtggcggccaccagcgccgacaccaagtactgcctgggcagcgtgctcaaccacgtcctgctccaccagaccgtcatcggggaggagtgcctggagcagctggcggcgctcggcgagacgcccgacgtcgtcatcggctgcaccggcggcgggtccaacttcggcgggctcgcgttcccgttcttgcgcgagaagctgcgcggcaagatgagccccgcgttcagggccgtggagcccgccgcgtgccccacgctcaccaagggcgtctacgcgtacgacttcggcgacacggccgggctcacgccgctgatgaagatgcacaccctcggccacggcttcgtccccgacccgatccatgcaggtgggcttcggtaccatggaatggcacctctgatctcgcacgtgtacgagctgggcttcatggatgccgttgctatacagcagactgaatgcttccaagctgccttgcaattcgccaggacggagggcatcatcccggcgccggagccgacgcacgcaatcgccgcggcgatcagggaggcgctggagtgcaagcggaccggggaggagaaggtcatcctgatggccatgtgcgggcacggacatttcgacctcgccgcgtacgagaagtacctgaggggagacatggtcgatctctcgcacccggcggacaagctggaggcctccctcgctgccgtgcccaaagtctgacggcgttggagccaacagcacatgcgactggaatgggacgaataatccattgatatcggcttcttgaatcttgtggtcatccatcgcccatcggcagtgggatacttgtgttccttatgaaatgaatgaataaaatttcaataaaagcattaattttatcatattcatggatatgtttgaatgtttgatcgttcttttttagggcattagtatttggtacagcatacactttcaagtttgaactctaaactccacttaaaaagaaacctggtagcatctcatacctaatataccaagatttacttccaaatagcacacttttaaccgctttatttgtttgaaaatacttgacgatacaacaacaacaacaacaacaacaacaacaaagcctttttgtcccaagcacgttggggtaggctagagatgaaaccccatatgaaaacctcagagctcaacccccaaagaacagaaaagggaaacaaaggcaaaggagaaccgaaaacaacgaaacagggaaacacataaaagagataaaacccacaatgaccagcaagatctaaaatggacacaagaaaaggtcaaacgattaaggaggaaaagcgaaa

SEQ ID NO: 3959 - DNA, 1578 bp, Zea Mays
aacttctggatccacaaatttgtccacggtagtgttcggattagggaatgcgtagatgcactgttgatgaagtgcgaactgagggttttgttcctaactttttagcttcaatttttgtcttgaatggcaacacctctggatgttccactggatgatttgattaagagcagaggtgatggccaaaggttggctcgtggttcgtggcgtgggcgtggtactggcaacttccgtgaaaggggacttggggtgtcttcgcggaggccacttggtgttaatacttggtcctcatcatttgctattgccaagtcattcaataaagcaaaggattttgtgtggagacatgatctctttgaggatagcatggtagcagctgggctttctgggatagaatctggaacaaagctttacatttcaaatttgcactatggagtgacaagtgaagatctacaggagcttttttcagaaatgggtcatttgaagcactgtgctgttcattatgacagttatagacacccaactggttcggctgaggtgatattcaccaggagaagtgaagctctcgcagcactgaagcgatataataatatgcgccttgatgggaaggccatgaagattgaagtaataggagcagaattgggtctatcagctgctgccgtaccccagattagtgttgttcctggtgcaagcagaagagggcagagagaagttgttatgatgcctggtggaagtgggtttggacaaggtgcatctggcccatctagttcgcttcctgggtggaagcgtggaggctttgttcgaagaggacaagggcgtgttagttttcctcaaagagggcgagggcaagtgcgcagccgtggccgtggccgtggccgcagtagctttgttcagagccgtggacgtggctatgtgcgcaggggtaatgcagagaaatcagccaaacaattggacaatgaacttgacaactacaactctggtgcgatgaatgtcgactaagttaatccatcgtgacatcattcaatccaacctggaagttggaactatgttgaagctaagcttgttttctgtcggtattctgtcaaatgtgcacacttctgtcatgctctagtggcatcagttgaagattagatattccattattcctactgcaatagtcttgtgatatcagaatttgctgtaattgaatgatgaattatgttttcaaccgttgaaaggtttgctgtcaaaatttcaatattatcctagttattgtcagaattttcagtaggcattagccaaaaagattggtgctgactactggtatatcagaatttgctgtaattgaatgatgaattatgttttcaaccgttgaaaggtttggtgtcacaatttccatattatcctagttattgtcagaattttcagtaggcattagccaaaaagtttggtgctgactacaggttgaggtgctcttcaaaaaaatcctaatgtacctagaggtgacaatgagctttaaattttgggaacatattcggtgcacccaagccttggtgcgtatatgatacacatgaattaataaagttcataaaaaatctaaaaaaa

SEQ ID NO: 3960 - DNA, 3394 bp, Zea Mays
ggtcccggactcccggttccggcctagaggatctcgttcccggccgtctgccgctcggtcctcacccgtcgccgtcgcccccctcccggtcccggcctcccggccttccaaatcgtcagcgcagggcgcacacgcttgcccgcgccgcccagccagcggcacacgcctgcccgcgccgcccagccgctctcccatagccgtcgcgccgtcccggccctccaagattcagattggtgttttgctggcaccatgtccagtccgtggagccctatgagtttggaggaagaggaagagatccaagagctcgatgccgaggagcagcaggacggtgagcagccgcagcagggtgatgggctgcagcaggggtccacagctgaagcaagggcacaacaaaccggaaagaaacgcgcaagatcagtggccaactcgtctactaagtctgaggcaaagataaaggtcgaggaaagtgcaccaggagctgcgacaggagtgattctgtctcttcgtgaaagtttacaggactgtaaacaaagccttgcatcctgccaggtggaacttgaagctgcaaaatcagaaattgagaagtggcattcagcatttcagagcattccagctgtaccttctggtaccagtccagatcctgtttcagtggtatcttacctcagtaacctgaagtcatcagaggaatcattgaaggagcagctggagaaagcaaagaaaagggaggcagcttttatagtaacatttgcaaaacgagagcaggagattgcagaactgaagattgtttgtatcttgtgcaaaatttgatggccctattcgtggatgaagaatctgttacagacgaaccatctgatcaaagtcagacaactgatgataattcagaaaatggcccaactgaagagcaggacctttttagccaagggaatgctgatcttctgaagagctgggtggtgaatacaatttcttgtgttctaaaaaatttaaagcttacttctaaagggaattcagattctgaaatggctaggtgcattgaagaaaagtttcaagtgcaaacggaaatattaaaattccttgctgtccaaggtctgttctcagcatctttaggaactgaggttacatcatttgagttgcaagagaagttcaaatggccaaagaatcccatatccacatcgctacgtaaagaatgcatagaacgacttcaattcttgctggaagatgcacaaaaggatgcatctttacatgttcctaatgaggtcaaatccaatgacttaggctactaccttatgtgtttcattaacaccgtatgcaacatcccctcagtctccctcttcaggatcttgagtggccacgatgataacgcattcaagaaattgatggcagtagaatcaatgcttttccacgaggagagaaaaactggtcctggattggagtctactaagatgcatgcaatgcgttatctccttatacagttactgctacaagttcttctccatccggatgagtattgggaggctgcagttgatgtgactatatgttgcaagaaatcctttcctgtcattgctcaaggtgataactcgagtgcacaagaatccgctgaacacggttcacaggagtctgatgaggatggttttgaggaatctgacgaggatggttcagaggatcccaatgaggaagtttccctagagtttatggatgttcttgtccagactttcctctctattttgcctcatgcatctggacctgtgtgtttcacagttgaacaggtttttcgtgtgttctgtgatgatattacagaaactggtctccttgatatgttgagggtcgtgaagatagatttgaaagaccgtcatcaaacagatagtgatgatgaagatgatggtcgtgttgatattgaagacgatgatgaaactgtaatggaagatgaagaggttggggaaattgataatgttacagatggtttggatgagaatacagatgatgattctactgatgaagatgatttggatcaagatgatttcaacaaaacagtcccgaatgagacaaaaggtggaggcaaaacagaaactactaaagatggggatgattcagatgattcagatggcatggatgatgatgctatgttccgtattgatccttacattgcaaggatattcaaggagcgcaatcttcctggtagtgatactaagcaatcccaacttatgcgattcaagcttcgtgtgctgacgttacttgatatatatcttcagaggaatccagggaaagttctggtgctggaggtgtattctttcttaatgcaagcttttgtaaaatcacatggtgctgatggtactgaacagttcaggcaacgtatttccggcatactgcagaggagggtattcaaagggaacgagtatccaaaaggcgatgccgtcgaatttggtaaactcgagagcttgttggagaaagctctgaggttgacatcgcgctcaagatacaacacggttgcttccgtagcacagaacgccacattttggatcctgaagatcatcaactcgaagcactgttctgagcaggagctcgcacgcgtggttgatctgttccgttcaatcttgagcgattacgacaggaagaaatcgcggctgaagcttggctttgtgaagcaggttgctaagaggaacccttggatagggcagaagctcttcggttttgtcctgcagagggccgaaaacacgaaggcgcagtatcggagaaaccagctgctggagttggcagagttcatactgaaatcatgggccgatggcacgtcagagatgttcttgaaccatctgtctcagctgtgcgggttgatacaagcagccctttcagccgttgccgaaaacaagtcgcgccgcaaggaagtgcgcaacttctgcactgggatcctgcagacggtgctgaagcttggtctcaaagaccagttccagaaagcgttgagtcctgaaacttattccctctgcgaggccaagctaggggctgcgtttaccgccttcaaaaagtgatcatgtgggacaccgattaaattcatttcacacagaccgtggatccttggaagttttataagaagaattagtgtatcttctagtttttgagctcggtgagagtaggatcaatcaaattaatgggtgcttgtgctagacttttagccgcagggagggatgcatgtacaagttgcttgggcccttattggatacaaaatgtttttatgttgttgcgtacgtaaatttgagcaaatattttttttattgaaagagcgtatttggatagggcgcctgaagtttgtgaattgcatccctttatatcatctttgggagaaaggtaacgagggggctaaaatctcctagctattcgttcaaaatattagtaatttcttaatctt

SEQ ID NO: 3961 - DNA, 7052 bp, Zea Mays
attgagacacagacagagcagctgagcaccgcacacacggacgccataccctagattggagcgcaccacgggcgccggcggccggcggcccgccaccggtgattgacgccccctcctcggtccccagcgcggcgagcaggctatttgaggagatgccgtcattgtcatccttactctctggctccaatactgcgagtgctgagcttcctctaatcccttgcaagctctgcaatggggtggtgattgagcgggtctccaaacaaccagaaaccacgtcgaggaagttctaccggtgcagagccaagaaaacggatgggtcttaatgtgattttttccactggcaagcgagctatgttgttttgttaatcgaggatgggtttgtcagtggtgatcgacgccttgagttgttaatgatcgcacttaatgatcatggcaaagccgttgaatctctaaccaattccatcagagagatgaagaaaaagctgtccaacctggagttagtgatggaagagctggataacgtgaaaaatttgatgaaggcagccatggttgaaattgaggaaaacaagaaatcgacagctgctgcattgaaactgatggagaatgagctgcaaaagctgaaagggtcaactaaagtgaaacctaggaatatggcacagtgttttctgcttttggcattgattgggtgtgttatgttccatgtcccgtgtcactttctggagtctaccgtggtgctcctgctaagtgttgagtcggatgttgattttgggaggacccacgggcgaagggcgtgtcactttcatgaggacccacgggccgaaccccgtgtcactttcatgaggtatagtgttgggttccttatcagagttgcgttcggatatatagagttgtgttcctccaatctgtgctgggtttcagggttccatgttgatttttgggaggacccgcggtcggaagcccgtgtcactttccggagtctacagcgttgcgttctgaatgctagtgttatgttccatgtcccgtgtcactttctggagtctaccgtggcgctcctgctaagtgttgagtcggatgggcggatgttgattttgggaggacccacgggtgaagggtgtgtccctttcatgcggtatagtgttgggttccttatcagtgttgcgttccttcaaggcgttgagtttcagggtcccatgttgatttttgggaggacccacgtgttggagtctaccatggggctcctgctaagtgttgagtcagatgggcagatgttggttttgggaggacccacgggcgaagggcgtgtcactttcatgcggtatagtgttgcgttcctccaatctgttgggtttcagggtcccatgttgatttttgggaggacccgcgggttccatgttgattttttggaggacccgtggtccgtagtccgtgtcactttccggagtctacagtgttgcgttctgaatgctagtgttatgttccataacccgtgtcactttctggagtctaccgtggggctccttctaagtgttgagtcggatgggcggatgttggttttgggaggacccacgggcgaacgacggtcccatgttgatttttggcaggacccgcagtctgaagcccgtgtcactttccggagtctacagtgttgcgttctgaatactagtgttatgttccatgtcccgtgtcactttctggagtctaccgtggcgctcctgctaagtgttgagtcagatttgcggatgttgattttgggaggacccacggcaaacgcaggcttcccaaagcggcatggtcagttcgagctcgccctggggatgccgccgctctgcccatcgcagacgccgtggagcatcgacggcgacgtcgcaggacatgaggtcgcctaccagctggtgacccgaaacacccaggcggcccgccgccacgtcgagataacggccctgacggtgccgacattttggggcagcgggcattgcccggagccgctcgtcatcctaagaaagggcagcacggtggcctgctagtacgtgacgggatctggcagcgcagggaacggagggacagacggcaagagcatgcaccacatcgacgtgaacatggagtgagcgagccaacggagaaatggcgatgggaatggaggtgcagctggtgggagcagttggcacgccgatgaccggacgaagcaagtgaggcaagggatggacgtcgcacttcaatacgtgcctggcggcaccgacattccgatgcagcggctacccccggagccactcgtcgtccatgaaaagggcgacgaactggcctggcaagatctggcggcgcggggatcgaatggacggacgacaagagcgagcgaagaagtcctggcggcttggtgagaaaatggtggcgctgggggcgatgggaacggaggtgcggatggtggcagcagtggagtgagcgagcgtggcctggtttcttcttgaggaaatggcattgcagaggcgatgggaatggagatgcgaatggggggaggagttgccgtgccgacggccgaccgcgatttttttgggaagaatcgtgagaagggataacacacagagagaaaaatgagtgttaccttcgcgttacaggaatgaagcgacggcgacgtcgagactgattgtcgtcgtccgcggccatggggcggagcaccttccggagaagtcgagacttatacgattaaaaaaggtaggcgaagagtcggcgcagcatttcacacgcagtagtgactgacacctggatggttggattagtggcacggacaaacgatcttacggctacggaaatttggacgatgtgtccaccttcgtttgcgagcagcggaccctggtttgatatattaaaaaaaggcagccgaagagtcggcgcagcatttcacacgcagtagtgagtgacacctggatggttggattagtggcacggacaaacgatcttacggctacggaaatttggacgacgtgtccaccctcgtttgcgagtagcggaccctggtttaatatatagaaatagtgttgagttctcaacactgtatactcctgaaagtgacacgggcccatggaatgtgacactatcgttcagaactcatgaaagtgacacgttgttcggtgtgaaagtgttgatttagggtttagtgtaaccgcccgttcggtgtggaagtgttcaaatttctctacgcgcgttcggtagcctcaccgacggcgacggcgacctcacctcaccgacggcgacggcctcggcgacggcgacaacgatccccaattctcttcgcgacctgaccgtctccacttcggtaaacccaccttcccttctctcctcgttccttgtcagggaaccgcctcaccgattctgatgtcgaaggtaacctggtgccgatccgcaggggtgaagaagaaagccaacatgccacaggggaagagtaagaagaacgtggtgaaggagaaagccaaaaagattaagaagaacgcggaatcgagagccaaagttcatgaaaatacagatcaaattgagatcaacattagagaaggtgtttcaatttggataacaaaggctgcagtgcaaaaatgttttgagtttccccctggtacagataagaagctgccaatagatccaactacaaaaacatttgattcactctacagagtattgagtgtttcagaaaaaaaaatcaatgtaaagaagaagaagatgaaggagaatatgaaggagaagcaggttgaggaggagaagattgagatgaacatggaggagaagaagcagaatctggttgaggatgaaggtagtcaacaggaggaaagtgaagaggaggacggtgaagatggggaaattggagaggaggaaggtgaagatggggcaattggagatgctaaagtggggggagatggagacaaggaaagtgctaaaaggggggggataaaggttgctgtcagaagaaatgttttgactcctttgaacatcaatttgatgttacagaacatcaacaacgatgagattctcaaacttcttgttaaaagaaatgaagacactgatggtacagaaccgaatcttgacattgacctgattgtcagatgtttctttgcggtgagcagtgttgctgagtttggcaaggataagaagaaactgatatcagggtgtacaactgtgctaatggttgttttcttggaccatctcgtggaaaaccctttggatcctttgaccatccctaggatcaacttgtatacttcagattttatcgcagacctgataatggtacccaaggatagccctggccctgaaaaaaagcgtcgtaagtttaagaattcggaggatacatgctatcatgaagattcagaaatggtgccaagtccagggagagcatcgccggttgttgcttctgtacaatctcataagaactttgttgatcatgcagatttagaaattgtgccatctcatgagaactctgttgatctacatagtgtttacatggcacatgtattggaaagaagcagacaaagcatagtagtggacatattggactacaatatacctgaatctacttttgcagattgtttgctacctacaggtcatatgcacacagatgtattttatttacaatgccaactgttgtcaaaggattggaaggataaagtaattcttagctggaaagctactcaagaactgattcatcaagatattggagttaaggagctggacaaggaacttactgcagagatatttattcctatcattcatgccggtcactggtcccttgttattctttccactgccaaacaagagacatatatccttgactcctacccaaggcacagtggggtggccaaggatgttttaactcaactgcagaagtatttggataataaacacaactttgacatgtctaactacactgaccatgtgccacctgttcagcatcaaaaaaacaattacgattgtggctttcatgttttattgtatattgaagaattcatgaaggagaagatgtataaaatcaacaaaaaaatggtgttgaaattcagaaagcagctttgcatgaatctcttgtaccatcctttgaacagaataaatcttgtggaattcagaaagaagctgggtattacattgaaaagaaaacttcctggtatacttgatcttactattgaaggtgagaggagtgaatctgaggctgcagtgataattgaaatagagaacagagatgataagactctagaggatgaacatatttcagttgagaaagagtaaggtaaaaaagaagagcatgtactatcaactgacacaaagaatgacgaagcttcatccccatctgacgaagagcctgagcagagtgagtcatctgagcagactgtgtatgaaagatggatgattccaaaggatcattatcacctgagaaagagcaagctggagaaaaatatcctcaaacgaaaaaagaggttgggcaaagacaacatgtcctctcaggatatgatttctccagtgtttggcaagaggcttgtgcctgcaaacacacattttacctctcttaggaagttgcgaaaacacaagtttacgtctgataagatcaacgatgagatctgcaaacatatcttgaactacaatgaacgggagttgttaagtgtggggcagactaccatgactgggggtcagctggaaaagtacgtaaatgaaggtgacaatggtgataaaatactcagagcattcatcacatgcttcacttgtgatgaaaagttcaatcaagggaacatcacaaccgtcatcccgccacatgaagtatccgaagagggtgaactctccaaagttgatgctgcacaacttgtagaagaaatcaaagctgtactcaaaggcaccaatgttgcacgtgtacgcaaagacaccgaatccaccaaagatcccaaagtgaaagtctttcgaaacatgaggaggacatttatattttttcctttctacaagaatgaagaattgtttgtatttcatgtcgatacgaaaagactacccatcattgatgctctgttttgcaagatgtcatcattgtcgtttgaagatagatcctgactaggaaagtctatcatgggctgtctactcaaagccatgaaggattccggcttcatggtgaaaaaatatggtgattgtaggttcacagttactgtaactgaactcgaattcaaagatagtgcctcagcgctcataagttttattgagaacttcacttctaagttggacgacaatgccaagaaactgaaaaagggtgacaaggactggctggaaccttacaagaagtcgacagtggcataccttgtttgtcacactgaaaataaggtggtgttgcctgacgatattgtgaagtacaagcaaaacaagtgaggtggttgagtcgttaatgggtccagtggctgtgttttaagacttgtatcacactacttgtatggctttattctctgaagctgttccattgttgccgttagtaacaggtgttgcttttgtctctgctcagtgggtgattcatttcatccagagttgctgcaactttaatcagtctatagtgttgggttcctagctcagtgttgagttctaaatgatcgtgttgtgttcctaccaagtgttgagctgcacgacggcgtgcgcagccgcagccgcaccggcgaggagcgtttagaactctgttgatctacatagtgtttacaccggctcaacagagttctcatgttgatttttgaaggacccacgtgttgggttcctgctcagtgttgagttctgaacgatagtgttatgttccatgggcccttgttgatttcgagaggacccacgggccgaacggcgtgtcactttcatgcgtctatagtgttgggttcctgtctagtgttgagttctcaactatggtgttgtgttcctccaagaagttgagtttcaggggcctattatattgtctcagttaatgggtaactcagttaatcctatatattgtgtcagttaatgggaactcagttaatggtatatgttgtctcagttaatgggtaactcagttaatccagcatatcattgatgag

SEQ ID NO: 3962 - DNA, 9613 bp, Zea Mays
atggacacaccgacgcgagttcttccccctgctgggcaaatccgatccataaatgtaactccgggaaggctcaccgatggcttgttacccttaccaatgatgaacatgggcccagatttgagccgggtctggtcatggttcgtggtcccatgcagacttgatgcgtgtaggcacacaacagcaaaacagctatttgaggagatgccgtcattgtcatccttactctctggctccaatactgcgagtgctgagcttcctctaatcccttgcaagctctgcaatggggtggtgattgagcgggtctccaaacaaccagaaaccacgtcgaggaagttctaccggtgcagagccaagaaaacggatgggtttgtcagtggtgatcgacgccttgagttgttaatgatcgcacttaatgatcatggcaaagccgttgaatctctaaccaattccatcagagagatgaagaaaaagctgtccaacctggagttagtgatggaagagctggataacgtgaaaaatttgatgaaggcagccatggttgaaattgaggaaaacaagaaatcgacagctgctgcattgaaactgatggagaatgagctgcaaaagctgaaagggtcaactaaagtgaaacctaggaatatggcacagtgttttctgcttttggcattgattgggtgtgttatgttccatgtcccgtgtcactttctggagtctaccgtggtgctcctgctaagtgttgagtcggatgttgattttgggaggacccacgggcgaagggcgtgtcactttcatgaggacccacgggccgaaccccgtgtcactttcatgaggtatagtgttgggttccttatcagagttgcgttcggatatatagagttgtgttcctccaatctgtgctgggtttcagggttccatgttgatttttgggaggacccgcggtcggaagcccgtgtcactttccggagtctacagcgttgcgttctgaatgctagtgttatgttccatgtcccgtgtcactttctggagtctaccgtggcgctcctgctaagtgttgagtcggatgggcggatgttgattttgggaggacccacgggtgaagggtgtgtccctttcatgcggtatagtgttgggttccttatcagtgttgcgttccttcaaggcgttgagtttcagggtcccatgttgatttttgggaggacccacggtccgaagcccgtgtcactttccggtgtctacagtgttgcgctctgaatgcttgtgttaggttccatgtcccatgtcactttctggagtctaccgtggggctcctgctaagtgttgattcggatgggcggatgttgattttgggataggactgggcgttcgggttacccgattagttcgggtcgggtagttcgggttttgataaattcgggtaatagaaactaatacccgatcacagctttaaaaacccgcgacccgtaatttcgggtacccgtaatttcgggttcgggtttgggtatacccaatttacccgaaatatataaagcacatgcgagggcgcgtttggctggtggcgcggcggcttgacagcgaggctgcgtacgcgtgtggccgcctggccgctaggtagtgcagcggcttgccggcgagggcgctgtccgctgtctgcgcttggtcgcctggccggtggcgcgacggcttgccggtgaggcagcctgttcgctgtacgcctgtccgctgtctgcgcgtggccgcctgtccgcctggccggtggccgcctgtccgctgtacggctgtacgcgcttcggcgcttggctgcctggcgcctggtgtgtggttgctagttaccgttgtgccttgttgtgagttgctgttgccgccatgccttgctgttgccggagaacaaagatctgaagtgctccttgctctggagtactagccttgaagttgcaggtggcgatagccgatggggattgggggacgtcgtagccaacgctggacaaggcagcggctgtggggctagcgttgtgcctggacgatgttggttatttcgggtcgaatgggtacttcgggtaccgcgggttaatacccgattaggcccgaacttagttcgggtatttagtttcgttacccgctagagctgttcgggtaacgggcttcgggctaaacgggtacgggttcgggtatttcgggtatagggcttcgggctcgggttttatgcccagatctattttgggatgacccacgggcgaacccccgtgtcactttcatgagttcacagtgttgagttctgaaggtagtgttacgttccatgtcccgtgtcactttcaggagtctacagcgttgcgttcctgatcagtgttgagctctaaacgatggtgttgcattgctgatcagtattgagttgggcgcatgttgattttgggaggacccacgggcgaacgatgtgtcactttcatgagttagtgtcgggttccaggttgagtttcggggggccatgttgattttttgaaggactcacgggccgaacctcgtgtcactttcattaggtatagtgttgggttccttctcaatgtggcgttcggaactatggtgttgcgttcctccaatctgttgggtttcagggtcccatgttgatttttgggaggacccgcggtccgaagcccgtgtaactttccggagtctacagtgttgcattctgaaaagcagtgttaggttccatgtacagtgttggagtctaccatggggctcctgctaagtgttgagtcagatgggcagatgttggttttgggaggacccacgggcgaagggcgtgtcactttcatgcggtatagtgttgcgttcctccaatctgttgggtttcagggtcccatgttgatttttgggaggacccgcggtccgtagtccgtgtcactttccggagtctacagtgttgcgttctgaatgctagtgttatgttccataacccgtgtcactttctggagtctaccgtggggcccttctaagtgttgagtcggatggggggatgttggttttcggaggacccacgggcgaagggcgtgtcactttcatgcggtatagtgttgtgttccttcatctgttgcgtttcagggttccatgttgattttttggaggacccgtggtccgtagtccgtgtcactttccggagtctacagtgttgcgttctgaatgctagtgttatgttccataacccgtgtcactttctggagtctaccgtggggctccttctaagtgttgagtcggatgggcggatgttggttttgggaggacccacgggcgaacgacgtgtcactttcatgagttcgtagtgttgagttccatatcccgtgtcactttcaggagtatatagtgttgcgttcctgatccatgttgagttctaaacgatggtgtggcgttcctaatcagtattgagttgggcgcatgttgattttgggaggacccacgggcgaacgacgtgtcactttcatgagttatagtgttgatttttgaaggacccacgagccgaaccccgtgtcactttcatgaggtatagtgttgggttcgtgctcagtgtggcgttcgacactatggtgttgcgttcctccaatctgttgggtttcagggtcccatgttgatttttggcaggacccgcagtctgaagcccgtgtcactttccggagtctacagtgttgcgttctgaatactagtgttatgttccatgtcccgtgtcactttctggagtctaccgtggcgctcctgctaagtgttgagtcagatttgcggatgttgattttgggaggacccacgggtgaagggcgtgtcactttcatgaggtatagtgttgggctccttctcagtgttgtgttcggaactatgctgttgcgttccttcaaggtgttgagtttcagggtcccatgttgatttttgggagttatagtgttgagtttcagggtcccttttagactggaaaagtcttctgccataatcgtcagatttacctaaatgatgtaaaaaatggtttggaaaactctaaaacattaaataaagatcacataacattaattaataaaaaatgatataatacacaaacattaagtaagaattatagaaagttgaggcaccagtttgtatgcaggattcttcctcctaagatgtggaaagctaattagttttaaaccataatccacctcaatatatatgaattaaagtgcatagatgtggcaacaacgttgaagataaacatctatttgtacagcaaacgcaggcttcccaaagcggcatggtcagttcgagctcgccctggggatgccgccgctctgcccatcgcagacgccgtggagcatcgacggcgacgtcgcaggacatgaggtcgcctaccagctggtgacccgaaacacccaggcggcccgccgccacgtcgagataacggccctgacggtgccgacattttggggcagcgggcattgcccggagccgctcgtcatcctaagaaagggcagcacggtggcctgctagtacgtgacgggatctggcagcgcagggaacggagggacagacggcaagagcatgcaccacatcgacgtgaacatggagtgagcgagccaacggagaaatggcgatgggaatggaggtgcagctggtgggagcagttggcacgccgatgaccggacgaagcaagtgaggcaagggatggacgtcgcacttcaatacgtgcctggcggcaccgacattccgatgcagcggctacccccggagccactcgtcgtccatgaaaagggcgacgaactggcctggcaagatctggcggcgcggggatcgaatggacggacgacaagagcgagcgaagaagtcctggcggcttggtgagaaaatggtggcgctgggggcgatgggaacggaggtgcggatggtggcagcagtggagtgagcgagcgtggcctggtttcttcttgaggaaatggcattgcagaggcgatgggaatggagatgcgaatggggggaggagttgccgtgccgacggccgaccgcgatttttttgggaagaatcgtgagaagggataacacacagagagaaaaatgagtgttaccttcgcgttacaggaatgaagcgacggcgacgtcgagactgattgtcgtcgtccgcggccatggggcggagcaccttccggagaagtcgagacttatacgattaaaaaaggtaggcgaagagtcggcgcagcatttcacacgcagtagtgactgacacctggatggttggattagtggcacggacaaacgatcttacggctacggaaatttggacgatgtgtccaccttcgtttgcgagcagcggaccctggtttgatatattaaaaaaaggcagccgaagagtcggcgcagcatttcacacgcagtagtgagtgacacctggatggttggattagtggcacggacaaacgatcttacggctacggaaatttggacgacgtgtccaccctcgtttgcgagtagcggaccctggtttaatatatagaaatagtgttgagttctcaacactgtatactcctgaaagtgacacgggcccatggaatgtgacactatcgttcagaactcatgaaagtgacacgttgttcggtgtgaaagtgttgatttagggtttagtgtaaccgcccgttcggtgtggaagtgttcaaatttctctacgcgcgttcggtagcctcaccgacggcgacggcgacctcacctcaccgacggcgacggcctcggcgacggcgacaacgatccccaattctcttcgcgacctgaccgtctccacttcggtaaacccaccttcccttctctcctcgttccttgtcagggaaccgcctcaccgattctgatgtcgaaggtaacctggtgccgatccgcaggggtgaagaagaaagccaacatgccacaggggaagagtaagaagaacgtggtgaaggagaaagccaaaaagattaagaagaacgcggaatcgagagccaaagttcatgaaaatacagatcaaattgagatcaacattagagaaggtgtttcaatttggataacaaaggctgcagtgcaaaaatgttttgagtttccccctggtacagataagaagctgccaatagatccaactacaaaaacatttgattcactctacagagtattgagtgtttcagaaaaaaaaatcaatgtaaagaagaagaagatgaaggagaatatgaaggagaagcaggttgaggaggagaagattgagatgaacatggaggagaagaagcagaatctggttgaggatgaaggtagtcaacaggaggaaagtgaagaggaggacggtgaagatggggaaattggagaggaggaaggtgaagatggggcaattggagatgctaaagtggggggagatggagacaaggaaagtgctaaaaggggggggataaaggttgctgtcagaagaaatgttttgactcctttgaacatcaatttgatgttacagaacatcaacaacgatgagattctcaaacttcttgttaaaagaaatgaagacactgatggtacagaaccgaatcttgacattgacctgattgtcagatgtttctttgcggtggtgttggacagactgttgttgccacaagccaccttttatctgagctcagctacattgaaagcagtgactgatctagacagactgaaaacagttgactggtcaattttattttcgaaaatttgaagagcagtgttgctgagtttggcaaggataagaagaaactgatatcagggtgtacaactgtgctaatggttgttttcttggaccatctcgtggaaaaccctttggatcctttgaccatccctaggatcaacttgtatacttcagattttatcgcagacctgataatggtacccaaggatagccctggccctgaaaaaaagcgtcgtaagactcaagatgaaaaagaagactagtaatgttataaagaatctcgctactctcaattttaagaattcggaggatacatgctatcatgaagattcagaaatggtgccaagtccagggagagcatcgccgattgtttgctacctacaggtcatatgcacacagatgtattttatttacaatgccaactgttgtcaaaggattggaaggataaagtaattcttagctggaaagctactcaagaactgattcatcaagatattggagttaaggagctggacaaggaacttactgcagaggttatgaacaaagtggatctggtttgtgctttgttttatattacagtagagttttttcagattgacagtagagtttgtgctttttttagatatttattcctatcattcatgccggtcactggtcccttgttattctttccactgccaaacaagagacatatatccttgactcctacccaaggcacagtggggtggccaaggatgttttaactcaactgcagaagtatttggataataaacacaactttgacatgtctaactacactgaccatgtgccacctgttcagcatcaaaaaaacaattacgattgtggctttcatgttttattgtatattgaagaattcatgaaggagaagatgtataaaatcaacaaaaaaatggtgttgaaattcagaaagcagctttgcatgaatctcttgtaccatcctttgaacagaataaatcttgtggaattcagaaagaagctgggtattacattgaaaagaaaacttcctggtatacttgatcttactattgaaggtgagaggagtgaatctgaggctgcagtgataattgaaatagagaacagagatgataagactctagaggatgaacatatttcagttgagaaagagtaaggtaaaaaagaagagcatgtactatcaactgacacaaagaatgacgaagcttcatccccatctgacgaagagcctgagcagagtgagtcatctgagcagactgtgtatgaaagatggatgattccaaaggatcattatcacctgagaaagagcaagctggagaaaaatatcctcaaacgaaaaaagaggttgggcaaagacaacatgtcctctcaggatatgatttctccagtgtttggcaagaggcttgtgcctgcaaacacacattttacctctcttaggaagttgcgaaaacacaagtttacgtctgataagatcaacgatgagatctgcaaacatatcttgaactacaatgaacgggagttgttaagtgtggggcagactaccatgactgggggtcagctggaaaagtacgtaaatgaaggtgacaatggtgataaaatactcagagcattcatcacatgcttcacttgtgatgaaaagttcaatcaagggaacatcacaaccgtcatcccgccacatgaagtatccgaagagggtgaactctccaaagttgatgctgcacaacttgtagaagaaatcaaagctgtactcaaaggcaccaatgttgcacgtgtacgcaaagacaccgaatccaccaaagatcccaaagtgaaagtctttcgaaacatgaggaggacatttatattttttcctttctacaagaatgaagaattgtttgtatttcatgtcgatacgaaaagactacccatcattgatgctctgttttgcaagatgtcatcattgtcgtttgaagatagatcctgactaggaaagtctatcatgggctgtctactcaaagccatgaaggattccggcttcatggtgaaaaaatatggtgattgtaggttcacagttactgtaactgaactcgaattcaaagatagtgcctcagcgctcataagttttattgagaacttcacttctaagttggacgacaatgccaagaaactgaaaaagggtgacaaggactggctggaaccttacaagaagtcgacagtggcataccttgtttgtcacactgaaaataaggtggtgttgcctgacgatattgtgaagtacaagcaaaacaagtgaggtggttgagtcgttaatgggtccagtggctgtgttttaagacttgtatcacactacttgtatggctttattctctgaagctgttccattgttgccgttagtaacaggtgttgcttttgtctctgctcagtgggtgattcatttcatccagagttgctgcaactttaatcagtctatagtgttgggttcctagctcagtgttgagttctaaatgatcgtgttgtgttcctaccaagtgttgagctgcacgacggcgtgcgcagccgcagccgcaccggcgaggagcgtttagaactctgttgatctacatagtgtttacaccggctcaacagagttctcatgttgatttttgaaggacccacgtgttgggttcctgctcagtgttgagttctgaacgatagtgttatgttccatgggcccttgttgatttcgagaggacccacgggccgaacggcgtgtcactttcatgcgtctatagtgttgggttcctgtctagtgttgagttctcaactatggtgttgtgttcctccaagaagttgagtttcaggggcctattatattgtctcagttaatgggtaactcagttaatcctatatattgtgtcagttaatgggaactcagttaatggtatatgttgtctcagttaatgggtaactcagttaatccagcatatcattgatgag

SEQ ID NO: 3963 - DNA, 3389 bp, Zea Mays
aaccgaaagtccatttcgtccccaaaatttcgattttcgaaaccaaaccaaaccactctcctactacagctctcggcctccctcgcgttctctccatcgaactggcgaactgctcctgctcgtctcttcccacaccacgcattttgtcgggattcgggaaccctatcgccggatcttcgcggcggcggcggaaatggcgaatcccctcgcggggctgcaggaccacatcaagcttgcgcgggattacgcgctcgagggcctatacgacacctccataatcttcttcgacggcgccattgctcagatcaacaagcatctaactactttggacgatgctttggttcgtacgaaatggatgaactgcaagaaagcaatctctgaagaagtggaaagtgtgaaacagttggatgctcaattaaagtcccttaaagaagctcctgggacgaggcggtcctcatcacctcctattcgctccaataaatcatttgttttccaaccgttggacgagtatccaacatcttcaccagctccttttgatgatcctgatgtgtgggctccaccaagggatacaccgacccgaagaccaacaagaggtcaatctagtgcaagaaaatcctcccaagatggagcctgggcacgtggttcatcaaggactggaacacctagccgaagctcaaaacctaatgggagtaaaggaggctctgtggttaaatcatcaactgcctctaacagttctgtaaggaaaggaaaaccaagttcaagcaaggctgattcagcgggtattcgtcgaccttggaaaggagttcttatgtttggtccaccaggcacgggaaagactcttttggcaaaggcagtggctacagaatgtggaacaacattcttcaatgtttcctctgcaacattggcctctaaatggcgcggcgaaagtgagcgcatgagcatctggtgaacatgagtcgtcaagaagggtgaagtctgaacttctagtgcaaattgatggtgtaaacaatagctccaccactgaagatggtcagccaaaaattgttatggttctagctgcaacaaattttccatgggatattgatgaggcactgaggtcaggttgatcaccagagcctagaggactggtggctgaggtcaaggctactcagtcctgtttatgtcatttatatttttcgatgtatctagttacatttgttctaaacaaaacaaatccactaattgctcattccagttccttttgtaatgctttacaattctttgtgtcattgcgtttatagtgcctaattcttgttcagttatgtaattttcttcaagcaaagcacccaattttgcaggatgacatgattttgccgttatttgtccaaataatagggttagagtttttaaattggttcttcatacttttttcgaacgacgcaggagagctgcatgtcattctattaaaaaggagtaagaaaaaatacaagtgggggaccgaggcctaaaacccacacccttacagtacagacataggcacgccacacacacgagggataacgacccaacacagaagggggtggggggcttgctcaagagcccagccccaccaaccttgcgcacagaaagctaaacgcagaattaccagctagataccacaggttacggcagactacagaaacactaggcctaatcccctcaaacacacaatcgttcctgtgcatctcccaggccaccaaaataaacaaggatagacccttcttcagccttacagagaattaatgtgaaactacaaattacactgaactattggtgtcaaaatcattgattattttaccagggaaaaaacagatggttattttggcagttttggtccattgatgtatataggatactgttttataataacaggcatggctgcaaatgaaaaggctatgcaccacctcctgcctggtttcaccccagatggtatttttgttgaaatttggtggggatctgacatcatgcataacagttctacgaaccattggtatcccttttttgggcaacattcatgtctggtagtttcctgctttatgtagacactatttatgtctggtagttcaatagaattttgcctatatctatactagcggcatttacctgctagttataatttactctagatatttatcttcacacatgagaatactatttttttctcattattatttttcaccaggctattcccatgtatgctgctactattgccattgctacttctcttcttccatatgcatctaccacttctgatccaaattatagttcactttagctttatcgtaaaccatttctttttatctttgaccaaatttaaaggaaaatgtaatatctacaatatcaatctattttcttaaattctccattaaatatttcttaatagtgcatctattcgaacttatagatgttaatataattttctaaaactttggtcaaagttagagaagtctaacgtaggagaaagcataaggaactacaatttgaatagagggaatatgttagtaacttactattgttcacattaatgtgcattatgttgacttctaaattgcccaggcggaggctggagaagcgtatttatatcccacttccagatttcgaaagcagaaaggcacttatcaacattaatcttagaacagttcagatagctgcggatgttaacatcgatgaggttgctcggaggacagaaggctatagtggagatgacttgacaaatgtttgccgtgatgcttcaatgaacggtatgcggcgcaagatagcaggcaaaacccgcgacgagatcaagaacatgtcaaaggacgatatagccaaggacccagtggccatgtgcgactttgtggaggctctggtgaaggtccagaagagtgtctcgcctgcagacatagaaaagcacgagaagtggatggctgagtttggatctgcctgagacctcggtcatctccttcaacattggtttctgtggttgacacgacaagtgtatgttgatatccgctgaccgctggtgcatagatcagaggcacgaactatcttgtatattttcagggatactacaaattaagttcacgattatttcatttcaatccctgatatgtacattctagctgtgaaacgtgtctcatcaattagccgtggcaaccattgtcagatgttgattgaacgtaactgcagccccgcctatacctccagatgcttccagtttggattgaaacgtctgcttctagctcttccaagattttcatgggcgtgaagaaagcgttaatcactttgccactgcgcagtggtgccactgtagagctccccctctttatttctgtgttctttttacggtcctgtgttttgcatgtgtcagttccaaacacgccgttaacgtg

SEQ ID NO: 3964 - DNA, 1217 bp, Zea Mays
acgtactccctcccgtgcacacccatccactcgccgcccaagcccttagcttcctgcccaacgctgctgcgcttcacgctccatcgcccctcatccaataactccaacaaagaccgggttgcttcgatctgcacacaacagaagaagcacgcccatccgcggctcttgcttcttttggcaccatgatgtcgtcggcgccggaggagacgctgttcaacctggaccagcagcagcctccgccggcggagcaggagcagatctgctacgtgcactgcagctactgcgacaccatcctcgcggtgggcgtgccgtgcagcagcttgttccagacagtcaccgtgcggtgcggccactgctccaacctgctctacgtcaacctccgcgccctcctgctgccggcggcggcggccaataaccagctaccacccttcggccagcctctcctctcccccacctccccgcacggtctacttgacgctgaggcgatgtcgttccaggcgccgagcctgccgggtgctgaaccgccgagcgcttgcgtgagcggcgtcacgagcatcaacaacacgtgcggtggcaacaccaccacgtcgtcggccatgtcgtccatggcgccgccaccggccaaacatgcactgcaggaggcgcagcagctgcccaggaccgcagcgtcggtgaacagaacttcagagaagcggcagagagttccttccgcgtacaaccgtttcatcaaagatgaaatccagcgcatcaaggccagcaatccggacatcactcacagggaagctttcagcgcggctgccaagaatgagggagctgagtgcatgcttttcatggacggtctctacgccagcatgggcttttctccattctgacttcacgtcttcacccccactagggttctgtcttctgaagcccctctgtgtatcccggttgccggaggaatctcgaaatgtctaccgcaaatctctctctctctctctctctctctctctctctctctctctctctctgtgtgtgtgtgtgtgtgtgtcctctcgttctccttacttaggttccagtttcttatttcgttaatttattattgttatgtaacctagagagcaaggttgttatgtgtatgatgctgctgccccttgtcttatatggacataatttcgagctggatgttggctgggcatcgatctagtcatatatctatggcttcaacttcttccaaa

SEQ ID NO: 3965 - DNA, 5321 bp, Zea Mays
ggacgacgaccctgacacgcactggcaggggatccgactgcaggtgatcggcgacgccgcgaagatgccagcctctctgcggagcgcagcggcgcaggccgacgaggccacgaggcaaaactcgcagctgcacgtgatgctggccatctgctacagcgggcgatgggacatggtccaggcgtgccgggagctggcccgggaggcgcaggcgaaccggctcagtccggacgacatcgacgagtcgatcatcgccggcaagctcgcgacgagcgccgccggcgagttctcctgtcccgacctggtcatcagaaccagcggcgagatgaggctcagcaacttcttgctatggcagtcggcgtactcggagttgttcttcaccgccaagatgtggcctgactttggggaggctgagtacctggaagcgttgcgctccttccagggcagagaccgccgcttcggccaatcaaaattactctaaggcctcgtttggtttaagagtccctctattttagttttatttagttcctaaattgtcaaacagtaggattaaaacagagactaaactgatttagtctctagtctctcaagatatggttaaaaagactaaatcatattaattctacatttgcccttcatttagttcaattgtactaatagcaggagaatattaaaggctattttagtcttcttatgagtcatttagtatatttttactaattttagtccttagaaacaaacatgttagagactaaattttagtcccctaactaaactttagtccctagactaaagaaaccaaacatggtctaacttgatggagtgttacacctgcatctccagcgtcagcacccaaaagaccgtcccgactcgcgtgcaagggcgtccaatcgtcggatccacaacagcgactatgtcctgtaaccgtggcccatgagccgatatggagtagcgtgtgtgtttgcagccagttgtcacgacgcacaaaagcgcgccactagcttctgtaaggatgaatcatccagagaattgcaaacagaactattccccccgtatctcatcttcttcctctccaagcattctcttcttccttccttcctccccaatctatcgtgttaacaagtggtatcagaggggtctgatcctcgtcactgttccactctggatcccacaacctcccacccctacgacactcgtcttcgtcgccagcgcgccgccatgaacgtcgacttccagcacctgctcgacgaaatgtccaagcgcttcgacggctacgatgcgaagctgacgcagcgcctctccgactacggcgtcaagctgcagcagcgaatgctagatcgcaatctggaactggagcgtcgtatggcggatctcgacacacggatggacgacaagttggcttcgctctccacggccaacgagacgcgcttgtcgcagctcgagtcggtggccatctccttcgacggttggcatccctgcatggagggttccgtcgacgacatccgtcttcacgtctccaagttgaccaatctctacgaacggtcggcagtggagcaccctaccgtcatgactggtgtgcttgttccggctccctctccggccgtgcgcccatctgctgctgcctccacggacgctcaacctgacaggcaccgcctgaatccatcaatccgggatgatggttgcggagttgtcacaattcttgatcatcacccggcaaagggtgcgtcatccccttctcaccccatgtgtttgcttctcctattttccactgttcgagatccgagtttaaggaacccgtgggtggaagtttggctggtttatctgatcattttcctaaaatgttgtttcctacgtccgatggggatcaacccaagttatggatctgtagatgtgaggattactttgatctgtatagtgttgatccagcgcagtgggtgagggtgtcatctatgcatttcagtgctgctgcatctcgcttggtgcaaactgtgcagagccatcttagatcccgttcgtggttagagttctgtggttgggttttggctcgatttggctatgaccatcacgaattgttgatccgccagttgtttaacattcgtcaaacttcatcggtgtctgagtacatcgatcgtttctcatccctttgtcgaccaattgacagcttacggatcgcacacagaccccctttatttcaccatgcgctttattgatgatttgcgtgatgatattaattcttctattttggttcaacgtccatcttcttggaattctgcctgtgtgttggctcaattacaggaggaggtctcggagtacggcaagaggccaccgacccggcaacctgatccattctcgagaactcagtcaacaccaccagcttctcttccacttccaccacccccgtggaaaggagagaaacagacaactctgggcgaggaccgtcggggcgctaactcaaataatatggaggacaagtggtctacccttcgggcttatcggcgtgcaaggggctgtgtattaagtgtgcagagaaatggtctaaggatcaccgttgtgctgattcgattcaactcaatgctgtgcaggagatatttgagctgttttagtgggattcggatgctcaatcagaagggaatgacccaatccaacctttagagcagatatttatgttcgtgtcggtggctgctgtatctagaatgccaggtccacgtacattttgtctgggtggcattattcatcaccaagctgttcgaatcatggtggactccgacagttctcattctttcttgaaaacaaaattggccactcagcttcaaggcattgttcctctatcagttcctattgttgttcaagtagctaatggtgctcggttacagtgttcagcgcattgtccagccactgcgtggtcggtccaagagttcaccttctccacagacttcaaaatcttggatgtgttttcttatgatgctatattggggattgattggttgtctcaattcagtccgatgcacatacactagcaacatcagtggatggtacttccataccaaggagtatcagtcttattgcaagggtccaattgttccatttctaagggtactgtggtccaattatgcttgttggtcgcgtgcctagaattagatgccatggtttctgaggccccctgccattcaagcagtgttatcagagttctcagctttgtttgctgtgcccacataattaccacctacccgagcatgtgaccatgcaatcccattgttccatggtgcttctccggtcacggtccgtccttaccgttatgctctagcactcaaggatgaaatcgagaaacaattttgtgacatgttggccaatggcatcatccaacccagagctcgtcccttctcttcttccatcacttgaatgctatcactgtcaagggcaagtatccagtaccaattattgatgaacttctggatgaattattagcaacatcttggttctccaaacttgaccttcgtgctaggttccaccagatctgactgaagtagggcgaggaaataagacaatgtttcagacacactatggacaatatgagtttaaggtcgtggcgtttggcctcacaggtgctccaggcacgtttcagtcggccatgaactcaactttagcctcttgcctgtgtcagagtgcactggtgtttttcgacgacattttagtctacaactcatccttgtctgaccatgtaatacaccttcggatagtactacagctgttagctcgagacaagtggtgtattaaactgtccaaatgttcatttgcacaacaacaaatcagctatttggctcacattatcagtgcccgtggtgtagctactgatcccgaaaggtgtcagccatcgctaattggccttgtcctcaaatagtgaaggaactacgcagcttcctttgattggctggttactaccgcaaatttgtccgtaacttcgaagtcatatcaaaactttgactcttctcctcaagaaacattcagtgtttgtgtggacgtcagtacatgatcatgcttttaacgtgctgaaacagtccttgtgcttggcgcatgtgttgaagttgcccaactttggacatccattttcagttgaaattgacgcagcaacaactggagtgggtgcaatattgattcaggatggtcacccaatagcctttatcagcaaggcattaggccccaaatctcaaggcctctccacttatgaaaaatagtatatggccattctattagcagtgtctcactagtgcgcttatttgcatctcaaagaattcaccatttttactgaccaacgcagcctaatatcattgttcgaacaacgcctccatacaatgtggcaacaacgggtgttttccaaactcttgggcattaattaccatattgtttacaaacgcgacactgagaattgagtgatagatgccctttcacggaaatcttctcatgaagcttcttgtgcagctatttcatcagctactccaaagtggtttgccgaggtgattgctggatacgatcaggatacccatgcaacaaacctacgagctcaattggctgttgatcccacattggtgcccactttcgcattggtggagggattactgcgctacaagtccaaagtttggattttccataatgtgccactacaacagaaaactgctatcagcttgttacgccagtgcattaggtggccattctagattcccggtaacatatatgaggatgaagaagctgtttgcttggaccgacatgtgtgttgcggtgaagcaatttgtgcaaacatgtctggtatgccagcaagctaaaccggacagaacccgtttaccaggtctgctacagccgttaccaatgccctcatcagcttggcagattatttcggtggactttgtggaaggcttgccgacctcttcttcatacaactgcatcttggttgttattgattttttcacaaagtatggtcacttcattcctcttcgccatccgttcactgctaccagcattgccaagttattcttgctgcatgtgtatcgtctccatgggatgccttcctcaattgtttctgattgggacagaatattcaccagttcgctttggaaggaactgtttcgtcttgccgaagtttagttacaaatgtcatcatcttatcacccacaatccgacgaacaaaaagagcgactgaaccagactgtaatacccaaacttgtaaactatatcaaaggaaataattcgcttatgtgatatgtctctatttcttaaaacatgtgaacaaccatttccaaaatgattaattagctaataacctataaaataaa

SEQ ID NO: 3966 - DNA, 1081 bp, Zea Mays
caaacggtctcaggctgttaggcgcgccactcacctcagccgctcgcaaaaccctctcctctcgagaagcagcgcggtggagaccggagagaagcagtcggcagccgggaagcccgtcacgtgcctttcttcctcgacgtgccatgattaacggaatattgagcactcgggagttgtagtcagacctggagcgacaatgaagtgtgacccaggagagttctggtgccatgtttcagagatagcattacatgatagaaaaccagcaccatctctgcccttggcttcaaatgttggcattgcaagagaaatgtcacaagtaccaaagaaggctattccattattcccaaaagcagatgatgataaaagcaaagaaagtaaatgtgatgtggagaagcctgctgctactgagtcctctaaaccgaaggttagcttggaggaaacaaaggatcctgagaagcatgaagttgatgttggtggcactgacgatgatgaaagtgacgaagactttgttgattcagaagagggtgaatcggatgatgacgagaattccagtgatggggatgaatgtgagagttcaaatgaagaagatgaagactctccaaatgtagtgctaagggcaagaataggccagcagcaacacccttgaagacacctccagggaagaaggcaaggaccacaacatcgtctatgggcaaaagaccagtcagtgtcagtgatgatgcaaagaaaagtatccacgtcactggttatggctgcaagtcgtgcagcaagttcttgtatcagaatttttcccaactagatgcggtcgtgcattctgatacatgggcgtcaaactcattgcaaggtgaagcacagtgctcgaaagtgaagtagcattcatggactatgttagggaagttcgttattaggcaactgaattgtgggtttgcgtttacaaacgggctctaaggcagcatcacaatgtccgatgcgtatttgattattgtgggttgttggaaagttgctgttttttctgctcaacagaatgtgtaattgagattttcttgaattagaaagttgttgttttgcagcgggtattgac

SEQ ID NO: 3967 - DNA, 2595 bp, Zea Mays
tatggcggacccacttatcaatcgatttatgggccccgcgtggcagagtcaaaagactcggaagggagttggttggtttttgtttcctccccgcacccgcaacaacggaaacaacggccccgtggtagcgaggagatcaggaattcaggagagcaaaaggggagagagaatgaattgaaacgaaggcccgcgacgcgaggagcgagggaactaccaccggtgaccggtctcggcgcctccgcgacgatagcctctccgacctcgagcgcggtccggttcctccctgcgtcagcacgcgagcccttggagcttcgagtcagatcccggcgggcgcccatggtggctctggtgccgttgagccgcgcgatgtagggttttcgcgcgccgcagagtaggagcgatggggcgccggaagatgtccgcggcggcaccgccgtctcggagctggtccaacgttggcggaagcgtcatcccgggtaagatctgtggctttgttccatgtgtggcgttaaggcgctgtgaggtgttgtggatcggattgatttcatgtcgagctaatttaagggtgtttgttttaccattctaaatgaggtggtgcaatcagtccatttctcaaatttggtggagtgattctattcctggtactaatttggtggaacgacttcatttgctgtactaattattagtccgcgaggctgaattattagcttgcaaggaatgaattattaacttgtaaggattgaagcgatgatgaatagcgcattctattccacaaatcaaacaaaataagaggagtgagaagatgatggactaactcattcctcaaaccaaacagcctgttagcttttggtttaggctctagctgatgactggtgctgttggtctgttttctttttatctcatgtatctacttattttgcagaacttcgagctaaacacaaaacagacttgcagaatttgacgctgaccaaacagccactcagaacattgcattttttcctgttagccatgttacaatacttgaaaagattagcaacatatatcctgagtaagggtggtttcttctttctcctaattgttttattggtagcttctggaatcttgctcgtcgtttcggatggtctgcataagaagcatgtgcaggaattccttaattatgctaaatttgtgtcgtggtgggtttcattaggtgtggcttcatcaattggactaggttctggtttgcatacatttgtgctgtatctgggtcctcatattgctctgttcactattaaggctgttcaatgtggtcgaattgatctaaaaattgctccatatgataccatacagctaaaggttgggccatcatggcttgacaagaaatgttcagaatttggaccacctgtgtatccagcatcagctcattcagttaggatcccagtcttcgacctactacctcagatacagctggaggcagttctttggggaattgggactgcgcttgctcgcttatcaggaagcgagtcaaaagctgttcaggagcttgatgcagctacttccaaagaagatgggccagtagcatcatcccttaatcgaaccaagcgttggcttctctctcactcccaacatctcaacttcttctctatcttgattcttgcttcggttccaaatccactctttgaccttgctggtattatgtgtgggcaatttggtgtgcctttctgggagttcttgtttgctactttgattgggaaagccatcatcaagactcatattcagacactatttatcgtgtccctgtgcaacaatcagctcttgtatcttattgaaaaggagttaatctggatatttggtcacgttcctgggttttctgccacccttccgtctgtgattgccagactccatgctgccaaggacaagtatctatcaccaccagccccagtctcaccgtcatcacaaatgggggagaaacagtggaatttctcttttacatctgtctggaactctatagtgtggcttgtgcttttgaacttcttcattaagatagtcacgtcaacagcacaggattatctcaaaaagcagcaggatacggagatggaacttatttcggattccccgatccaggaccattctaaaactaactagtggcgcagctagtggtgtttatacacagctgctagcagcaaagattctcctctgtagcttaagcccctgcagatgatttcaagttccaacaattagtattagtagttattcatctgcgcagtggacaaaaacatggacacatggtcttggttaacttgtcagttgacgaccttttgtcattgagcctgtacctgtactggcagctcctgttggagtcattctgtttattttcggacatctacacggataaacagtaggaattgtttatggagcacggttggctttttttgaagtgaagagcacggttggctttgtgagatgtatcattcatacctgttcctatgtattctgggaacttgaaatgcaatagaaacctgggaggatttaacaaggatacatcattgtgtcattactatgtgcatgtggtttgcaatttgcacctcttccggaacaggtggtgaatagtctctg

SEQ ID NO: 3968 - DNA, 3281 bp, Zea Mays
gttacatactcataatgcaaaagtctattttgttaatgatgctcgtgtgccaaaaacatccgacatgtacagcttgcttatcgcggtcccagacgaaacggacaaatggtcgcattagaccgttatatatgcttacggaatcgcacggaacgtacattgcttgtcgacgttgcggtcgtttctcgtaggaattcaatttgacgtcacgacgccgttaaaagctttttccgattaaaaaaaagctccggatccgtcggctttcagccactaattttcaaagccaattttctcgcttcgcctttccttctcccatctctctcgacgaggctcgccatcgccgctattcccattcgccctcccctcctcttctccacccccgcaaaaccctagccgccgacccctccaatcccctaccagcgcccgattgccggccccaatcgagctagggctcgccaaattctggccgggctcgttgaaatttcggccggtcttttctggtgaatcctttggtttatcctgaggggatattttgatttctgcggcgcacgatggggagcagaagggaggaggagaggaacgagaagatcatccgcggactcatgaagttgccgcccaaccgcaagtgcatcaattgcaacagtgtggggccacagtatgtgtgtaccaatttctggaccttcatttgcctgtcatgtagtggaattcaccgtgaattcactcaccgtgttaagtcggtgtcaatgtccaaatttactacccaagaagtgcaggccctcgaacaggggggtaaccagcgagcacgtgacatctacctaaaggattgggattggcaacgaatgaggttgcctatcaacaccaatccggataggataagggaatttatcagggctgtttatgtggataagaagtatgctggtggatcctctaacaaaccagccacagaaagtgagagtatgaagagcaatgaccatgacatgagaagacctagttcttatcattcatattcccagagcccaccctatgattttcaatatgaagatagacgatatggtaagcaagtgaacacacttgctagaaggccttcagatagggcgctcttcgatgggaaacttggcaacctactattcagtccaggtcgtttgcgagatcagatgaatgaagaccgttttgccaatgaaagttcaggatcaaggttttctgacttctcagcctcaagcactggcgacttcagaaatgatgtgctttctcctagctctcaggagacaggctacagtagtccctcagtccaccattcaagaaatgtctctgctgacaatcctcaaacccagaaatgtcctaacgcagcttcacaaatagatttcaatggagttcgacgtccacagcgaacaacttcttctggaagttttggatcatttgatggtagctcagtttccaacaaatcaattgaatcaggttacccacctgatgcaccaacagaaaagtcagtgcattgtgctgtaaaccatcagactgtaccttctcctgaggcctgttcgacacaacaatatgcctccccatccgacaatcacaacttgatacctcacaaacctgctgatttaggtagccaaattgttgccaccaggaaaccagtgcaacatagttgcgctcagattgaaaatgtggtgccgatgcatgctccagtacaaccaacgacttccacacctcttggcctctttgatcaatcaactgtgcaacatcctgtcacatctgctgcaccgatagatctgtttgctggctttaatgaacagttaccagcttctcataatacagatggtgtatccagtcattctgttgttgctaaagaacctgcccataatgttgttcagaagggcataatgccatcagctgaagcactcgccacatctcatgctgtgcaccaagatttgttcagtctgtcaattttgcaggaaccagcaacacccttaccctctcagccaatagatctgtttgctggctttgaccaacatttgccgcatttgtctactgttcagaaaattccatcggcagttccatttcctgctaatgatggatgggctttctttgacgtgcaacatggattgttgacatctgtttcaaatgtgcaaggtcaggtgcctgctgcattctctccatctgatggtattgctaaaggaattgaccaattaacattaccaacttcgccaccaaatgtaattgggtcacaaaattctccggctatgatggataactggagtttaaatgctgaggaagtgaagatccctgtcctcaacgaaaattctctcttggaatgcctttggtgaatctactcagagcgcatcaaatgatctgttcacatttaatactatgtctcaagtagaagctcatcaattctctatgccaagtggtccatatgttgaatccagaattccacagggtggcatggtctctcatcctgaaaaatcaacaaatccatttgacatggcatttgaatccgacgttgacgccaatgacatgttcatggatttgacctcactgcaagaaacattaccagatcatcacactctcacagattattcggggagcttaacagagccatggatttctcagaattccactatgtcatatattccttctgggcctcaaggaggtttatcctatgtggcaggacaggactctcacatgttgagttcaacacatcaaggagcttttccacctaggaatccatttgagtgagactagtaaagagagttttgctggatagtggtggacagaagaggaaggcaatcagcaccggtcgaaactcaaatggatactcaggtctactatactagatgcattgaaagcaactgtgcatcgaatctgaaaccctgaggtaaatatgtgtcttggatttcattgtctatggtctctcgtgtatcagaaaggactgcatagaagtctacatggcaggagtgctggaatttttgcccgaagcaaaagctgtcctctactcccatggactaatgtatctctggcaggcagtgctggtccagcatcaaaaaatttctttcatttcgacatttgcccaatagttgtgttcatgttcttgttaaaccctgttgtgaatgagaagggacgacatttacctccttaatatagtaaaaacatgttcgtcaaaagattgaattgctgtcagatgctgtgttgttcagtaatggttattacctttgtatgttgaaggggcctgtcgactctcctgagcaatattaatgctcatcatagtaaaggatcatgatgacattttt

SEQ ID NO: 3969 - DNA, 2360 bp, Zea Mays
ggcaaattgtgctaatgtgcacagaagtaaatatgcggattagaagtagaggtaaattatctgcgtttgaacgaccttttgttcgagaaaaaaaggtaaattatctgctgtgtttcaaagcagaatcaatatggtacagttttacctttattattgtttacctgaactaagttacttattattccctcggtctgaaaaaagaatgcaattctaggtttggaacaagtcgaactttcatttaagtttgactaagtttatagaaaataacattaacgtttatgtctttaaaataggtttactatgaaaacatattccaagatcattatgatatgtattcggtatcgcaaatattagtacttattgtatagattttcgtcaaaattgaattatttgactgcccacgaagctagaattgcattcttttagggacggagggagtgactgttttcagttcatgctatcatattgagtctaagtgttctattagagctattagttattgacaatttgattagccaaattgtcaagatcccattaacaaagctgtggcatttgagtttgctgacatgcttgctcctttaccttttattgccttctcaacataaattgcagttttttggaacatattttgttgcatgctaccagtttctattggtttgaccttgacatgaaatagcaactttccaattttgtctccctttctctgaacacaatatttgaatattaacaacgtggctgcctttcatctagtcatctctactctcaaagcaacttctagactgccaagttgatgcttatgttctttgaatggggcaacatatttatggttccatgttcctgctaatgaagaggaagtgcctccttttctagcaataatttcagtgcagaacaaactaaagaacagaacaaggatatggcattgtgcttcacctggagaaccaagaaaaggcagaagcagaaaggacaagcaatcaaacaaatagtgttactaactagtgtgacaagcctctgaaaaagaatcagatccatcgctacatttgatggagatgttctttaaattacatgccgtcgattttttttttcactaattgtttaaccacagattcctcattcatccatatgtgctgcaggattcaagttggtagaatctccaacgtaacatctccattagctgtgtctgtctcagtggctacatgcctacatgatgaagaaggtcacgatctacagtgttggattagatgcacctcacctgcaggctgaaggatgtagtacccaattactcaattatttcgtgtggatgctgcacttgtcctcgagaagatgaagcatcaccagacatatcgattccatccgaggccagatgcaagtgaaggcggcccagcactcatgtctgtcttggtgtatcccttcacttgccattcgtcgttgtccttcacttgccatttactgtacaaaggggaaaaaatgcgattctgatagagaattggaagttttgtcgcgagcttatttactttgttggtgctgtcaggtcaggaaatggacgattgcagattaccgaacactactgcctgttggggaaaaaaaatggtgctcttgcatcggacgcaatggcaagttggcagtatcttatgcctttggcaattctcttgtggtccatagcggagtgctcactgcatctaaaatggtaaaagtgaatgggtgctgtggtgtgtggcatccaggcgaccttaatattctcctgtaattcgtccctttaacgaagaagcctgtcttgagagactgcaaagtgcatttggacagttgagttgccatctctcttccattattcggaccacttgtttcttcccgtctcctggaaatctctgaactgcatggatccatccatctcatcaagtggcacacttacttctcttcgcctatctgagaattaataactcttcgacacccttcaaaacctgtttgttgttccttgtacctgagtttctctacctgctgtttatgtccacccaacactcttttcttatgggagatcattagtatcgttaaatatatattttttcccccaagggccccatggtctcccctagatgagacacccttgcacttttatccttattatagtatgtgataacatattgccctctacgcactcatgagaggctgagacaactgaaacatttccatcctaacctactgtacatccatccagacatcttttagccagagccacctacagggctcagtgcctatcccctatggcgccattcacaatcataggcctttagttagttgatggtggttagaacacaatgattgctttgatcaccaagtgctgcaactgaacactctcaagattgttt

SEQ ID NO: 3970 - DNA, 765 bp, Zea Mays
gttggaagtcacaccagcaaatctgacctgatcatattgcctgctcagagtcgtttccaggtggatgccaagaataaccggaaggactcatgcaaagtgaaaaaaaaacttataatgatgctggagagccttcagaagaaaagggagaagagcattgtattcagccagtttacttccttcgtcgatcttctggagacccccttcactcagaacttcagaagggtatcaagttcttgtggtttgatggcaagctgagccagaagcataaagaaaaagttctgaaggagttcagtgaaagtcaggacaagctggtgctaatgatgtcactcaaagctggaggtgtagggctaaatctaattgctgtctccaatgttttttacgatggatccatggtggaatccagctgtggaagagcaggctttcatgagaattcaccgtattgggcagaaaagagaggtccgagtcaaaagcttcatcgtcaaggatactgtcgaggagctagcggatgcaacaggtccaaatgcgcaagcagaggatggtttctggggcgctcactgatgaggagattcgtggcgctcgcattgagcatctcaagatgttgtttaaatgattgctgccatgaactcccgatgtgtatagctgacgctatgtcgttgatgcttttgtaggagtattatctgggttcagatcattgtagatggggatggagtgggtggaaccttgccctttggattttgtgtatatctcccccatgctagtatgcat

SEQ ID NO: 3971 - DNA, 3153 bp, Zea Mays
gtgcgaaggcaggcaggcagggacgcggatccttcgtggactcgtcttccatcccttctccctccccccgctcgcgcggcaatgaccggtcgcgggtcgccgccccctccgcaacgcacaacttggactcgtcctagtcctcagcctcagctccgccccgccccgccgtatatgcatgcgcctgcctagttcatttcttgtatatataggcgcccccgtccgcgctgggagtaccacggatcaaccaaccaacaacagctaggtgaacctgaacccccaaaggaaccgcagcgctgcccattaatcttcctgcgatcaactgctgtctctctctagaacgatcggctctccagcgacggcgcagggagggagccgcgagatgactctgaggctgctcaacacagagcacaaccacctgctgcacccgaggccgcagagcccgcgggatgccgccgccttgtcgtcgctgctgaggtcacccagggtgtcctgctccggccagcagagccccaagcccaagagcgccaagatggcgcacggcggcctggagcgctcgctcagcttcaggaactgggaggcggccagccggggcggcggcggcatcaacggcgcgcgcccggggaccctcgcgctgcagcagcagagcccacggcgggtggtgtccgtgtccccgcacccgcacccgcacccgcaggcgcaggccatgatcgagtacatctcccctcgcccccgcgtggagctcgaccaggcggccaccacgctgcagaaggcctacaagggcctccgcacgcgccgcagcctcgccgacggcgccatcgtcgccgaggagctctggtggaagacggtcgactcggtctacctcaacatcaagtccatctccttcttccacgaggacaggcaggagaccgccgcgtcccgctggtccagggccggcaagagggtcgccaaggtcggcaagggactctgcaaggacgacaaggcgcagaagctcgcgctccagcactggctcgaagccattgacccgcgccaccgctatacgacatctggtgcgcgagctccagctgcgagcccttcttctactggttggatgtcggcaaaggcagagacttgcatcaccagaaatgcccacgaagcaagctcaactcacagctcatcatgtacctcggaccagtacgtgcgaacgagagggcggcgtacgaagtcgtcgtggaggaaggccggctgctgtacaagcaaagcggcgatctggtgaacacgaacgaggagtccaagtggatcttcgtgctgagcaccagcaggtcgctgtacgtcgggcagaagcgcaagggcaagttccagcactcgagcttcctgtccggggcagccacctcggccgccggcaggctggtcgccaaggacggcgtcctcaaggcgatatggccctacagcggccactacctcccgaccgaggagaacttcagggagttcatcgccttcctggaggacaacaacgtggatctcgccaacgtcaagcgatgctcggtggacgacgacgagtacccgtcgttcaagaagcaggcggcggagggcccagaagagccgcaggcagcaggggaggccccagccccagtggccaccgaagaagctgctgaggaggccgtggagctgcccgcggtcgacgtcgtgaaggcggaggacacggccacggacaccgtcgagccgtcgaagatgacgatgatggccagccggccgtcgttcaagtggtcgacgcccacgggcgcgcgcatcggctgcctccagaactacccggccgacgtccagagcatggctctggagcaggtgaacctgtcgccgaggcttgcggcagcggcgccgtccccgcggctgcccatcccgtcgccgcgccccagccccaagatcaggctgtcgcccagcctgcactacatgggctgccccaccccgacgggcagacgctcttcccccaagcagcagcagttcatgggcttctacacggcgccgcccgtggcgctcaccctccccaagcacaaggtcaagtgatctgctcattgacacgacacctccgcagccacagcgccgttttccaaggtgctcgtgctactgcgttgcgttgcgccgttctttccttagcaccagggagggagggagggaagggttaacaatattgttggttggtttgttgcttcgttgtagacaaacatcgtttcggttgcgttctctgatcgggtagcattcttttgtacgtttcttccatcatcgccttttgacctgaggtgcatgcgctccgcctgcacaataaactacaggcctttgcatcctgggtagcctgaatctgcagtttctcggacaaatgtagtactgactgcaggatccttgttgaataaaagaatttgttagcaatacgagcactgccacgagatttcgtgccttcattttcaactacaaatctttgagcagctggatgcttgcattgtcacatctgagttttgtgcataaagatggaagtacagtactcctaaactcctgtaaggcaaaggtgatcaaatgtcagatcttgtcatcaaatgccagaaagggtcaaaggcgcgaaatctcggagaaaggtcagtttccagtatagaacaatggagatctgcaggaaaaggggtcaggaggagtcgaaaccgccgcccggattcgtgtttctgactttttttcgttctcttcggccgacgtgtttcggactatttttttcgcatcttggatatggaattctggtttgttctgtacagcttgcgttttaattttgacttgggagaggccaccagtccaccttctgaaccagagctaggggagctaatcgattgctatatgcctgtttagattgtaagggctaattattagtcactaaactttagcctgtaaattgttagcttatctatcgactaacaattagtccacaaatctttgctaaagtgggctaattttttatggagccgatggaaagaaatttgtgcccccgtcttcaccgtcaaatatagagtttgacttttgtgaaagtgcaatgccacatgtagaatttgacctgtatgatcgtgatggaaactacacaccaatttcggttgagtgttcatctcaaccaatagtgaccacagagatgaaaatgaagacatggac

SEQ ID NO: 3972 - DNA, 2057 bp, Zea Mays
gaagtaaatggtggcagttgtctggtgtcttgggacattgttactaggccccttttcctaggagggctgggtatcccaaatctgcattttcagggattagcactgcaggcaaggtggctttggctgcagaagactgatgccagcaggccttggagggacctggaccttcccattcacccgcaggaaacttctgtcaaggactaccagaatttcaatttccgacaaccttattctcaagcgtcatactatgtctctttgatattgggagataaaaaatggcctgtagctgagaaacttgaagctctttctaagcttgaatcagattattttgcaaagttcgtaccacacctactgtcaaaaacatttttggaatgttatgttcaagggaacattgaaccaagtgaagcaaaatctatcgtagaagaaatcgaaaacactatatttactacgcccaattctttgttcaaatccatgtctccatcagaatatctgattaaaagggtcatcatgcttgaaaatgacttgaaatgctactaccaaactgagggattaaaccagaagaatgagaattcatcagttatccaatatattcaggtgcatcaagatgacgccattttgaatatcaaacttgagctgttctctctaatagcaaaacagccagccttcaaccagctacgaactgttgaacaacttgggtatataacaagtctttctctgagatccgactatggagtcctggcactccaggttgttatccagtccacagtaaaggatccttcatacctcgatgttagagttgatgagttctttaagatgtttgaaagcaaaatctatgaactctccgacaaggatttcaagagaaatgtgaaatcattaattgattctaaactggagaagtttaaaaacttatgggaggaatctcatttctactggggagagattgaggcaggaactctgaagtttgatagggtcgagtctgaggtcgctatgctaagagagctcaagaaagaagaattcatcgagtacttcaaccagtatataaaagtggacgcgcctcaaaggaggacactaagcgtgcaagtcttcggcggcaaccatttggtagagttcaagaaggcaatcaacgaagccaacccgcccaaaatgtacagaattacagacatattcggcttcaaacgatcgaggccgctgtacagctcactcaagggaggtccgggcaggatcaccatggactgacagccggcaatagcatgccttgtttttcatgtatgtagtgtaatggccagtgcatacgaatgatgaattcgattctgaatcctgctcctgcatcagattcggttgcatgattgatctatacttcactgtgggtttcacgaccagcgtgtcactttctgggcaaaatctagggagctgtataaagtcatgtatgttcacatgtttgtttgcgtttcttctcacagctatgcagtttgtacagttacatatccacagtgaactagaactagaagcgcgtcttctacacaccaatatacagcttgagcctggctgaccgtgcccgacgccggccgagaaccgtcaaggtgccgtcatgcgcacatgcaccaccggccgtccggtttcagcacgccccggcgtgttcgcaaacgcccgccggcgcccccactcgaagccgttgcggtgccaccggcacctgaacgagccccggtgcgtcgtgggcgagcacacgcagtagtagtgcggcgacgcctggcgcgcccgtggcacagatggtgggggcgacggtgccacggtcgcctgctgctcccgccgcctgactgcgcagtccggcggcagaggcggcagccctggatggcacatgcttctaggctacaaaagggtgatgcgatcggcagctccaccagctataaaacagatggcgccgaagaatggaatcgggttctggcgttttcggatggtgggagatgactagacgtggggaaagggcggggaatatgtgtgggctagggtggtaatgtatggtatggtagcccgcaggcgatggtttttgcgagctggtg

SEQ ID NO: 3973 - DNA, 3994 bp, Zea Mays
agttcgttggtgcctgagaatccatggtcgatcgtctccagtcgaagcgaaaagcgaaaaggagaaggggcgggggattgcgagcctgtgctgatggcggcggcggcggtggccgcggcggggagcagcaatgtcgagttcatccgcgcgcgcagcgacaagcgggagtaccgccgcgtggtgctcgccaacgcgctcgagatcctactaatcagcgaccccgacaccgacaaggcggcggcgtgcatggaggtcgaggtgggctcgttcagcgatccggagggacttgagggcctcgcgcacttcctcgagcacatgctattttatgccagcgagaagtatcctggagaacatgaatatacgaaatatatcatagagcatggtggctcttacaatgcatatacaagctccgagacaacgaatttctttttcgatgtcaatgtggacaattttgaagaagccttagatagatttgctcagttcttcattaagccattgatgtcacaggatgctgttcttagagagataaaagctgtggattctgaacacaagaaaaatttgttgtctgatggctggaggatgtatcaggaagttgggaaacactagaaactaaaccaaaagcgaggggcctggatatcagacttgaacttctgaagttttacaagaattattcagcaaacgttatgcaccttgttgtttatggaaaggagaacctcgattgcattcagggcttggttgagcgtatgtttagtgacataaaaaacactgatcagagaagcttgaaatgtccaagtcatcctctttcagaggaacatttacagcttcttgtcaaagcactgccaatagtagaaggggactatctaagaattatatggccaataacacctagcatccagttttacaaagaagctccttgccattatctgagtcacctcattggacatgaaggcgaggggtccatcttccatattataaaggaactaggatgggccatgaacttaatggctggagagtgcagtgacagtaatgagtattcctttttctcagtaagcatgaggctcactgatgctggccatgaacgcatggaggatattgttgggttgatcttcaaatatcttcatctattaaaagaagacggagtccatgagtggatatttaatgagcttgcggcgataaatgaaatggagttccattatcaagacaaagtccgcccaatcaactatgtgatgcgcactgtctcaactatgcggttgttcccaccagaagaatggttggttggagcagcattaccatcaaagtatgcatcacagagaataaatatgatactcaatcaactaatacctgaaacagtaagaatattctgggagtccaaaaaatttgaaggatctacgagttctgctgagccctggtataacacaccattttcagttgaaaatgtcactccttcagttatacaggaatggattgaaaaagctcctactgaaaaactccatcttccaaaacctaatattttcataccaaaggatttatctcttaaagaagtgcatgaaaaggttacttttccaacagtgttaaggaagagcccactttcacagttgtggtataagcctgatatgctgttctccacaccaaaggttcacattatcattgatttccactgtccattatccagccactcccctgaagcagttgttgctactgagctctttgttgatttgttagtagattatttgaatgcttatgcttatgatgctcaaattgctggtttattctattcaatatatgttacttcagctggattccaggtttctttaggtggttacaatgacaagatgagagttctcttaaatgccatactagtgcaaattgtgaaatttgaagttaagccaaacagattttctgcactgaaggaaacttctgtcaaggactaccagaatttcaatttccgacaaccttattctcaagcgtcatactatgtctctttgatattgggagataaaaaatggcctgtagctgagaaacttgaagctctttctaagcttgaatcagattattttgcaaagttcgtaccacacctactgtcaaaaacatttttggaatgttatgttcaagggaacattgaaccaagtgaagcaaaatctatcgtagaagaaatcgaaaacactatatttactacgcccaattctttgttcaaatccatgtctccatcagaatatctgattaaaagggtcatcatgcttgaaaatgacttgaaatgctactaccaaactgagggattaaaccagaagaatgagaattcatcagttatccaatatattcaggtgcatcaagatgacgccattttgaatatcaaacttgagctgttctctctaatagcaaaacagccagccttcaaccagctacgaactgttgaacaacttgggtatataacaagtctttctctgagatccgactatggagtcctggcactccaggttgttatccagtccacagtaaaggatccttcatacctcgatgttagagttgatgagttctttaagatgtttgaaagcaaaatctatgaactctccgacaaggatttcaagagaaatgtgaaatcattaattgattctaaactggagaagtttaaaaacttatgggaggaatctcatttctactggggagagattgaggcaggaactctgaagtttgatagggtcgagtctgaggtaagtgttctcctttcagcaacaatgcgtgtaaaggaaattgtatctagtataaagcaagcagactgtagccttttagtaaacagataatagtgtaatagttgaaaatattcacaaaattttaattgtcactcccttatattcagaggaaacagaaatgagaaggttgtgccagtaattgccaagatgctttgctaacaaatgtaacaggtcgctatgctaagagagctcaagaaagaagaattcatcgagtacttcaaccagtatataaaagtggacgcgcctcaaaggaggacactaagcgtgcaagtcttcggcggcaaccatttggtagagttcaagaaggcaatcaacgaagccaacccgcccaaaatgtacagaattacagacatattcggcttcaaacgatcgaggccgctgtacagctcactcaagggaggtccgggcaggatcaccatggactgacagccggcaatagcatgccttgtttttcatgtatgtagtgtaatggccagtgcatacgaatgatgaattcgattctgaatcctgctcctgcatcagattcggttgcatgattgatctatacttcactgtgggtttcacgaccagcgtgtcactttctgggcaaaatctagggagctgtataaagtcatgtatgttcacatgtttgtttgcgtttcttctcacagctatgcagtttgtacagttacatatccacagtgaactagaactagaagcgcgtcttctacacaccaatatacagcttgagcctggctgaccgtgcccgacgccggccgagaaccgtcaaggtgccgtcatgcgcacatgcaccaccggccgtccggtttcagcacgccccggcgtgttcgcaaacgcccgccggcgcccccactcgaagccgttgcggtgccaccggcacctgaacgagccccggtgcgtcgtgggcgagcacacgcagtagtagtgcggcgacgcctggcgcgcccgtggcacagatggtgggggcgacggtgccacggtcgcctgctgctcccgccgcctgactgcgcagtccggcggcagaggcggcagccctggatggcacatgcttctaggctacaaaagggtgatgcgatcggcagctccaccagctataaaacagatggcgccgaagaatggaatcgggttctggcgttttcggatggtgggagatgactagacgtggggaaagggcggggaatatgtgtgggctagggtggtaatgtatggtatggtagcccgcaggcgatggtttttgcgagctggtg

SEQ ID NO: 3974 - DNA, 2097 bp, Zea Mays
atggactccatggtgtttgaggttgctgaattggatggagcaacaatgatttgtcacactaacagtaaaatgaaagggaggttcgaagttttgttcctagccttccttgtagcgttgaagatgatgagagatcaaagaagaaaacagtcagagccattttggtcttcaatggtgatgaaaaaatggctaaacatcaggccgaaattaaatgatttcagcgaagacgagtttgatacaggcagtgaggatagtgacggtactaactctggagatgataataacttctttgagatacatggaaatctcaaatacatgattagcaaatcatcaggagagaaaacaattcctctgcgaagtcttcagagaaggaaatcagagagtttacgtgttaactacatcagtaacaaagatgtgagggtgatgataggtacatggaatgttgctggaagagtgcctagtgatgaccttcgtcttgatgagtggctttgtacacaagagccagcagacttgtatgttttaggtttccaggaagttgtcccactaagcgctggtaatgtgttgggagcagaggacagtagaccaatacggaaatgggaagctcttatccgccaaacacttaacagttctcagcaaaccaggacaatctgcaaaagctacagtgctccactctcgccattactaaggcctgttgcttcaggcgatgggaaatccaaacctgaagatagagtgacaggaagtttaactcagcttagagattggcaaactagtaagagtgagcttcattgcagctggttcgatgggaccagttcattggactggccagaatatccactcgacactccatcaaaggttttggtgtcaggtacaggcttgaggcgagtcatgagtttggggttatttagctccaactttgtgggaaaccctcgaggtcttgagctccaggatgtagatttgcatgctgggatgagaaggcagtatcatagctcgggaaatcttagcatgttatggtctgaacagcaggagaagcttgatgttttaaattcacttgatcgcttatctgatttggcgtcagaagaagactcaacttttgaagacaccgttgagggctgtgctactcttgggaaaagagaatcttccgtgcatcgtgcaaattatgtgcgaattgtcagtaaacaaatggttggtatacatgtttctgtatgggtttcccgaaaactgaggcgacatgttaacaatctggaggtatcaccggttggggttggactcttgggctacatgggcaacaagggatcgatttccatcagcatgtctcttttccaaactcgattgtgctttgtctgctctcatcttgcatctggtcataaatcaggagatcaacaaaaaaggaatgctgatgtttacgagattttacaaagaacaaggttttcttccttgtttgctgctggtcgtccacaaaagattccttctcatgatcggattttctggttcggggatcttaactaccgcattgacctgccggactctgaagtgcgatatctggtgggtatgaagaagtgggatgaccttttgaagtctgatcagctaacgaaggagctagtaagtgggaatacttttgttggttggaaggaaggcttgattaactttccaccaacttacaagtacgaaaggaatacaaccagatatgttggcgagcttcataatgaggaggagaaaaaaagatctccagcatggtgcgatcgtgtgctatggtttgggaagggtaccaaacaactatcatattggagctccggtctgaacctctcagatcaccggccagtcagcgccgtcttcttggttgaagttgaagtgttcaatcaacaaaaactcgagagggtcttgaacttcaatcctggatttgtttcaaatggggattattacatgatggcagatccttaaaacttttttttttgagccagtggcattgtgcggggtatataaattttgcagtgattcttctgtaggatttagtcctgccattgtgtgaattgccacagtttttttggggaatacaccgataattcgggtcagaaatttatttgaccttaaccttagaggggc

SEQ ID NO: 3975 - DNA, 1141 bp, Zea Mays
agaaaccgcgtctacagcacagaggcggcggtgcctagggcacagagaaggcggcggcgacatctatactggctgaccggcgccattccatcggtgtccgcttctcgcaggtcatgtgtgacctgcttggtgtggttgctcgacactctcctcaattggtgatattttcttttggagcccaagttcttcgtctaaggacgaggaggggtgggtgctgattcacttagtggcaagcttcgactactctcaaatcatcgacatcctgcttgagcgaagcatatcttatggtgagcgtgctgaacacgaaggacgaggagtggtgggcgctgattcactcagtggcaagcttcgactactctcaaatcatcgacatcctgcttgagcgaagtatgagactgacgcggcatatcttatggtgagcgtgctgaacacgaaggacgcgtaggggtgggcgctgattcactcagtggcaagcttcgactactctcaaatcatcgacatcctgcttgagcgaagcatatcttatggtgagcgtgctgaacacgaaggacgcgtaggggtgggcgctgattcaaccagtggcaagcttcgactactctcaaatcatcgacatcctgcttgagcgaagcatatcttatggtgagcgtgctgagcacgaaggacgtggaggggtgggcgccgattcactccatggcgtgctccgacaactctcaaatcatcgacatccaccttgagcgatctgtattcggttcaagcggctttgatgcagctccagctgaccatcctcttgtcagtgggaatggttacgagcatacctcatgcactatttgctgagttaattggataagaggtttgcttatgcttgtgaggaagacaacaagagttcaattagtcgaacatgaaaatagtctaaatgcttgcgcttaagcggggaaaaacaataattcttcctattgtgatggcaaaaggtgtcctcgaaaagaacagaaccaaaaaatgttcctattgtcacggctcaacctcatagaaaatcttgagttggcgtttttaagttctatggcaacgcacgtgcacatatctagtagtctaattataaaattaattatacatatgagaactaaaaggtaagacgaacctatta

SEQ ID NO: 3976 - DNA, 2240 bp, Zea Mays
gtctcgacggcgtggaaagaaaccgcgtctacagcacagaggcggcggtgcctagggcacagagaaggcggcggcgacatctatactggctgaccggcgccattccatcggtgtccgcttctcgcaggtcatgtgtgacctgcttggtgtggttgctcgacactctcctcaattggtgatattttcttttggagcccaagttcttcgtctaaggcatgactggacatggcattttggcgacatcagaatagcacatgctgctagtgttgtttgatattagagacactttttgatttgcttgcatgttttattttcagtttgaggggcacgagtggtcggacttgtttcagtttcagaaaactagggacacttcttttagtttcagaattgagagaagtgtattttagtttcaggattcataatgatagggacacttcactcagcatatgttcggttgtgattaaaaccatggttgtggacgttctccatagcatctttctactttattttagtttcatgattcaaaatgctagtgacacttctttctatttttattttatagaaagcaacattgtacatggcaggtctatgtaagcccactaggcaacgttttacagtgttgccaggtctatgtacagccggtctctagtgggcttacagtgttgcttccttgttgaattatgttgcatatatggcggggattaaccgaacaaacattttgagacaggtatttaaaccataaagatattaaatcccaaagggattaagtgaaaaggagggatccactcaatccctccctggattagatccacttggggaattaatccattgcaaccgaacaagcccttaaggggaaccaaaatttcagaagataggtatgagagttataaactattcttggaagaaaaggtgaggctacctgcacttgtttggatctcacagcaggaaacgagttgatgttgctaatccttcactaaaataggaaaactaggcagttttctagttaaattccatcttagggataggccctttgtagttagtacttacgaatgagatggacatgcaccctttctcttgatgcacacaagatttaatggtacaatatgaatacaatatgataacttccatgacatttcaaaatatatagttccactttagtaaaatagttttggatgcatttgctacaatttactgcatattcaaattgaggctaaccttgtggcgtcgataaccttgaggctagtcttttgtatgcatttgctacaatttagtgcattttctacacaaaggacgaggaggggtgggtgctgattcacttagtggcaagcttcgactactctcaaatcatcgacatcctgcttgagcgaagcatatcttatggtgagcgtgctgaacacgaaggacgaggagtggtgggcgctgattcactcagtggcaagcttcgactactctcaaatcatcgacatcctgcttgagcgaagcatatcttatggtgagcgtgctgaacacgaaggacgcgtaggggtgggcgctgattcactcagtggcaagcttcgactactctcaaatcatcgacatcctgcttgagcgaagcatatcttatggtgagcgtgctgaacacgaaggacgcgtaggggtgggcgctgattcaaccagtggcaagcttcgactactctcaaatcatcgacatcctgcttgagcgaagcatatcttatggtgagcgtgctgagcacgaaggacgtggaggggtgggcgccgattcactccatggcgtgctccgacaactctcaaatcatcgacatccaccttgagcgatgtatgagaccagcacgatacatctgtattcggttcaagcggctttgatgcagctccagctgaccatcctcttgtcagtgggaatggttacgagcatacctcatgcactatttgctgagttaattggataagaggtttgcttatgcttgtgaggaagacaacaagagttcaattagtcgaacatgaaaatagtctaaatgcttgcgcttaagcggggaaaaacaataattcttcctattgtgatggcaaaaggtgtcctcgaaaagaacagaaccaaaaaatgttcctattgtcacggctcaacctcatagaaaatcttgagttggcgtttttaagttctatggcaacgcacgtgcacatatctagtagtctaattataaaattaattatacatatgagaactaaaaggtaagacgaacctatta

SEQ ID NO: 3977 - DNA, 2281 bp, Zea Mays
aaaaaccttgtctcgacggcgtggaaagaaaccgcgtctacagcacagaggcggcggtgcctagggcacagagaaggcggcggcgacatctatactggctgaccggcgccattccatcggtgtccgcttctcgcaggtcatgtgtgacctgcttggtgtggttgctcgacactctcctcaattggtgatattttcttttggagcccaagttcttcgtctaaggcatgactggacatggcattttggcgacatcagaatagcacatgctgctagtgttgtttgatattagagacactttttgatttgcttgcatgttttattttcagtttgaggggcacgagtggtcggacttgtttcagtttcagaaaactagggacacttcttttagtttcagaattgagagaagtgtattttagtttcaggattcataatgatagggacacttcactcagcatatgttcggttgtgattaaaaccatggttgtggacgttctccatagcatctttctactttattttagtttcatgattcaaaatgctagtgacacttctttctatttttattttatagaaagcaacattgtacatggcaggtctatgtaagcccactaggcaacgttttacagtgttgccaggtctatgtacagccggtctctagtgggcttacagtgttgcttccttgttgaattatgttgcatatatggcggggattaaccgaacaaacattttgagacaggtatttaaaccataaagatattaaatcccaaagggattaagtgaaaaggagggatccactcaatccctccctggattagatccacttggggaattaatccattgcaaccgaacaagcccttaaggggaaccaaaatttcagaagataggtatgagagttataaactattcttggaagaaaaggtgaggctacctgcacttgtttggatctcacagcaggaaacgagttgatgttgctaatccttcactaaaataggaaaactaggcagttttctagttaaattccatcttagggataggccctttgtagttagtacttacgaatgagatggacatgcaccctttctcttgatgcacacaagatttaatggtacaatatgaatacaatatgataacttccatgacatttcaaaatatatagttccactttagtaaaatagttttggatgcatttgctacaatttactgcatattcaaattgaggctaaccttgtggcgtcgataaccttgaggctagtcttttgtatgcatttgctacaatttagtgcattttctacacaaaggacgaggaggggtgggtgctgattcacttagtggcaagcttcgactactctcaaatcatcgacatcctgcttgagcgaagcatatcttatggtgagcgtgctgaacacgaaggacgaggagtggtgggcgctgattcactcagtggcaagcttcgactactctcaaatcatcgacatcctgcttgagcgaagtatgagactgacgcggcatatcttatggtgagcgtgctgaacacgaaggacgcgtaggggtgggcgctgattcactcagtggcaagcttcgactactctcaaatcatcgacatcctgcttgagcgaagcatatcttatggtgagcgtgctgaacacgaaggacgcgtaggggtgggcgctgattcaaccagtggcaagcttcgactactctcaaatcatcgacatcctgcttgagcgaagtatgagaatgacgcggcatatcttatggtgagcgtgctgagcacgaaggacgtggaggggtgggcgccgattcactccatggcgtgctccgacaactctcaaatcatcgacatccaccttgagcgatgtatgagaccagcacgatacatctgtattcggttcaagcggctttgatgcagctccagctgaccatcctcttgtcagtgggaatggttacgagcatacctcatgcactatttgctgagttaattggataagaggtttgcttatgcttgtgaggaagacaacaagagttcaattagtcgaacatgaaaatagtctaaatgcttgcgcttaagcggggaaaaacaataattcttcctattgtgatggcaaaaggtgtcctcgaaaagaacagaaccaaaaaatgttcctattgtcacggctcaacctcatagaaaatcttgagttggcgtttttaagttctatggcaacgcacgtgcacatatctagtagtctaattataaaattaattatacatatgagaactaaaaggtaagacgaacctatta

SEQ ID NO: 3978 - DNA, 1811 bp, Zea Mays
attaaacccccaaaacctctgagagacgaaaccccaaggcggagccggaggacccgatggaaaagaaggatctgctcgccgtccggaagaggctgcctgcggcggcggccaagcggaggcacaaggtggtgacgcccgctaaggccggcgccgggcgtctcgcgaaggtgatcgctggatacctcgcgtccgactcctacatgtacgcgccgctgatctccgctccgccatctctcccaccgccgcctccggcgtcttcggtggcgccatccgcgacgcctcttatttccactcctgcccaagtttataaactctgccaatcctatggtgtcaatcctgagggaagggtaatggttaacaatctgtttgggggtcagcatgatttatggaagagaaagtcttgtgcgccagcggctaaattctaggtgaggaggatgaggcactgagcaatggattgcagcaggataggaaagaaatcactggtgcaaaaatacagaggctctttgcaagctacattcactgtctagaagtatctgtggacatgttcttggagctgtgcttctagcatgacctttaagagctacaatacaatagttgtttctatgatctgttatgttaatgactaggtactgtggcttagcaatctgccttcttctggagttctcatgtgatcgctcactatttaatatagattgtttagttaagtagctttatcttgtggtctatgttcactaatgcatccaaacttctcatattgcccagtatatcatctgttcctgtctatttttgttaaggattcgatcaggagcgattgagcgctcccaaaactgataaatcctgccatttgtagcttgttgcttctccttccttcatccatgctgaattgtgatattgttagtttcttgcatttggtgtttatttttatgttatccatcccatcatacttgatttgatggtcttgattttctaacgtgaaccaaattggcgtagagaatgagcattttggaaaacatgaataccgtagagcccttttttctcttgagtcttggattgcagctgttaatctgtcatgttgttcttgttttactcccttttctgtatgctgtgctttctgttctctccttcagacttctcaggaattacagcgtgtccactaaggtatccttccatgatgttgaaacatcattcttgggccacttccattattgatcttcgatgtagcttctgtttgagtttgataaggttgtgtcgaatgatgagctcgtgggggcaagggcaagcgtggacaatcatgagatttcatctaacttaagcatggttgaatatgaccacttgtaatgtccggccttatcagagaagtacatctccatggccatggctgagatttttgtggtgcttaatgtggggataaatgatatttaatcagtggtccggaactgcctggcaaatccatacggaaagaaggaaggtggcttatctgaattagttggaacagaagcacaggacaagtcacatgtgtgcacatggcttagagacccacatctgcatggacttccaactggatttggctatatgcattgcaggtgcaaacaaaactttctgcaagagctaaaggacgaactagcagcccctgattaaaagtggaggttatgaatcaatacgacacaaaggagatcaaacatagagaagatagatttatcgtgggttttttttcactctgggtgttgaatttgtgatccaaattataaagaagatagctcgtgtcggcgagcggagcgaaagcccgtcgctggcaggtttgaatcggagcg

SEQ ID NO: 3979 - DNA, 1435 bp, Zea Mays
cgcaccaggaggcgaagagaataacaaaacctggcctgcgccttccctgcggcgacctgggaggcgaatgcggccgcgatgtggagcatcgcacccgccgcgagcgggcagcacttgagtgatccctccacagccagtgccggcgcgtgctcgccgtcgagccgtccgtcccggaggcacctcacgaccgcctccgccatcctccccgccgccgccggccgccgcttagtgcctaaaccctagcccccacaagagcccgagacgggtcgccaaactcccggaaggcctggaggcaagagtaacgcggggcccagctgtcagagaaacacgggaccccttacccgtgtcggatataatcaagccgtcgtttgaccccgcctcgaaaccttttgccgtcttgcggcggccttctgctccgccgctcgttctcatatcttgcggcggcctggggaaaaagaggagagatcggagatgaaggcgtgtgcgaaggctgcgggggagaggctgtcgctggtctgtgctccgtcaactaggcagcctctagctcggagctctgcaggagcagttaatcgtatttatgagatcaaaggacgcatacaaacaaggcctctggcaatttgtgttggtgatgtctcagacatatcacggtttgctttagtggaccacttgccacatggcttgcttgatagtctacttcctgggcctgtcactattgttctaaaacgaggtgaaaacagcatattagagagatcacttaatcctggcttggatagcattggagttcgtgtgccggatctggatttcatacgatccattgctcgtggtactggaagtgcacttgcactcaccagcgccaacttaagcggacagcctagtagtgtctgtgtcaaagatttcgagggtttatggccacattgttcatatgtctttgatggtggagtacttccttctgggcgtgctggttcaacaatcgttgatctaataacaccaggagtttacaagatattgagggatggaagctcaaggaaggaaacagcagcagtgctcggcaagttcggctttgttgaagcgttgtaactactcggcactttaagaaagtaagcacgatcaaagagtggctgtcttatccacattatatcttgtttaattagtgatacattagagcttttgttgctgtttgtgcttttcttttacatcttcaaacttattgtattattgcgaatgtgatgttgagtagaataacagagttcacattatttaagctgtgtagagtgtgtgacatgggcttgttttgtagcaaatgaagcagctcagttgtggattttggatgtgttgtgaacgaaaatatgatattttcttatgcctgttcttcgcccatggttctgcttgttagcttctacgtgacatcaagtcgttggttacagggcgtactaaa

SEQ ID NO: 3980 - DNA, 1600 bp, Zea Mays
tgcggcgacctgggaggcgaatgcggccgcgatgtggagcatcgcacccgccgcgagcgggcagcacttgagtgatccctccacagccagtgccggcgcgtgctcgccgtcgagccgtccgtcccggaggcacctcacgaccgcctccgccatcctccccgccgccgccggccgccgcttagtgcctaaaccctagcccccacaagagcccgagacgggtcgccaaactcccggaaggcctggaggcaagagtaacgcggggcccagctgtcagagaaacacgggaccccttacccgtgtcggatataatcaagccgtcgtttgaccccgcctcgaaaccttttgccgtcttgcggcggccttctgctccgccgctcgttctcatatcttgcggcggcctggggaaaaagaggagagatcggagatgaaggcgtgtgcgaaggctgcgggggagaggctgtcgctggtctgtgctccgtcaactaggcagcctctagctcggaggcaagaagattaccctctcaacatgagacgaagtcacaagtatcctgctcggttagggtgtcagaaaacacagctcacagaatagatgccacagcagaaaatattttcccagcagtgaaagatcatgtcttgaaagcaactgatgcaatcaacagaggagaagtgattgcggtgcctactgataccatatacgggtttgcatgtgatgcatgctctgcaggagcagttaatcgtatttatgagatcaaaggacgcatacaaacaaggcctctggcaatttgtgttggtgatgtctcagacatatcacggtttgctttagtggaccacttgccacatggcttgcttgatagtctacttcctgggcctgtcactattgttctaaaacgaggtgaaaacagcatattagagagatcacttaatcctggcttggatagcattggagttcgtgtgccggatctggatttcatacgatccattgctcgtggtactggaagtgcacttgcactcaccagcgccaacttaagcggacagcctagtagtgtctgtgtcaaagatttcgagggtttatggccacattgttcatatgtctttgatggtggagtacttccttctgggcgtgctggttcaacaatcgttgatctaataacaccaggagtttacaagatattgagggatggaagctcaaggaaggaaacagcagcagtgctcggcaagttcggctttgttgaagcgttgtaactactcggcactttaagaaagtaagcacgatcaaagagtggctgtcttatccacattatatcttgtttaattagtgatacattagagcttttgttgctgtttgtgcttttcttttacatcttcaaacttattgtattattgcgaatgtgatgttgagtagaataacagagttcacattatttaagctgtgtagagtgtgtgacatgggcttgttttgtagcaaatgaagcagctcagttgtggattttggatgtgttgtgaacgaaaatatgatattttcttatgcctgttcttcgcccatggttctgcttgttagcttctacgtgacatcaagtcgttggttacagggcgtactaaa

SEQ ID NO: 3981 - DNA, 1602 bp, Zea Mays
tgcggcgacctgggaggcgaatgcggccgcgatgtggagcatcgcacccgccgcgagcgggcagcacttgagtgatccctccacagccagtgccggcgcgtgctcgccgtcgagccgtccgtcccggaggcacctcacgaccgcctccgccatcctccccgccgccgccggccgccgcttagtgcctaaaccctagcccccacaagagcccgagacgggtcgccaaactcccggaaggcctggaggcaagagtaacgcggggcccagctgtcagagaaacacgggaccccttacccgtgtcggatataatcaagccgtcgtttgaccccgcctcgaaaccttttgccgtcttgcggcggccttctgctccgccgctcgttctcatatcttgcggcggcctggggaaaaagaggagagatcggagatgaaggcgtgtgcgaaggctgcgggggagaggctgtcgctggtctgtgctccgtcaactaggcagcctctagctcggagctttgttaaggcaagaagattaccctctcaacatgagacgaagtcacaagtatcctgctcggttagggtgtcagaaaacacagctcacagaatagatgccacagcagaaaatattttcccagcagtgaaagatcatgtcttgaaagcaactgatgcaatcaacagaggagaagtgattgcggtgcctactgataccatatacgggtttgcatgtgatgcatggagcagttaatcgtatttatgagatcaaaggacgcatacaaacaaggcctctggcaatttgtgttggtgatgtctcagacatatcacggtttgctttagtggaccacttgccacatggcttgcttgatagtctacttcctgggcctgtcactattgttctaaaacgaggtgaaaacagcatattagagagatcacttaatcctggcttggatagcattggagttcgtgtgccggatctggatttcatacgatccattgctcgtggtactggaagtgcacttgcactcaccagcgccaacttaagcggacagcctagtagtgtctgtgtcaaagatttcgagggtttatggccacattgttcatatgtctttgatggtggagtacttccttctgggcgtgctggttcaacaatcgttgatctaataacaccaggagtttacaagatattgagggatggaagctcaaggaaggaaacagcagcagtgctcggcaagttcggctttgttgaagcgttgtaactactcggcactttaagaaagtaagcacgatcaaagagtggctgtcttatccacattatatcttgtttaattagtgatacattagagcttttgttgctgtttgtgcttttcttttacatcttcaaacttattgtattattgcgaatgtgatgttgagtagaataacagagttcacattatttaagctgtgtagagtgtgtgacatgggcttgttttgtagcaaatgaagcagctcagttgtggattttggatgtgttgtgaacgaaaatatgatattttcttatgcctgttcttcgcccatggttctgcttgttagcttctacgtgacatcaagtcgttggttacagggcgtactaaa

SEQ ID NO: 3982 - DNA, 2372 bp, Zea Mays
ttacggcttcacccgctgccgtggccggagatctcacatcactacaccagccaattttatcaagctcgctcgccgtcacactgcgccaccagcggcgatcccgccatggcctcctggctcaaggtcgccgaagacttgctcgaagtcgtcgaccggagggccaagatcgtggcaacagaactgtcggatgagcagtctacctctcagccttcaggaccaaacaaccaagaagtgcaagcaaagaagggaaagccgagggagaagggtccattgaagctcactaatgccgatggtggcaacaagatatctgctcagaaggaaaagaggagtaggcaacggccgcgagagcggatgaagatcgagaagatcaggccttcgccacctgcaggttcatcaagtgttgataccagtgctagtgaaccagaagtcactccgatcgatgttaaggaagtgggtaatgagggtacattggagaaaggagagaaagagattgctgttgaaagctatttttcagttatggatgcaaaaagtgagtcgagcagcagtaaccagacttccgagattggttcagtgattaatttggaggagagagactctactgtggctgttatccaggacacaaatgcgtctgaattgccaaatacagaggttactggcaaactgcaggaatcaaagaaagcgagtgtttcagattcatcagaaagcatagaagatcgacgcaaacaaaaatctgatacaatttctgtgaaagaacaagaccaacttgaggaggctcagggattgttaaaaagtgctgtcaagactggccagtcaaaagaagctaggttagctcgggtttgtgctggactttcatcccgcctccaagagtataagtctgaaaatgcacagctggaggaacttcttgttcaagagagagagaaatctacattgcatgaagctcatataaagcaactacagcaagagttatcaatgtccagagtagaaggttcaagagctgaattgaatatggttgatgctttgactgcaaaaaatgcagagattgaatctcttgttaaatcattggactcttggaagaaaagagcagcaacttcagaagaaaagcttgcttctttagaggaagatatagatggtctcaagaggaactgtgaacttactgaaaccagagttatacaggctttacgggaggaacttgctaccacagagcgtagggctgaagaagagcgcattgctcataatgccacaaaaatggcagctgttgagagagaagtagaactagaacatcgggctgttgaggcatcgagcgctttagctagaatccagagagctgctgatcaaagctcatcaagagtgctggaattggagcacaagttggctgttcttgaggttgaatgtgcttcattgcaacaagaactacaggagatggaagctcgtaatcgccgcgtacagaaaaaaccttccgaagaagctaatcaagttcttcagatgcaggcttggcaggaagaagttgagcgtgcacgccaaagccaacgagaggcagaggcaaagatatcatccttggaggcagagttgcagaaaatgagagttgaaatggctggaatgagaagagatgcagagcattattctagacaggagcatgttgaacttgagaagagataccgtgagctaactgacttactgtaccacaagcaaacacaattggaatccatggccagcgaaaaggctgcgttagagttccaactggagaaatcattgaaacaatttcatgaagtgcagattgaggcagaaaggagtaaagctactcgcagatcagcatcgtcgtgggaagaagatgctgatatcaaggcattagagcctcttcctctacatcatcgacacatggcaacagcaaatcagcagttacaaaaggctgcgaagcttttagacacaggagctgtgcgcgcaacaagatttttgtggcgacatcccgttgcacgagtcagcctgctgttctatttggtgttcgtgcatttgttcttgatgcacttgttaaaccgccttcaggacttcgcgtccagagaaggaacatcagccatgggggatctggccagcgcgaacctgccatagcccatagtctctgtgcccttcttgttgattcaggcattccccactgattcttggtccacatgccttcaaagtttcatttcatcctcctgtttctttttttttccgtcttccccatcttttgtaaagtagtagtgttcgttgtttggccatgcgctgtataatccattcttttacattgactgatgagtcagattgagtatgtaccaagtaccttgacatgatataccaagccaattgagccagttcttgtaccctcgagtctcttcaag

SEQ ID NO: 3983 - DNA, 1756 bp, Zea Mays
gcctctcaagctcaagggctcaaggccattagcgtaattacaaaattgtaattaattctcaatctcaaggttagtaacgtaattctagagcttccgagcagaaaaggtacggagtcggaaggatatgatcgcttaggagtgcggctagggttttttcttgtcacaccttccctcggtcccttccatcttctagccgccgccgccgccgccgctgcccaaaaccctacctaccctcttcttccccctcactctcctttcatctccattctaatggcggcccaacccgtccggcgaagctgctagtgcttgtatctactatcttcatcaggtacttcgccatcctactgaagtattccccgccgccgctgccatggccaccctcaaccctttcgaactcctcggcgccgacgacaacgacgacccgacgcagctgattgcggcggcggcggctgctgctcagaaagccgaggcgaagaagtccgccgtggcgcctgctgggaaggctgcccagcctgcggcgaccaccaagttcccgaccaagcccgctcctccctcgcagacggttcgggatgcacgcggcggtggctcatcagctcgtggaggctttggccgtggtgaacgtggccgtggcagaggtggacggggatatggccagaaccgtggcttcagtggtgacaatggcaatgagttccagggaggttatggtggcggaggctatggggatggtgctgtaactggtggatctgaaggagaaagggagagagagactcgtcccccgtaccgtggcggagaaactatgagcgccacagcgggactggccatggctatgagatgaagcgtgatggcgcagggcgtgggaactggggcactgccactgatgaacttattgcccaggatgcagaggactctccgaagatggaggaggctgctcctgttgctgagaaacaaggtgagcagaatgatgccccagcagcagatgagaacaaagataacaaggatgctactgcaaatgaggaggaagaaaaggaagaggacaaggagatgactctggaggaatttgagaaaataagagaggagaagaggaaagcactacttgcattgaaggctgaggagaggaaagttgaagttgacaaggatttgcagtctctgcagccactttcaaacaagaaagaaaatgatgaagttttcattaagctgggttctgacaaggataagaagaaggaaaatgctgagcgtgatgagcgtgccaagaagtcggtgagcatcaacgagttcctgaaacctgctgaaggagaaaggtactacggcggccgtggccgtggaaggggccgtggggatcgtggtggttttagaggcggatacggagggggatacagtcggcgcccagctgctgctgtcaccgagcgttgtgttgtctgctgttgtcatatttaaattttgtccgacgttaaatttctgtgccacggtttaaacggaacaaataatgatgttgcatgtggctatctttagttatgtggtacttgacgttgaataccggagttgttgtttatcagaattaacctccaatttttgtaggccagcttttaccattttgttgtcttagcatgcttgcttgtttggctgtcctgtatggcactgctgcagctgcaatccatattagttgcagctggattaaagccggagtgaacttgtcacctcttgcttgccttacatttttgtgtgtttatctttgtgcggtctgcgttttatacttgag

SEQ ID NO: 3984 - DNA, 696 bp, Zea Mays
cacgatccggcccgagatccgtgccgatgtggacggcgagaacccgaacctgtacttcagcaaggatgacgtggtgctgtgcgtgctgccgctgttccacatctactcgctgaactcggtgctcctggcggggctgcgcgccggctgcgccatcgtgatcatgcgcaagttcgagatcggcgcgctggtggagctggtgcgcgcgcacggcgtgaccgtggcgcccttcgtgccgcccatcgtggtggagatcgccaagagcccccgcgtgggcgccgccgacctcgcctccatccgcatggtcatgtccggcgccgcgcccatggggaaggacctccaggacgcgttcatggccaagatccccaacgccgtgctcggccaggggtacgggatgaccgaggcggggcccgtgctggccatgtgcctggccttcgccaaggagccgttcgaggtcaagtccggctcctgtggcaccgtcgtcaggaacgcggagctgaagatcgtcgacccagacaccagcgcgtcgctgggacggaaccagccaggcgagatatgcatccgcggcgaacaaatcatgaaagagaagaacagagccctctccacaagttgcggacggtccgctcacgcaaagagtacctcaagtcctcgctccctacaagcgagatcacggtgcgctaggtgactggccaaaagagc

SEQ ID NO: 3985 - DNA, 1497 bp, Zea Mays
atgcccgccgtggacaccctcgaactcgttaccggctcccccaccgacattgcggccccatcagtgatctgtcccccaccaacccttccaccacgccgcggcggtataataacccggcttcctccccaattccgccactcctcagctcaggcgagcagcggagccgagcagagcctcgagatcccgcccaccatttgccctccggccgacgcggagccgatcgcttcaccggcagcgaggacgatgggttccgtcgcggaggactccaccgcggcagcggcagcagcggcgtcggtagtgttccgctccaagctacccgacatcgagatcccgcggaacctctcgctgcaggcctactgcttcgagcggctccccgaggtgtcctcccgcccctgcctcatcgacgggcagacgggcgccgtgcacacctacgccgaggtggaccgcctgtcgcgctccgcggcggcggcgctgcgcgggctcggggtgggcaggggcgacgtggtgatggcgctgctccgcaactgccccgagttcgccttggtcttcctcggcgcggcgcggctgggcgccgccaccaccacggccaacccgttctacaccccgcacgagatccaccgccaggcggccgcggcgggggccagggtggtcgtcaccgaggcctgcgccgtcgacaaggtgcgcgggttcgccgccgagcgcggcgtgccggtggtcgccgtcgacggcgccttcgacgggtgcctggagctgcgggccctggtggacgccgccgagccgctcgccgccgacgaggaggtcggccccgacgacgtcgtcgcgctgccctactcctccggcaccaccgggatgcccaagggcgtcatgctcacgcatcgcagcctcgtcaccagcgtcgcgcagcaggtggacggcgagaacccgaacctgtacttcagcaaggatgacgtggtgctgtgcgtgctgccgctgttccacatctactcgctgaactcggtgctcctggcggggctgcgcgccggctgcgccatcgtgatcatgcgcaagttcgagatcggcgcgctggtggagctggtgcgcgcgcacggcgtgaccgtggcgcccttcgtgccgcccatcgtggtggagatcgccaagagcccccgcgtgggcgccgccgacctcgcctccatccgcatggtcatgtccggcgccgcgcccatggggaaggacctccaggacgcgttcatggccaagatccccaacgccgtgctcggccaggggtacgggatgaccgaggcggggcccgtgctggccatgtgcctggccttcgccaaggagccgttcgaggtcaagtccggctcctgtggcaccgtcgtcaggaacgcggagctgaagatcgtcgacccagacaccagcgcgtcgctgggacggaaccagccaggcgagatatgcatccgcggcgaacaaatcatgaaagctttacctctcctcggcttgacgtcgagtggtctgctg

SEQ ID NO: 3986 - DNA, 2600 bp, Zea Mays
ctcctcctcgcttttccccatgccatttgtgcgcagctccgttcgaggattcttgggaagccctgtacctgactactggatccactaccaagctcttcaagttccaggatccattcctctttgtcgggcaagagctcttggcctctgtggattatcagcctgattcacaactctctgcaagaattcgagcgcagatgggccaagaaagcgcggctgacgcgattcctggtttgatggtttctgttggtgtttcgggctaacagactctcttttttttgtttacttcctcaaagttccacttcaacatatggatccgggcttcccgagttggaatctgatcactcgcgtcagtgcttcttagcttccttcatttgccgtcatggaggagcagaactcatggcttattaggaccaagttctcccatactgtctacactagagtggatccacgaagagtagcagctgttgctccggtgggcaaagatgtggtgctgccttttgctccgcttagtaaggatgttgagcggaagctgcagaaaattttcagtatgaagaagtctgcatcgatgcctgttgatcgggatgatgaagacacagggactgcattcaagcactgcgctagcttgccgctagtccggtcctcgcctcagcttgatagggacaaggtcaacaagcccaggagggcgggcctggaggttcctgcaagccccccgatgaactcagagagttgcaagacaccaaaggcaaggagcctggtcaagagcccaagttcgatgatgctcctgagctacttgaacaaggcaccatcaaaccaaggctacagtccgcaaaaggcttatggatctcggcccagaccgagatcaaagtccccccttcccagtatcgcgccttcggaagtgttcagggaagcgaagtctaccagcaagaggtttgcaagccctcctccacagcgaagaggatctgaaaagagtatctatggcaaatcgtttgctagacaggtgtcggatattggtcagagtcctgattggtgttcaactccagtggtatctggtaagcacaagtctcaaaagaatagtgcttggtcaaggaaatccagcggtggaaggaggattagcgcagtaaaccctgcggatgatcgtagggcgcagatggttagaatgaatcaggcggtgcagacgacgttcgattggacgctcgatccatccaagctgcttgttgggcacaggtttgctagtggagcgtgtagccggctgtacaaggggttctatgatgagaagccagttgcaattaaatttatccgccaacctgatgatgacgacaatgggaagacggctgcaaagcttgagaagcagtataacagtgagatcaattcgttgtctcacctgtaccataggaacgtgatcaagcttgtagcagcctacaaatgcccaccggttttttacatcatcaccgagttccttcccggaggctcgttaaggtcatacctaaacaacacggagaaccacccaatccctctggagaagaccatatccatcgctctcgacatcgctcgaggtctggagtacgtacactctcaagggatcgttcaccgcgacatcaagcccgagaacatcctcttcgacgaggactcgtgcgtgaaggtcgctgatttcggtatcgcctgcgaggagaccttgtgtgacgtgcttgtggaggatgaaggcacctacaggtggatggcgcctgagatgatcaagcagaaggcgtacaaccggaaggtggacgtctacagcttcgggctggtcatgtgggagatggtgtccggtagagttccttacgagaacctgacccctttccaggtggcttacgcagtggccaacaggaacttgaggccaacgatttctccagaatgcccatcggccctcgggcccctgatcgagcagtgctgcgccttgcagcctgacaagaggcccgacttctggcagatcgtcaaagtcctggagcagtcccactccatcctctcgcagggtggctgcctcgacgcgcagaagagcggcacctgccaggaccccaagaagcggctcatgcagtggatccagaagctgaaaccaacgcatggcgcctgagtaaccgagttcttacaggctatagcatcgtttcagccgcagttttttttttcttttctgtctagttgggtatgctctcagtagtttagacctgttaaggaggatccttggtttaaggaaccagcgttctaaggcggatgctcgtagctgtgtgaccaaccactggtctgcgagcatagatcttgcagtagctgtacatggttatgcttttgcatctcgtctccccatcatgttaaaacttccctgcaggttgttctcatggatggtaccatagtgtgtgcggtgtgcggtgtgccccctcactcgttgagctgaaagcgagaggaaaatcatacgacgcagagttgactcctgaggccgtctttcgggaaagggtcgtatgctaacacaattattgcgcctttcccttctattgttagcagctgccctgccgtgcttattgtcatcatgatgctgatatctgagacagcaacatctgatggctgcttgtctaaag

SEQ ID NO: 3987 - DNA, 2617 bp, Zea Mays
tttttttgctcccccaccccgatgacattggaaagagtcaaaggccctcaattttgaattgctggattcttgggaagccctgtacctgactactggatccactaccaagctcttcaagttccaggatccattcctctttgtcgggcaagagctcttggcctctgtggattatcagcctgattcacaactctctgcaagaattcgagcgcagatgggccaagaaagcgcggctgacgcgattcctggtttgatggtttctgttggtgtttcgggctaacagactctcttttttttgtttacttcctcaaagttccacttcaacatatggatccgggcttcccgagttggaatctgatcactcgcgtcagtgcttcttagcttccttcatttgccgtcatggaggagcagaactcatggcttattaggaccaagttctcccatactgtctacactagagtggatccacgaagagtagcagctgttgctccggtgggcaaagatgtggtgctgccttttgctccgcttagtaaggatgttgagcggaagctgcagaaaattttcagtatgaagaagtctgcatcgatgcctgttgatcgggatgatgaagacacagggactgcattcaagcactgcgctagcttgccgctagtccggtcctcgcctcagcttgatagggacaaggtcaacaagcccaggagggcgggcctggaggttcctgcaagccccccgatgaactcagagagttgcaagacaccaaaggcaaggagcctggtcaagagcccaagttcgatgatgctcctgagctacttgaacaaggcaccatcaaaccaaggctacagtccgcaaaaggcttatggatctcggcccagaccgagatcaaagtccccccttcccagtatcgcgccttcggaagtgttcagggaagcgaagtctaccagcaagaggtttgcaagccctcctccacagcgaagaggatctgaaaagagtatctatggcaaatcgtttgctagacaggtgtcggatattggtcagagtcctgattggtgttcaactccagtggtatctggtaagcacaagtctcaaaagaatagtgcttggtcaaggaaatccagcggtggaaggaggattagcgcagtaaaccctgcggatgatcgtagggcgcagatggttagaatgaatcaggcggtgcagacgacgttcgattggacgctcgatccatccaagctgcttgttgggcacaggtttgctagtggagcgtgtagccggctgtacaaggggttctatgatgagaagccagttgcaattaaatttatccgccaacctgatgatgacgacaatgggaagacggctgcaaagcttgagaagcagtataacagtgagatcaattcgttgtctcacctgtaccataggaacgtgatcaagcttgtagcagcctacaaatgcccaccggttttttacatcatcaccgagttccttcccggaggctcgttaaggtcatacctaaacaacacggagaaccacccaatccctctggagaagaccatatccatcgctctcgacatcgctcgaggtctggagtacgtacactctcaagggatcgttcaccgcgacatcaagcccgagaacatcctcttcgacgaggactcgtgcgtgaaggtcgctgatttcggtatcgcctgcgaggagaccttgtgtgacgtgcttgtggaggatgaaggcacctacaggtggatggcgcctgagatgatcaagcagaaggcgtacaaccggaaggtggacgtctacagcttcgggctggtcatgtgggagatggtgtccggtagagttccttacgagaacctgacccctttccaggtggcttacgcagtggccaacaggaacttgaggccaacgatttctccagaatgcccatcggccctcgggcccctgatcgagcagtgctgcgccttgcagcctgacaagaggcccgacttctggcagatcgtcaaagtcctggagcagtcccactccatcctctcgcagggtggctgcctcgacgcgcagaagagcggcacctgccaggaccccaagaagcggctcatgcagtggatccagaagctgaaaccaacgcatggcgcctgagtaaccgagttcttacaggctatagcatcgtttcagccgcagttttttttttcttttctgtctagttgggtatgctctcagtagtttagacctgttaaggaggatccttggtttaaggaaccagcgttctaaggcggatgctcgtagctgtgtgaccaaccactggtctgcgagcatagatcttgcagtagctgtacatggttatgcttttgcatctcgtctccccatcatgttaaaacttccctgcaggttgttctcatggatggtaccatagtgtgtgcggtgtgcggtgtgccccctcactcgttgagctgaaagcgagaggaaaatcatacgacgcagagttgactcctgaggccgtctttcgggaaagggtcgtatgctaacacaattattgcgcctttcccttctattgttagcagctgccctgccgtgcttattgtcatcatgatgctgatatctgagacagcaacatctgatggctgcttgtctaaag

SEQ ID NO: 3988 - DNA, 2631 bp, Zea Mays
ttcagtactctgcgacgtaccagcttagttcttcagggctggggttttggtcgatccgcttctctcctcaaaaggaaggattcttgggaagccctgtacctgactactggatccactaccaagctcttcaagttccaggatccattcctctttgtcgggcaagagctcttggcctctgtggattatcagcctgattcacaactctctgcaagaattcgagcgcagatgggccaagaaagcgcggctgacgcgattcctggtttgatggtttctgttggtgtttcgggctaacagactctcttttttttgtttacttcctcaaagttccacttcaacatatggatccgggcttcccgagttggaatctgatcactcgcgtcagtgcttcttagcttccttcatttgccgtcatggaggagcagaactcatggcttattaggaccaagttctcccatactgtctacactagagtggatccacgaagagtagcagctgttgctccggtgggcaaagatgtggtgctgccttttgctccgcttagtaaggatgttgagcggaagctgcagaaaattttcagtatgaagaagtctgcatcgatgcctgttgatcgggatgatgaagacacagggactgcattcaagcactgcgctagcttgccgctagtccggtcctcgcctcagcttgatagggacaaggtcaacaagcccaggagggcgggcctggaggttcctgcaagccccccgatgaactcagagagttgcaagacaccaaaggcaaggagcctggtcaagagcccaagttcgatgatgctcctgagctacttgaacaaggcaccatcaaaccaaggctacagtccgcaaaaggcttatggatctcggcccagaccgagatcaaagtccccccttcccagtatcgcgccttcggaagtgttcagggaagcgaagtctaccagcaagaggtttgcaagccctcctccacagcgaagaggatctgaaaagagtatctatggcaaatcgtttgctagacaggtgtcggatattggtcagagtcctgattggtgttcaactccagtggtatctggtaagcacaagtctcaaaagaatagtgcttggtcaaggaaatccagcggtggaaggaggattagcgcagtaaaccctgcggatgatcgtagggcgcagatggttagaatgaatcaggcggtgcagacgacgttcgattggacgctcgatccatccaagctgcttgttgggcacaggtttgctagtggagcgtgtagccggctgtacaaggggttctatgatgagaagccagttgcaattaaatttatccgccaacctgatgatgacgacaatgggaagacggctgcaaagcttgagaagcagtataacagtgagatcaattcgttgtctcacctgtaccataggaacgtgatcaagcttgtagcagcctacaaatgcccaccggttttttacatcatcaccgagttccttcccggaggctcgttaaggtcatacctaaacaacacggagaaccacccaatccctctggagaagaccatatccatcgctctcgacatcgctcgaggtctggagtacgtacactctcaagggatcgttcaccgcgacatcaagcccgagaacatcctcttcgacgaggactcgtgcgtgaaggtcgctgatttcggtatcgcctgcgaggagaccttgtgtgacgtgcttgtggaggatgaaggcacctacaggtggatggcgcctgagatgatcaagcagaaggcgtacaaccggaaggtggacgtctacagcttcgggctggtcatgtgggagatggtgtccggtagagttccttacgagaacctgacccctttccaggtggcttacgcagtggccaacaggaacttgaggccaacgatttctccagaatgcccatcggccctcgggcccctgatcgagcagtgctgcgccttgcagcctgacaagaggcccgacttctggcagatcgtcaaagtcctggagcagtcccactccatcctctcgcagggtggctgcctcgacgcgcagaagagcggcacctgccaggaccccaagaagcggctcatgcagtggatccagaagctgaaaccaacgcatggcgcctgagtaaccgagttcttacaggctatagcatcgtttcagccgcagttttttttttcttttctgtctagttgggtatgctctcagtagtttagacctgttaaggaggatccttggtttaaggaaccagcgttctaaggcggatgctcgtagctgtgtgaccaaccactggtctgcgagcatagatcttgcagtagctgtacatggttatgcttttgcatctcgtctccccatcatgttaaaacttccctgcaggttgttctcatggatggtaccatagtgtgtgcggtgtgcggtgtgccccctcactcgttgagctgaaagcgagaggaaaatcatacgacgcagagttgactcctgaggccgtctttcgggaaagggtcgtatgctaacacaattattgcgcctttcccttctattgttagcagctgccctgccgtgcttattgtcatcatgatgctgatatctgagacagcaacatctgatggctgcttgtctaaag

SEQ ID NO: 3989 - DNA, 1393 bp, Zea Mays
ccgccactaccctgctccctcccccaagccgccgccactccttctccctccccctttctctctcttctctctctaccgcccacctctctccacctcctctccccaagccgcgccaccaggagtgcagcagccgctagaagctgccatccgcccgccaggagttcagtcaatctcctgtctcctgagagccgccgcccgccgagtcccgctcgccgctcggtcgctcccgtgaggcgctcgatctcctcagcgccgcgcccacccagccacggtggagccacccttcgtcccgtcgtccggcggccggccctcaatccctcacgccctagcttctctgccatttccggtcagcccctcacgccctagctttcctatcaggcgctcggtcgctccctttgccacgcgctcctagcttctctggtcggctcttcctccgccatttccggttggatcctcctatgtgctcgacaaacggcaccagcgccgctgggtactgtcaccgcttcggtcgccggagcccggagatgtaaatgcgctggagttttcatgctgtcgctggaggaattgaggaagaaagtttggtaaccgtatactgctctaagaagttttgccagttttgatcatagccaagcttttgattcatcataatctgatcctgtaaccaatttctctccctatgtctagagcagcctcgtggccaatgcaattgatgccctggaactgccgaagggatctgcaattgctattgacatgcctatggatgttacctaatttcaggatgctaaggtaataatgcttggactggtacccagcatcgttcgtacttggaagaatacggactgtacagctggactagactggtcctccatccgatgcagttgaagacccaagatttgaacgacactattgtcacaccgaaagtgtgttcgatgaaatgcctccaacatccggaggtttctatttgtgaaagtttgcaggctaagacaaatgatagctattcaaggagctagaggctgctcaacataaagcatcaacagcaacctctggaacagctgaaaatgctctactggaagctaagtcagtgactgatcttaaatctaaagatttggagaagaagaaaagtgagctttgttcactgatacaagaagttggagtgcttttgtgaaggcttttgcgaatcacttgaagtgttagtacttttgtgaatgattttgtaaagtgtttgcaaatatgtgcaaaacataataacatgtgtaggttttgtgaatgattttgttgtggtgcttgttgatggtttatgtgatgtggatctatcattgtgcaatactaattaaatttgtatatctatgtgattatctgtataaaaattggtgatttgtgatgcttttgtata

SEQ ID NO: 3990 - DNA, 2822 bp, Zea Mays
ctacgggcactgctcccctactttcgtgtcctgctatcctttccgcgctgtttttcgctgtgccgcccgccctccccgcccgtgtggcatgcagtgtgtgttgttaggttcttcttgcttcgtccgtccggtgggattccctaggtgtggcggcctgaagtgtacgggtgtcgagtttgttgccttgttggtgagcattgtcaggagtgccggacggaggcggcgattactctataggttaacctacgccgccagattagtttggtggtggttagcctgggcctgtgttttctttggtttgctttattattgacaacctgtgacagttcagtgttgtggactctgatgacagtctgataccccactgccttcactgagtgctagagcccctccttgtcaattcactgtctggtgctgaatcgagttcattgaagatgccaaggtccgaatcagacagtgatgatgttttcttcgatgcatttgaagatgttctatctgcaggggaaccttcgttttcagaggattgcagcacaagtgatgaagtttcagggccaatgaaattagagtatgagatttgggcaaacgaaccaattagtgttcaagaaaggcgccaaaggttcctgaagggaatgagactcgatgatttcgtgtctacgaggataggttcttttcaatgccatggtgaaatcacagccgtcgagtcttccactgacatggaggagagaactgtcagtggcctttcttccggggattcatctgtttgtgacaatgagtcagattttgacggtgcctgttgcataagggatacggatactggaaagagatatattgtccacaatggtgcacacagcagtataactggcatgcccaaggaggttggatcagataaggtgatgactcttctggagtttgagagtttgcttggcctctctaggtctgttcaaaagttattgcggaggggatgtggtaacagtcctgcaaaagaaacaaaaagtgctaaggaaaaggacggcaaaagctcgtcaaggaaattcgttacaaagagaagctttggtggcatttgcaagtacgatgtccatgtgaaaaattgcacaaacagtataccaaccagaacaagagttcagcaccggaagaaaaaatttcttgaattctctgctgtgtacatggatcaagaaatcagagctcacaagggttcaattagggtcatgaaattcagcccatctggctggtatttagcaagtggcggtgaggattgtgctgtacggatatggcaaatcatagaagtagaagcatctcctaagttatacaggggagaggatccgcatgaaaaggtggaaaaagttcaggtctttaagacaaatataggaaagaagcacaaccctgcacttgcagttatacccaagaaggtttttcgtatatcagagactccattacatgaatttcgtggccatgcaagtgatatccttgatatggcatggtccaaatcagattgtctgttaacttcatctaaagataagacagtgcgcttatggaaaccgggctgcgacggttgtctcgcagttttcaaacacaaagactatgtaacatgtgttcagttcaaccctatcgacgagaaatacttcatgagcggttcattagatggtaaagtgcgcatttgggatgtgttggacaaacgagtaactggctggacttatacgcgaactatcataactgctttgagttaccagtcagatggaaagggttttgttgttggcactattgcaggcgcatgtcgtttctatgatcaatctggtgaaaacatccagctagagaaagaattgtttgtgcaagggaagaagaagtcagccgccagtcggatcaacaatctaaagttatgtacaagtgattccaatagggttgtagttacatcaggagattccaaaatccgagtcgtcaatggtgataccatccaaaagtttgaagggccttggaagtcgaaggctctgtcatcgccgtcattaacatcagacggcagataccttatatctgtgggcaaagattccaacgtctacatttggaacttggcgaactctagagatgcaagatcggttcattcgtgcgagctgttcttctccaaagctgtaactaccgcagtaccatggccgggagtgtaccaagatgggcacacgaagccttcctatctgactgagaaatactgcagcatgcccattttgcgccaccacggggagtgccagtccgctgagccgtggtcgttcgtggacggcagcaagggattggcgacatggcctgaagagaagttgccttctacagcaaagcctggaagcagcccgcagctgggcgactgtctctccatgatatccgccgcgtggagcacggtcatcgtgaccgccagccgcgatggcgtgatccgatcttttcacaactacggcttgcccgttagattgtgagcttcgagaccggtttgaggtagtcagtggagcgccgccatggttggtgactgataatccgctaaggttttgtaagtttttttttctttttcttttctggtcagagttactagaaattatttatgtaacatttttagatcattaatttcttgtgaagagatgatctgtagtcagtccaaggccaaacacttgtgctgttttttgctggatggttgtgacaaaagtaaaaaaaaactcaaccatccagttatagttagcgggaaaatatcctatgcaatcacttatcctggtgcaagcatgcaatcaagcgatctggtgcatccgatctagatctaattataactattattttatatttaacccctctacctaaaa

SEQ ID NO: 3991 - DNA, 2150 bp, Zea Mays
ggtgaggaacgcgcttccgtgcgtgcaggagggtccccctatttgttgggggacgggaaggttggcagttctctgtaccgcgcgctcgcgcccgaaatttcacaacaccaaacccgcaggggggagaagcgcaaagccacgaggagtgcgaggcgagggccgacaccggggacaagcacggcgcggcggcggaggcagcaatggcggcgctgcagagttggcgcaaggcgtacggcgcgcttaaggacaccaccaccgtcagcctcgccaatctcaactccgacttcaaggatctggatgtcgcgatcgtgagggccaccaaccacgtggagagcccgcccaaggagcgccacctgcgcaagattgtggcggcgacgtccatcgcgaggccacaggcggacgtcacttactgcatccatgcgcttgcccgacgactcgccaaaaccaggaactggatcgttgccctaaagacacttgtagtgatccataggcttcttcgtgaaggtgaccctgcattccgcgaagagtttctaacatttacacagagagtgcggattttgcagctgtcaaacttcaaggatgattccagcccagttgcttgggattatgcttcatgggttcgcacatacggtttatttttggaagaaaaactagaatgcttcagggttttgaagtatgacattgaagctgcacgtttatcaaagcaaggtcaaggacctgaaaagggccacagtagaactacggaattgaattctcaggacttgctggagcaattgccagcactgcagcaattgttatatcgacttattggctgtcgagcagaaggagctgcaaaaaacaattatctggtgcaatatgctctagcccaggttcttaaagaaagcttcaaaatttattgtgcaataaatgatggaattatcaaccttattgacaagttctttgagatgccaaagcatgaagcactaaaagcccttgacgtttacaagagggctgtccaccaggagcttcctgagcggcttcttctgacatacaaaccagaagaagaagttcatgataccgttccaattgtagcggagaaactgcaagttgttgaagaaattgctccagttccttcttcccaaatagctttgcctcccaagcctgagattgcagatactggtgatttactggggttaggtgattcaacccctactgtgttggcgatagaggagagcagtgctttggccttggccattcttccgacaggtattgataactcaacaacaactacacagcaagatagtggatttgatccaacaggatgggaacttgctcttgttactacaagcagcaatgcgactccactgtctatggagagtaatttgggtggtggatttgacaagctcacattggacagcctatacgatgatggaacctacaggcagatgcagcaacaacagctatacggatcagcccctcccaatccattcatggcaagcgatcccttcgccgtatcaaatcaagtagctcccccaccatcagttcaaatggcggccatggctccacagccccagcatttgcccatgatgattgaaccaaatcccttcggaccaccacagcagcatcacgcgggcgtcgctcctgcagcaaaccccttcctcgacgccgggttcggtgcgttcccggcagtaaatggaatgcatccacagaccaaccccttcggaggcgccgcacaacttctctagtcatatatactttgcaaagtttgcattacaattacatagaagatgtgcaatctgtagatacccacgcaacgatgcaagacaagcaattgacgtctgtggaatcgcttttctccgtcagaccgttaccaatcagggaatcgccatgttgcaccagcctcttctcgcccttccttaggctttggccgcttggcctttcttgtgtagctttctgttttgctgtgtctggttttccatcttccgtggcgagccattgcacccattgtaaagaaatttgtttcatcaggctttgggctgataaaatcatgagtacgtgccaataaggcaataacccatcagcgtttgcatttgtgtaactcctgatgaccgtgcgaatattttcgcaattggtcccaaaccacttttggcactattaaaaaacaggtagag

SEQ ID NO: 3992 - DNA, 1133 bp, Zea Mays
gtctgtataaatatacaaccccatcgaacctagaggtcaagggaagcattttaatatcctgatgttgtgtttctttcgtagtatcagggccacctacttcatctgttagtcggcgtcctgaccaagagaagtcaacatcaacctcaccagcaacaagaccccatagcgtcatccggctttgttgtactaacgtctctcctagggcaaaccattgctgtaaagatcaacaagaccaacttcacatcctgaaaagcgcaagttctgcccatccttagagggatccaaaatttctgataagtcacataaccaggagacaacagatctacacaaatgtatttctcgaatccatcattgtacgcctgatgatgaaaaaccaaatctctgtgtacttgttactggagcactaggtggaaggtttgatcacgaggcggcaaatatcaatgttctgtatctgttttcggacatgaggattgtcctcctatcagacgattgcttgatccgacttcttccaagaacacatcgccatgagctttatattgagtcgtctgttgaaggaccccattgtgggcttttccctgttggagcaccatcaacaagcacaacaactactggcctgaaatggaatctaagtgaatcaaagatgagatttgggagcatgataagcacatccaacattgtgcagtcggagaaagtaactgtagaatctgatgcagatctcttgtggacaatttctctgcgaaatctgacataagcagttcctagtttgttatcttttttcttctctttcctgtcaagtggcaaccaagctcttgtacagccacttttgtgtttatgagttgtgtgtctggtaaataaataccatctgatgacaaatcgatgaggtctcatcattagacaggatgtctaccacgatcttgaactgctgatgaattatgtgaataacacgagcaggcatgatggttgtatcctctctagttgtataactgtattgttgtacttgcaacggggtttcttgtataaaattgttctcaacagttcacactgtatggttggattttgtaatgagtctggcaattgggtacagtgatatatgctaatccatctgttctaatgtaagacattttagattttct

SEQ ID NO: 3993 - DNA, 1191 bp, Zea Mays
ttgagtaggtcaccatagttgaagccacctcccaatttctcatctttggcaccgggatggatctacttcatggagatcatcaagcatttgctaatgttgctggtcatgggtgtggaaacaaccatggcttggccatgttcgaggcagagggcatggtgttcctcctagtgactatggtggctaccaaggtccatcgtcatcttcgtctgatggacatctacaagctctgtgcactaacaagatctgtcaagtctacgacaaggtatgttccagaaataattgaaggggacatggattctataagacctgaagtaaaactgttctactctagtcagggatccaaaatttctgataagtcacataaccaggagacaacagatctacacaaatgtatttctcgaatccatcattgtacgcctgatgatgaaaaaccaaatctctgtgtacttgttactggagcactaggtggaaggtttgatcacgaggcggcaaatatcaatgttctgtatctgttttcggacatgaggattgtcctcctatcagacgattgcttgatccgacttcttccaagaacacatcgccatgagctttatattgagtcgtctgttgaaggaccccattgtgggcttttccctgttggagcaccatcaacaagcacaacaactactggcctgaaatggaatctaagtgaatcaaagatgagatttgggagcatgataagcacatccaacattgtgcagtcggagaaagtaactgtagaatctgatgcagatctcttgtggacaatttctctgcgaaatctgacataagcagttcctagtttgttatcttttttcttctctttcctgtcaagtggcaaccaagctcttgtacagccacttttgtgtttatgagttgtgtgtctggtaaataaataccatctgatgacaaatcgatgaggtctcatcattagacaggatgtctaccacgatcttgaactgctgatgaattatgtgaataacacgagcaggcatgatggttgtatcctctctagttgtataactgtattgttgtacttgcaacggggtttcttgtataaaattgttctcaacagttcacactgtatggttggattttgtaatgagtctggcaattgggtacagtgatatatgctaatccatctgttctaatgtaagacattttagattttct

SEQ ID NO: 3994 - DNA, 1417 bp, Zea Mays
gtggtcccgtttgacggcgctcgtgagaacagtccatgtccgtcgcagcacatcgagcggctacaaccaacttcagaattctgaaagggacacaccgtcataccgacagcgaagacctttgccgtttttattcttcctccgtctctgcctgtacagcggcggcttggccacctctgagcctcaagccctcaacctccctcttcggcgcgtaacgtcagtcctcaggtcaagatgttgtggcgcgcagtacgcagtatggatgtaataatgcattcttcgagtttccttcttccgaaactgtatcaacctgtcaacaaaccagtcaagaactatgctttagttgttctaaaccagcatcttccacgattcatgcctcgactctgggatcatgcaaacttgaggatctgcgctgatggaggagctaatcatatttttgatgagatgtatcagataaccaatgatgaagacaaaaaaagcaccagaaataagtatgttccagaaataattgaaggggacatggattctataagacctgaagtaaaactgttctactctagtcagggatccaaaatttctgataagtcacataaccaggagacaacagatctacacaaatgtatttctcgaatccatcattgtacgcctgatgatgaaaaaccaaatctctgtgtacttgttactggagcactaggtggaaggtttgatcacgaggcggcaaatatcaatgttctgtatctgttttcggacatgaggattgtcctcctatcagacgattgcttgatccgacttcttccaagaacacatcgccatgagctttatattgagtcgtctgttgaaggaccccattgtgggcttttccctgttggagcaccatcaacaagcacaacaactactggcctgaaatggaatctaagtgaatcaaagatgagatttgggagcatgataagcacatccaacattgtgcagtcggagaaagtaactgtagaatctgatgcagatctcttgtggacaatttctctgcgaaatctgacataagcagttcctagtttgttatcttttttcttctctttcctgtcaagtggcaaccaagctcttgtacagccacttttgtgtttatgagttgtgtgtctggtaaataaataccatctgatgacaaatcgatgaggtctcatcattagacaggatgtctaccacgatcttgaactgctgatgaattatgtgaataacacgagcaggcatgatggttgtatcctctctagttgtataactgtattgttgtacttgcaacggggtttcttgtataaaattgttctcaacagttcacactgtatggttggattttgtaatgagtctggcaattgggtacagtgatatatgctaatccatctgttctaatgtaagacattttagattttct

SEQ ID NO: 3995 - DNA, 1622 bp, Zea Mays
cggcggagcatctggaacccgactcccaagatggataagctcagtggttctgcacgtcttatgattgtttcagatcttgaccatacaatggttgatcatcatgacgaggagaacctgtccttgcttaggtttggtgccctgtgggaatctgtttactgtgaggattctctactagtcttctcgactggaagatcaccaactctttacaaggaattaaggaaagagaagcctatgctaactccagacatcactatcatgtctgttggcactgagataacatatggggaggcaatggttcctgatgatggctgggaagaatatctgaacaataagtgggacaggaatattgttgtagcagaaactgtgagcttttctgagctgaagcttcagccagagacagaacagcgcccgcacaaggtcagcttttttgttgataagaagaatgcccaggaagtgataaaatctgttgccgagagattggacaaatgtgggatgccaaaataatatatagtggtggccaggaccttgatatattacctcaaggagctggaaagggccaagcacttgcatatttgcttaaaaagctaagctcatgtggaaaaccgcccaacaatactcttgtttgtggtgactctggtaatgatgcagaattattcagcatccctggtgtacatggtgtcatggtcagcaatgcccaagaggaactacttcagtggtacacagaaaatgcgaaggataacccaaagataattcattcaaatgagagatgtgcagctggtattatacaagctattggacacttcaagctaggacctaacatttctcctagagacctgcagtttccttatgcaaaggaagcctctttcaaacctacagatgctgtagtgaagttctacgttctctatgagaagtggcgcagggctgaggttccaaagtctgattcagttataaagtacttcaaaaacatcactcatgcaaatggagttaccatccatcctgctgggcttgaactctcactccatgcatccattgatgcgttgggatcatgttatggtgacaaacaagggagaaagtaccgagcatgggtggacagactttttatcacacagactggttcagatagttgggtggggaggtttgacttgtgggaatcagaaggtgatgtgcgtgcgtgttctctgtcaagtcttgctttgattctgaaggctgaatccccagagggctttgtgctaacccacatccaaaagacatggctgaacggatactcgtcaggggttgagcaggcgtttaagctgtagagcagtataccgtctcggctcgtggttggagttttcttgagaatagaatagaataatgtacctgtttataatattaacttcccaaaaccgcactggaggatcaccagggagaggattcggtgccttctcctatttggcgcgtaagataaatgttttgtctcatggctttcatgagaagatgaaattgactcatcttggtatatatttacaaatcttgaataatgcagcgttatctatatccagggatgtcaacggcaatccagggaaattgggtttttacttcattactcattaatgctttatttggttagaagatgattgatg

SEQ ID NO: 3996 - DNA, 1778 bp, Zea Mays
gtgaggatagacgacgggtggcaccgcgcgacgcctccgcaccaccgtccatattcccccatcaaactgcgaaccgaaaaaggagaagacggacaacgaattgggatcgaaaaacatctccgttccccaccaccaccttcgctccttctgcttcgcccgtccccctccgtcgcgtcgactcccaagatggataagctcagtggttctgcacgtcttatgattgtttcagatcttgaccatacaatggttgatcatcatgacgaggagaacctgtccttgcttaggtttggtgccctgtgggaatctgtttactgtgaggattctctactagtcttctcgactggaagatcaccaactctttacaaggaattaaggaaagagaagcctatgctaactccagacatcactatcatgtctgttggcactgagataacatatggggaggcaatggttcctgatgatggctgggaagaatatctgaacaataagtgggacaggaatattgttgtagcagaaactgtgagcttttctgagctgaagcttcagccagagacagaacagcgcccgcacaaggtcagcttttttgttgataagaagaatgcccaggaagtgataaaatctgttgccgagagattggacaaatgtgggatgccaaaataatatatagtggtggccaggaccttgatatattacctcaaggagctggaaagggccaagcacttgcatatttgcttaaaaagctaagctcatgtggaaaaccgcccaacaatactcttgtttgtggtgactctggtaatgatgcagaattattcagcatccctggtgtacatggtgtcatggtcagcaatgcccaagaggaactacttcagtggtacacagaaaatgcgaaggataacccaaagataattcattcaaatgagagatgtgcagctggtattatacaagctattggacacttcaagctaggacctaacatttctcctagagacctgcagtttccttatgcaaaggaagcctctttcaaacctacagatgctgtagtgaagttctacgttctctatgagaagtggcgcagggctgaggttccaaagtctgattcagttataaagtacttcaaaaacatcactcatgcaaatggagttaccatccatcctgctgggcttgaactctcactccatgcatccattgatgcgttgggatcatgttatggtgacaaacaagggagaaagtaccgagcatgggtggacagactttttatcacacagactggttcagatagttgggtggggaggtttgacttgtgggaatcagaaggtgatgtgcgtgcgtgttctctgtcaagtcttgctttgattctgaaggctgaatccccagagggctttgtgctaacccacatccaaaagacatggctgaacggatactcgtcaggggttgagcaggcgtttaagctgtagagcagtataccgtctcggctcgtggttggagttttcttgagaatagaatagaataatgtacctgtttataatattaacttcccaaaaccgcactggaggatcaccagggagaggattcggtgccttctcctatttggcgcgtaagataaatgttttgtctcatggctttcatgagaagatgaaattgactcatcttggtatatatttacaaatcttgaataatgcagcgttatctatatccagggatgtcaacggcaatccagggaaattgggtttttacttcattactcattaatgctttatttggttagaagatgattgatg

SEQ ID NO: 3997 - DNA, 851 bp, Zea Mays
gaggaaggatactctggttcgatgaaatggcatacatattccaaccgtcctccgagaatacggcatgacttcagtcacagaaggcattgacgctattgcgacgactcgagtggttgtcaccggagacgtggccaacaactccaaacacgccttgactggccactctttcaaccgctccttcagcgggagcggggcggcaatggacatcgtcgtgtccagcgtcagagcttacctgagtgccctgaacaagatgtgcagcttcgctggcgctgcgagagccagcagcactgaggtgcctgggagcgcaagtgttcaacgcgcagaatgagctcggcggcgttcgcgttcgtgttagttctcgtatgggatgccaggatggactgtgcgttgtaagagcttgtcaagctgttgaggtgacatttcgtttcagtaacaggctgctcgatattatggggtaccccttgtcagtggggtgacgacaatgctgttctttttctgggaggatagtcccttcagcttagaacatgcaggaaattttggccctatgtagtgtacattttgtatctttaaacatactttcaataatgaaataatattagggtccatctagccacatgggtggccatcggcatgaaaatgatcgaaaataaatatttattcggtttgtcttttttttattacggataaataggatatagaatttacaatgaaaatatatattcttatttttaacattaaactcataaagattcataaaagataaaccttaaaattatcatatatcttctcaataaagtttggatatagattcagatataatttcgaatgttttttcttctttttttggttgt

SEQ ID NO: 3998 - DNA, 2661 bp, Zea Mays
cgtgtcagccagctccgctccgtggcgcctacgaaaccaccacccgtccggatccggatatattctccattccctgctgactgactgtgactgacatgtcgtcggactcctctccttttccagatcactcacatacacatttcgcgcatccactgactttaacacaagatccccgccagcgccgccgcgcgaccaccccttcctaaaccccgacgaccaccaaccatggccttcaacgctaaaccctactgctccaccaccgccaaaccgcccacccccgccgcccaccgctcgccgtccggcccgtccccctgcatctccgtccgcgccgccgccgtatccccccgcgcccggcactcagcctatggcctctccgccgccggcaacgcgtcctccagcaccgtccgcctccgcgcgctggcccagcgcacccgggcgcagccgcagcctccccggcggcggcccgagtacgtgccgaaccgcatcgacgaccccaactacgtgcgcatcttcgacaccacgctccgcgacggggagcagtcgccgggcgccaccatgacgagcgccgagaagctcgtcgtcgcgcgccagctggcccgcctcggcgtcgacgtcatcgaggccgggttcccggcctcctcccccgacgacctcgacgccgtgcgctccatcgccatcgaggtcggcaacccgccgccgggggacgacgggggcgcccacgtgcccgtcatctgcggcctctcgcgctgcaacaggagggacatcgacgccgcgtgggaggccgtcaggcacgcgcggaggcccaggatccacaccttcatcgccaccagcgagatccacatgcagcacaagctcaggaagacgcccgaccaggtcgtcgccgttgccagggagatggtggcgtacgcacgcagccttgggtgcgccgatgtcgagttcagccctgaggatgccggcaggtcaaatcgagaattcctgtaccatatactggaggaagtcataaaagctggggcaaccactcttaatatcccagatactgtcggatacactcttccttatgaatttgggaagttaatttctgacataaaggaaaacactcctggaattgaaaatgccattatttccactcattgccagaatgaccttggccttgcaactgccaacacattagcggagcacgacagttagaggtgactattaatggtattggtgaaagggctggaaatgcttcattggaagaggttgtcatggcaattaaatgtcgtggggagctcttagatggtctatatacgggaataaattcccaacatattactttgacaagcaaaatggtacaagagcacagtggacttcatgtacaaccacataaagctattgttggtgccaatgcctttgcccatgaaagtggaattcatcaggatgggatgcttaaatataaaggaacatatgaaataatatcgcctgatgatattggtttagcacgtgcaaatgaatttggtattgttcttgggaaactcagtggaaggcatgcagtgagatctaagctggtagagcttggatatgaaatcagtgacaaggaatttgaagatttctttaaacgctacaaagaggtcgcagagaagaaaaagcgtgtaactgatgaggacatagaagctttattgtcagatgagatattccagcctaaggttatttggtcccttgctgatgtacaggcaacatgtggaacacttggcttatctacagcaactgtgaaactgatagggccagatggagaggagagaatagcatgttcagttggaacaggtccagttgatgcagcttacaaggctgttgaccaaataatccagattccaaccgtcctccgagaatacggcatgacttcagtcacagaaggcattgacgctattgcgacgactcgagtggttgtcaccggagacgtggccaacaactccaaacacgccttgactggccactctttcaaccgctccttcagcgggagcggggcggcaatggacatcgtcgtgtccagcgtcagagcttacctgagtgccctgaacaagatgtgcagcttcgctggcgctgcgagagccagcagcactgaggtgcctgggagcgcaagtgttcaacgcgcagaatgagctcggcggcgttcgcgttcgtgttagttctcgtatgggatgccaggatggactgtgcgttgtaagagcttgtcaagctgttgaggtgacatttcgtttcagtaacaggctgctcgatattatggggtaccccttgtcagtggggtgacgacaatgctgttctttttctgggaggatagtcccttcagcttagaacatgcaggaaattttggccctatgtagtgtacattttgtatctttaaacatactttcaataatgaaataatattagggtccatctagccacatgggtggccatcggcatgaaaatgatcgaaaataaatatttattcggtttgtcttttttttattacggataaataggatatagaatttacaatgaaaatatatattcttatttttaacattaaactcataaagattcataaaagataaaccttaaaattatcatatatcttctcaataaagtttggatatagattcagatataatttcgaatgttttttcttctttttttggttgt

SEQ ID NO: 3999 - DNA, 909 bp, Zea Mays
ggaaaacgaagaagccgagactgagtactgggccggcccactttgattatttgtagcgaaggcttgcaaacatgtatatccgagtgaagcgcaacaagagtacctacttcattcaatgtgaaccaacagagacagctttgagcatcaaacagaagttgcactcgctgatagatcaacctcctagtagtcagcagttggtcttgtggcctagcagtgatgtgcttgaagactcaaagactttggcagatcaaaaggtggataacgattccattgttgcattggcactaagaaaagatgacggtgagtttgaggaagttttcatcgctaggccggaggatttcatgtcatcatcatgataaagattagtccatcatttctacaaagggaccactgcgcgttcttggagtggaccgtcgctctatgctggttcttctagaatctgggatgtggcttgcttgtccctttgggaggaaaaagaaaatcttttatctgttgtatgcgaatccatctgtgccttcatcacctaatgcactcgctgttgctgctggcattcctggttggccccattgctcgattcaactgcgctgtcggtcacataatgggcaacgcgtttggttggcgccacaagattacgacgacagttttgggcttgtggtttctctttctcagggcaaaattttagtgaatgtttggacagatttcgtctgctcttacattaatggttctttttttttttttttgcctttgtaagtcagtttcataatttggcagaattgttgcctactttggtccaccctttccgttctacaagttttttaatttgccgtttgattgcaaaagttcttgcgaaagtgacagaggcgacttctcaggagcttcagcttttgatttggtagtagcaactttttg

SEQ ID NO: 4000 - DNA, 5916 bp, Zea Mays
ccgcacacaagtcctcacgatatttagattcttatgcagctagttatacacgaattcaaattctatatttaaaaggagtaccaaacaggtccaatgtgtgtaataaaaagaaaaaaaaagattccagtagcagcagtaaagcccattcgtatgtggccctgctccggaccgaaagataaagcccatttgaaatccagctcggcctgctgtcagttcaggagcaggacgagtcggggtcggcgcggcggcaggccgcaggccggcagcaggctctcgcttcgctctctcgttgtctgtcgagaggaagaagacgaggcgagggacggcagcagtagcagctccagcatcttctagcttcttcattcatgggattcggtctctactaggattaggggtgcttcatttcatccgatccccaacgacttgacctgattctgatctcgacgacgatgcggaagcgggatctgggcatcctgctgctcgccgccttcgccatcttcttctccctccaccacgaaggcgacttctccttccgggagtcctggtaccacctcaccgacgaggacttccccatcaagtacgaggccgaccgcctgcccccgccgctcgtcgccgatctcaacggcgacggcaagcccgaggtcctcctccccacccacgacgccaagatccaggttctccagccgccccacgcccgccacctcaacgatgactccgccttccaggaggcccgtgtcatggccgacatctctctcctccccgacaacgtccgcctcgcctcggggaggcgccccatcgccatggccgtcggcaacgtcgaccgctcctacagacctggcgaggtcaggaagcaggtgctcgtcgtcgtcacctccggatggtcagtcatgtgcttcgaccataacctcaagaagctgtgggagcacaacctccaggacgatttccctcatgccgcccaccaccgcgaggtcgcaatctccataaccaattatactctcaagcatggagatgcaggcctcgtcatcgttggaggaaggatggagatgcagcatcataacacaacatggatgatcgccgtcgaagcgccagtgagaaacagggctctgaggctggcaatgcagacctgcgccattttgccctttatgccttcgctggacgtagtggcgaccgtagatggagccggaagaatgagaacatccagtcacagccatcagatgcttctgtgatgttaccacagcataattacaaactcgacgttcatgccctcaatagtcatcaacctggtcagttcgaatgtcgtgaattcagagaatcaatccttggcatcatgcctcatcattgggataggagagaggatactaccctacaacttgcacattttaggaagcataaaaggaaacaagttaagagaacgcctggaaaggctgttattaatagcgtgaacaagcccattgaacacaatccacctgggaaggatgcttccaatagaatagctagagctcttgggaaggctgcagatatggctaactcaaataaagccaggaaggcacagaggatgcagtatgttccgacaatcactaatcatactcaagtttggtgggttcctaatgttgttgttgtacatgaaaaggaagggatagaggttgtccatctagcttctggacgtacaatatgcaagcttcatttaaatgaaggaggccttcatgcagatattaatggagatggagttctggatcatgtccaggttgttggtggaaatggtattaaagagcagactgtcgtgagtggatcaatggaagtgctgaaaccctgttgggcagtcgctacatccggtgtgccagtgcgggagcaactttttaacgtctctatctgccattacaaccattttaatctgttccatcatggtgacttctcgagaagttttgggaggacattgatacagctggtttagaggtcgcgactcctatcctggtccagacagacgatgggcataaacacaggagaggaagccatggtgatatcatctttttgacaagccggggagaggtgacatcgtactctcctgggctgctcggccatgatgcggtgtggagatggcaagtatcatcaggggcgacatggtccaaccttccatctccatcgggaatgatggagaacatagtggtgcctaccttgaaggccttctccctacgtgcctatgacccgaaagaggtgatcatcgccggtggtgaccaggaagcggtggtgctctctccttctggtggcatactggccatgatcgagctcccagcgccccccactcacgctcacctcctggaggatttctccggggacggtctcaccgacatgattgtggtaacttccggtggaatatatggattcgtgcagacaaggcagcctggggctcttttcttcagcacgctggtggggtgcctgatagttgtgatcggcgtggtattcgtgtctctgcacctcagttcgtccaatgccgccaaacccagggcttcctcgtctgaatacagatgatgttttgatatgcaaggtcaagagacttttggtactcctatgttctagtagtctatatatttaaccaaatgagaattcgtgttattgtatgataagaattgttcctactagtatatctcatgatatactgatagtgcaatctcgttttttgttgtctaccttggtgttcctagcccccacaaccatttgtacgttggttttttttttaagtttgtttggtcagcaggtcaggcaacaatccagtccatctaatttgagtacatgatggtcaagattgtttcctggtcgacaagttgcctgcccggctataaacaaaatatgatgtcctagcatgcaaagctcgtcttgtctacagtagaatgtgtaaaatagaagatgcagacaagtttgaaatagaaaatgagatataaaatagaagacgtagacaagtttgaaatatagaatgagataggagatctgttgaagatagtttgaagttgaagatagtttgaagatagtcttattgtgttgtcacaattctaccaaagagagggaaagaaaaaaaaatgacaccacacgtcaggctcagctcacagaggccaccgccgccgtgttcctctgtcccgcgggcccccaccccacccgcgtcttcaacttcctgcctgccgctcttctccttgtttgttcccttccgtctaatttggctgcgggtgcaggtggaggccgaggccgaggccaacgccgcctgcgcctggcctgccgtgaggtggaggcggaggcggaggccgaagccaacgccgcccgcgcctggcctgccgttccgcgtcatcttcttccttcgcgtaacgacgccggccaggccaataaataaacaatttccaattccgttcctggaggacgtctgcacggggaccttcccagcgggcgacggccggctgcatccatggcggtggccttcctgctgctgggattgggtttcctccttggcctcctctccctggcgatcgcggaggggctgacgctcctttgggccatccgaagcctcacgcgccgcacatcggcctcacgcagcacgccgccgccatcactccccatccacccgacgccggcgcggtctgtgtctcgccacagcctcaaccgacagggcttcttatggatgctggagcaacccaaggatagcagcatcaatggcgctagcccagggatcagagacaggaagctcctcgtcgaggttttccctgtaaaaatgtctgctacgcttcaaggacattccctcaccttgtctggacccgatgatgcctcgcagctaaccattgacctgctcggttgcacagttgctgctgtttctgcatccaatctgccctcacgtaaatgggccaagaggtatccgataaaactggaaagcaaggaatctggtatttgcagggggagcaaggtatgctatgtttatgcagacacctcttgggagaaggaatcatggtgtaaagcactccgtcttgcttctactacggacaaggacaaactcaaatcccatgaaatgctgacccaagagttccgcagttacatgtcctctctgaaagctggatacccttcctttctgggaccctcgacactctccagtcaggaacatgtgcttgtggacaacactgtgaagaatgatggaccttcaaaactccgaggttttctcaaacgattggtgggaaagaaggcatctgccaaggcttctcaggagagcaaaacaggtccggcgccatctaaacaagatacaagccaacccagtactcctagctccactatgagtttcaacagccagctaccagcttcccccagtgcaaaggtggatgaaaagcttgccgatgacggtacactttgttggaacctcctaatctcccggttgttttttgatgctaaaatgaatgatgagatgaacaaagccatcagagcacgtattcagcgaacattgtcgaacaccagaactccagcctacattggtgagatcacgcttactgacctcaaccttggcaagctcccaccatctctgcacagaatgagagtcctcccactggatttggacgaatcgtgggctttcgaagttgacttcgagtgttctagtggaatactgctgcatatcgaaacaagacttgaggttcaggcgccagagctggaaaaggacattatgaagactgatattagaggcaatcctaatggggacgcgagttcagatttccttgatagtattgagcaatatggtaaccaattcgggccttcagaagtttcggattttgcagcagaggtcaacgatgaagcagataccttaaggaaatcaaagagcgctgggtgggcatcaacatatatgtcaaggtggagaagtatcttgaattcaatagcggaccaggtttcacaggtgccgctatcattggcgattaaaatttcttcagttcgtggaacgatgcggatacatctaaagcctcctccgggtgatcgagtttggtatgggtttacgtccatgccggagatagagtgggagttggaatcatcggttggggataggaagataagcagcagttacatcgcctcgcttatcggcaacaggatcaaggcttcggttcgtcagatcttggtgatgcccaactgtgaaagctttcctatttcctggatgatagcagatacggatgactgggtgccccgcagaattgcaccttttatatggctgaaccgtgagcccgctgataggcgtgctgcagacacaactagagagatgatgccaggggaagcttccacatccaaggccattgcaaagaacaagtcgagtccgctgccgtctacaaaaagaatcaccaacggttcctggaacaagacaaagatacgtgttgatgggcaagagcaagagcaggcagaagcatcaacgagctcgcagtcttggctggtttcagcaaatggtgatgcaacaagggaacagctgaggatgccactgctgagcagcagcggagacgagagagcaggccctgtggaggagcagcaagcatcaccttctgctgctgaggaggagggagatgcgaagaagaggaagaggcgtgcacgggtgatggatctaggaaggaggatgggcgacaagctggaagagaagggcaagcgtttcgtcgggaagatgcgggagaacgcgaggaacaaccgcttgctattgccggacttggagcaggccaccacccctcctgctcctgctcctagttaggcattttaaggatgttactcgacaaaatgaaaattaatcagttgcagcgcctagcaacagctcctaattaggagcacttgtattatgtaaaagaaagaaagaaaaagcttatgagatatgattgtaccacacagatggatgtatgcatctctcatctcacccactgaattaacacaaca

SEQ ID NO: 4001 - DNA, 5943 bp, Zea Mays
ccgcacacaagtcctcacgatatttagattcttatgcagctagttatacacgaattcaaattctatatttaaaaggagtaccaaacaggtccaatgtgtgtaataaaaagaaaaaaaaagattccagtagcagcagtaaagcccattcgtatgtggccctgctccggaccgaaagataaagcccatttgaaatccagctcggcctgctgtcagttcaggagcaggacgagtcggggtcggcgcggcggcaggccgcaggccggcagcaggctctcgcttcgctctctcgttgtctgtcgagaggaagaagacgaggcgagggacggcagcagtagcagctccagcatcttctagcttcttcattcatgggattcggtctctactaggattaggggtgcttcatttcatccgatccccaacgacttgacctgattctgatctcgacgacgatgcggaagcgggatctgggcatcctgctgctcgccgccttcgccatcttcttctccctccaccacgaaggcgacttctccttccgggagtcctggtaccacctcaccgacgaggacttccccatcaagtacgaggccgaccgcctgcccccgccgctcgtcgccgatctcaacggcgacggcaagcccgaggtcctcctccccacccacgacgccaagatccaggttctccagccgccccacgcccgccacctcaacgatgactccgccttccaggaggcccgtgtcatggccgacatctctctcctccccgacaacgtccgcctcgcctcggggaggcgccccatcgccatggccgtcggcaacgtcgaccgctcctacagacctggcgaggtcaggaagcaggtgctcgtcgtcgtcacctccggatggtcagtcatgtgcttcgaccataacctcaagaagctgtgggagcacaacctccaggacgatttccctcatgccgcccaccaccgcgaggtcgcaatctccataaccaattatactctcaagcatggagatgcaggcctcgtcatcgttggaggaaggatggagatgcagcatcatatctcttcgatgaatttatgataccagaacacaacatggatgatcgccgtcgaagcgccagtgagaaacagggctctgaggctggcaatgcagacctgcgccattttgccctttatgccttcgctggacgtagtggcgaccgtagatggagccggaagaatgagaacatccagtcacagccatcagatgcttctgtgatgttaccacagcataattacaaactcgacgttcatgccctcaatagtcatcaacctggtcagttcgaatgtcgtgaattcagagaatcaatccttggcatcatgcctcatcattgggataggagagaggatactaccctacaacttgcacattttaggaagcataaaaggaaacaagttaagagaacgcctggaaaggctgttattaatagcgtgaacaagcccattgaacacaatccacctgggaaggatgcttccaatagaatagctagagctcttgggaaggctgcagatatggctaactcaaataaagccaggaaggcacagaggatgcagtatgttccgacaatcactaatcatactcaagtttggtgggttcctaatgttgttgttgtacatgaaaaggaagggatagaggttgtccatctagcttctggacgtacaatatgcaagcttcatttaaatgaaggaggccttcatgcagatattaatggagatggagttctggatcatgtccaggttgttggtggaaatggtattaaagagcagactgtcgtgagtggatcaatggaagtgctgaaaccctgttgggcagtcgctacatccggtgtgccagtgcgggagcaactttttaacgtctctatctgccattacaaccattttaatctgttccatcatggtgacttctcgagaagttttgggaggacattgatacagctggtttagaggtcgcgactcctatcctggtccagacagacgatgggcataaacacaggagaggaagccatggtgatatcatctttttgacaagccggggagaggtgacatcgtactctcctgggctgctcggccatgatgcggtgtggagatggcaagtatcatcaggggcgacatggtccaaccttccatctccatcgggaatgatggagaacatagtggtgcctaccttgaaggccttctccctacgtgcctatgacccgaaagaggtgatcatcgccggtggtgaccaggaagcggtggtgctctctccttctggtggcatactggccatgatcgagctcccagcgccccccactcacgctcacctcctggaggatttctccggggacggtctcaccgacatgattgtggtaacttccggtggaatatatggattcgtgcagacaaggcagcctggggctcttttcttcagcacgctggtggggtgcctgatagttgtgatcggcgtggtattcgtgtctctgcacctcagttcgtccaatgccgccaaacccagggcttcctcgtctgaatacagatgatgttttgatatgcaaggtcaagagacttttggtactcctatgttctagtagtctatatatttaaccaaatgagaattcgtgttattgtatgataagaattgttcctactagtatatctcatgatatactgatagtgcaatctcgttttttgttgtctaccttggtgttcctagcccccacaaccatttgtacgttggttttttttttaagtttgtttggtcagcaggtcaggcaacaatccagtccatctaatttgagtacatgatggtcaagattgtttcctggtcgacaagttgcctgcccggctataaacaaaatatgatgtcctagcatgcaaagctcgtcttgtctacagtagaatgtgtaaaatagaagatgcagacaagtttgaaatagaaaatgagatataaaatagaagacgtagacaagtttgaaatatagaatgagataggagatctgttgaagatagtttgaagttgaagatagtttgaagatagtcttattgtgttgtcacaattctaccaaagagagggaaagaaaaaaaaatgacaccacacgtcaggctcagctcacagaggccaccgccgccgtgttcctctgtcccgcgggcccccaccccacccgcgtcttcaacttcctgcctgccgctcttctccttgtttgttcccttccgtctaatttggctgcgggtgcaggtggaggccgaggccgaggccaacgccgcctgcgcctggcctgccgtgaggtggaggcggaggcggaggccgaagccaacgccgcccgcgcctggcctgccgttccgcgtcatcttcttccttcgcgtaacgacgccggccaggccaataaataaacaatttccaattccgttcctggaggacgtctgcacggggaccttcccagcgggcgacggccggctgcatccatggcggtggccttcctgctgctgggattgggtttcctccttggcctcctctccctggcgatcgcggaggggctgacgctcctttgggccatccgaagcctcacgcgccgcacatcggcctcacgcagcacgccgccgccatcactccccatccacccgacgccggcgcggtctgtgtctcgccacagcctcaaccgacagggcttcttatggatgctggagcaacccaaggatagcagcatcaatggcgctagcccagggatcagagacaggaagctcctcgtcgaggttttccctgtaaaaatgtctgctacgcttcaaggacattccctcaccttgtctggacccgatgatgcctcgcagctaaccattgacctgctcggttgcacagttgctgctgtttctgcatccaatctgccctcacgtaaatgggccaagaggtatccgataaaactggaaagcaaggaatctggtatttgcagggggagcaaggtatgctatgtttatgcagacacctcttgggagaaggaatcatggtgtaaagcactccgtcttgcttctactacggacaaggacaaactcaaatcccatgaaatgctgacccaagagttccgcagttacatgtcctctctgaaagctggatacccttcctttctgggaccctcgacactctccagtcaggaacatgtgcttgtggacaacactgtgaagaatgatggaccttcaaaactccgaggttttctcaaacgattggtgggaaagaaggcatctgccaaggcttctcaggagagcaaaacaggtccggcgccatctaaacaagatacaagccaacccagtactcctagctccactatgagtttcaacagccagctaccagcttcccccagtgcaaaggtggatgaaaagcttgccgatgacggtacactttgttggaacctcctaatctcccggttgttttttgatgctaaaatgaatgatgagatgaacaaagccatcagagcacgtattcagcgaacattgtcgaacaccagaactccagcctacattggtgagatcacgcttactgacctcaaccttggcaagctcccaccatctctgcacagaatgagagtcctcccactggatttggacgaatcgtgggctttcgaagttgacttcgagtgttctagtggaatactgctgcatatcgaaacaagacttgaggttcaggcgccagagctggaaaaggacattatgaagactgatattagaggcaatcctaatggggacgcgagttcagatttccttgatagtattgagcaatatggtaaccaattcgggccttcagaagtttcggattttgcagcagaggtcaacgatgaagcagataccttaaggaaatcaaagagcgctgggtgggcatcaacatatatgtcaaggtggagaagtatcttgaattcaatagcggaccaggtttcacaggtgccgctatcattggcgattaaaatttcttcagttcgtggaacgatgcggatacatctaaagcctcctccgggtgatcgagtttggtatgggtttacgtccatgccggagatagagtgggagttggaatcatcggttggggataggaagataagcagcagttacatcgcctcgcttatcggcaacaggatcaaggcttcggttcgtcagatcttggtgatgcccaactgtgaaagctttcctatttcctggatgatagcagatacggatgactgggtgccccgcagaattgcaccttttatatggctgaaccgtgagcccgctgataggcgtgctgcagacacaactagagagatgatgccaggggaagcttccacatccaaggccattgcaaagaacaagtcgagtccgctgccgtctacaaaaagaatcaccaacggttcctggaacaagacaaagatacgtgttgatgggcaagagcaagagcaggcagaagcatcaacgagctcgcagtcttggctggtttcagcaaatggtgatgcaacaagggaacagctgaggatgccactgctgagcagcagcggagacgagagagcaggccctgtggaggagcagcaagcatcaccttctgctgctgaggaggagggagatgcgaagaagaggaagaggcgtgcacgggtgatggatctaggaaggaggatgggcgacaagctggaagagaagggcaagcgtttcgtcgggaagatgcgggagaacgcgaggaacaaccgcttgctattgccggacttggagcaggccaccacccctcctgctcctgctcctagttaggcattttaaggatgttactcgacaaaatgaaaattaatcagttgcagcgcctagcaacagctcctaattaggagcacttgtattatgtaaaagaaagaaagaaaaagcttatgagatatgattgtaccacacagatggatgtatgcatctctcatctcacccactgaattaacacaaca

SEQ ID NO: 4002 - DNA, 1737 bp, Zea Mays
aggcaaaacagccccggaccgcgtgcgtttcgcttccggcttccgcccctgctgtttcttggcgttcaccccctctttctctcgtggcgacgacggcgaccgtcgccgcccccctacgcgctaggtgccagggtccgtcgggtccttcgctggcgacgagcacctaccaggcgatccagtggtgtgtttgggaaggtttccgcggtcgggcggcgccccccagtggcgaagatgatccgactaccgacgtacgaagcaggaggcgtccgttgccatcttcttctcctttgagtatatgatactagcaacatccacagtatcaacattcgtgaagtatatattctatgttagtgacatgctaatggaaggtcaatgggagaaaaaggcagtgtatacattttacttggagctcataagtgaccttgtgcacttgtcattatacatgctcttcttcatagctatcttcctgaactatggtgtcccgctgcacttgattcgtgagctatatgagactttccgcaacttcagaattcgcattgcagattatgtgcgctacagaaagatcacttccaacatgaatgaacgctttccagatgctacatcagaagagctcgatgtgagtgatgctacatgtattatttgccgtgaggagatgactacagcaaagaaactgctctgtgggcatctgttccatgtgcattgtctaaggtcgtggctagaacgccaacacacttgccccacgtgcagagctccaatcattcccgcagataatggacatgctgtatcagcacgacaacatggagcccaggctggggttcagcctggtactgccactccatcctcagaaggagcaccaggtgagaacatgagcaggcaccaagcaaaacttgaagctgctgcagcggcagcttctttatatggaaggtcttttgtttatcctccagcaaacaccctaaaaaggtctgttcctcctcagcctgcatcaagtacaccacaatctgaagcaagtagctccaatcatcagtcacaaaaagaccaagaaatgcagtcccgaaacagcagcgatggtttagtgcctctgcctcttaatgcagatggtgctgttggttcaggaacaagcacaagggaccttgaaaattcacttcagaaggcacaagaaaactttattaagagccagattgagatgttacagatccaactgcaaatggtgcagcgtggcgctgctgggccgcccagtaacgagaatactgagcacacagaagaatgactgaatctgtgaacagacacttctgcatcgtggtgtaataataaggagaatactgatgagcacacagctgaatctgtaaataggcggcgatgaggatgggacaaaagaaagccaaggattggcgatacctggggctgggggaaactgttacatgatgtcttgcctggatttttggcaggcctgttaatttatgcttcactattagtgccttgttgccagcaccagatgtttctctctctctgtgtgtgtgtggtggtttctgtacatgaaagccttttgacgggagaaccaaccatggctagtttaattatgaagttcacttgttgtacccgagggaaaatagaaatgactcttgtttttgcctatctatccatgacttgttgtaccgaggtcctttgattgcagaggcgactgtgagcaacatagacggcaggggttgggaaaagatggccctgttgatgctacaactg

SEQ ID NO: 4003 - DNA, 2034 bp, Zea Mays
aggcaaaacagccccggaccgcgtgcgtttcgcttccggcttccgcccctgctgtttcttggcgttcaccccctctttctctcgtggcgacgacggcgaccgtcgccgcccccctacgcgctaggtgccagggtccgtcgggtccttcgctggcgacgagcacctaccaggcgatccagtggtgtgtttgggaaggtttccgcggtcgggcggcgccccccagtggcgaagatgatccgactaccgacgtacgcagcgttcagcctgctggcgacggcgtcggcggcgtactacgcgttcagcagccgtgagcagttctacccggcgatggtgtacctctccacctccaagatctgcttcgtgctgctcctcaacacgggcctcgtcgccatgtgcgtcgcctggcagctcgccaggcgcctcttcctcggctcgctccgtgaggccgaggttgagcgcctcaacgagcagtcctggcgggaggtcatcgagatcctctttgctgtcaccatcttccgacaggatttctctgtttcctttcttgccatggttgctgcgcttctcctcgtcaaggcgctgcactggcttgcacagaagagggtcgagtacattgagaccacgccctctgtgcccttgctctcgcacatcaggatcgtctccttcatggttttcctgcttaccgtcgactgcctcttcctgtcaaactcgctcaggtcactcatacagaagcaggaggcgtccgttgccatcttcttctcctttgagtatatgatactagcaacatccacagtatcaacattcgtgaagtatatattctataattcgcattgcagattatgtgcgctacagaaagatcacttccaacatgaatgaacgctttccagatgctacatcagaagagctcgatgtgagtgatgctacatgtattatttgccgtgaggagatgactacagcaaagaaactgctctgtgggcatctgttccatgtgcattgtctaaggtcgtggctagaacgccaacacacttgccccacgtgcagagctccaatcattcccgcagataatggacatgctgtatcagcacgacaacatggagcccaggctggggttcagcctgctgcaggtactgccactccatcctcagaaggagcaccaggtgagaacatgagcaggcaccaagcaaaacttgaagctgctgcagcggcagcttctttatatggaaggtcttttgtttatcctccagcaaacaccctaaaaaggtctgttcctcctcagcctgcatcaagtacaccacaatctgaagcaagtagctccaatcatcagtcacaaaaagaccaagaaatgcagtcccgaaacagcagcgatggtttagtgcctctgcctcttaatgcagatggtgctgttggttcaggaacaagcacaagggaccttgaaaattcacttcagaaggcacaagaaaactttattaagagccagattgagatgttacagatccaactgcaaatggtgcagcgtggcgctgctgggccgcccagtaacgagaatactgagcacacagaagaatgactgaatctgtgaacagacacttctgcatcgtggtgtaataataaggagaatactgatgagcacacagctgaatctgtaaataggcggcgatgaggatgggacaaaagaaagccaaggattggcgatacctggggctgggggaaactgttacatgatgtcttgcctggatttttggcaggcctgttaatttatgcttcactattagtgccttgttgccagcaccagatgtttctctctctctgtgtgtgtgtggtggtttctgtacatgaaagccttttgacgggagaaccaaccatggctagtttaattatgaagttcacttgttgtacccgagggaaaatagaaatgactcttgtttttgcctatctatccatgacttgttgtaccgaggtcctttgattgcagaggcgactgtgagcaacatagacggcaggggttgggaaaagatggccctgttgatgctacaactg

SEQ ID NO: 4004 - DNA, 2043 bp, Zea Mays
ccagtctccaggcccaggcaaaacagccccggaccgcgtgcgtttcgcttccggcttccgcccctgctgtttcttggcgttcaccccctctttctctcgtggcgacgacggcgaccgtcgccgcccccctacgcgctaggtgccagggtccgtcgggtccttcgctggcgacgagcacctaccaggcgatccagtggtgtgtttgggaaggtttccgcggtcgggcggcgccccccagtggcgaagatgatccgactaccgacgtacgcagcgttcagcctgctggcgacggcgtcggcggcgtactacgcgttcagcagccgtgagcagttctacccggcgatggtgtacctctccacctccaagatctgcttcgtgctgctcctcaacacgggcctcgtcgccatgtgcgtcgcctggcagctcgccaggcgcctcttcctcggctcgctccgtgaggccgaggttgagcgcctcaacgagcagtcctggcgggaggtcatcgagatcctctttgctgtcaccatcttccgacaggatttctctgtttcctttcttgccatggttgctgcgcttctcctcgtcaaggcgctgcactggcttgcacagaagagggtcgagtacattgagaccacgccctctgtgcccttgctctcgcacatcaggatcgtctccttcatggttttcctgcttaccgtcgactgcctcttcctgtcaaactcgctcaggtcactcatacagaagcaggaggcgtccgttgccatcttcttctcctttgagtatatgatactagcaacatccacagtatcaacattcgtgaagtatatattctataattcgcattgcagattatgtgcgctacagaaagatcacttccaacatgaatgaacgctttccagatgctacatcagaagagctcgatgtgagtgatgctacatgtattatttgccgtgaggagatgactacagcaaagaaactgctctgtgggcatctgttccatgtgcattgtctaaggtcgtggctagaacgccaacacacttgccccacgtgcagagctccaatcattcccgcagataatggacatgctgtatcagcacgacaacatggagcccaggctggggttcagcctggtactgccactccatcctcagaaggagcaccaggtgagaacatgagcaggcaccaagcaaaacttgaagctgctgcagcggcagcttctttatatggaaggtcttttgtttatcctccagcaaacaccctaaaaaggtctgttcctcctcagcctgcatcaagtacaccacaatctgaagcaagtagctccaatcatcagtcacaaaaagaccaagaaatgcagtcccgaaacagcagcgatggtttagtgcctctgcctcttaatgcagatggtgctgttggttcaggaacaagcacaagggaccttgaaaattcacttcagaaggcacaagaaaactttattaagagccagattgagatgttacagatccaactgcaaatggtgcagcgtggcgctgctgggccgcccagtaacgagaatactgagcacacagaagaatgactgaatctgtgaacagacacttctgcatcgtggtgtaataataaggagaatactgatgagcacacagctgaatctgtaaataggcggcgatgaggatgggacaaaagaaagccaaggattggcgatacctggggctgggggaaactgttacatgatgtcttgcctggatttttggcaggcctgttaatttatgcttcactattagtgccttgttgccagcaccagatgtttctctctctctgtgtgtgtgtggtggtttctgtacatgaaagccttttgacgggagaaccaaccatggctagtttaattatgaagttcacttgttgtacccgagggaaaatagaaatgactcttgtttttgcctatctatccatgacttgttgtaccgaggtcctttgattgcagaggcgactgtgagcaacatagacggcaggggttgggaaaagatggccctgttgatgctacaactg

SEQ ID NO: 4005 - DNA, 2108 bp, Zea Mays
gtggttctctattttcttttcccgcgagttgttaatcccttcgccgtactcagctaccgccgccgccgccgccgccgcgtgagttgagagaacgagagccaagaagccagggagggacttgagcttcacttgggaagggctagtactgctcccgcccccgccacggccgtctggctgtctgttgcgcgactgcgccagcctggcggctctgccccgggctgctggcgccgccattgctttcccttggagccgctggcagctaaactggtgccctcggccgcctttgtgcgttcctcgccactgcgcccggggtagctgaggtctgaagacggaggtgtcgcccgcctcacggctcctgcaccacggtttttctttctcgcatcgccagagcaacaactgccccccgccgttgtttgtcctgtgctcaaaatggaggctaatggagcagtggatctggaggttgacattatcggcccaggtgctgctggtagcaagttaacctcggttgacgaccctgacgccacagagtgttcaagttcttttggggacactctgtcaggttcggaggatggtgcaagaccttcagagattagcgacattgaggtggactcgccgttctgccgctacccttctaattgtgatgctgctgctctactggatgcagctgcttcagacaattcggatagactattgaagaagaaaaaggtgactgatcattggagaaagtatgtaagcccactaatgtggagatgccaatggttagaactgcggatgaaggatttgcaatcgcaagtgtctaaatatgacaaggagcttgcagtactcaagcatgagaaggagttgcagacaaaaatgattgaattggattgttcctcctcacgatctgtaccattctcctctctttgctgcagaaagactatgaagcgaaggaggagaaaaagaaatgaagataaaattgacacttcatcatatatctctaatcatactgtattatcttattttgaaaaaatggaagcagatggtcattctattgaagacaatgccaacctagtcgatgacaacacaaaagcaaataatgatgctgattggctacttggtattgaaggaggtgataccactgttgagcagattcttttaagcattcaagctgctcaagacagggtattcagtctgagatcaaatctcaagcaagcaatggctaggaagaataagggaataacccttaaaattaacacatccgtcattggtacacacagctcaaattgctcaccaggaaagggcaaagttgctggactgcatgagagatctccccaggacacatcagaatgtgatatggatgattctggcatgcctgatagtgctctctcaagctatggagaagctagcaacatggatatttttgagagcaccatgagcctattgtctgaaggcccacatcagatgggagaatttcgtgaagcagcagaggaagggtaccgaaacttcgaggtgatcagccacccaagcaagcggctaagggtatcagtgaagcgagaagctgggccacactcggaggatgagagcgtcgcccctgttgtcggtgtcaagagagaagagacacacgaggaagctaccaccagcttcagcctgcacggggcattcctgaagccctgcttcacggggaagaggcaggagaggaagccgaaaaagcaaatgaagcgaaggcgaggtggcccgaccgcggcagctgccgctctcatctcgtggaggagcaagaggatccggaagaagaagcaactctaggatggacgcacatgccatggttcacactttctggcctgatcagatgatgggatgacgacggcaaccgcatacttaaatctttttcttagccttattcttttttatttgtctttctttaccttatcactttttttatctgcctctccttaccgttatcctttttctttcctggattctgtttaacttttggctgtttgtttcggtttcaaatgggactgttttgccaatgcgtttcattcattccaggttcctgcaatattgacatgaaaagctatagccaataggcacagttttgaggcctggatcccgactggtttgaaaattcg

SEQ ID NO: 4006 - DNA, 1811 bp, Zea Mays
ctcagatgggccgagcccaggcccacttcgtctcctccacgttcacccacttcgcagtctagggctctagcatccccaatcccatcggtcagcctcatccatccgcagggcgccggcggcgggagtcttgccggccacatcgtcgccgatttcaccgatccgagctccggcctcttagccatggaatctccacgaactctggaagccctcaccaacgacctcgtggtggagatattcctccggatcggctcccctgccgacctcgttcgcgcctccgccgcctgcgtcgccttctgccgtctcatcgccaacccctccttcttgcgccgcaagttatccggctattgtgtctctgacgtccgagacggtcatgtcctcctcaccatcacgccctaccttgaggacgacgaggatgagaagttggtgccagacctcgcggtgtgcgaccccctggcccgtgtatgcctgcgactgccccccataccagacgaccttctcgcctccgtccaggttcagcagcaagatctcgtacattatagttgcgatacattccttgtcccttcaggagatgaagaagatgtcacttcttttagagtgatcgtcatgatgagatctacacagatgctagtcgcttttatcttctcttcaaccactggtgattggagtgctggttcacctttcagcctgggttctctgagaataccatacgacaacattccgagttatgcttatggctgcttctactggaaagtcgagtctgagaacaggttgctcacgctcaacatgagcagtatggagttctcagtcgttgacctcccacctgggcccgataggagtttcgtcatcatggtggaggcaggcgaaagcaggcttgggatgtttagtctaattaaccatggtaccactctctgttatgccattaggcaaattgggagcgagaagtccaatcagttggagatggacagtgtgatccctttacctgagggttatatttactttcgcattcacggttcatatgaaggacacattctcatatttggatacgcgtttagtgaagacgcatgcttcgcacttgagatcaagactatgaagattgagagagtctgtcggaagtggcgtggtttctgtccttattttgtgttcctgccatccatgtcacaaaggaggatataatgtggactgaattcacatccaggtttggggcttcttccaatccattctgctggtgtggagttgagctaggtgatggcacaggccctcatgtagatgtagcacatctgcaacactgtcccatgttatcctcctagtctgtcgtattgtctagcttacattagtagctactgaaactttagttatatctatatttttaagttctcccgactgtaatttaagatgtgacaaaggcgtctttagtgtatcaagagccaacttttataagccggctctgtgtgctgcgaaatcacgtgtttgctagtcttgtgtagaattatcatgccagcatcatcagacatggtacggtcagcatgtttctcacttgagactcagagagaggtgtccaaaagctattggacaaggaggaatagttaagcttggcttaacattcatctccgtgatccttccacctggactcttttctgtgcttctctcttgaaaacctcatctgaggttgggttaatggatcaggtggaggtcctccgcgtgctcagcctgacaattggtcaatagctttcgagtcccctgtcttttggcacggttcaaatgaacctgtcaaaacagaaagaatatcaaaatttagatttgttggaaaacag

SEQ ID NO: 4007 - DNA, 1899 bp, Zea Mays
ttacaatggcattgccatacatttgtgttagtcatgcataaaacgtattggctatcggctctggacttctaaggataacctttgatcatttcgtttgctggacattggatcaactggtgctgttatacatagaaaggatttcattttaaattctcatctatatttggtggtgccataatcatttttccactagcgtttggcaataatgtcggagagcgagttagcagtaataaaaccagaggtgttgaagacatatatctggcttcagtgctttgatggttccatacaacaagtggaggaggaggttgcaatgttctgccccatgatatgtcaggaaattgtgaaaaatggcacagggtcatcaaaaaatcatgctattgctctcccggaaagagttaatccagccaatttgagtttgattcttgactactgtcgatttcatcagatcactgggcgttcaaacatggagcggaagtcctttgatgaaaagtttgttaggatagaaacagaaagactctgcgaattgacttctgcagccgacagtctacagttaaagccacttgttgatcttactggccgagcgcttgctcgaatcattgaaggaaagacacctgaggaaattcgtgacattttccatttaccagatgatttaacagaggaagagaaattggagcccctaaaaaatataaatgatggtcctgctaggattcgcctactgaaccggttgtatgccaagaagcggaaagagctccaggagcgccataagctgaaggatgttcaagtacagaaagagcaaaaagatgagagatctttggatgagttacttagttttattaatggggatggaggtatagctacagttcaggaggcaggaaagctaccaagagtaagaaaaagaataaaaggaaggatcatgttgagaaccccccaaaagctgactctgagcctgtaaatgcgaatccagatatgcaagatgatgccgagtacccttttgaagatgctgacctcgatgatggacttgatcctgcaatgaaagaagagcttgatagagaagttgaggcctttgcgaagaggttggattcagtttggaaggagtcacatattggtggtaatggttctgcacggagatttcctgggtttaatcacatgtgagtgttaagctggtaggatcagaaggcagaagcagaggagatttgtggacatacagcctggaagagagtaaaaataccaaacagtcgacttgctcctgtgtgtttgataagggcatgtacaaccctgaaatcatggatcggttttgcgaagtacaaaagacatgttaagagactgtataccctgagcctttggatcataaatgtaagtaagaggcaatgtgtgtagaattgtgtagagacagtctcttcgcggaaagagagcctgtctattgtatttttttcaattaaccctcaagagacttcatattgaaagaggttatacatgtcagagccaagcatgcagacatgctattttgttggggaggaggctgcctagttgggatgaagcttagcatggttcaaggaaaaagtgtagttttttttctttggaaagggaggattagaggtctgtcttgtctgtgttgccagggaggaggctgcctagttgggatgaagcttataatgcagtatatagtgtaaaacagtgttttgaatgactatatggctgaactgttggacacagtttgtatcaatgaaatttcgttgattcactgtattgtggtggtgcacataaaaaatgtcctttttttggctgaccttacgtgggttggaatatactataagcacgtgttcttatttataattaagttaaacaacattttatcgtatatatcaataataatagaattggatagatgaatgatagaag

SEQ ID NO: 4008 - DNA, 2150 bp, Zea Mays
cgagtcacgactcacagcaactgaaaactaaagaaaccgctggcggacgcccaccaaaccaaaaaaaaaaacaaaaaacaaaaaaccaaaaaaccccacgcctttcctcgccggcgaaggagaagccgcagcgctgctcccacgccccctaggagcgcgtgcctccattccatgtgcgcccgcccaccggaggataacctttgatcatttcgtttgctggacattggatcaactggtgctgttatacatagaaaggatttcattttaaattctcatctatatttggtggtgccataatcatttttccactagcgtttggcaataatgtcggagagcgagttagcagtaataaaaccagaggtgttgaagacatatatctggcttcagtgctttgatggttccatacaacaagtggaggaggaggttgcaatgttctgccccatgatatgtcaggaaattgtgaaaaatggcacagggtcatcaaaaaatcatgctattgctctcccggaaagagttaatccagccaatttgagtttgattcttgactactgtcgatttcatcagatcactgggcgttcaaacatggagcggaagtcctttgatgaaaagtttgttaggatagaaacagaaagactctgcgaattgacttctgcagccgacagtctacagttaaagccacttgttgatcttactggccgagcgcttgctcgaatcattgaaggaaagacacctgaggaaattcgtgacattttccatttaccagatgatttaacagaggaagagaaattggagcccctaaaaaatataaatgatggtcctgctaggattcgcctactgaaccggttgtatgccaagaagcggaaagagctccaggagcgccataagctgaagaaagagcaaaaagatgagagatctttggatgagttacttagttttattaatggggatggaggtatagctacagttcaggaggcaggaaagctaccaagagtaagaaaaagaataaaaggaaggatcatgttgagaaccccccaaaagctgactctgagcctgtaaatgcggttagatttcctgactgtttcccctactgtgtgttctatgtagaacatttatttcttacgcgatctatcatgggagtttaggaaggagctgcttgtgtggttccgtgcaaagtcgatagaagtaatgtttctagacttccatgccagaatccagatatgcaagatgatgccgagtacccttttgaagatgctgacctcgatgatggacttgatcctgcaatgaaagaagagcttgatagagaagttgaggcctttgcgaagaggttggattcagtttggaaggagtcacatattggtggtaatggttctgcacggagatttcctgggtttaatcacatgtgagtgttaagctggtaggatcagaaggcagaagcagaggagatttgtggacatacagcctggaagagagtaaaaataccaaacagtcgacttgctcctgtgtgtttgataagggcatgtacaaccctgaaatcatggatcggttttgcgaagtacaaaagacatgttaagagactgtataccctgagcctttggatcataaatgtaagtaagaggcaatgtgtgtagaattgtgtagagacagtctcttcgcggaaagagagcctgtctattgtatttttttcaattaaccctcaagagacttcatattgaaagaggttatacatgtcagagccaagcatgcagacatgctattttgttggggaggaggctgcctagttgggatgaagcttagcatggttcaaggaaaaagtgtagttttttttctttggaaagggaggattagaggtctgtcttgtctgtgttgccagggaggaggctgcctagttgggatgaagcttataatgcagtatatagtgtaaaacagtgttttgaatgactatatggctgaactgttggacacagtttgtatcaatgaaatttcgttgattcactgtattgtggtggtgcacataaaaaatgtcctttttttggctgaccttacgtgggttggaatatactataagcacgtgttcttatttataattaagttaaacaacattttatcgtatatatcaataataatagaattggatagatgaatgatagaag

SEQ ID NO: 4009 - DNA, 2198 bp, Zea Mays
cctgtttccgcctgcgctgagcgtgaatggttgtaataagccatggctggaggctgcctgggttcgggagccttggttactggaacagatagtcttcttgcaaaccaatctccggctcaattcattagtccatgcgatatttggttgctggttacctctgacatattctgctctcatgtgttgaagacatatatctggcttcagtgctttgatggttccatacaacaagtggaggaggaggttgcaatgttctgccccatgatatgtcaggaaattgtgaaaaatggcacagggtcatcaaaaaatcatgctattgctctcccggaaagagttaatccagccaatttgagtttgattcttgactactgtcgatttcatcagatcactgggcgttcaaacatggagcggaagtcctttgatgaaaagtttgttaggatagaaacagaaagactctgcgaattgacttctgcagccgacagtctacagttaaagccacttgttgatcttactggccgagcgcttgctcgaatcattgaaggaaagacacctgaggaaattcgtgacattttccatttaccagatgatttaacagaggaagagaaattggagcccctaaaaaatataaatgatggtcctgctaggattcgcctactgaaccggttgtatgccaagaagcggaaagagctccaggagcgccataagctgaaggatgttcaagtacagaaagagcaaaaagatgagagatctttggatgagttacttagttttattaatggggatggaggttcaggaggcaggaaagctaccaagagtaagaaaaagaataaaaggaaggatcatgttgagaaccccccaaaagctgactctgagcctgtaaatgcgaatccagatatgcaagatgatgccgagtacccttttgaagatgctgacctcgatgatggacttgatcctgcaatgaaagaagagcttgataggtgaggatataagatatctcattgctgtatgcatgtagactcttagatttgtttttcttttgatgtgtcaacttgtttttcctccttggaagcgaactttttagtctgctttgttctgtgcctactagtctgtttcttaatttgcaaagcatgtagttgtccctgaaatgacaagccttagaggtttctatactcagatgtgaagaatttaagttgagttcggaattgttgcttaatattgtttcaaataccacgacccatgaaactcaatttcaattttacttggattgcggcacgtggtcattatttactctatgcatagtgcggtagtgctgtggcctgaaacaacggcaaggtttgtttttaacatgcagagaagttgaggcctttgcgaagaggttggattcagtttggaaggagtcacatattggtggtaatggttctgcacggagatttcctgggtttaatcacatgtgagtgttaagctggtaggatcagaaggcagaagcagaggagatttgtggacatacagcctggaagagagtaaaaataccaaacagtcgacttgctcctgtgtgtttgataagggcatgtacaaccctgaaatcatggatcggttttgcgaagtacaaaagacatgttaagagactgtataccctgagcctttggatcataaatgtaagtaagaggcaatgtgtgtagaattgtgtagagacagtctcttcgcggaaagagagcctgtctattgtatttttttcaattaaccctcaagagacttcatattgaaagaggttatacatgtcagagccaagcatgcagacatgctattttgttggggaggaggctgcctagttgggatgaagcttagcatggttcaaggaaaaagtgtagttttttttctttggaaagggaggattagaggtctgtcttgtctgtgttgccagggaggaggctgcctagttgggatgaagcttataatgcagtatatagtgtaaaacagtgttttgaatgactatatggctgaactgttggacacagtttgtatcaatgaaatttcgttgattcactgtattgtggtggtgcacataaaaaatgtcctttttttggctgaccttacgtgggttggaatatactataagcacgtgttcttatttataattaagttaaacaacattttatcgtatatatcaataataatagaattggatagatgaatgatagaag

SEQ ID NO: 4010 - DNA, 2374 bp, Zea Mays
cgagtcacgactcacagcaactgaaaactaaagaaaccgctggcggacgcccaccaaaccaaaaaaaaaaacaaaaaacaaaaaaccaaaaaaccccacgcctttcctcgccggcgaaggagaagccgcagcgctgctcccacgccccctaggagcgcgtgcctccattccatgtgcgcccgcccaccggaggataacctttgatcatttcgtttgctggacattggatcaactggtgctgttatacatagaaaggatttcattttaaattctcatctatatttggtggtgccataatcatttttccactagcgtttggcaataatgtcggagagcgagttagcagtaataaaaccagaggtgttgaagacatatatctggcttcagtgctttgatggttccatacaacaagtggaggaggaggttgcaatgttctgccccatgatatgtcaggaaattgtgaaaaatggcacagggtcatcaaaaaatcatgctattgctctcccggaaagagttaatccagccaatttgagtttgattcttgactactgtcgatttcatcagatcactgggcgttcaaacatggagcggaagtcctttgatgaaaagtttgttaggatagaaacagaaagactctgcgaattgacttctgcagccgacagtctacagttaaagccacttgttgatcttactggccgagcgcttgctcgaatcattgaaggaaagacacctgaggaaattcgtgacattttccatttaccagatgatttaacagaggaagagaaattggagcccctaaaaaatataaatgatggtcctgctaggattcgcctactgaaccggttgtatgccaagaagcggaaagagctccaggagcgccataagctgaaggatgttcaagtacagaaagagcaaaaagatgagagatctttggatgagttacttagttttattaatggggatggaggttcaggaggcaggaaagctaccaagagtaagaaaaagaataaaaggaaggatcatgttgagaaccccccaaaagctgactctgagcctgtaaatgcgatatgcaagatgatgccgagtacccttttgaagatgctgacctcgatgatggacttgatcctgcaatgaaagaagagcttgataggtgaggatataagatatctcattgctgtatgcatgtagactcttagatttgtttttcttttgatgtgtcaacttgtttttcctccttggaagcgaactttttagtctgctttgttctgtgcctactagtctgtttcttaatttgcaaagcatgtagttgtccctgaaatgacaagccttagaggtttctatactcagatgtgaagaatttaagttgagttcggaattgttgcttaatattgtttcaaataccacgacccatgaaactcaatttcaattttacttggattgcggcacgtggtcattatttactctatgcatagtgcggtagtgctgtggcctgaaacaacggcaaggtttgtttttaacatgcagagaagttgaggcctttgcgaagaggttggattcagtttggaaggagtcacatattggtggtaatggttctgcacggagatttcctgggtttaatcacatgtgagtgttaagctggtaggatcagaaggcagaagcagaggagatttgtggacatacagcctggaagagagtaaaaataccaaacagtcgacttgctcctgtgtgtttgataagggcatgtacaaccctgaaatcatggatcggttttgcgaagtacaaaagacatgttaagagactgtataccctgagcctttggatcataaatgtaagtaagaggcaatgtgtgtagaattgtgtagagacagtctcttcgcggaaagagagcctgtctattgtatttttttcaattaaccctcaagagacttcatattgaaagaggttatacatgtcagagccaagcatgcagacatgctattttgttggggaggaggctgcctagttgggatgaagcttagcatggttcaaggaaaaagtgtagttttttttctttggaaagggaggattagaggtctgtcttgtctgtgttgccagggaggaggctgcctagttgggatgaagcttataatgcagtatatagtgtaaaacagtgttttgaatgactatatggctgaactgttggacacagtttgtatcaatgaaatttcgttgattcactgtattgtggtggtgcacataaaaaatgtcctttttttggctgaccttacgtgggttggaatatactataagcacgtgttcttatttataattaagttaaacaacattttatcgtatatatcaataataatagaattggatagatgaatgatagaag

SEQ ID NO: 4011 - DNA, 2447 bp, Zea Mays
cgagtcacgactcacagcaactgaaaactaaagaaaccgctggcggacgcccaccaaaccaaaaaaaaaaacaaaaaacaaaaaaccaaaaaaccccacgcctttcctcgccggcgaaggagaagccgcagcgctgctcccacgccccctaggagcgcgtgcctccattccatgtgcgcccgcccaccggaggataacctttgatcatttcgtttgctggacattggatcaactggtgctgttatacatagaaaggatttcattttaaattctcatctatatttggtggtgccataatcatttttccactagcgtttggcaataatgtcggagagcgagttagcagtaataaaaccagaggtgttgaagacatatatctggcttcagtgctttgatggttccatacaacaagtggaggaggaggttgcaatgttctgccccatgatatgtcaggaaattgtgaaaaatggcacagggtcatcaaaaaatcatgctattgctctcccggaaagagttaatccagccaatttgagtttgattcttgactactgtcgatttcatcagatcactgggcgttcaaacatggagcggaagtcctttgatgaaaagtttgttaggatagaaacagaaagactctgcgaattgacttctgcagccgacagtctacagttaaagccacttgttgatcttactggccgagcgcttgctcgaatcattgaaggaaagacacctgaggaaattcgtgacattttccatttaccagatgatttaacagaggaagagaaattggagcccctaaaaaatataaatgatggtcctgctaggattcgcctactgaaccggttgtatgccaagaagcggaaagagctccaggagcgccataagctgaaggatgttcaagtacagaaagagcaaaaagatgagagatctttggatgagttacttagttttattaatggggatggaggttcaggaggcaggaaagctaccaagagtaagaaaaagaataaaaggaaggatcatgttgagaaccccccaaaagctgactctgagcctgtaaatgcggaaggagctgcttgtgtggttccgtgcaaagtcgatagaagtaatgtttctagacttccatgccagaatccagatatgcaagatgatgccgagtacccttttgaagatgctgacctcgatgatggacttgatcctgcaatgaaagaagagcttgataggtgaggatataagatatctcattgctgtatgcatgtagactcttagatttgtttttcttttgatgtgtcaacttgtttttcctccttggaagcgaactttttagtctgctttgttctgtgcctactagtctgtttcttaatttgcaaagcatgtagttgtccctgaaatgacaagccttagaggtttctatactcagatgtgaagaatttaagttgagttcggaattgttgcttaatattgtttcaaataccacgacccatgaaactcaatttcaattttacttggattgcggcacgtggtcattatttactctatgcatagtgcggtagtgctgtggcctgaaacaacggcaaggtttgtttttaacatgcagagaagttgaggcctttgcgaagaggttggattcagtttggaaggagtcacatattggtggtaatggttctgcacggagatttcctgggtttaatcacatgtgagtgttaagctggtaggatcagaaggcagaagcagaggagatttgtggacatacagcctggaagagagtaaaaataccaaacagtcgacttgctcctgtgtgtttgataagggcatgtacaaccctgaaatcatggatcggttttgcgaagtacaaaagacatgttaagagactgtataccctgagcctttggatcataaatgtaagtaagaggcaatgtgtgtagaattgtgtagagacagtctcttcgcggaaagagagcctgtctattgtatttttttcaattaaccctcaagagacttcatattgaaagaggttatacatgtcagagccaagcatgcagacatgctattttgttggggaggaggctgcctagttgggatgaagcttagcatggttcaaggaaaaagtgtagttttttttctttggaaagggaggattagaggtctgtcttgtctgtgttgccagggaggaggctgcctagttgggatgaagcttataatgcagtatatagtgtaaaacagtgttttgaatgactatatggctgaactgttggacacagtttgtatcaatgaaatttcgttgattcactgtattgtggtggtgcacataaaaaatgtcctttttttggctgaccttacgtgggttggaatatactataagcacgtgttcttatttataattaagttaaacaacattttatcgtatatatcaataataatagaattggatagatgaatgatagaag

SEQ ID NO: 4012 - DNA, 1206 bp, Zea Mays
ccaccacctcaaaaactgcaagccccaaactcacgaccaccgtctccaccacggcaccaccatcactccaacaccaccgcctccctctccgttctcttcctcccaacgactcaaaccgccaccgtcgcggctccctgaaccaccagaccagcccagagcccagcccaccacaaacgctgctgctgctggagagaggggcgcgcgggcggacgggagcgatgggcaactgccaggcggcggaggcggcggcggtcatcatccagcaccccggcgggaaggtcgaccggctctactggtccaccaccgccgccgaggtcatgcggaacaacccgggacactacgttgccctcgtcatactccgtgttcctgcagataacaagcccgccgccgccgccgccgccgccgccggggacgccgcggcgtcctccggccccggcagtggtggggccaagatcaccagggtcaagctgctgaagcccaaggacacgcttctccttggccagaggtgacgaaggcggtgcgggcgaggaagaacgagaagatgcagcggtgcgaggccatcaggcagcagcacgagcagctccggcgcggcgacggggctcaccagagctcttccagccaggacgggaagcaggacaaggaccggcaccggggaagaggccggcactggcggccggtgctgcagagcatctccgagtccgcgagccagagcagcagcagcatcgtctctgaatccgccaccagctaatgctactgaccggactgtgccatccggccggtgctctctttctttctttttcttttgggatttctgtttgcttgttagtatagagtgcttgagcctagccagaaatggaaaaaaaaactgtaaatcagagtgtcagggcaggactaataggaagtttgtttcgtctgtcaatgtgatttggcatggtgaaactgacactaaaaccgcgtattcagatcaatcgagtggtttgccaattgcaacatttcagagcatgaacactaagcaaaaaggaagaagaaaaaaaaatgcaatccttgctcttcgatccagaggagggccctaagagttttaactcatctcgagagaaaaggttcaagaaccggactcttgtaccatactgtattattagtcttcgcatcactagcagaaactaagttcaaataatcgagcggtttggcaatcgtaactttgcaaag

SEQ ID NO: 4013 - DNA, 2213 bp, Zea Mays
cgaacaaagttggacccagccttgcctctccccgtggagaattcaaagctccgccgtgtcctcttctggataccggaagtcgtcgccgtccttggaatggcttggcttccttcgctaggaggttttctttctttccggccgactctgtttcttcgaaccttgctcttccagtcagtcgtccttggctcctcttcttccccacacaaacacaacggaatagtcccgaccatactggaaaaccggcgaacttggaaagcaagtcaacaagagtatggcgtccatggagagcctgatcgggatgatgaaccgcatccagcgcgcctgcaccgccctcggagaccacggaggaggaagcgacttgcccaccctctgggagtcgctcccaaccatcgccgtcgtcggaggccaggaattgtcacgcgaaggcctttagtgttgcagctgcaacagacagaggatggatctcaggaatatgcagagttcttgcatatgccgaaaagaaggttttcagactttgcccttgttcgccaagaaattgctgatgagacggataggctgactggaaaaactaagcaaatatctcctgtccctattcatctcagcatctactcgcccaaggttgtgaacttaacaatgattgatcttcctgggttgacaaaagttgctgtagagggacaatctgaaagtattgtgcaagatatagagaatatggttcgctcatatgttgataagcccaactgtattattttggctatatctccagcaaatcaggatattgcaacttctgatgcaattaagctctcaaaagaagttgatccaacaggtgaaaggacgttcggtgtgttgacaaaactggacttaatggacaaaggaacaaatgctctcgatgttcttgagggaagagcctatcggctgcagaatccttgggttggaatcgtcaatcgctcacaagcagatattaataggaaggttgacatgatttcagcgagggaaaaagaaagggaatattttgaaacaagtcctgactatgctcatttatcaagtcgtatgggttctggatatcttgctaagcttctttctcagcatcttgaatctgttatcaaagcacacattcctagtatcacagcgacaatcaacaaaactatagacgaacttgaatcagagctggacatcatagggagagctgtggctgctgatccaggggctcaactgtacaccatactggacctctgccgtgcttttgaccgtgttttcaaggaacatcttgatggagggaggtcaggtggagatagaatatacggcgtgtttgaccataagctccctgctgcttttaagaagctttccttcgaccgctacctgtcggtgcaaaacgtgaagaaggtggtttcagaagcagatggctatcagccccatctcatggcacctgaacaagggtaccggcggcttattgagaagggcatcaactatttcagaggaccagctgaagccacggttgatgcggtccacgttgttctaaaagacttggtcaggaaatccataggggagacagagcaactcagaagatttccgacgcttcaagcagcgatcgcgaccgctgcaaacgaagccctggagcgattccgggaggacgggcgcagcacggcgcttcgtctggtggacatggaggctgcgtacgtgacggtggagttcttccggaagctccctcaggatcctcctgctgatgcgcctgctagcaaggctggaggcaagccttcagcggagccggcggctgcgccgcctcctgaccgctacggtgacgggcacttcaggagcatcgcctccaacgtgtcccagtacatccggatggttggagacgagctcctgcagaagatccccaaggcagctgtccactgccaggttcgcgaggccaagaggtctctgctcaaccatttctacgtgcagatggggaagaaagaggctggggagtttgggcatatgctggacgaggacccggcgatgatggagcgccggcagcagtgcttcaagaggctggagctgtacaaatctgccagggatgaggttgattctgtggcatgggggggcagcagcagataggtcagtggaagcattgtattcgtagggatattcttgttgtatatacaatacaattctatatatattacggtattacatactctaaaaacaaaaaatgatataatttataataaaaaata

SEQ ID NO: 4014 - DNA, 985 bp, Zea Mays
cttgcttggagctgattacacttacacccggccagctagctaggccaggttccatgtggacaaggtatcctcggcacacgtctacctgaggctaaagaaaggcgagacgatacacaccatcagcgaggccctcctggaggactgtgcgcagctcgtcaaggctcactccattcaagggaacaagatgaacaacgtcgaggtgatctacacgccctgggctaatctcaagaagtccccatccatggatgtcggccaggtacatgtgcttatagtcgagaagcgtgtcaacgagatcatcaacaggctgaataaaacccgggtagaacgccgggcgccagacttgaaagcggagaaagaggcatcaaatgcagcagaaaaggccgagaggaagatgcagctgaaagagaagaaacggaaggaggagatggaaaggctggagaaggagaaatgggcggagatacggagctacaagggcctcatggtggccgagaagatgacgtccaaccgccagatcgcctccgccggcaagtccatgcaggaaatggaggatgagttcgtctgaagacgactgtcatcgtcactggagtctacatctctctctctctctctctctgtctgtgtgtgtgttgtgtgtgtacgtacatatgtccatgctcgcgtgataacgacgagtcgaagcaaccaaaagatctcatggatcgattattcgatccgttcctgatcctccgttgatctgtgctctgtacataacatgtgctcccagcatggacatgtataggtcacgagaagagctagcgcgtatgtatacaagtaactagtgacgagctgttgctcggagggatcaacatatatggagttcatcaagagaatcggtgcaacacacttgccgccaggagaaccagctgaggtactaaaaatatatggagttcctcagtttccacgatgtccatgcccaaaggggtagcacaggtaaacatattcagaa

SEQ ID NO: 4015 - DNA, 1218 bp, Zea Mays
ccgcgcgcgcccgccgctacctgccagccgcacgcccgccgccagcgccccgccgcaaccccgcgcgccggctcgagtacttcgctgtccgctcccattcaactccggcccagctgcgtgctgctccggcaccggcaggcggataagcccagcaggcaagcaggcaggagactaggagaggaggagagctcagcactgcacgcgcgctcccctccccttgttggccaaatcgatcggtccccttcaggcttaaggcttcggagcttgctttacttcagttggcaggtgtattttcaggggatgttgcttgagcccaaatggatgacagcagaagtgtgatctgacgtgcgctcagcttcaccaacacactgattcttgaatgcattaagcatagtgcacaagcagttattcatgataagaaatcttttgctcaaatacatagaaggtgctctcaaagacatcgaaggtcttcctttaccgtttcgtcatctgcaatgtgcttatagtatgagagttgcctgctaattcctctaaatatagcattagttcagcttgtagcttcatattacatcaggtaatggatggcatcagaactattctctgtaatgatggtataagagctcacttgctaattcttctgaacattccctgggttcagcttgtaactttagttagatcaatggatatcatctaaactattcttttctttttttcttttgaaacagggcatatctacttagtacctgcatttttttgttgcttgttgatgatactaatactgtctgatataactagttgctttttctctctttggtaagaatctgcaattaaatttgacatccattggttatatattttttccttgttcagttaccacacatgttgccatctgaaaaggcattttcagctgttgtatctgctcttggcatctacaacaaagacgggatagtagtttatgatggaaaggggctgttcagtgatgctcgtgtttggtggtaagcttttttattcacaaaaatatgtaaaagaaggagttcatcaagcagtttgctgagatttcatcaataaaccaacgaattttgttatccggtccagcaggttctgagatttatcaggaaacattggtaaaggcacttgctaaacattttggtgctagacttcttgtcttggattcacttttgctaccttggagaggaaggataaggacgcaaagaagac

SEQ ID NO: 4016 - DNA, 3514 bp, Zea Mays
atggctcgcctgttccgcgagtcccgccgcgactcgtcccccttctcctcctcctccaatggcttcctcccgccggcgtccgcttccagcccctcggtctccgcgctcccctcgccgttcccggacctcggggtcgccctctccaccgcggacctccgggaggccgcctacgaggtgctggtcgcggcctcccgcaccacgggcgggaagcccctcacctatatcccccagtcctcgtcggtggccgcgggggccacggcgtccccggcctcctccgcgtcctcggcatcctccgcctcgctccagcgctccctcacctctgccgccgccagcaagatgaagaaggcgctcgggctccgctcgtccgcctcctccaagggtgtcggcagccccgggagtggcgggaaggcggcgcccccgcgtaggcccgccacgtttggggagctcatgcgggtgcagatgcgcatctccgagcccaccgacgccaggatccgcaggggcctcctccgcatcgctgccagccagcttggcaggcgtgcagaatctatggtgttgcccttggaattcttgcagcaattcaaggcatcagattttctctgatcctcaagagtatgaggcatggcggagtaggaatctgaagcttcttgaggctggtctacttgttcatccactcgttccattgaacaaatcagacagttctgtgcaacggttgcggcaaattatacggggtgcatatgataggccacttgaaactgggaaaaactctgagtcaatgcagggtctacgtacttgtgtcatgtcccttgctggaagatctcatgatggtacttctgatggatgccactgggcagatggcttcccattgaatctccatctgtaccaaacgttggtagaagcttgctttgataatgatgagggcactgtggttgatgagatcgatgaggtgatggagctcttgaagaaaacctgggttattcttggaattaatgagttgctccacaatctttgctttacttgggcattgttcaaccattttgttatgtctggtcaagtagatatcgagctactttctgcagcagagaaccagttagctgaagtggctaaggatgcgaaaaccacaaaagatccaaattactgtaaagtattgagctcaacattaagctcaataatgggctggacagagaaaagacttctggcatatcatgaaaccttcaatacaagtaatattgagtctatgcaaggcattgtctccattggagtgtcagctgcaagggttcttgttgaagatatatcccatgaataccgccgtagaagaaaagaagagactgatgtagctcgaagcagggtagagacatacataaggtcttcactacggacagcttttgctcaaagaatggaagaagcagattcaaaacgatcatcaagaaaccctactccagttctttctatccttgcgaaggacattagtgacctagctacgaaggagaaaaaattgtacagtccaatactgaagacatggcatcctcttgcttctggtgttgctgttgcaacccttcattcttgttatggaaatgagctgaagcagtttgtagctgggcttacagagctgacccctgatacagttgaagtacttaaatcagcagacaaattagagaaggaccttgttaatatagctgtagaagattctgtggatagtgatgatggaggcaagtcactaatcagagagatgccgccatatgaagctgaaaatgcaattgctaatctggtgaaagtgtggataaaagaaagagtagacagactaaagggatgggttgaccggaatttgaagcaagagggataattttgctccctcttccgtggagatgcttcgagttattggtgaaacgttggatgcatttttccaattgcctataccaatgcatccggctcttcttcctgatctgacagttgggctcgacagaagcctacagctttatgttgctaaagcaaaatctggctgcggagcacgaaattcttttatgccccaactacccccactaacgcgatgcgaggttggctccaagttattattcaagaaaaaggagaagccacaaaatctgcaggttcgtgtatcacaaaatggagcatcaaacggaaatgatcccttgggccttcctcaactctgtgtgcgcctgaatactcttcagtacatccgtggtgagtttgagaatctagagaagaaaattaaaacgagcttacgaaatgttgagtcagctcaggcagatatcactgatggattgaacatcaagtttgagctttgccaggcagcctgtcaagaaggcattcagcagatttgtgagacgactgcatataaggtgatgttttatgacttgggacatgtcctctgggacaccctttatgttggtgatactgcatcaaacagggttgaggtactgttgagggaacttgaccctgtccttgagacggtatctagtatggtgcacaacaaagtgcggaaccgtgctattactgcactgatgaaagcaacttttgatggtttcttgctggtgcttcttgctggtgggcctttgcgtactttcacccgtcaagactctcagataatagaagatgacttcagggccctcagagatctgtacttagcagatggggatggtttgccagaggaattagttgacaaggcatcctcccaggtcaagaatgtcctgcccctctttcgagcagactctgaaagtctcattgagcgattcaaacgcatgatggttgaatcgaatcggcctgcgtccaagaacaggttaccattgcctccaacaacagggcattggagtccaaatgagcctaacacagtcctgcgagttctgtgctaccggaatgatgagacagctacaaagttcctcaagaaaacttacaacctaccgaagaagatttgacttgtgggatagatcacaaaccatatgtacatgttcctgtcactacaaaaaggtttctctatgcctgtcacattctctggctgaggaccccgaggaaataccccctgtaaagtttccacatcaaaggtttcaagtgatcatcagcaagaaggtttattctgtggtgctgtagagatgtgactgggtgttttcggtggttcgtgtcattgataggttttgcggtgaagggtggatttacttacagctcgatttgttcattatattatatgtttgcctaatccagttcttttgctgaccttgcgctcgtgtaatttggttcattctagtctgcaacagctaaatccagcgtgtgaataagttgtgtactcgcgtgacactgtccggtgcttttgctgtgacaatatgcggggagcatttgtatattttactgcatcgtgcactccatctctctccatatcctcgttggatccgttcttcagtcaatcgatcctgttcaaagtgagaataatacgtggtcgagatgatgaaatgagtgattgttaacacatggttgagattagggatgaaagtggtaatctgaactgtta

SEQ ID NO: 4017 - DNA, 3886 bp, Zea Mays
ctcttctgcttctgcaacgactccctccctgcctcctcatcaacttgcagtgcagcagaagcccaagcagagggaggaggagagacaggcgccgaccaagccccgaccgagcgagcgccgcgcatgcggttcccacctccaccccaccaccaccactactcgtagtcgggggcccacccaactgcctccgggaccgggaccgggaccgggaccaggacgactccttgtcgtacgtgctttcctcccgctgccgccgccgcttcatccgccaggactccgcgcgggcattgttctccgacggcgatgggcgaggcagtgcccgaccccgacgacctggccgcgttcccggcgtgggcgcggtcggtggcggactgcgaggcgcggctcggggtgagcgtcacgcgcggcctctcgtccgccgaggccgccgcgcggctgcgcgcccacggacccaacgagctggccgaccacccggccccgtcgctgctgcgcctgctgctggaccagttcgaggacacgctggtgcgcgtcctgctcgccgccgccgccgtctccttcctcctcgcgctctcctccagcgccggcgcgctcacgctcgccgccttcgtcgagccgctcgtcatcttcctcatcctcgtcgtcaacgccgccgtcggggtctggcaggaggccaacgcggagcgggcgctggacgcgctgcgggagatccagtcccaccacgccgccgtcctgcgcgacgccgcatggctccccgcgctcccggcccgggacctcgtcccgggcgacgtcgtccagctccgcgtcggggacaaggtgcccgccgacatgcgcgtcgccagcctcctcacctccacgctccgcctcgagcagggctcgctcacgggggagacggcctccgtcaacaagacctcccgcgcgctcccgctcgaggacgccgacatccaggccaaggactgcatggtcttcgccggcaccaccgtcgtcaacggcgccgcgctctgcatcgtcgcgcgcaccgggatggacacggagatcggcgccatccacgcccagatccaccaggcctcgcaggaggacgacgacacgccgctcaagaagaagctcaacgagttcggggaggcgctcaccaagatcatcggcctcatctgcgccctcgtctggctcatcaacgtcaagtacttcctcaccttcgacctccagggaggatgggtgcccaggaacatcaccttctccttcgagaagtgcacctactactttgagatcgccgtcgcgctcgccgtcgccgccatacccgagggcctgcccgccgtcatcaccacctgcctcgcgctcgggaccaggaagatggctgccaagaatgcgctcgtcaggaagctgcctagcgtcgagaccctcggctgcaccaccgtcatctgctccgacaagaccggcacgctcaccaccaacaagatgtccgtcgccaagctcgtggccgtcggcgattcctcgcaggaggttaggaccttcaaggtggacggtacgacttacgatccccgggacgggaaaattcacgactggcctgctgggagcattgacgccaaccttgagacgatcgccaaggtcgcagctgtgtgcaatgatgccaatgtggcacattcttcgcatcagtatgttgccactggaatgccgacagaggcagctcttaaggttttggttgagaaaatgggtctgcctggaggaaagaatggtctgtccttggatccgtctgagatactaggctgctgcgcatggtggaacaatgttgccaaaaggattgctaccctcgagtttgatcgcacaaggaaatcaatgggcgtcattgtgaaaacaagttcaggaagcaatgccctgctcgtgaagggagctgttgaaactttgcttgagcgaagtagccacattcagctgaaggatggttccgtggtgccattagatgagaaagcaaagagaactatcctggcaagcctccatgagatgtcgaccaatgctctgcgctgcctcggttttgcatacaaggaggcgctagcagaatttgcaacatatgatggcgagaaccatcctgctcataagctcttgctggatccggccaattatgcagctattgagactgacctaatatttgcgggtcttgtaggcctaagggacccaccccgggaagaggtctatgatgctattgaagattgcagagctgctggcatccgagttatggtgataacaggggacaacaaagaaaccgctgaggcaatatgccgtgaaatcggcgtgttttcacctgacgaggatatcaccttcaagagccttacagggaaggagttcatggcgctggaggacaagaagacgctgctacgcaggaaaggtggcctcctgttctctagggcggaacctaggcacaaacaagagattgtgaggttgctgaaggaagatggggaagttgtcgccatgactggagatggagtcaatgatgcccctgctttgaagctggctgacatcggtgtagctatgggcattactggaactgagctctaatgtttcaggttgccaaagaggcgtctgacatggtgttggctgacgacaattttagcaccatagtttctgcagtcggtgaaggaagatcgatctacaacaacatgaaagctttcataagatacatgatttcgtcaaacattggtgaagtcgcttctatattcctaacttccgccctgggcattcctgagggtttgattcccgtccaacttctatgggtcaatctcgtcaccgacgggccccccgcaactgctctaggtttcaatccgcctgacaaggacatcatgaagaagccacctaggaggagcgacgactcactgatcactccctggatcttgttccgctacctggtgattggcctttacgttgggatggcgaccgttggcatcttcgtcatatggtacacacatgggtctttcatgggcattgacctgaccggagacggccacactctggtcacctactcgcagctttcgaactggggccagtgctcttcctgggacaacttcacggcctcgcctttcaccgccggagccagaacgttcgcgttcgacgacgacccgtgcgactacttccacgcaggcaaggtgaaggcgacgacgctgtccctgtccgtgctggtggccatcgagatgttcaactcgctgaacgccctctccgaggacagcagcctgttggccatgccgccctgggtcaacccgtggctgctcgtcgccatgtcggtctcgttcggcctccacttcctcatcctctacgtgccgctgctcgccacggtgttcggcatcgtcccgctcagcctcaacgagtggctgctggtcctgctggtggctctcccggtggtgctcatcgacgaggctctcaagctcgcgggcaggtgtacgagcccttcttcgggccccaccaggcggtccaggaagaagaagcagaagggcgagtagcgagcgggcgctaacatttgactccgtgctcagttactaaaccattccattaatcatgtaaacaaaagatgaacctcagtcagtcaatcaatcaatacaggagataacccattttcactgtttctctttctactctctctccaccctaacgccaaaacaacagcagcacagtagcttctttgttctcagaacaagttgttaattagttggcaacatatgttatcctgtgaattatgtagcgttgagtcagatcttcagatgatactttccagtttttttttcttttcttttggctgtaaatttctctcttgccagtgcagatggcaacgagagcaaggtcaggccagagggttggtcaaacaaagtttaactgccctcttgtggcccgaatgaatactgcagcttttgat

SEQ ID NO: 4018 - DNA, 3967 bp, Zea Mays
gcttctgcaacgactccctccctgcctcctcatcaacttgcagtgcagcagaagcccaagcagagggaggaggagagacaggcgccgaccaagccccgaccgagcgagcgccgcgcatgcggttcccacctccaccccaccaccaccactactcgtagtcgggggcccacccaactgcctccgggaccgggaccgggaccgggaccaggacgactccttgtcgtacgtgctttcctcccgctgccgccgccgcttcatccgccaggactccgcgcgggcattgttctccgacggcgatgggcgaggcagtgcccgaccccgacgacctggccgcgttcccggcgtgggcgcggtcggtggcggactgcgaggcgcggctcggggtgagcgtcacgcgcggcctctcgtccgccgaggccgccgcgcggctgcgcgcccacggacccaacgagctggccgaccacccggccccgtcgctgctgcgcctgctgctggaccagttcgaggacacgctggtgcgcgtcctgctcgccgccgccgccgtctccttcctcctcgcgctctcctccagcgccggcgcgctcacgctcgccgccttcgtcgagccgctcgtcatcttcctcatcctcgtcgtcaacgccgccgtcggggtctggcaggaggccaacgcggagcgggcgctggacgcgctgcgggagatccagtcccaccacgccgccgtcctgcgcgacgccgcatggctccccgcgctcccggcccgggacctcgtcccgggcgacgtcgtccagctccgcgtcggggacaaggtgcccgccgacatgcgcgtcgccagcctcctcacctccacgctccgcctcgagcagggctcgctcacgggggagacggcctccgtcaacaagacctcccgcgcgctcccgctcgaggacgccgacatccaggccaaggactgcatggtcttcgccggcaccaccgtcgtcaacggcgccgcgctctgcatcgtcgcgcgcaccgggatggacacggagatcggcgccatccacgcccagatccaccaggcctcgcaggaggacgacgacacgccgctcaagaagaagctcaacgagttcggggaggcgctcaccaagatcatcggcctcatctgcgccctcgtctggctcatcaacgtcaagtacttcctcaccttcgacctccagggaggatgggtgcccaggaacatcaccttctccttcgagaagtgcacctactactttgagatcgccgtcgcgctcgccgtcgccgccatacccgagggcctgcccgccgtcatcaccacctgcctcgcgctcgggaccaggaagatggctgccaagaatgcgctcgtcaggaagctgcctagcgtcgagaccctcggctgcaccaccgtcatctgctccgacaagaccggcacgctcaccaccaacaagatgtccgtcgccaagctcgtggccgtcggcgattcctcgcaggaggttaggaccttcaaggtggacggtacgacttacgatccccgggacgggaaaattcacgactggcctgctgggagcattgacgccaaccttgagacgatcgccaaggtcgcagctgtgtgcaatgatgccaatgtggcacattcttcgcatcagtatgttgccactggaatgccgacagaggcagctcttaaggttttggttgagaaaatgggtctgcctggaggaaagaatggtctgtccttggatccgtctgagatactaggtggattgcaatgttatttgctggcaggctgctgcgcatggtggaacaatgttgccaaaaggattgctaccctcgagtttgatcgcacaaggaaatcaatgggcgtcattgtgaaaacaagttcaggaagcaatgccctgctcgtgaagggagctgttgaaactttgcttgagcgaagtagccacattcagctgaaggatggttccgtggtgccattagatgagaaagcaaagagaactatcctggcaagcctccatgagatgtcgaccaatgctctgcgctgcctcggttttgcatacaaggaggcgctagcagaatttgcaacatatgatggcgagaaccatcctgctcataagctcttgctggatccggccaattatgcagctattgagactgacctaatatttgcgggtcttgtaggcctaagggacccaccccgggaagaggtctatgatgctattgaagattgcagagctgctggcatccgagttatggtgataacaggggacaacaaagaaaccgctgaggcaatatgccgtgaaatcggcgtgttttcacctgacgaggatatcaccttcaagagccttacagggaaggagttcatggcgctggaggacaagaagacgctgctacgcaggaaaggtggcctcctgttctctagggcggaacctaggcacaaacaagagattgtgaggttgctgaaggaagatggggaagttgtcgccatgactggagatggagtcaatgatgcccctgctttgaagctggctgacatcggtgtagctatgggcattactggaactgaggttgccaaagaggcgtctgacatggtgttggctgacgacaattttagcaccatagtttctgcagtcggtgaaggaagatcgatctacaacaacatgaaagctttcataagatacatgatttcgtcaaacattggtgaagtcgcttctatattcctaacttccgccctgggcattcctgagggtttgattcccgtccaacttctatgggtcaatctcgtcaccgacgggccccccgcaactgctctaggtttcaatccgcctgacaaggacatcatgaagaagccacctaggaggagcgacgactcactgatcactccctggatcttgttccgctacctggtaaacggtctccctcgcgtgctacccgtcccttgactctgttgggtcgtcatcttttggagactttgtctgcaggtgattggcctttacgttgggatggcgaccgttggcatcttcgtcatatggtacacacatgggtctttcatgggcattgacctgaccggagacggccacactctggtcacctactcgcagctttcgaactggggccagtgctcttcctgggacaacttcacggcctcgcctttcaccgccggagccagaacgttcgcgttcgacgacgacccgtgcgactacttccacgcaggcaaggtgaaggcgacgacgctgtccctgtccgtgctggtggccatcgagatgttcaactcgctgaacgccctctccgaggacagcagcctgttggccatgccgccctgggtcaacccgtggctgctcgtcgccatgtcggtctcgttcggcctccacttcctcatcctctacgtgccgctgctcgccacggtgttcggcatcgtcccgctcagcctcaacgagtggctgctggtcctgctggtggctctcccggtggtgctcatcgacgaggctctcaagctcgcgggcaggtgtacgagcccttcttcgggccccaccaggcggtccaggaagaagaagcagaagggcgagtagcgagcgggcgctaacatttgactccgtgctcagttactaaaccattccattaatcatgtaaacaaaagatgaacctcagtcagtcaatcaatcaatacaggagataacccattttcactgtttctctttctactctctctccaccctaacgccaaaacaacagcagcacagtagcttctttgttctcagaacaagttgttaattagttggcaacatatgttatcctgtgaattatgtagcgttgagtcagatcttcagatgatactttccagtttttttttcttttcttttggctgtaaatttctctcttgccagtgcagatggcaacgagagcaaggtcaggccagagggttggtcaaacaaagtttaactgccctcttgtggcccgaatgaatactgcagcttttgat

SEQ ID NO: 4019 - DNA, 2117 bp, Zea Mays
atctgctccctcccctatctgttttgctgagcaaagagagtggatattttggctgctagaagtgaccaagttcagttttccttgccatgttcagaggtcccactagcccctgttgaaaatatcaacttcaaaccatatgagcctgtgttggactggtgcataagagccacgtattggagtccatatgtattgctggcaccatgggaatacacccttgctgcatgttgaacaggtttaaggggcatctgtccattctagctgcttaaaaggcaaaattcagtgaaggtcgccctccctgccttgagttccacctacagaccactgcagggtgtggagctacttgtgttctagttggtgtagcctctccccagtcatcaagcttggtctgcctagagctggcatgccaccctcgccgtgaccaggtaacttcaagggtttccttagccgagctgtacatgttttgtgctctgcataagatagtgaggctcatatgatggtgagtaaatctccttaagacagttttgatggatgttatatgaaatttggagtaaaagctggctaaagttgggctgttaagttagctgtgattgagtttgttcagttcctgaaatctgtattgcagcacatggtgctcagtttagagccctttaggcatcaaaccatgtggttttggactgaagtttctataacaaacttggagacaatgttagggggataattcttggtaggggtcatgccattgaaactacatcaaactgggagtaatggtgcctaaatgtgtgctgtcagacttattttctctgaactagattcagttaactgaaatctggaatttcactgttggtgctcagtttggagtttttttggtgaccaaatcatgggtttttaggttaggagttctataacaaagtgaaataccaaggtaaggcaaacaagtttcatgtgaatagttgggcttgttactatgaagaaattgggggaaaacctattgtaaaattctgtgtcagacttgctatattgttgttttagttaagctgaaactggacttttcagtagattttgttctactttagtgcatcatagctattgctctgtgtatttttagtcttggagtgttataccaaagtggaagagcaatacttagggaatagatttggttcagtaagtggggtcttttgtcatgcgagtttgtgagataaaaggtattgaacaaagaggagagggatggagcagcaggactgatgagatcagattcagtgtttagtggggttactgaagattttttcatccctactggttgcacttgtgtgaagggatggagataagattgtagtacatatttgaaggtgctagaggtctcactccatgatgaaagtatccaagtttggaccgatttgggttgtaaaaaaatctcctctccctgctgtcctacatttctaggcaccaataaagataagtcttgggtgacgaaaaagggtatagtggtctcattcccttctgaaatatcaagtgctgcacctgttagtgcctgtccacagatggggccttatctgccttagttccctgtctacaaaaagggacaaattggatatttggctgggtgagctcgaccagattcagtgtcctggctcggcttgaatgttggcgtggtgttggtgcttgtaagccatgtatttgtgtccatgttgtgctggcaccctgggagtctttctccactgagttgtatacaagttcagagataattgattacatgttcagctaccttgagtgctgagttcagaaaagttcctcccagtcctcaagttccagcttttgttcactatttgtgtgagaagaagaagatgaaattcaagaagtggtttctgaagaggagtctgctttagtgcctgctcaacaagtaatgggagccatctaactggggtttaatagagggatttagacctccgtctctgcaacaaaggagaagttttattcacttatctttgggttagttacttcatgtggaggacttgaagcttagaatgtttttatatatctcttatggaaaggcttcacccttccaattattgtaataagttatgcacttcgagtactatcaggacttgtaataaatacat

SEQ ID NO: 4020 - DNA, 2126 bp, Zea Mays
atctgctccctcccctatctgttttgctgagcaaagagagtggatattttggctgctagaagtgaccaagttcagttttccttgccatgttcagaggtcccactagcccctgttgaaaatatcaacttcaaaccatatgagcctgtgttggactggtgcataagagccacgtattggagtccatatgtattgctggcaccatgggaatacacccttgctgcatgttgaacaggtttaaggggcatctgtccattctagctgcttaaaaggcaaaattcagtgaaggtcgccctccctgccttgagttccacctacagaccactgcagggtgtggagctacttgtgttctagttggtgtagcctctccccagtcatcaagcttggtctgcctagagctggcatgccaccctcgccgtgaccaggtaacttcaagggtttccttagccgagctgtacatgttttgtgctctgcataagatagtgaggctcatatgatggtgagtaaatctccttaagacagttttgatggatgttatatgaaatttggagtaaaagctggctaaagttgggctgttaagttagctgtgattgagtttgttcagttcctgaaatctgtattgcagcacatggtgctcagtttagagccctttaggcatcaaaccatgtggttttggactgaagtttctataacaaacttggagacaatgttagggggataattcttggtaggggtcatgccattgaaactacatcaaactgggagtaatggtgcctaaatgtgtgctgtcagacttattttctctgaactagattcagttaactgaaatctggaatttcactgttggtgctcagtttggagtttttttggtgaccaaatcatgggtttttaggttaggagttctataacaaagtgaaataccaaggtaaggcaaacaagtttcatgtgaatagttgggcttgttactatgaagaaattgggggaaaacctattgtaaaattctgtgtcagacttgctatattgttgttttagttaagctgaaactggacttttcagtagattttgttctactttagtgcatcatagctattgctctgtgtatttttagtcttggagtgttataccaaagtggaagagcaatacttagggaatagatttggttcagtaagtggggtcttttgtcatgcgagtttgtgagataaaaggtattgaacaaagaggagagggatggagcagcaggactgatgagatcagattcagtgtttagtggggttactgaagattttttcatccctactggttgcacttgtgtgaagggatggagataagattgtagtacatatttgaaggtgctagaggtctcactccatgatgaaagtatccaagtttggaccgatttgggttgtaaaaaaatctcctctccctgctgtcctacatttctaggcaccaataaagataagtcttgggtgacgaaaaagggtatagtggtctcattcccttctgaaatatcaagtgctgcacctgttagtgcctgtccacagatggggccttatctgccttagttccctgtctacaaaaagggacaaattggatatttggctgggtgagctcgaccagattcagtgtcctggctcggcttgaatgttggcgtggtgttggtgcttgtaagccatgtatttgtgtccatgttgtgctggcaccctgggagtctttctccactgagttgtatacaagttcagagataattgattacatgttcagctaccttgagtgctgagttcagaaaagttcctcccagtcctcaagttccagcttttgttcactatttgtgtgagaattcccagaagaagaagatgaaattcaagaagtggtttctgaagaggagtctgctttagtgcctgctcaacaagtaatgggagccatctaactggggtttaatagagggatttagacctccgtctctgcaacaaaggagaagttttattcacttatctttgggttagttacttcatgtggaggacttgaagcttagaatgtttttatatatctcttatggaaaggcttcacccttccaattattgtaataagttatgcacttcgagtactatcaggacttgtaataaatacat

SEQ ID NO: 4021 - DNA, 2387 bp, Zea Mays
gttttggcttctgggagagacccacgacgctccattcccccacgaaatgagactccgcgcgcaaaagccccgtttctcgccgcgcgcgagaaaaccctaccttttcccgccacccgcgcgcatttagtcgagcacatagtccgcaccccacatcaccaccgccaccatcagaacctctacgcaccgggtatcgaacgcatctacgatggagggcgacgacttcacgccggagggcggcaagctccccgagttcaagctagatgcgagacaagcgcagggtttcatctccttcttcaagaagctgccgcaggatccccgggccgttcgtctcttcgatcgcagggattattacactgcccatggcgagaatgctacgtttatcgcaaggacatactaccacacaatgtctgccttacgtcaactaggtagcagctctgatggaatcttaagtgccagcgtgagcaaggctatgtttgagaccattgcccgcaacattttgttggaaaggactgactgtacattggaactctatgagggaagtgggtcaaattggaggttaacaaagtccggaacacctggaaatattggtagttttgaagacattctgtttgcaaacaatgacatggaagattcaccagtgattgttgctttgtttccagcgtgccgggaaagtcagctgtatgtagggcttagttttttggatatgaccaataggaagcttgggttggctgagtttcccgaagatagccgattcactaatgttgaatcagctcttgttgcattaggttgcaaggagtgtcttctcccagcagattgtgaaaaatccattgacctaaacccccttcaagacgtcattagtaactgtaatgttctgttgactgagaaaaagaaggctgacttcaaatccagggatctcgcacaagatcttggtagaataatcaggggttctgttgagcctgtacgtgatctactatctcagtttgactatgctcttggtccccttggagctcttttatcttatgccgagttgctagcagatgacactaactatggaaattacacaattgagaagtacaatttgaactgctacatgcgacttgattctgctgcagttcgagcattaaacattgcagaagggaaaactgatgtaaacaagaacttcagtttgtttggtttgatgaacagaacttgtactgttgggatgggaaaaagattgctgaacagatggctgaaacaacctctattagatgttaatgaaattaataaccgactagacatggttcaggcttttgtagaagacccagaacttcgtcagggactccggcaacaacttaaaaggatatcagatattgatcgtctaacacatagtctccgaaagaaatcagctaatctgcagcctgttgttaagctttatcagtcctgtagcagaatcccatacatcaagggcattcttcagcaatataatggccaattttcaacattgataaggtcaaagtttcttgaaccgttagaagaatggatggcaaagaatcgatttggtcggttttcttctcttgttgagacagctattgatcttgctcagctggagaatggagagtacagaatatctcctctatattcttctgacttgggtgtactaaaggatgagctttctgtggttgaaaaccacataaacaatctgcacgtggatacagctagtgatctggatctttctgttgataagcaactgaagctagaaaaaggatcccttggacatgtgttcagaatgtcaaagaaagaggaacagaaagtcaggaagaaactcactggcagctacttaatcatagaaactcgtaaagatggtgtaaagttcacaaattctaagctgaaaaatctaagtgatcaataccaggcattgtttggtgagtacacaagttgtcagaaaaaggtggttggtgatgtagtgagggtttcaggcacattctcagaggtatttgaaaattttgctgcagttctgtcggagttggatgttttacaaagttttgctgatttggcaactagttgcccagttccttatgttaggccagacatcactgcgtcggatgaaggagatattgttctactgggtagcagacatccttgtctagaggcacaagatggtgttaactttatacccaatgattgcactctggtgagagggaaaagttggtttcagatcatcactggaccaaacatgggaggaaaatccacatttataagacaggagagctgcatattaatatattaagcagaagaatgaaggttcaaagaggacaaagtccatcatagcctcctcacggtggccaaaaaataacatacaggaacacctccataataaacagacaagaccactcaacccacctacacta

SEQ ID NO: 4022 - DNA, 3182 bp, Zea Mays
cctcgctcggtcccctccgcgcacgcgcaaaccaccgttcccccgcccgctccactgatccccatccccctcagatcctccctgcaaatcaaatccccatgcccgcagcgcctcgcctcggctgctctacctctatcccgcgacccgcgagattggaatcgcggagccccgccgccctcctccaaaacggcatcgtctctgctcggggtcacctttcctccctctcacttcctcttcttcatttaggtgtgttagttaagcagaggaggtggctttgcttgttgctcgtgtttctgcgtggatgcgtccaggggtttagcaagtcgctggccatgacggtgctcttcgagatcagggacaagaccttcttcgccgtcgcgattctggctatgcgccatcctaggaaactcgtattggcaggctgtttaactgcactaagaaggctgtttaactacactaagagtcatgacagctctatcgacttatctaggttgggttgcaccaaatctgagctgtcatgacaaaaatcatgatgcaatacaagcagaatatgcttcctgaaagacaaagtaatcacaaagttgaggcagataaaatggttgagcaaaccaatcaatctgaagttagctttgtgaaggctgagcatctgaatggaagtaaaattcggcagacaggcattgaggattactcctatgacaaggatgttgtagagatcaaactgccagacacagatctttcttctgattatggtgttcattttgtcaaggatgtctgcattgatgaaggagttcttcctgatcaaaagatttcatcagaaaagcaagtagaccaaaaagtgtctataagctttgattccagggaagagataagtgctgactctacaaaaactgcacatgagttgaaatcgaaaatagttgtcctacctgtcaagtgtgatactcatgacaatattgtggaacagaactcctcatgcaaaaagcgtgatcttgaagataacaatactacagatgtatctaccgagtctaatgatgagggattaaatcccaaacaattaccatttcatgaagttgcacaagattaccaggaggttgatagtgtcatttcggagagcaatgaaaatcaggaccgacttttcactggagatgcaacccatcaggtttcatcgaatgattgttatgaagctggaattagtatcgcgtcagaggccagtaatttatcattttaaaaactggcactacatcttgaaaaaaggataatttatcattttattacgttgtatacggactaataatttatcattatattataccgtatatctactaatattttatcattttattatgttgtatactgagtaatagttatatgtgctagaatttttactcttcgtagcatatgacaacgtttgacttctcttttagggacttgagaaatatgttatgacaaagctgtttaatcgggtattcgcatcagtcccagaagatgtgaagagtgatgaagaactttttgagaattaacttgtacgagaatgaaacatcatggctgactactggccagccactacattcgcgtattactcttccattgtgagtttttgctcttcactatccgatgcccaccaatctaagcagccaaggcatgcatacctaaccttctcgaggacaattcaggaggtatggtgcataaaaaagtaggaaccacaatgagattgtgatgctgctcagggcacatgccttttgtgtgatgtctgaatgttcatagcccttgtgctcctcatccacccattttaagaatatgctcacgtctcatgattgtgtctttcttcagaatctcagctgttcctcatgtggagaacctccagaggctcacatgtattcctacactcaccgcaacgagaatctgattgttcttgtgaggcacttgctgcctaaatattgtttacctggtgaatcagaaggaaagatttggatgtggacttgatgcttaaggtgtgaacgtgaaagtggggtccccagatcatcacgaagggtgataatgtcagctgaagcacactacctttcatttgggaagttccttgaacttagtttttcaagccactcaaccgctagaaggctgccaatatgcgggcattcactcaatacggattgtctgcgctttttttgggttgggctccaaagttgcaatgttcccgtattcctcagtcgaaatttacaatgcctgcaaaccacagcctactcttgagattcacaaccccgatatgcacaaagatgccccaaggttgctgccctcgtgtttcgtgctctgattgttgagtcttcaatgagagctgattccagttatatagagctacaatgcttccgagagaagggaaaccggcaaaggggaaaagagacgaatagaagggcattggtgccctctcacacacaggccaagtatacatccacatgccacaaggctgaagcttccacatgaacaagagaatggatcgtgatagctattgcaagatgatgcacaagtacataggatcagatgttacataacttgtgacacttccagtcataatttttgagccaatgacaatgcttcagaaaatggctgagctttgttaggtgttccattttagttatctgtctacttcctttaaactggttctggttatatgcgcgcgtatctattattatgtataagcattgttgctactggtccttatcgagaatcgcataaggagacaacttcatgggctaggaggcttaactgacggtttcgaccttgggatgaacatgctgttgggaggagacaaggaagatgatggcggttcaagcaagtcgcatggcaagagcggaaaccgaaagaagcacctgaagaacaacaagaggaagaggcattagccctggactcacactcctgtatcacttcaacatacttgagtgtgtgacatgtcagttattttacagatatgttagttttaccatagtattgttcgatgtgatcctagcatgcccgtgaatgctttggttccctatagagctgttgatgtcttacacaaatgtattacaaaacttttttcataacaatataacacacatttgtacataaattaccgtggtattatacgttcccgttgcaacgcacgggcacacacctagtgtagtctcaaggttaccaatttaaaccaatggcgg

SEQ ID NO: 4023 - DNA, 3331 bp, Zea Mays
atccccatgcccgcagcgcctcgcctcggctgctctacctctatcccgcgacccgcgagattggaatcgcggagccccgccgccctcctccaaaacggcatcgtctctgctcggggtcacctttcctccctctcacttcctcttcttcatttaggtgtgttagttaagcagaggaggtggctttgcttgttgctcgtgtttctgcgtggatgcgtccaggggtttagcaagtcgctggccatgacggtgctcttcgagatcagggacaagaccttcttcgccgtcgcggtgttcggtggtatgccgccgcggcgttcctctttgctcggcttttgggtgcgaccgtgggagattctggctatgcgccatcctaggaaactcgtattggcaggctgtttaactgcactaagaaggctgtttaactacactaagagtcatgacagctctatcgacttatctaggttgggttgcaccaaatctgagctgtcatgacaaaaatcatgatgcaatacaagcagaatatgcttcctgaaagacaaagtaatcacaaagttgaggcagataaaatggttgagcaaaccaatcaatctgaagttagctttgtgaaggctgagcatctgaatggaagtaaaattcggcagacaggcattgaggattactcctatgacaaggatgttgtagagatcaaactgccagacacagatctttcttctgattatggtgttcattttgtcaaggatgtctgcattgatgaaggagttcttcctgatcaaaagatttcatcagaaaagcaagtagaccaaaaagtgtctataagctttgattccagggaagagataagtgctgactctacaaaaactgcacatgagttgaaatcgaaaatagttgtcctacctgtcaagtgtgatactcatgacaatattgtggaacagaactcctcatgcaaaaagcgtgatcttgaagataacaatactacagatgtatctaccgagtctaatgatgagggattaaatcccaaacaattaccatttcatgaagttgcacaagattaccaggaggttgatagtgtcatttcggagagcaatgaaaatcaggaccgacttttcactggagatgcaacccatcaggtttcatcgaatgattgttatgaagctggaattagtatcgcgtcagaggccagtaatttatcattttaaaaactggcactacatcttgaaaaaaggataatttatcattttattacgttgtatacggactaataatttatcattatattataccgtatatctactaatattttatcattttattatgttgtatactgagtaatagttatatgtgctagaatttttactcttcgtagcatatgacaacgtttgacttctcttttagggacttgagaaatatgttatgacaaagctgtttaatcgggtattcgcatcagtcccagaagatgtgaagagtgatgaagaactttttgagaattaacttgtacgagaatgaaacatcatggctggtatgagaattaacttccctcgttttttggcatttttttgcttgatgtattgcatctctggcaagctgcacacatgaataggtttctggcagaaactgaaccaggattgaattgtacttgtgtcttgcgttgggttggtcttttggatctttctatgtattatgtctatactttgtagactactggccagccactacattcgcgtattactcttccattgtgagtttttgctcttcactatccgatgcccaccaatctaagcagccaaggcatgcatacctaaccttctcgaggacaattcaggaggtatggtgcataaaaaagtaggaaccacaatgagattgtgatgctgctcagggcacatgccttttgtgtgatgtctgaatgttcatagcccttgtgctcctcatccacccattttaagaatatgctcacgtctcatgattgtgtctttcttcagaatctcagctgttcctcatgtggagaacctccagaggctcacatgtattcctacactcaccgcaacgagaatctgattgttcttgtgaggcacttgctgcctaaatattgtttacctggtgaatcagaaggaaagatttggatgtggacttgatgcttaaggtgtgaacgtgaaagtggggtccccagatcatcacgaagggtgataatgtcagctgaagcacactacctttcatttgggaagttccttgaacttagtttttcaagccactcaaccgctagaaggctgccaatatgcgggcattcactcaatacggattgtctgcgctttttttgggttgggctccaaagttgcaatgttcccgtattcctcagtcgaaatttacaatgcctgcaaaccacagcctactcttgagattcacaaccccgatatgcacaaagatgccccaaggttgctgccctcgtgtttcgtgctctgattgttgagtcttcaatgagagctgattccagttatatagagctacaatgcttccgagagaagggaaaccggcaaaggggaaaagagacgaatagaagggcattggtgccctctcacacacaggccaagtatacatccacatgccacaaggctgaagcttccacatgaacaagagaatggatcgtgatagctattgcaagatgatgcacaagtacataggatcagatgttacataacttgtgacacttccagtcataatttttgagccaatgacaatgcttcagaaaatggctgagctttgttaggtgttccattttagttatctgtctacttcctttaaactggttctggttatatgcgcgcgtatctattattatgtataagcattgttgctactggtccttatcgagaatcgcataaggagacaacttcatgggctaggaggcttaactgacggtttcgaccttgggatgaacatgctgttgggaggagacaaggaagatgatggcggttcaagcaagtcgcatggcaagagcggaaaccgaaagaagcacctgaagaacaacaagaggaagaggcattagccctggactcacactcctgtatcacttcaacatacttgagtgtgtgacatgtcagttattttacagatatgttagttttaccatagtattgttcgatgtgatcctagcatgcccgtgaatgctttggttccctatagagctgttgatgtcttacacaaatgtattacaaaacttttttcataacaatataacacacatttgtacataaattaccgtggtattatacgttcccgttgcaacgcacgggcacacacctagtgtagtctcaaggttaccaatttaaaccaatggcgg

SEQ ID NO: 4024 - DNA, 3357 bp, Zea Mays
atccccatgcccgcagcgcctcgcctcggctgctctacctctatcccgcgacccgcgagattggaatcgcggagccccgccgccctcctccaaaacggcatcgtctctgctcggggtcacctttcctccctctcacttcctcttcttcatttaggtgtgttagttaagcagaggaggtggctttgcttgttgctcgtgtttctgcgtggatgcgtccaggggtttagcaagtcgctggccatgacggtgctcttcgagatcagggacaagaccttcttcgccgtcgcgattctggctatgcgccatcctaggaaactcgtattggcaggctgtttaactgcactaagaaggctgtttaactacactaagagtcatgacagctctatcgacttatctaggttgggttgcaccaaatctggcaaagtagttatttcttttgtgtgtgtctgtttgcttcctgcaatgcatagagctgtcatgacaaaaatcatgatgcaatacaagcagaatatgcttcctgaaagacaaagtaatcacaaagttgaggcagataaaatggttgagcaaaccaatcaatctgaagttagctttgtgaaggctgagcatctgaatggaagtaaaattcggcagacaggcattgaggattactcctatgacaaggatgttgtagagatcaaactgccagacacagatctttcttctgattatggtgttcattttgtcaaggatgtctgcattgatgaaggagttcttcctgatcaaaagatttcatcagaaaagcaagtagaccaaaaagtgtctataagctttgattccagggaagagataagtgctgactctacaaaaactgcacatgagttgaaatcgaaaatagttgtcctacctgtcaagtgtgatactcatgacaatattgtggaacagaactcctcatgcaaaaagcgtgatcttgaagataacaatactacagatgtatctaccgagtctaatgatgagggattaaatcccaaacaattaccatttcatgaagttgcacaagattaccaggaggttgatagtgtcatttcggagagcaatgaaaatcaggaccgacttttcactggagatgcaacccatcaggtttcatcgaatgattgttatgaagctggaattagtatcgcgtcagaggccagtaatttatcattttaaaaactggcactacatcttgaaaaaaggataatttatcattttattacgttgtatacggactaataatttatcattatattataccgtatatctactaatattttatcattttattatgttgtatactgagtaatagttatatgtgctagaatttttactcttcgtagcatatgacaacgtttgacttctcttttagggacttgagaaatatgttatgacaaagctgtttaatcgggtattcgcatcagtcccagaagatgtgaagagtgatgaagaactttttgagaattaacttgtacgagaatgaaacatcatggctgactactggccagccactacattcgcgtattactcttccattgtgagtttttgctcttcactatccgatgcccaccaatctaagcagccaaggcatgcatacctaaccttctcgaggacaattcaggaggtatggtgcataaaaaagtaggaaccacaatgagattgtgatgctgctcagggcacatgccttttgtgtgatgtctgaatgttcatagcccttgtgctcctcatccacccattttaagaatatgctcacgtctcatgattgtgtctttcttcagaatctcagctgttcctcatgtggagaacctccagaggctcacatgtattcctacactcaccgcaacgagaatctgattgttcttgtgaggcacttgctgcctaaatattgtttacctggtgaatcagaaggaaagatttggatgtggacttgatgcttaaggtgtgaacgtgaaagtggggtccccagatcatcacgaagggtgataatgtcagctgaagcacactacctttcatttgggaagttccttgaacttagtttttcaagccactcaaccgctagaaggctgccaatatgcgggcattcactcaatacggattgtctgcgctttttttgggttgggctccaaagttgcaatgttcccgtattcctcagtcgaaatttacaatgcctgcaaaccacagcctactcttgagattcacaaccccgatatgcacaaagatgccccaaggttgctgccctcgtgtttcgtgctctgattgttgagtcttcaatgagagctgattccagttatatagaggtgaacaagcttttgattatttcttttgttaatttggtgcaacatatagaggtgaacaagcttattaaaggaagatccttgtacaatcaagagttcatacaatagatgaaacgatattgtgattctctcaatggtggcttcatgagcaagcaatcattcaccttgttcactaaaatttcagactgtagctcagataaggctttgagcattccttgctacaatgcttccgagagaagggaaaccggcaaaggggaaaagagacgaatagaagggcattggtgccctctcacacacaggccaagtatacatccacatgccacaaggctgaagcttccacatgaacaagagaatggatcgtgatagctattgcaagatgatgcacaagtacataggatcagatgttacataacttgtgacacttccagtcataatttttgagccaatgacaatgcttcagaaaatggctgagctttgttaggtgttccattttagttatctgtctacttcctttaaactggttctggttatatgcgcgcgtatctattattatgtataagcattgttgctactggtccttatcgagaatcgcataaggagacaacttcatgggctaggaggcttaactgacggtttcgaccttgggatgaacatgctgttgggaggagacaaggaagatgatggcggttcaagcaagtcgcatggcaagagcggaaaccgaaagaagcacctgaagaacaacaagaggaagaggcattagccctggactcacactcctgtatcacttcaacatacttgagtgtgtgacatgtcagttattttacagatatgttagttttaccatagtattgttcgatgtgatcctagcatgcccgtgaatgctttggttccctatagagctgttgatgtcttacacaaatgtattacaaaacttttttcataacaatataacacacatttgtacataaattaccgtggtattatacgttcccgttgcaacgcacgggcacacacctagtgtagtctcaaggttaccaatttaaaccaatggcgg

SEQ ID NO: 4025 - DNA, 3479 bp, Zea Mays
gtcccctccgcgcacgcgcaaaccaccgttcccccgcccgctccactgatccccatccccctcagatcctccctgcaaatcaaatccccatgcccgcagcgcctcgcctcggctgctctacctctatcccgcgacccgcgagattggaatcgcggagccccgccgccctcctccaaaacggcatcgtctctgctcggggtcacctttcctccctctcacttcctcttcttcatttaggtgtgttagttaagcagaggaggtggctttgcttgttgctcgtgtttctgcgtggatgcgtccaggggtttagcaagtcgctggccatgacggtgctcttcgagatcagggacaagaccttcttcgccgtcgcgattctggctatgcgccatcctaggaaactcgtattggcaggctgtttaactgcactaagaaggctgtttaactacactaagagtcatgacagctctatcgacttatctaggttgggttgcaccaaatctgagctgtcatgacaaaaatcatgatgcaatacaagcagaatatgcttcctgaaagacaaagtaatcacaaagttgaggcagataaaatggttgagcaaaccaatcaatctgaagttagctttgtgaaggctgagcatctgaatggaagatgtctgcattgatgaaggagttcttcctgatcaaaagatttcatcagaaaagcaagtagaccaaaaagtgtctataagctttgattccagggaagagataagtgctgactctacaaaaactgcacatgagttgaaatcgaaaatagttgtcctacctgtcaagtgtgatactcatgacaatattgtggaacagaactcctcatgcaaaaagcgtgatcttgaagataacaatactacagatgtatctaccgagtctaatgatgagggattaaatcccaaacaattaccatttcatgaagttgcacaagattaccaggaggttgatagtgtcatttcggagagcaatgaaaatcaggaccgacttttcactggagatgcaacccatcaggtttcatcgaatgattgttatgaagctggaattagtatcgcgtcagaggccagtaatttatcattttaaaaactggcactacatcttgaaaaaaggataatttatcattttattacgttgtatacggactaataatttatcattatattataccgtatatctactaatattttatcattttattatgttgtatactgagtaatagttatatgtgctagaatttttactcttcgtagcatatgacaacgtttgacttctcttttagggacttgagaaatatgttatgacaaagctgtttaatcgggtattcgcatcagtcccagaagatgtgaagagtgatgaagaactttttgagaattaacttgtacgagaatgaaacatcatggctgactactggccagccactacattcgcgtattactcttccattgtgagtttttgctcttcactatccgatgcccaccaatctaagcagccaaggcatgcatacctaaccttctcgaggacaattcaggaggtttgcttttttcctccctgttttatactggcatactactatatacttcattgatttttttagcagggtaaaaaatataaagatagatttttagaaaataacaaatagttcataaaattatttcagctgatgaaccttttagagttcttttattatataatgccattaattgctaacagggtgcacgtcttctatttctaggtatggtgcataaaaaagtaggaaccacaatgagattgtgatgctgctcagggcacatgccttttgtgtgatgtctgaatgttcatagcccttgtgctcctcatccacccattttaagaatatgctcacgtctcatgattgtgtctttcttcagaatctcagctgttcctcatgtggagaacctccagaggctcacatgtattcctacactcaccgcaacgagaatctgattgttcttgtgaggcacttgctgcctaaatattgtttacctggtgaatcagaaggaaagatttggatgtggacttgatgcttaaggtgtgaacgtgaaagtggggtccccagatcatcacgaagggtgataatgtcagctgaagcacactacctttcatttgggaagttccttgaacttagtttttcaagccactcaaccgctagaaggctgccaatatgcgggcattcactcaatacggattgtctgcgctttttttgggttgggctccaaagttgcaatgttcccgtattcctcagtcgaaatttacaatgcctgcaaaccacagcctactcttgagattcacaaccccgatatgcacaaagatgccccaaggttgctgccctcgtgtttcgtgctctgattgttgagtcttcaatgagagctgattccagttatatagaggtgaacaagcttttgattatttcttttgttaatttggtgcaacatatagaggtgaacaagcttattaaaggaagatccttgtacaatcaagagttcatacaatagatgaaacgatattgtgattctctcaatggtggcttcatgagcaagcaatcattcaccttgttcactaaaatttcagactgtagctcagataaggctttgagcattccttgctacaatgcttccgagagaagggaaaccggcaaaggggaaaagagacgaatagaagggcattggtgccctctcacacacaggccaagtatacatccacatgccacaaggctgaagcttccacatgaacaagagaatggatcgtgatagctattgcaagatgatgcacaagtacataggatcagatgttacataacttgtgacacttccagtcataatttttgagccaatgacaatgcttcagaaaatggctgagctttgttaggtgttccattttagttatctgtctacttcctttaaactggttctggttatatgcgcgcgtatctattattatgtataagcattgttgctactggtccttatcgagaatcgcataaggagacaacttcatgggctaggaggcttaactgacggtttcgaccttgggatgaacatgctgttgggaggagacaaggaagatgatggcggttcaagcaagtcgcatggcaagagcggaaaccgaaagaagcacctgaagaacaacaagaggaagaggcattagccctggactcacactcctgtatcacttcaacatacttgagtgtgtgacatgtcagttattttacagatatgttagttttaccatagtattgttcgatgtgatcctagcatgcccgtgaatgctttggttccctatagagctgttgatgtcttacacaaatgtattacaaaacttttttcataacaatataacacacatttgtacataaattaccgtggtattatacgttcccgttgcaacgcacgggcacacacctagtgtagtctcaaggttaccaatttaaaccaatggcgg

SEQ ID NO: 4026 - DNA, 3931 bp, Zea Mays
atccccatgcccgcagcgcctcgcctcggctgctctacctctatcccgcgacccgcgagattggaatcgcggagccccgccgccctcctccaaaacggcatcgtctctgctcggggtcacctttcctccctctcacttcctcttcttcatttaggtgtgttagttaagcagaggaggtggctttgcttgttgctcgtgtttctgcgtggatgcgtccaggggtttagcaagtcgctggccatgacggtgctcttcgagatcagggacaagaccttcttcgccgtcgcgattctggctatgcgccatcctaggaaactcgtattggcaggctgtttaactgcactaagaaggctgtttaactacactaagagtcatgacagctctatcgacttatctaggttgggttgcaccaaatctggatgtctgcattgatgaaggagttcttcctgatcaaaagatttcatcagaaaagcaagtagaccaaaaagtgtctataagctttgattccagggaagagataagtgctgactctacaaaaactgcacatgagttgaaatcgaaaatagttgtcctacctgtcaagtgtgatactcatgacaatattgtggaacagaactcctcatgcaaaaagcgtgatcttgaagataacaatactacagatgtatctaccgagtctaatgatgagggattaaatcccaaacaattaccatttcatgaagttgcacaagattaccaggaggttgatagtgtcatttcggagagcaatgaaaatcaggaccgacttttcactggagatgcaacccatcaggtatgcaactacttaagttatacaagataatatttgcaactaatctgtatgatcaccacttcagcccttgcaattcattcttgccttcaatgtgtatcatattgtttgatgattatatgtaaaatgtaaattatctgttctgttctccaaaaaatgtgatttggcattacatctgtagtttatttggctcaataaatgagcaactgcatgtataattttaactattccatcacttatgtacctcaacaccactggagcacataacatgattgatctctgttacaggtttcatcgaatgattgttatgaagctggaattagtatcgcgtcagaggccagtaatttatcattttaaaaactggcactacatcttgaaaaaaggataatttatcattttattacgttgtatacggactaataatttatcattatattataccgtatatctactaatattttatcattttattatgttgtatactgagtaatagttatatgtgctagaatttttactcttcgtagcatatgacaacgtttgacttctcttttagggacttgagaaatatgttatgacaaagctgtttaatcgggtattcgcatcagtcccagaagatgtgaagagtgatgaagaactttttgagaattaacttgtacgagaatgaaacatcatggctgactactggccagccactacattcgcgtattactcttccattgtgagtttttgctcttcactatccgatgcccaccaatctaagcagccaaggcatgcatacctaaccttctcgaggacaattcaggaggtatggtgcataaaaaagtaggaaccacaatgagattgtgatgctgctcagggcacatgccttttgtgtgatgtctgaatgttcatagcccttgtgctcctcatccacccattttaagaatatgctcacgtctcatgattgtgtctttcttcagaatctcagctgttcctcatgtggagaacctccagaggctcacatgtattcctacactcaccgcaacgagaatctgattgttcttgtgaggcacttgctgcctaaatattgtttacctggtgaatcagaaggaaagatttggatgtggacttgatgcttaaggtgtgaacgtgaaagtggggtccccagatcatcacgaagggtgataatgtcagctgaagcacactacctttcatttgggaagttccttgaacttagtttttcaagccactcaaccgctagaaggctgccaatatgcgggcattcactcaatacggattgtctgcgctttttttgggttgggctccaaagttgcaatgttcccgtattcctcagtcgaaatttacaatgcctgcaaaccacagcctactcttgagattcacaaccccgatatgcacaaagatgccccaaggttgctgccctcgtgtttcgtgctctgattgttgagtcttcaatgagagctgattccagttatatagaggtgaacaagcttttgattatttcttttgttaatttggtgcaacatatagaggtgaacaagcttattaaaggaagatccttgtacaatcaagagttcatacaatagatgaaacgatattgtgattctctcaatggtggcttcatgagcaagcaatcattcaccttgttcactaaaatttcagactgtagctcagataaggctttgagcattccttggtagtattatatttcctttgtcgccaccaactttaagtagtattaaaagaatttttcttaactcttacatttcattttccctgttcttttttgcgtaatagctacaatgcttccgagagaagggaaaccggcaaaggggaaaagagacgaatagaagggcattggtgccctctcacacacaggccaagtatacatccacatgccacaaggctgaagcttccacatgaacaagagaatggtgcacattgccttacatgacacatttatttcccaatcactgtgcaattcttagtttagttctgtattggttgttgccaaataatttgtgagatattgagatcgataacttggtttaagtattgcaccttttgacaaatataatttgccatgaacatggatattgaaggctatactctgaaatgcagtctcactacataattgactaataaaaatatgttttcttattacatgattctgtttagtagaatctatggttttaaggtcatagtagttttacgatcgtatacttgaagttctggtccgattcaggatcactattttaacaaccttgtgtggttaatttgcaggatcgtgatagctattgcaagatgatgcacaagtacataggatcagatgttacataacttgtgacacttccagtcataatttttgagccaatgacaatgcttcagaaaatggctgagctttgttaggtgttccattttagttatctgtctacttcctttaaactggttctggttatatgcgcgcgtatctattattatgtataagcattgttgctactggtccttatcgagaatcgcataaggagacaacttcatgggtatgttcagatagtttatcttttgttgcttattgtccgtgtaaatacacaaggcgcctttgatagcacttggtttccctgttgggatttttagcttgtcttagtatccaacttacaccaccatctgatatctgatcctgacaacaggctaggaggcttaactgacggtttcgaccttgggatgaacatgctgttgggaggagacaaggaagatgatggcggttcaagcaagtcgcatggcaagagcggaaaccgaaagaagcacctgaagaacaacaagaggaagaggcattagccctggactcacactcctgtatcacttcaacatacttgagtgtgtgacatgtcagttattttacagatatgttagttttaccatagtattgttcgatgtgatcctagcatgcccgtgaatgctttggttccctatagagctgttgatgtcttacacaaatgtattacaaaacttttttcataacaatataacacacatttgtacataaattaccgtggtattatacgttcccgttgcaacgcacgggcacacacctagtgtagtctcaaggttaccaatttaaaccaatggcgg

SEQ ID NO: 4027 - DNA, 4007 bp, Zea Mays
ctcggtcccctccgcgcacgcgcaaaccaccgttcccccgcccgctccactgatccccatccccctcagatcctccctgcaaatcaaatccccatgcccgcagcgcctcgcctcggctgctctacctctatcccgcgacccgcgagattggaatcgcggagccccgccgccctcctccaaaacggcatcgtctctgctcggggtcacctttcctccctctcacttcctcttcttcatttaggtgtgttagttaagcagaggaggtggctttgcttgttgctcgtgtttctgcgtggatgcgtccaggggtttagcaagtcgctggccatgacggtgctcttcgagatcagggacaagaccttcttcgccgtcgcgttatatttgctagattctggctatgcgccatcctaggaaactcgtattggcaggctgtttaactgcactaagaaggctgtttaactacactaagagtgagtatattctgaattttacatgctgacctatggtatccttttattatatgttcagattttaacaaataatttaattgatttagttattaattttaggtcatgacagctctatcgacttatctaggttgggttgcaccaaatctgagctgtcatgacaaaaatcatgatgcaatacaagcagaatatgcttcctgaaagacaaagtaatcacaaagttgaggcagataaaatggttgagcaaaccaatcaatctgaagttagctttgtgaaggctgagcatctgaatggaagtaaaattcggcagacaggcattgaggattactcctatgacaaggatgttgtagagatcaaactgccagacacagatctttcttctgattatggtgttcattttgtcaaggatgtctgcattgatgaaggagttcttcctgatcaaaagatttcatcagaaaagcaagtagaccaaaaagtgtctataagctttgattccagggaagagataagtgctgactctacaaaaactgcacatgagttgaaatcgaaaatagttgtcctacctgtcaagtgtgatactcatgacaatattgtggaacagaactcctcatgcaaaaagcgtgatcttgaagataacaatactacagatgtatctaccgagtctaatgatgagggattaaatcccaaacaattaccatttcatgaagttgcacaagattaccaggaggttgatagtgtcatttcggagagcaatgaaaatcaggaccgacttttcactggagatgcaacccatcaggtatgcaactacttaagttatacaagataatatttgcaactaatctgtatgatcaccacttcagcccttgcaattcattcttgccttcaatgtgtatcatattgtttgatgattatatgtaaaatgtaaattatctgttctgttctccaaaaaatgtgatttggcattacatctgtagtttatttggctcaataaatgagcaactgcatgtataattttaactattccatcacttatgtacctcaacaccactggagcacataacatgattgatctctgttacaggtttcatcgaatgattgttatgaagctggaattagtatcgcgtcagaggccagtaatttatcattttaaaaactggcactacatcttgaaaaaaggataatttatcattttattacgttgtatacggactaataatttatcattatattataccgtatatctactaatattttatcattttattatgttgtatactgagtaatagttatatgtgctagaatttttactcttcgtagcatatgacaacgtttgacttctcttttagggacttgagaaatatgttatgacaaagctgtttaatcgggtattcgcatcagtcccagaagatgtgaagagtgatgaagaactttttgagaattaacttgtacgagaatgaaacatcatggctgactactggccagccactacattcgcgtattactcttccattgtgagtttttgctcttcactatccgatgcccaccaatctaagcagccaaggcatgcatacctaaccttctcgaggacaattcaggaggtatggtgcataaaaaagtaggaaccacaatgagattgtgatgctgctcagggcacatgccttttgtgtgatgtctgaatgttcatagcccttgtgctcctcatccacccattttaagaatatgctcacgtctcatgattgtgtctttcttcagaatctcagctgttcctcatgtggagaacctccagaggctcacatgtattcctacactcaccgcaacgagaatctgattgttcttgtgaggcacttgctgcctaaatattgtttacctggtgaatcagaaggaaagatttggatgtggacttgatgcttaaggtgtgaacgtgaaagtggggtccccagatcatcacgaagggtgataatgtcagctgaagcacactacctttcatttgggaagttccttgaacttagtttttcaagccactcaaccgctagaaggctgccaatatgcgggcattcactcaatacggattgtctgcgctttttttgggttgggctccaaagttgcaatgttcccgtattcctcagtcgaaatttacaatgcctgcaaaccacagcctactcttgagattcacaaccccgatatgcacaaagatgccccaaggttgctgccctcgtgtttcgtgctctgattgttgagtcttcaatgagagctgattccagttatatagaggtgaacaagcttttgattatttcttttgttaatttggtgcaacatatagaggtgaacaagcttattaaaggaagatccttgtacaatcaagagttcatacaatagatgaaacgatattgtgattctctcaatggtggcttcatgagcaagcaatcattcaccttgttcactaaaatttcagactgtagctcagataaggctttgagcattccttgctacaatgcttccgagagaagggaaaccggcaaaggggaaaagagacgaatagaagggcattggtgccctctcacacacaggccaagtatacatccacatgccacaaggctgaagcttccacatgaacaagagaatggtgcacattgccttacatgacacatttatttcccaatcactgtgcaattcttagtttagttctgtattggttgttgccaaataatttgtgagatattgagatcgataacttggtttaagtattgcaccttttgacaaatataatttgccatgaacatggatattgaaggctatactctgaaatgcagtctcactacataattgactaataaaaatatgttttcttattacatgattctgtttagtagaatctatggttttaaggtcatagtagttttacgatcgtatacttgaagttctggtccgattcaggatcactattttaacaaccttgtgtggttaatttgcaggatcgtgatagctattgcaagatgatgcacaagtacataggatcagatgttacataacttgtgacacttccagtcataatttttgagccaatgacaatgcttcagaaaatggctgagctttgttaggctaggaggcttaactgacggtttcgaccttgggatgaacatgctgttgggaggagacaaggaagatgatggcggttcaagcaagtcgcatggcaagagcggaaaccgaaagaagcacctgaagaacaacaagaggaagaggcattagccctggactcacactcctgtatcacttcaacatacttgagtgtgtgacatgtcagttattttacagatatgttagttttaccatagtattgttcgatgtgatcctagcatgcccgtgaatgctttggttccctatagagctgttgatgtcttacacaaatgtattacaaaacttttttcataacaatataacacacatttgtacataaattaccgtggtattatacgttcccgttgcaacgcacgggcacacacctagtgtagtctcaaggttaccaatttaaaccaatggcgg

SEQ ID NO: 4028 - DNA, 1432 bp, Zea Mays
gatgcagttacttggatagcctgcaagtgtgtatgatttagaacttcggaagttcggattatgtagattgaagcatatgtgcaacagctagagagcagtaagctaaaacttgcaagcctggagcaagaactccagaaagctcgacagcagggaatcttcatttctagttctggagatcaaactcatactatgagtggaaatggagctatgaccttcgatttagaatattctcgatggcaagaggaacaaaataagcagataaatgagctgaggactgcagtaaatgctcatgcaagtgatagtgacctccgtcttatagtcgatgggataatggcacattatgacgagatattcaggctgaagggcattgctgcaaaggctgatgtgttccatatactttcaggcatgtggaaaacatctgctgaaaggtgcttcttgtggcttgggggtttccgttcgtctgagcttctaaagctccttgtgaatcagcttgagcctctaactgagcagcaattgatggggctgtccaatctgcagcaatcttctcagcaggctgaggatgcattgtcacaaggaatggaagcattgcagcagtccttggcagaaacgctggctgggtcccttggtccatcaggatcttctggaaacgtggcaaactatatgggtcaaatggctatggccatgggaaaacttggcacactcgagaatttccttcgccaggctgacaatctacgacagcagaccttacatcagatgcaacgtatcctgacaatccgacaagctgctcgtgcgcttcttgcaatccatgactacttttcacgtttgcgcgcactgagttctctttggcttgctaggccacgagagtaacatcacccccgttggggtcactcgatgaactgatctgtgaatgtgggactgctggctgcaaactcgcaaagcatttgcagatgactggaggatcagtcctctctgtacaagttgtattaacatcttctggtctcatattgtgctccagtgttgtacaatttagggaaaagcttggattaacttgtaagttatcatgaatttgttattggcatattgtacaattgtattagcaataaaaatagaagtacataagtgctggaagcctggaaggatatccagaatctatattggttggaaacgagcagcagaagattgttatagattgttatgttgctttgaatattcggttgtaagtgccttttttggggtatatagaacaaagaaagattcaggagagatgtagggattcaccagaggctatcggggattgtgcttctaggagctccctggactatctctagcaagtctcatattaagctctactctgtaaacagtgatacattgaattgaacgtgctacggttatgatggtaacatttgctatgcattttttaggatgaattctg

SEQ ID NO: 4029 - DNA, 1961 bp, Zea Mays
gtgctctgctgctgcagcctgcagcggctttccttcccccaccatcgcgtgtgagtccacggtgtgatgtcacggagcggtggcggctttcccgatccactgtgcgggagaaatccccgtgcagccttcttccagctcttcctactctttgctactcgtcttcgctgatttctgccttaattccatcccttccctgcctagaacttgctttgcttcaccccatcacagcttttggtgcctcgtcatcggcgacctaaccgccggcgaccagataaactaagccaggcccttcgctccgaaagtcgtctctcgtagagagcacttgctcacctgctcctcgccctcctctgctggcagtggacttgcgcggagtggagatccatccggacctggttcgatttcttcatctcggctggcttgtcagcctatcataaggaaagtgaaaaagagacaacaaagcaatttgttgtctcattcttaggagctggcgagcactcggcatggcagatgctagttcgaggactgacacctcgactgttgtagacatggatgataagaatcaaaggttagaaaacggacagagtggagccatggtcccggcttctaattcatctgaccggtctgacagatctgacaaacctatggaccagaaggttttacgacggcttgcccaaaatcgtgaggcagcaagaaaaagccggctgaggaaaaaggcatatgtgcaacagctagagagcagtaagctaaaacttgcaagcctggagcaagaactccagaaagctcgacagcagggaatcttcatttctagttctggagatcaaactcatactatgagtggaaatggagctatgaccttcgatttagaatattctcgatggcaagaggaacaaaataagcagataaatgagctgaggactgcagtaaatgctcatgcatgtggaaaacatctgctgaaaggtgcttcttgtggcttgggggtttccgttcgtctgagcttctaaagctccttgtgaatcagcttgagcctctaactgagcagcaattgatggggctgtccaatctgcagcaatcttctcagcaggctgaggatgcattgtcacaaggaatggaagcattgcagcagtccttggcagaaacgctggctgggtcccttggtccatcaggatcttctggaaacgtggcaaactatatgggtcaaatggctatggccatgggaaaacttggcacactcgagaatttccttcgccaggctgacaatctacgacagcagaccttacatcagatgcaacgtatcctgacaatccgacaagctgctcgtgcgcttcttgcaatccatgactacttttcacgtttgcgcgcactgagttctctttggcttgctaggccacgagagtaacatcacccccgttggggtcactcgatgaactgatctgtgaatgtgggactgctggctgcaaactcgcaaagcatttgcagatgactggaggatcagtcctctctgtacaagttgtattaacatcttctggtctcatattgtgctccagtgttgtacaatttagggaaaagcttggattaacttgtaagttatcatgaatttgttattggcatattgtacaattgtattagcaataaaaatagaagtacataagtgctggaagcctggaaggatatccagaatctatattggttggaaacgagcagcagaagattgttatagattgttatgttgctttgaatattcggttgtaagtgccttttttggggtatatagaacaaagaaagattcaggagagatgtagggattcaccagaggctatcggggattgtgcttctaggagctccctggactatctctagcaagtctcatattaagctctactctgtaaacagtgatacattgaattgaacgtgctacggttatgatggtaacatttgctatgcattttttaggatgaattctg

SEQ ID NO: 4030 - DNA, 1982 bp, Zea Mays
tgtgcgggagaaatccccgtgcagccttcttccagctcttcctactctttgctactcgtcttcgctgatttctgccttaattccatcccttccctgcctagaacttgctttgcttcaccccatcacagcttttggtgcctcgtcatcggcgacctaaccgccggcgaccagataaactaagccaggcccttcgctccgaaagtcgtctctcgtagagagcacttgctcacctgctcctcgccctcctctgctggcagtggacttgcgcggagtggagatccatccggacctggttcgatttcttcatctcggttgcttctctgtccagtgggtggatcactggattgtgggttgtgctaactgcaggctggcttgtcagcctatcataaggaaagtgaaaaagagacaacaaagcaatttgttgtctcattcttaggagctggcgagcactcggcatggcagatgctagttcgaggactgacacctcgactgttgtagacatggatgataagaatcaaaggttagaaaacggacagagtggagccatggtcccggcttctaattcatctgaccggtctgacagatctgacaaacctatggaccagaaggttttacgacggcttgcccaaaatcgtgaggcagcaagaaaaagccggctgaggaaaaaggcatatgtgcaacagctagagagcagtaagctaaaacttgcaagcctggagcaagaactccagaaagctcgacagcagggaatcttcatttctagttctggagatcaaactcatactatgagtggaaatggagctatgaccttcgatttagaatattctcgatggcaagaggaacaaaataagcagataaatgagctgaggactgcagtaaatgctcatgcaagtgatagtgacctccgtcttatagtcgatgggataatggcacattatgacgagatattcaggctgaagggcattgctgcaaaggctgatgtgttccatatactttcaggcatgtggaaaacatctgctgaaagctccttgtgaatcagcttgagcctctaactgagcagcaattgatggggctgtccaatctgcagcaatcttctcagcaggctgaggatgcattgtcacaaggaatggaagcattgcagcagtccttggcagaaacgctggctgggtcccttggtccatcaggatcttctggaaacgtggcaaactatatgggtcaaatggctatggccatgggaaaacttggcacactcgagaatttccttcgccaggctgacaatctacgacagcagaccttacatcagatgcaacgtatcctgacaatccgacaagctgctcgtgcgcttcttgcaatccatgactacttttcacgtttgcgcgcactgagttctctttggcttgctaggccacgagagtaacatcacccccgttggggtcactcgatgaactgatctgtgaatgtgggactgctggctgcaaactcgcaaagcatttgcagatgactggaggatcagtcctctctgtacaagttgtattaacatcttctggtctcatattgtgctccagtgttgtacaatttagggaaaagcttggattaacttgtaagttatcatgaatttgttattggcatattgtacaattgtattagcaataaaaatagaagtacataagtgctggaagcctggaaggatatccagaatctatattggttggaaacgagcagcagaagattgttatagattgttatgttgctttgaatattcggttgtaagtgccttttttggggtatatagaacaaagaaagattcaggagagatgtagggattcaccagaggctatcggggattgtgcttctaggagctccctggactatctctagcaagtctcatattaagctctactctgtaaacagtgatacattgaattgaacgtgctacggttatgatggtaacatttgctatgcattttttaggatgaattctg

SEQ ID NO: 4031 - DNA, 1994 bp, Zea Mays
acggagcggtggcggctttcccgatccactgtgcgggagaaatccccgtgcagccttcttccagctcttcctactctttgctactcgtcttcgctgatttctgccttaattccatcccttccctgcctagaacttgctttgcttcaccccatcacagcttttggtgcctcgtcatcggcgacctaaccgccggcgaccagataaactaagccaggcccttcgctccgaaagtcgtctctcgtagagagcacttgctcacctgctcctcgccctcctctgctggcagtggacttgcgcggagtggagatccatccggacctggttcgatttcttcatctcggttgcttctctgtccagtgggtggatcactggattgtgggttgtgctaactgcaggctggcttgtcagcctatcataaggaaagtgaaaaagagacaacaaagcaatttgttgtctcattcttaggagctggcgagcactcggcatggcagatgctagttcgaggactgacacctcgactgttgtagacatggatgataagaatcaaaggttagaaaacggacagagtggagccatggtcccggcttctaattcatctgaccggtctgacagatctgacaaacctatggaccagaaggttttacgacggcttgcccaaaatcgtgaggcagcaagaaaaagccggctgaggaaaaaggcatatgtgcaacagctagagagcagtaagctaaaacttgcaagcctggagcaagaactccagaaagctcgacagcagggaatcttcatttctagttctggagatcaaactcatactatgagtggaaatggagctatgaccttcgatttagaatattctcgatggcaagaggaacaaaataagcagataaatgagctgaggactgcagtaaatgctcatgcaagtgatagtgacctccgtcttatagtcgatgggataatggcacattatgacgagatattcaggctgaagggcattgctgcaaaggctgatgtgttccatatactttcaggcatgtggaaaacatctgctgaaaggtgcttcttgtggcttgggggtttccgttcgtctgagcttctaaagcaatcttctcagcaggctgaggatgcattgtcacaaggaatggaagcattgcagcagtccttggcagaaacgctggctgggtcccttggtccatcaggatcttctggaaacgtggcaaactatatgggtcaaatggctatggccatgggaaaacttggcacactcgagaatttccttcgccaggctgacaatctacgacagcagaccttacatcagatgcaacgtatcctgacaatccgacaagctgctcgtgcgcttcttgcaatccatgactacttttcacgtttgcgcgcactgagttctctttggcttgctaggccacgagagtaacatcacccccgttggggtcactcgatgaactgatctgtgaatgtgggactgctggctgcaaactcgcaaagcatttgcagatgactggaggatcagtcctctctgtacaagttgtattaacatcttctggtctcatattgtgctccagtgttgtacaatttagggaaaagcttggattaacttgtaagttatcatgaatttgttattggcatattgtacaattgtattagcaataaaaatagaagtacataagtgctggaagcctggaaggatatccagaatctatattggttggaaacgagcagcagaagattgttatagattgttatgttgctttgaatattcggttgtaagtgccttttttggggtatatagaacaaagaaagattcaggagagatgtagggattcaccagaggctatcggggattgtgcttctaggagctccctggactatctctagcaagtctcatattaagctctactctgtaaacagtgatacattgaattgaacgtgctacggttatgatggtaacatttgctatgcattttttaggatgaattctg

SEQ ID NO: 4032 - DNA, 2147 bp, Zea Mays
gctgcagcctgcagcggctttccttcccccaccatcgcgtgtgagtccacggtgtgatgtcacggagcggtggcggctttcccgatccactgtgcgggagaaatccccgtgcagccttcttccagctcttcctactctttgctactcgtcttcgctgatttctgccttaattccatcccttccctgcctagaacttgctttgcttcaccccatcacagcttttggtgcctcgtcatcggcgacctaaccgccggcgaccagataaactaagccaggcccttcgctccgaaagtcgtctctcgtagagagcacttgctcacctgctcctcgccctcctctgctggcagtggacttgcgcggagtggagatccatccggacctggttcgatttcttcatctcggttgcttctctgtccagtgggtggatcactggattgtgggttgtgctaactgcaggctggcttgtcagcctatcataaggaaagtgaaaaagagacaacaaagcaatttgttgtctcattcttaggagctggcgagcactcggcatggcagatgctagttcgaggactgacacctcgactgttgtagacatggatgataagaatcaaaggattattttacgaaatttcaacttctctctgtgggacatctaatggtacaggtcttggagagatgcatgtaaagtgttagaaaacggacagagtggagccatggtcccggcttctaattcatctgaccggtctgacagatctgacaaacctatggaccagaaggttttacgacggcttgcccaaaatcgtgaggcagcaagaaaaagccggctgaggaaaaaggcatatgtgcaacagctagagagcagtaagctaaaacttgcaagcctggagcaagaactccagaaagctcgacagcagggaatcttcatttctagttctggagatcaaactcatactatgagtggaaatggagctatgaccttcgatttagaatattctcgatggcaagaggaacaaaataagcagataaatgagctgaggactgcagtaaatgctcatgcaagtgatagtgacctccgtcttatagtcgatgggataatggcacattatgacgagatattcaggctgaagggcattgctgcaaaggctgatgtgttccatatactttcaggcatgtggaaaacatctgctgaaagctccttgtgaatcagcttgagcctctaactgagcagcaattgatggggctgtccaatctgcagcaatcttctcagcaggctgaggatgcattgtcacaaggaatggaagcattgcagcagtccttggcagaaacgctggctgggtcccttggtccatcaggatcttctggaaacgtggcaaactatatgggtcaaatggctatggccatgggaaaacttggcacactcgagaatttccttcgccaggctgacaatctacgacagcagaccttacatcagatgcaacgtatcctgacaatccgacaagctgctcgtgcgcttcttgcaatccatgactacttttcacgtttgcgcgcactgagttctctttggcttgctaggccacgagagtaacatcacccccgttggggtcactcgatgaactgatctgtgaatgtgggactgctggctgcaaactcgcaaagcatttgcagatgactggaggatcagtcctctctgtacaagttgtattaacatcttctggtctcatattgtgctccagtgttgtacaatttagggaaaagcttggattaacttgtaagttatcatgaatttgttattggcatattgtacaattgtattagcaataaaaatagaagtacataagtgctggaagcctggaaggatatccagaatctatattggttggaaacgagcagcagaagattgttatagattgttatgttgctttgaatattcggttgtaagtgccttttttggggtatatagaacaaagaaagattcaggagagatgtagggattcaccagaggctatcggggattgtgcttctaggagctccctggactatctctagcaagtctcatattaagctctactctgtaaacagtgatacattgaattgaacgtgctacggttatgatggtaacatttgctatgcattttttaggatgaattctg

SEQ ID NO: 4033 - DNA, 3424 bp, Zea Mays
ccccgtgcagccttcttccagctcttcctactctttgctactcgtcttcgctgatttctgccttaattccatcccttccctgcctagaacttgctttgcttcaccccatcacagcttttggtgcctcgtcatcggcgacctaaccgccggcgaccagataaactaagccaggcccttcgctccgaaagtcgtctctcgtagagagcacttgctcacctgctcctcgccctcctctgctggcagtggacttgcgcggagtggagatccatccggacctggttcgatttcttcatctcggttgcttctctgtccagtgggtggatcactggattgtgggttgtgctaactgcaggctggcttgtcagcctatcataaggaaagtgaaaaagagacaacaaagcaatttgttgtctcattcttaggagctggcgagcactcggcatggcagatgctagttcgaggactgacacctcgactgttgtagacatggatgataagaatcaaaggattattttacgaaatttcaacttctctctgtgggacatctaatggtacaggtcttggagagatgcatgtaaagtgttagaaaacggacagagtggagccatggtcccggcttctaattcatctgaccggtctgacagatctgacaaacctatggaccagaaggttttacgacggcttgcccaaaatcgtgaggcagcaagaaaaagccggctgaggaaaaaggcatatgtgcaacagctagagagcagtaagctaaaacttgcaagcctggagcaagaactccagaaagctcgacagcagggaatcttcatttctagttctggagatcaaactcatactatgagtggaaatggagctatgaccttcgatttagaatattctcgatggcaagaggaacaaaataagcagataaatgagctgaggactgcagtaaatgctcatgcaagtgatagtgacctccgtcttatagtcgatgggataatggcacattatgacgagatattcaggctgaagggcattgctgcaaaggctgatgtgttccatatactttcaggcatgtggaaaacatctgctgaaaggtgcttcttgtggcttgggggtttccgttcgtctgagcttctaaagctccttgtgaatcagcttgagcctctaactgagcagcaattgatggggctgtccaatctgcagcaatcttctcagcaggctgaggatgcattgtcacaaggaatggaagcattgcagcagtccttggcagaaacgctggctgggtcccttggtccatcaggatcttctggaaacgtggcaaactatatgggtcaaatggctatggccatgggaaaacttggcacactcgagaatttccttcgccaggttgcaagacctgctccaagtttcagaacgcaagcttgtggattgaggtgctggattgctgcaaagctgaaactccgcaaggcattgaaaaggcatcacggatggcaacttcaaagaaatctagatgctcgagggaatgataacgttccagattgcttggaggctgcatctctgactgaaaagagaagtcattggaacatgcatcttgcttatgattctggaggtgaaatggccaacacaagctctgatactttggatagttcaactgttcaggaaaaaccagtggttccgggacacatcatctctgaaatcagttctcatgttcaaaaggaagagtctgctgtgtccaaaagacgctctaacaatgaaccatctctttgcattgctgtaattggagctactgaatgttggtatatttgggtattctaggaagaaattgacagatgagggcttaagatctataattgaagccaatttgacctgccgggtggatcaccatgaaaattgtgatgacaagctaattgagttcctcaaaaagacgtattatgtagatgccggacatgacaaccaagaagggatggttagattaaattctaggatgtcacaaatagagggcattggtgctgcaaacagaatattctaccttgctgttccacaagaggcactccttgatgtagcattgccactggctgacggtgcccaaactaagcaaggctggaatagaataattatcgagaaaccatttggctttactggtttgtcctcactgcgggtaacacaatctatgctgtcaaggtttgaggagaagcaaatttacaggattgaccaccttctggggaaggatctgatcgaaaatcttactgtcttgagattttctaacttggtgtttgaacctttgtggagtcgaacttacatacggaatgtgcaggtcattttttctgaagaaacatcaaatgaaatacaagggaggtactttggaaattatgggataatccgtgacatagttcacagccacattcttcaaacaatagctctatttgctatggaaccacctgtaagtcttgatggagaggatatccgagatgaaaaggtgaaggttctcagatcaattcggaaagtgaaccttgatgatgttgttcttggtcaacttaaagatatgtctggtaaagttgacagatacacaaaatccatgataccaacctattttgctgctgctatgtacattgacaatgcacgctgggatggggtaccattttttatcaggacaggcatgggacttatgacgaatagagcagaaattcgaattcagtttcgccatgtccctggtaatatctaccgtgaacgctttggccatgacatagatctcgacacaaacgagctggttctacgcgatcaacctgaagaagcaatcctgttgaaagtcaacaacaaggtcccagggcttgggctccagctggatgcttcagaactgaacctgctttaccgggataggtacaacaccgaggtaccagattcgtatgaacatcttctactggacgtgctagatggagatagtcatttattcatgcgcagcgacgaactggctgccgcatggaatgtgctcactccgataatccatgagatagatcagaacagagtagttcctgagctctacgaggctggggacagagggcctatcaatgcttaccatctcgctgctaaacatggggtgcgatgggatgacgactggtgagtcgatacatggcaaagattctcgatgcgcaacgagattcattaccaatttttgtcgttgtatcgcagtcagatgtacaatatgccttctgtaatcggcctgatcaaggactttcaaggagacatgcctttcaaggagatatgcaaacatggtttctttcctgtcctgtagactgtagcactgttgattcaagttggaaaaagaaaaaaaggagaaaagaaaatatgcttgcgacaagccgaggccccatgtcttgtgcgtttagcatctcgtttgccacaagtatggcagtgtttggaaaatggcaatgaaaag

SEQ ID NO: 4034 - DNA, 3155 bp, Zea Mays
cttttcttcttttgccttctttcttggtggccccatccgactccgcctgctcttcctcggcgccccatccatctgccttgcgtctgctccctctccaccaaaccctagccggccaacagagcttattgaaggccggctaggcgagagcagcatccaccgccgcgctctcatggcggcgcccaaaccgatctgggtgcgccaggctgaggaggccaagctcaagtccgaggcggagaccgctgccgccgccaaggccgccttcgaggccaccttcaaggccctcgctgccgcacccggcgacgacgacaaggacgccgaccccgccccgccctccccggccgaacccgcctcccccgagtccgatgacgatgccccggccccgccaggcccggtcgacccgtccaagtgctccgccgctggccccggcatcgggggcggctccgccggaactccctccaccttcaccgtcgtcgccaaggaccgccacagccggaggctcaccgccggcggggcgctcgtgcgcgtgcgtgtctcgcctgctgctgcagtcggcggggacgatctcgagggtgctgtcaaggacaacggggacggatcctacacggtcacctacgtcgtccccaagcgcggcaactacatggcgcgccctccagtgccttccccagcctcctcggggccatgcctggttcctcagctggttcctcgagtggagtcatgctgcctggggttggtgcttcattgggggagatatgccgggactacatgaatgggaggtgcacaaaggtggagactgactgtaagttcacccacccaccgcaacagctgctgatgtcgatgcttgcagccacgagttctgtcagtgctcttgggcatgcgccgttggcgccctctgcggctgctatggcagctgcacaggccatcatggctgctcaggcactgcaggcacatgctgcgcaagccaaggccgcaggtggggcttcaggctcagtacacaaagctgatgaagctgatgccctgaagagaacagttcaaattagcaacctgagtccacttcttactgtggattatgttaagcagctatttggattgtgtggtaaagttgttgattgtaccatcacagattcaaaacacattgcttatgttgaatactccaaacctgaagaagcgactgcagcgttggagttcaataacaagaatgttggtggtcgtccattgaatgtggagatggctaaatctcttccttctaaagcaaataataacttgcctatgatgatgcagcaagccattcagctgcaacagatgcaattccagcaggcactaatgatgcaacagtcaatagcaacccaacaggctgctgcacgtgctgccaccatgaaatctgccactgaagcagctgcagcaagggctgctgagataagcaggaagttgaaggcggagggctttggtgcggacaacatggaagaaaagcatgccaaagggaagtcaagatcaccatcgccctctactcgtagatcaaaatctcggtcgagatcacctatcaaataccgtaggagcaggcggtcccgctcctactctcccccagttagacgctcaagggagcagcgatcacgatcaccatcaaaatctcgccactcaaagtacggtagtgatcgatcgcatagggatgataaggacaggtatagcaggtccgggagaagggagagtgaacgatctcgtgatcatcattcatctagttcaaggaggaacagaagtaaaagtagaagtccaaggcataagaagccctccagagttgattctaggtcacccaagaaacaaagagaggaaagtttaagcccatcaaaatcaaggtcagcaagggctggttcaagatcaccacgccatcataagggaagcaaatcatcgccaactcgtgaccgtcattctcgccatagcaggcattcaaggtccagatctcctggcagaaagcaccgtcacagtgataaaagggacagcagaaagtctgagattcaggacgacaaaagaagatctcatagaggtagcagacacgacaaagatgaaagttcagtaaaggacgaaggggaaagatctcatagaagcaatagaggtgacaaagatgaaaggtctgtaaaggatccagtggaagataaagggatggatactaaagttgttgcacataagaggagctcaacagtatctgaagatgaaattctgaacaacaatagtagtaaccataagaaatatagacatgaagttggtttggaagttgatggaaatgatgtgtgctctgctgcagctgacattgataggaaacatgaaactggagtagatggctctttggggggcgctgcagaatcagctatgtgatggctgctgtatcattgagtttgctgtttacagatggattgatgatgatggagaatgctgaactggtgtttattatctccttttctgatttaggagttttatttgcagggcatgaagatcttcggagaacttgagtgctgttcggagtgctcatctgatatattaaaatgctcatgattccatgaagagttcttggagcacatttctgggatgtcggttgaagatacaagggagtatacacttcctcaagactatgttgcggatgctcaaccggtgaggattacatgttctatcaggagtgaagacttgtgcacgagagctgcaagtgaacctttctgcatgtggatgcttatttatatcaacatgtgtctcccggataatatagcttgccgcttgcgagttgggatatgagcgctaatctaagcttggagtgattcaccaaaccgctctaagattaaggaaatatagggatattcaaacaacaaatggagttaatccaggtcgtgcctgtgggaaaaacatccatagacttcaatttgttagggaaaaatattttctaaaataagggtgaaatacactgttttttctctttcttttttgctcagaaagaataaaattgagtaaggaggtgctaaattctgtgccctggttcttttccctaaattttcagatttgtttttgaggtaactttacgaaatctggtcgatgtgaattgcaaatgtataaatttgacgtgataaatgacgggaatcaaaatcgagtgtaaacaactatatcttgacacgtcatgg

SEQ ID NO: 4035 - DNA, 3227 bp, Zea Mays
gtcttttcttcttttgccttctttcttggtggccccatccgactccgcctgctcttcctcggcgccccatccatctgccttgcgtctgctccctctccaccaaaccctagccggccaacagagcttattgaaggccggctaggcgagagcagcatccaccgccgcgctctcatggcggcgcccaaaccgatctgggtgcgccaggctgaggaggccaagctcaagtccgaggcggagaccgctgccgccgccaaggccgccttcgaggccaccttcaaggccctcgctgccgcacccggcgacgacgacaaggacgccgaccccgccccgccctccccggccgaacccgcctcccccgagtccgatgacgatgccccggccccgccaggcccggtcgacccgtccaagtgctccgccgctggccccggcatcgggggcggctccgccggaactccctccaccttcaccgtcgtcgccaaggaccgccacagccggaggctcaccgccggcggggcgctcgtgcgcgtgcgtgtctcgcctgctgctgcagtcggcggggacgatctcgagggtgctgtcaaggacaacggggacggatcctacacggtcacctacgtcgtccccaagcgcggcaactacatggcgcgccctccagtgccttccccagcctcctcggggccatgcctggttcctcagctggttcctcgagtggagtcatgctgcctggggttggtgcttcattgggggagatatgccgggactacatgaatgggaggtgcacaaaggtggagactgactgtaagttcacccacccaccgcaacagctgctgatgtcgatgcttgcagccacgagttctgtcagtgctcttgggcatgcgccgttggcgccctctgcggctgctatggcagctgcacaggccatcatggctgctcaggcactgcaggcacatgctgcgcaagccaaggccgcaggtggggcttcaggctcagtacacaaagctgatgaagctgatgccctgaagagaacagttcaaattagcaacctgagtccacttcttactgtggattatgttaagcagctatttggattgtgtggtaaagttgttgattgtaccatcacagattcaaaacacattgcttatgttgaatactccaaacctgaagaagcgactgcagcgttggagttcaataacaagaatgttggtggtcgtccattgaatgtggagatggctaaatctcttccttctaaagcaaataataacttgcctatgatgatgcagcaagccattcagctgcaacagatgcaattccagcaggcactaatgatgcaacagtcaatagcaacccaacaggctgctgcacgtgctgccaccatgaaatctgccactgaagcagctgcagcaagggctgctgagataagcaggaagttgaaggcggagggctttggtgcggacaacatggaagaaaagcatgccaaagggaagtcaagatcaccatcgccctctactcgtagatcaaaatctcggtcgagatcacctatcaaataccgtaggagcaggcggtcccgctcctactctcccccagttagacgctcaagggagcagcgatcacgatcaccatcaaaatctcgccactcaaagtacggtagtgatcgatcgcatagggatgataaggacaggtatagcaggtccgggagaagggagagtgaacgatctcgtgatcatcattcatctagttcaaggaggaacagaagtaaaagtagaagtccaaggcataagaagccctccagagttgattctaggtcacccaagaaacaaagagaggaaagtttaagcccatcaaaatcaaggtcagcaagggctggttcaagatcaccacgccatcataagggaagcaaatcatcgccaactcgtgaccgtcattctcgccatagcaggcattcaaggtccagatctcctggcagaaagcaccgtcacagtgataaaagggacagcagaaagtctgagattcaggacgacaaaagaagatctcatagaggtagcagacacgacaaagatgaaagttcagtaaaggacgaaggggaaagatctcatagaagcaatagaggtgacaaagatgaaaggtctgtaaaggatccagtggaagataaagggatggatactaaagttgttgcacataagaggagctcaacagtatctgaagatgaaattctgaacaacaatagtagtaaccataagaaatatagacatgaagttggtttggaagttgatggaaatgatgtgtgctctgctgcagctgacattgataggaaacatgaaactggagtagatggctctttggggggcgctgcagaatcagctatgtgatggctgctgtatcattgagtttgctgtttacagatggattgatgatgatggagaatgctgaactggtgtttattatctccttttctgatttaggagttttatttgcagggcatgaagatcttcggagaacttgagtgctgttcggagtgctcatctgatatattaaaatgctcatgattccatgaagagttcttggagcacatttctgggatgtcggttgaagatacaagggagtatacacttcctcaagtttttcaagggggttgacattggagtatgttttgagggaagtcagtgcatacttcattttgtgaatgaggactatgttgcggatgctcaaccggtgaggattacatgttctatcaggagtgaagacttgtgcacgagagctgcaagtgaacctttctgcatgtggatgcttatttatatcaacatgtgtctcccggataatatagcttgccgcttgcgagttgggatatgagcgctaatctaagcttggagtgattcaccaaaccgctctaagattaaggaaatatagggatattcaaacaacaaatggagttaatccaggtcgtgcctgtgggaaaaacatccatagacttcaatttgttagggaaaaatattttctaaaataagggtgaaatacactgttttttctctttcttttttgctcagaaagaataaaattgagtaaggaggtgctaaattctgtgccctggttcttttccctaaattttcagatttgtttttgaggtaactttacgaaatctggtcgatgtgaattgcaaatgtataaatttgacgtgataaatgacgggaatcaaaatcgagtgtaaacaactatatcttgacacgtcatgg

SEQ ID NO: 4036 - DNA, 1204 bp, Zea Mays
cgacaaccttctatctatgaattatatgtcatgtctctttaattatctctatatcaatgtctacctatgtgatataagataccgtagcaacgcacgtgcacctaattagtgaatttggaagtgtgactttataaaaacaaatgagttatatgttcaagataatgttagtagtcatactatttaaagtccttttactttcttatttggatgagtcttttttcacatatcttccttcttaatgtaccattcatggttctattgatagctcaaggtcatgagaatgttgccgctgagtactacaaacagcaggtggagatgttagagggttttagtgagatggacgcatttacagatcgtgctttcctacctgtaatgtccaaggaagaacacgaaaaagttgtcaggagtgaatcattagccatatggctgtctaatattgcaaatatggttctctttgctgcaaaagtgtatgcttcagtaaggagtggttcacttgctattatcgcatcaactttggattctcttctagacttgttgtcatgatatatcttgtggtttactgccttttcaatgcaaacgccaaatccctatagaaactcaattggaaaagcgtatgcagccgctggtgagttcttttttgccataacctgtacttccaaaaatgatggttgatgttgatatctagatctgttgtccagaatgttctgtactcttttctgcgaaaatgatttacttatcttttacgtaatctgaattattgtctctgcattttgaatagaatgagcattgctttccatgtttctttctgaggcaaacaataaagatctgaattgataggaaatcaataaacttactcaacactgtgtgctcactactcagtaattcctacttactggaatataaattacctgtctataaatactaattgttgagttcacgattgaagtcatagaaccatggaccctttttatccagtcacctctgtttgaattttctttaagttaatgatgaacttgttatgacttccaatctgacatttgcttttgagatgcgttgtcacttgttggggcaacttccatgtgtcaaacttttttttgtcatgccttttttcatattcttttttctttcaactttactgggattttctgatagatcacctcttagttatattgttgatttgtgatccttccaaaaccatactatc

SEQ ID NO: 4037 - DNA, 798 bp, Zea Mays
agtagcaggagcacaaagtgcagaagcagagccagtcctaactgcttagccaggaaagcagaagcagagcgtgcttagccatgtactcatccagctgccatgtgatgtccgagaagccaaacggttccaaggcggtgacgctgctgctcaggctgtccacgctggttctgtcgctcatctcggcggtcgtcatggccaccgccaccagcgactgcaccatctacggccacggcggcgccgccaaggtcactatcatgttcaagaactaccggcccttcgttttcctggtagttttgaacatcgcggcggcggtgctggaggcagcagccatctacctacaggtcgtgaagggcgacgacggcgacgaggcgcccaagcttccccggatcatcctggttgtcctcgacgtcgtggtgctcgcgctggtcaacgcggcgacgggcgcggtggtcgcggcggtcatcgcctacggccccgagatcgacgcgtgcaccgtcgcaggtggtggccgattccgcgagcaggtgcgcaggtccgagctcctgtcgatcgccgcgagcatctccgctgtgtccgccgccgtcgctaaggacgtgccgctgcccttctccgtgtggcccctctcgtcggaatcaggcgactactactgatcttggttattatttgtcaggtgatgttgagtactgtgagtgtgaaggctttctgccagcgaaattccaatttatgtcaactgaatgccactacgataagctatccttcgaaaaaatttcagcacaaatcatatatttgatttccatc

SEQ ID NO: 4038 - DNA, 1189 bp, Zea Mays
aaaccctaacccctccttcgtttgcccatcctcgtgacggctcctcgccagtcgcctcgtctctccctgccgcgtcgcctccagttccgcctccgccgcgcctcccgcctccgccgcgcctgacgaacgcagtataggtagagaggaggagggtccggcgagatggggatgcgagataagaagcggaaccagaagcgagtgctcgcgcgccgtaccgcggcaccgcgcccaggcgagggcaaggatttcctgccgctggaaggaggccccggtaagaagcatctgaaggtgcagcagcctgaagagcccgaaaacacagccacaatcgtctacattgggcatatcccccatggtttctacgaggacgagatgaaagggttctttaagcagtttggggatattaagaggcttaggatcgctcgtaaccgcaaggtatgtttagaatggcacatgccatgatttctgtgctatttttttttggtgagcccataacttatggtttcatgatattttcagacaggaaagtccaagcactatggattcattgagtttgagaaccctgctgtggcaaaggtcgtagcagatgagatgaataactatctcttgtttgagcgcaccttgcaagttgcacttgttgagccagagaaagttcatcctaaattatggaaaggggtgcgaaggggatttatacctgttgatcgagtagcaattgaacggaagagacacaacaaggataagactgtagcagagcacaaaaagatggttgaaggaattgtaaagcgggatggaaagcgtcgcaaaagaatcaaggcagctggtattgactatgagtgtccagctcttatagggagcattcaaccatcagcgaaaaagatcaagttcgatgaggcatagtattttattctaatgggctgttggatccttagtagacgaggcggtggaatggttgagcaatatattcaccttttgaggagacggcagacaactatgtatttcacttttgaatttctctatgttttatgaatgacaccgacacagatgttacaacttaagtatgaaaatgcaatgggcgatgtgttcttaatttgcccttggaaggttccatataacaatgtgttcttaattcacttgttcgttatatttatatactgtgctgcatcaatcgatgaaattcgacatcatagtaaaa

SEQ ID NO: 4039 - DNA, 3532 bp, Zea Mays
cactttgtagaaattcgctcaatagcccggctgacgtcactaattcaccctctctttccggccgccgccacgggctctccatggaacggctcaaatcggcggtgccgcccgacctccggcgggccgtcggcgagggcacggccgccgatctagctaacaccacctctcgcctgttcgccttcttcgacagccttcctctcttccaccaggttatgcaagaactgaccgaccccgagcttgcgttgtgtcgcaaagacaaggtgaaggctgtagagttgaagggccacggcaacgcgtgcttctctaggagggagttcgggaaagctctcaggttctattcgcagaaattaggtctgttcgaagaatctctaagggactgtgacagggccataaccatttctcctaattattctaaggcttggtacaggaagggaatggtaaaaacagcgctcaagaattattcatctgcaatacatgatttagaggtggcattgagccaggaagtgacttcttcggggaagagtaacatagaacaagagctgaagttgattttagagaagcatgaaagtgtcaatgaagctgggacatcaaactgtgatagcaaggatagagatttgcctcttgcaggacaacctcataaaattgttatagagagtatttcaacaccaaacaaaggtagaggaatgatttctacagatgatatccccccagcttcgttgattcatgttgaggaccctcttgctgcgattatcatgaaatcttcccgtgaaacacactgccacttttgcttcagtgaaactccagccgatgttgtattctgtccttcatgtacaataccaatttattgttcaaaaaggtgccaggagcaatcagcaggtcatatttctcgtgatgaagatactaatcttggatattcaacgaatgttgcaaacctgagtataacttcgagttgcaagtctccaagatctaagctatttgctgaacataggcatgaatgtggaggtgcccactgggcagctgttttaccagctgatgtagttttagctggacgaataatagcacacagcatagtaaaaaggatgccgtctgggaagagctttgctttctctggcccaaatttggatctagttcaccattatgatcaacattctcctgccaacaagttggaatcacatatatatgcaattgtcctattgttatgcctccaaaatcattatagatcagaccttttgtggacagaagattctttatcacaggtatatatggcgtttatcttcagacattattgttctgatatacctggttaatgagtatgatctgaaattgatggcgatttcagctcaagattttttataaattttcacaatgctaattgttatcaaatgtcttggtccatactgttttggtggagataaccagtctccttggggattgccagtttcatgttccttagtaatcttaatctcatctctacaataccagtgtttgtcgaacttccttctgtatagtccctttgaacttccttctgtatagtcctctttacacacttttacttgttctgatacttagaaagccattttttaacatgcaagaatttgtatcattacatttaaaaaaggacacaataaaagctctttcacttgtaaattaggtgaacacatcaaaccaaacaaaataggcagaaaagcagaaccaacgaggattattgttatataatcaaatcttaaatgactaaatagcctctagatcaatagccatcctgcaatgcaagtctgcaactgtgtctaacatgttacctaaagcccactggttacactcatggtggtcagacaagaaatcagacaagcttggaactcaagcttcagtcagatatgcctaaggtacctgggttcaacgatgttcttatctataccatggttttgtttctcattactaagctttcctatatactgcaattcccccaaaacttttttctctgggggtatagagaaactatggggtatcacattcacattttgtttttgggaaagaagaaactcatgtgttgattatcctctacagctggttcttttgatatttcaaatcaaagtcaattcaattgctattgtctgtatgaggtcgatggacagaggcccagagcacacaataaatagaggtttttatgtagctgaaggtgcaaaaatgtgtagtgtggagcaggtcagggttgcacaagctctttatgtatctggtagcctgttcaatcactcatgtcagcccaatgtgcacgcatattttctttcacgtgcgttcgtgctgagaactactgaatttataaagtccgggagcccagttgaactgtcatatggtccacaggttggcgagatgcatatttcagagagacagaagtcacttcaagagaattactacttcagttgtcaatgttcaagttgttcagagctaaacctatcagaccttgttatgaattcattctgttgtccacaaagcaactgccttggtgccatatcggaatcaacttactacaggtccaaagagaatttcgtgaatgtttcccttggaggatcttatgtctgcaaactatcattgcccgatgtatcgaaggttgatatggatatggagaatgtcgccaaatctctcttgcaaaatagtggtgtcagtctgaacatagatcatggatgttgcatgagttgtagatcctgtattgatctgtcgtctgctctggctacatcacacagggaagaatctaccatcgataggttgaagaaacatacattcctagacaagactctcatcacagaggcattacaatctctaaaacaactcaagaagttgaggcacccatatagcaaggctctcgcgcaggccgaagacacaatcgcagaggcctttgcgaaggtcggagaccaagaactagcacgaaagcactgtgaagcatcaattcagatcctcgagaagctgtaccacccaaaacacatcatcattgctcacgagcttattaagcttgtttcgattctgctgtccctgggagatggggcaagcgccgcagccacattcgctcaagcagaggcaatattctctctttactacggatctcatgtggagaaggttttgacatacatgggtgccctgaagaaagctgtcattgacgtgtagcgtgctgacaatcctcacgcgggaatggccaacacggttctgcagaatcatctcaccttttgcgcttcttcgaggagttaatgtaggggaaaacccaaaaaatatttacaaagcagtgtggtattgcttgtagtttagtttgttctagaaaacacaaactagctcaaccaaacttcctggctaatgagtttggtggatgttctgagtgcctatgttaatgacttgtttcataaatttttttcgtatatactcgttgccttacaaactcggtcggtagaggaaagatcgctcccacggtattatattaagaagaagctcaattgaagcctcaaccaagaaaggtcatgaaagctgtcttcctgcaacatgagggtccgtc

SEQ ID NO: 4040 - DNA, 3614 bp, Zea Mays
cactttgtagaaattcgctcaatagcccggctgacgtcactaattcaccctctctttccggccgccgccacgggctctccatggaacggctcaaatcggcggtgccgcccgacctccggcgggccgtcggcgagggcacggccgccgatctagctaacaccacctctcgcctgttcgccttcttcgacagccttcctctcttccaccaggttatgcaagaactgaccgaccccgagcttgcgttgtgtcgcaaagacaaggtgaaggctgtagagttgaagggccacggcaacgcgtgcttctctaggagggagttcgggaaagctctcaggttctattcgcaggcattgcgccatgtcccaattaattcgggtggcatggatgtgaacttggtatcttcattatatgtcaatcgagcctccaccatgcataaattaggtctgttcgaagaatctctaagggactgtgacagggccataaccatttctcctaattattctaaggcttggtacaggaagggaatggtaaaaacagcgctcaagaattattcatctgcaatacatgatttagaggtggcattgagccaggaagtgacttcttcggggaagagtaacatagaacaagagctgaagttgattttagagaagcatgaaagtgtcaatgaagctgggacatcaaactgtgatagcaaggatagagatttgcctcttgcaggacaacctcataaaattgttatagagagtatttcaacaccaaacaaaggtagaggaatgatttctacagatgatatccccccagcttcgttgattcatgttgaggaccctcttgctgcgattatcatgaaatcttcccgtgaaacacactgccacttttgcttcagtgaaactccagccgatgttgtattctgtccttcatgtacaataccaatttattgttcaaaaaggtgccaggagcaatcagcaggtcatatttctcgtgatgaagatactaatcttggatattcaacgaatgttgcaaacctgagtataacttcgagttgcaagtctccaagatctaagctatttgctgaacataggcatgaatgtggaggtgcccactgggcagctgttttaccagctgatgtagttttagctggacgaataatagcacacagcatagtaaaaaggatgccgtctgggaagagctttgctttctctggcccaaatttggatctagttcaccattatgatcaacattctcctgccaacaagttggaatcacatatatatgcaattgtcctattgttatgcctccaaaatcattatagatcagaccttttgtggacagaagattctttatcacaggtatatatggcgtttatcttcagacattattgttctgatatacctggttaatgagtatgatctgaaattgatggcgatttcagctcaagattttttataaattttcacaatgctaattgttatcaaatgtcttggtccatactgttttggtggagataaccagtctccttggggattgccagtttcatgttccttagtaatcttaatctcatctctacaataccagtgtttgtcgaacttccttctgtatagtccctttgaacttccttctgtatagtcctctttacacacttttacttgttctgatacttagaaagccattttttaacatgcaagaatttgtatcattacatttaaaaaaggacacaataaaagctctttcacttgtaaattaggtgaacacatcaaaccaaacaaaataggcagaaaagcagaaccaacgaggattattgttatataatcaaatcttaaatgactaaatagcctctagatcaatagccatcctgcaatgcaagtctgcaactgtgtctaacatgttacctaaagcccactggttacactcatggtggtcagacaagaaatcagacaagcttggaactcaagcttcagtcagatatgcctaaggtacctgggttcaacgatgttcttatctataccatggttttgtttctcattactaagctttcctatatactgcaattcccccaaaacttttttctctgggggtatagagaaactatggggtatcacattcacattttgtttttgggaaagaagaaactcatgtgttgattatcctctacagctggttcttttgatatttcaaatcaaagtcaattcaattgctattgtctgtatgaggtcgatggacagaggcccagagcacacaataaatagaggtttttatgtagctgaaggtgcaaaaatgtgtagtgtggagcagggttgcacaagctctttatgtatctggtagcctgttcaatcactcatgtcagcccaatgtgcacgcatattttctttcacgtgcgttcgtgctgagaactactgaatttataaagtccgggagcccagttgaactgtcatatggtccacaggttggcgagatgcatatttcagagagacagaagtcacttcaagagaattactacttcagttgtcaatgttcaagttgttcagagctaaacctatcagaccttgttatgaattcattctgttgtccacaaagcaactgccttggtgccatatcggaatcaacttactacaggtccaaagagaatttcgtgaatgtttcccttggaggatcttatgtctgcaaactatcattgcccgatgtatcgaaggttgatatggatatggagaatgtcgccaaatctctcttgcaaaatagtggtgtcagtctgaacatagatcatggatgttgcatgagttgtagatcctgtattgatctgtcgtctgctctggctacatcacacagggaagaatctaccatcgataggttgaagaaacatacattcctagacaagactctcatcacagaggcattacaatctctaaaacaactcaagaagttgaggcacccatatagcaaggctctcgcgcaggccgaagacacaatcgcagaggcctttgcgaaggtcggagaccaagaactagcacgaaagcactgtgaagcatcaattcagatcctcgagaagctgtaccacccaaaacacatcatcattgctcacgagcttattaagcttgtttcgattctgctgtccctgggagatggggcaagcgccgcagccacattcgctcaagcagaggcaatattctctctttactacggatctcatgtggagaaggttttgacatacatgggtgccctgaagaaagctgtcattgacgtgtagcgtgctgacaatcctcacgcgggaatggccaacacggttctgcagaatcatctcaccttttgcgcttcttcgaggagttaatgtaggggaaaacccaaaaaatatttacaaagcagtgtggtattgcttgtagtttagtttgttctagaaaacacaaactagctcaaccaaacttcctggctaatgagtttggtggatgttctgagtgcctatgttaatgacttgtttcataaatttttttcgtatatactcgttgccttacaaactcggtcggtagaggaaagatcgctcccacggtattatattaagaagaagctcaattgaagcctcaaccaagaaaggtcatgaaagctgtcttcctgcaacatgagggtccgtc

SEQ ID NO: 4041 - DNA, 3703 bp, Zea Mays
cactttgtagaaattcgctcaatagcccggctgacgtcactaattcaccctctctttccggccgccgccacgggctctccatggaacggctcaaatcggcggtgccgcccgacctccggcgggccgtcggcgagggcacggccgccgatctagctaacaccacctctcgcctgttcgccttcttcgacagccttcctctcttccaccaggttatgcaagaactgaccgaccccgagcttgcgttgtgtcgcaaagacaaggtgaaggctgtagagttgaagggccacggcaacgcgtgcttctctaggagggagttcgggaaagctctcaggttctattcgcaggcattgcgccatgtcccaattaattcgggtggcatggatgtgaacttggtatcttcattatatgtcaatcgagcctccaccatgcataaattaggtctgttcgaagaatctctaagggactgtgacagggccataaccatttctcctaattattctaaggcttggtacaggaagggaatggtaaaaacagcgctcaagaattattcatctgcaatacatgatttagaggtggcattgagccaggaagtgacttcttcggggaagagtaacatagaacaagagctgaagttgattttagagaagcatgaaagtgtcaatgaagctgggacatcaaactgtgatagcaaggatagagatttgcctcttgcaggacaacctcataaaattgttatagagagtatttcaacaccaaacaaaggtagaggaatgatttctacagatgatatccccccagcttcgttgattcatgttgaggaccctcttgctgcgattatcatgaaatcttcccgtgaaacacactgccacttttgcttcagtgaaactccagccgatgttgtattctgtccttcatgtacaataccaatttattgttcaaaaaggtgccaggagcaatcagcaggtcatatttctcgtgatgaagatactaatcttggatattcaacgaatgttgcaaacctgagtataacttcgagttgcaagtctccaagatctaagctatttgctgaacataggcatgaatgtggaggtgcccactgggcagctgttttaccagctgatgtagttttagctggacgaataatagcacacagcatagtaaaaaggatgccgtctgggaagagctttgctttctctggcccaaatttggatctagttcaccattatgatcaacattctcctgccaacaagttggaatcacatatatatgcaattgtcctattgttatgcctccaaaatcattatagatcagaccttttgtggacagaagattctttatcacaggtatatatggcgtttatcttcagacattattgttctgatatacctggttaatgagtatgatctgaaattgatggcgatttcagctcaagattttttataaattttcacaatgctaattgttatcaaatgtcttggtccatactgttttggtggagataaccagtctccttggggattgccagtttcatgttccttagtaatcttaatctcatctctacaataccagtgtttgtcgaacttccttctgtatagtccctttgaacttccttctgtatagtcctctttacacacttttacttgttctgatacttagaaagccattttttaacatgcaagaatttgtatcattacatttaaaaaaggacacaataaaagctctttcacttgtaaattaggtgaacacatcaaaccaaacaaaataggcagaaaagcagaaccaacgaggattattgttatataatcaaatcttaaatgactaaatagcctctagatcaatagccatcctgcaatgcaagtctgcaactgtgtctaacatgttacctaaagcccactggttacactcatggtggtcagacaagaaatcagacaagcttggaactcaagcttcagtcagatatgcctaaggtacctgggttcaacgatgttcttatctataccatggttttgtttctcattactaagctttcctatatactgcaattcccccaaaacttttttctctgggggtatagagaaactatggggtatcacattcacattttgtttttgggaaagaagaaactcatgtgttgattatcctctacagctggttcttttgatatttcaaatcaaagtcaattcaattgctattgtctgtatgaggtcgatggacagaggcccagagcacacaataaatagaggtttttatgtagctgaaggtgcaaaaatgtgtagtgtggagcaggtcagggttgcacaagctctttatgtatctggtagcctgttcaatcactcatgtcagcccaatgtgcacgcatattttctttcacgtgcgttcgtgctgagaactactgaatttataaagtccgggagcccagttgaactgtcatatggtccacaggtttcactgaaccccagctccctccaggcctccatttctctctgaatcagatatgaatgtcttctgctttgaacttttcatgcttctgatttctaggttggcgagatgcatatttcagagagacagaagtcacttcaagagaattactacttcagttgtcaatgttcaagttgttcagagctaaacctatcagaccttgttatgaattcattctgttgtccacaaagcaactgccttggtgccatatcggaatcaacttactacaggtccaaagagaatttcgtgaatgtttcccttggaggatcttatgtctgcaaactatcattgcccgttgatatggatatggagaatgtcgccaaatctctcttgcaaaatagtggtgtcagtctgaacatagatcatggatgttgcatgagttgtagatcctgtattgatctgtcgtctgctctggctacatcacacagggaagaatctaccatcgataggttgaagaaacatacattcctagacaagactctcatcacagaggcattacaatctctaaaacaactcaagaagttgaggcacccatatagcaaggctctcgcgcaggccgaagacacaatcgcagaggcctttgcgaaggtcggagaccaagaactagcacgaaagcactgtgaagcatcaattcagatcctcgagaagctgtaccacccaaaacacatcatcattgctcacgagcttattaagcttgtttcgattctgctgtccctgggagatggggcaagcgccgcagccacattcgctcaagcagaggcaatattctctctttactacggatctcatgtggagaaggttttgacatacatgggtgccctgaagaaagctgtcattgacgtgtagcgtgctgacaatcctcacgcgggaatggccaacacggttctgcagaatcatctcaccttttgcgcttcttcgaggagttaatgtaggggaaaacccaaaaaatatttacaaagcagtgtggtattgcttgtagtttagtttgttctagaaaacacaaactagctcaaccaaacttcctggctaatgagtttggtggatgttctgagtgcctatgttaatgacttgtttcataaatttttttcgtatatactcgttgccttacaaactcggtcggtagaggaaagatcgctcccacggtattatattaagaagaagctcaattgaagcctcaaccaagaaaggtcatgaaagctgtcttcctgcaacatgagggtccgtc

SEQ ID NO: 4042 - DNA, 3944 bp, Zea Mays
cactttgtagaaattcgctcaatagcccggctgacgtcactaattcaccctctctttccggccgccgccacgggctctccatggaacggctcaaatcggcggtgccgcccgacctccggcgggccgtcggcgagggcacggccgccgatctagctaacaccacctctcgcctgttcgccttcttcgacagccttcctctcttccaccaggttatgcaagaactgaccgaccccgagcttgcgttgtgtcgcaaagacaaggtgaaggctgtagagttgaagggccacggcaacgcgtgcttctctaggagggagttcgggaaagctctcaggttctattcgcaggcattgcgccatgtcccaattaattcgggtggcatggatgtgaacttggtatcttcattatatgtcaatcgagcctccaccatgcataaattaggtctgttcgaagaatctctaagggactgtgacagggccataaccatttctcctaattattctaaggcttggtacaggaagggaatggtaaaaacagcgctcaagaattattcatctgcaatacatgatttagaggtggcattgagccaggaagtgacttcttcggggaagagtaacatagaacaagagctgaagttgattttagagaagcatgaaagtgtcaatgaagctgggacatcaaactgtgatagcaaggatagagatttgcctcttgcaggacaacctcataaaattgttatagagagtatttcaacaccaaacaaaggtagaggaatgatttctacagatgatatccccccagcttcgttgattcatgttgaggaccctcttgctgcgattatcatgaaatcttcccgtgaaacacactgccacttttgcttcagtgaaactccagccgatgttgtattctgtccttcatgtacaataccaatttattgttcaaaaaggtgccaggagcaatcagcaggtcatatttctcgtgatgaagatactaatcttggatattcaacgaatgttgcaaacctgagtataacttcgagttgcaagtctccaagatctaagctatttgctgaacataggcatgaatgtggaggtgcccactgggcagctgttttaccagctgatgtagttttagctggacgaataatagcacacagcatagtaaaaaggatgccgtctgggaagagctttgctttctctggcccaaatttggatctagttcaccattatgatcaacattctcctgccaacaagttggaatcacatatatatgcaattgtcctattgttatgcctccaaaatcattatagatcagaccttttgtggacagaagattctttatcacaggtatatatggcgtttatcttcagacattattgttctgatatacctggttaatgagtatgatctgaaattgatggcgatttcagctcaagattttttataaattttcacaatgctaattgttatcaaatgtcttggtccatactgttttggtggagataaccagtctccttggggattgccagtttcatgttccttagtaatcttaatctcatctctacaataccagtgtttgtcgaacttccttctgtatagtccctttgaacttccttctgtatagtcctctttacacacttttacttgttctgatacttagaaagccattttttaacatgcaagaatttgtatcattacatttaaaaaaggacacaataaaagctctttcacttgtaaattaggtgaacacatcaaaccaaacaaaataggcagaaaagcagaaccaacgaggattattgttatataatcaaatcttaaatgactaaatagcctctagatcaatagccatcctgcaatgcaagtctgcaactgtgtctaacatgttacctaaagcccactggttacactcatggtggtcagacaagaaatcagacaagcttggaactcaagcttcagtcagatatgcctaaggtacctgggttcaacgatgttcttatctataccatggttttgtttctcattactaagctttcctatatactgcaattcccccaaaacttttttctctgggggtatagagaaactatggggtatcacattcacattttgtttttgggaaagaagaaactcatgtgttgattatcctctacagctggttcttttgatatttcaaatcaaagtcaattcaattgctattgtctgtatgaggtcgatggacagaggcccagagcacacaataaatagaggtttttatgtagctgaaggtgcaaaaatgtgtagtgtggagcaggtctgtctttttatactttctgtatttttttctgggactgggagcaatatatcatccaactattaaagttgcaaaaggtcgattggttgttgtcaatcattgggctttatctcatgctgataaaacacaatttcaacccagaaggtcaaaactagattagattaaaaaataaaacggagaaagtattatttgaaaagttattggatcgattatcaagtaacaataatcacagtatatgaggcctttttattaaaaaggcatctcactctaaattgtggtattgtgtctgtaacctttgtcttatgttatgtttgctcactgttaggtcagggttgcacaagctctttatgtatctggtagcctgttcaatcactcatgtcagcccaatgtgcacgcatattttctttcacgtgcgttcgtgctgagaactactgaatttataaagtccgggagcccagttgaactgtcatatggtccacaggttggcgagatgcatatttcagagagacagaagtcacttcaagagaattactacttcagttgtcaatgttcaagttgttcagagctaaacctatcagaccttgttatgaattcattctgttgtccacaaagcaactgccttggtgccatatcggaatcaacttactacaggtccaaagagaatttcgtgaatgtttcccttggaggatcttatgtctgcaaactatcattgcccgatgtatcgaaggttgatatggatatggagaatgtcgccaaatctctcttgcaaaatagtggtgtcagtctgaacatagatcatggatgttgcatgagttgtagatcctgtattgatctgtcgtctgctctggctacatcacacagggaagaatctaccatcgataggttgaagaaacatacattcctagacaagactctcatcacagaggcattacaatctctaaaacaactcaagaagttgaggcacccatatagcaaggctctcgcgcaggccgaagacacaatcgcagaggcctttgcgaaggtcggagaccaagaactagcacgaaagcactgtgaagcatcaattcagatcctcgagaagctgtaccacccaaaacacatcatcattgctcacgagcttattaagcttgtttcgattctgctgtccctgggagatggggcaagcgccgcagccacattcgctcaagcagaggcaatattctctctttactacggatctcatgtggagaaggttttgacatacatgggtgccctgaagaaagctgtcattgacgtgtagcgtgctgacaatcctcacgcgggaatggccaacacggttctgcagaatcatctcaccttttgcgcttcttcgaggagttaatgtaggggaaaacccaaaaaatatttacaaagcagtgtggtattgcttgtagtttagtttgttctagaaaacacaaactagctcaaccaaacttcctggctaatgagtttggtggatgttctgagtgcctatgttaatgacttgtttcataaatttttttcgtatatactcgttgccttacaaactcggtcggtagaggaaagatcgctcccacggtattatattaagaagaagctcaattgaagcctcaaccaagaaaggtcatgaaagctgtcttcctgcaacatgagggtccgtc

SEQ ID NO: 4043 - DNA, 1873 bp, Zea Mays
ctccattccctcccgccgctccgctccacgaaaatggcgcctccgctcgaagacctcacccgggtactcgccgagctcgcctcgggcctcgcccagcctcctgctggcggcggtacattctcatccaccgactccctcccggcctccatctcctccctcgccgccgccctcaaccccagcggcgacggggccgccgcctcatccggaaccggggttctggacgccgcgctctccctcatgtgcttcgacccgctagaggtgaatagtgcccgcgtcaactgccttgtccgcaccctcgtctccgtgctctcggcgtcagtctcgtgctgcgtggtccgtcccgatggggacgctgctgaggagatgctctgtgtcgggagttccgtgtcgcccctggactgccgcgagctgctccggtcgtgtgcagccctcgtggagaaattgggggattgtggcgatagaaggcattcctacgatctgttgtatgctgttgtgaaaactatcctgctatcccctcactaccagtgtctttccccgttaccatattataaggaagaggaagaaagagtatctcatatgggaaccattgctgcggagttaataaaccattcttctgatcatatccttcctagtgaccactcaatcccaccaaggttgctttcatggcatcttgatccattaattcttaggcatgatctctcagcaatgctccaggaggtacatgattattagtttccctatttggttcagttatgcaactgctttacttttccacagagaaggctcacaagattatttatcagaaacattatccaaagagataactgctgaatcaataagtgatgtcagtcttgttcagagggcagccttttacctttcttggctgctatgcccttataatcatgatcaacgcgagatgctatcaaacaatattttggaaatatcacattcttgggctaggaacaacaaaaagtgcgtaagctaccaaagtactgtgaataataggaggaaactgcgaatacccacagctgcggactctgagaaattccatgtgccagtcaacactataagctcccttgttaaagaatttgatgatcgctgtgtaaaatgttgtagcccaactgcctttcctcaagcacaagttggaaatctatcggacctccatcccttatactttaacctgttgcatcagtggattcctttgggagtattgcttgtatcacctagttgtgttaacgagcagaactgtgacatcctcctgcgctacacaagcactgggcaggttctggagtcaaatggagcacgagtaaaaacaaaagatgatgccactaatgatggtttcttaggcagctgcattggtactgctgagagatgggcattgactggagcatatctcatctttggctggcttgacgtagttgaggatatggccccattgatatttgattgcgaagataaatgtcatagttttgtcagccaactcagaaacaagacaggcccatacctgctcaagtgcgtgaagtcattatttaagacgttggaacagccaaatcaagataaagattttgtgattgatcttcataataggttgttaaactgggataagaacgtgcaaggctgtgagatatttggggatgttatccttgaaatgaacaagaagtttaatcttcctttgtagtagtgaccagggattctatgcagctcttaaatatttgaacgtacttaaaagattgtcttaatatgagcgtatgagaaacggctgtatgaaccttagtttttggcttttgttgagtttcaactctagcctattctaaaagatttttgttgttgtcgttttaaatatctaaaatgaatgtcggattctttgcctctg

SEQ ID NO: 4044 - DNA, 1030 bp, Zea Mays
ctcgcccagtcgccccttccgctcgacgcaaatcgtgaaacagtttagaatttccaacgaaagtcctacgagcctgcgagtgctaaactgctaactgctaagactgcaatggcggccggaggcgagctgcagctgctgagctcatggtacagcccctacgtgatccgcgccaaggtggcgctggggctgaaggggctcatctacgagttcatcgaggaggacctcttcagcaagagcgacctgctgctgaagctcaacccggtgcacaagaaggtgcccgtcctggtccacggcggccgccccgtgtgcgagtcgctcgtcatcgtgcagtacgtcgacgagacctgggcagcaggcaccgggacccctctccttcctgccgacgcccacgaccgcgccacggctcgcttctgggcagcctacgtcgacgacaagttctgcaaggagtggatcaaactgtacaggtcgacgacggcggagaaggcggcggaggcgctcggcggcgtggtccccgtggtggagacgctggagcaggcgttcagggagtgctccaaagggaaacccttcttcggcggcgacgccgtcgggctcgtggacatcgcgctcgggagcttcgtggtgtggatcagggtggtggacgaggcggccggcgtaaagcttctggacgaggccaagttcccggccttgacggcgtgggcggagcgcttcttggcggtggacgccgtgaaggaggtgatgccggacgccggaaggctgttggagcactacaaggggtttctggctaaacggtctccacctgctggttactgaacgctgtaactgtaagcctgtaacagcaagctcagtgttcgtgtacttttccgtgcgttaacgtgtactagagttcaggaaaggctttgattctgtccagagtccagacgaataaacgaatgttttttatacttcctccgttgcaatttatactttatttgacttttttacttaaagttttatcggtttgttttattaaaaaattctaatttattattaa

SEQ ID NO: 4045 - DNA, 2784 bp, Zea Mays
ggcctgttggagtcagccaaagtgctgctgcacttcaagagtcagccaaaagagctgcttcactctgggtgttgttctctagggttttctgtagccgacctaggccacgcaaagtccaaaacccagagccatcgctgccgcctcggtcgcgattcctaaaggcggcgatggccatgacgcggcgttctgcttcccatctcctatccgccttccggcccttctccctcctcctccagccgcacctcgtcgactcttcgccggcggccgcgtcggcgaggcgggcgatgtcgtcggcgtcggccctgcgtgcacgggacgagaaggatgtggcgcggtggcgggagtcgatgggccggatgcggaatatcggtatctccgcgcacatcgactccgggaagacgacgctcacagagcgagtcctctactacacgggtcggatccacgagattcacgaggtgcgcggccgtgacggcgtcggtgctaagatggactccatggacctagagcgcgaaaaggggatcaccattcagtctgctgccacctactgcacctggaaggattaccagattaatattattgatactccaggtcacgtggatttcaccattgaggttgaaagggcactccgtgttcttgatggagctatacttgtactatgtagtgttggtggagtacaaagtcagtcgataactgttgatcggcaaatgagaagatatgaaatcccaagggttgcttttattaacaagttggaccgtatgggagctgatccatggaaggttcttaaccaggcgcgatccaagctccgtcaccacaatgcagctgtacaagtacccataggattagaagaggagtttgagggccttgttgaccttgtagaaatgaaggcttataagttcgagggatctagtggccagaatgtaactgcttctgatgttccattgaatatggaggatttagtcactgagaagcgtcgtgaacttattgaagttgtttctgaagtagatgaccagcttgctgaagcttttctcaatgatgagccaataacagctaatcagcttaaggcggctattcgaagagctacagtggcacggaagttcataccagtatacatgggaagtgcattcaaaaataagggtgttcaaccacttcttgatggcgtgctggattatctaccgtgcccgttggaggtttataactacgcccttgatcaaaacaaatctgaagagaaggtattattagctggaactccagctgaaccacttgtggcattagcatttaagctagaggaaggtcgttttggtcagctgacctatctaagaatctatgacggcgttatacggaagggtgacttcatatacaatgtcaatacagggaagaaaatcaaagttcctcgcttggtaaggatgcactctaatgagatggaggatattcaagaagcatatgctggccaaattgttgctgtttttggtgttgattgtgcatcaggcgatacatttacggatggaacagtgaaatatactatgacttcaatgaatgtccctgaacctgtgatgtccttggcagtttcacctatatctaaagactctggaggacagttttcaaaagctctgaatcgcttccaaaaggaggatcctactttccgtgtgggtttggatgctgagagtggccagacaattatttccgggatgggtgagctgcatctggatatatacgttgaacgtattaagagagagtacaaggtggatgcaaaggtaggaaaacctcgtgttaacttcagggaaacaattacccagcgtgctgaatttgattatttgcacaaaaagcaatctggcggtcaaggtacattgagcctctaccttcaggttctgatggtaaattcgaatttgataacatgattattggacaagcaattccttcaaactttataccagcaatagagaagggttttaaggaagcttgcaattcaggctcgttgattggtcatcctgttgaaaatttaagaattgtattgactgatggggcttcacatcaggtggattccagtgaacttgcttttaagctagctgctatctatgcttttcgacagtgctacacttctgccaaacctgtaatattagaacctgtgatgaaggtggaactcaaatttccaactgagtttcagggcacagtaactggtgatatgaacaagagaaaagggatcattgttggaaatgagcaggaaggtgacgacaccattgtagtttgccatgttccgctaaacaatatgtttggatatgcaacagctattcgatcagcgactcaggggaaaggtgaatttacgatggagtacctggagcataatgttgtatcgcaggatgtgcagatgcaactagtgacctcgtaccaggcggccaagggcacagagtgattcttctttttacagaagaacaaattttgtttgcgaacttttagtggcatcgacttcccggtcctctggacacgtcacaaatagtaggcgataattcaaactgtggtttcttagtgaaaatacaactatgccgcaataattagcattcccacagtagaattgtacaaaacattatctagcaaatgcctgaagtttagtttgtaatgtcttggtaatgagaacatcttgtgcaatttctcctcaaaaagaaatatctaatgctacactgtgaaggcatggatgttttggttactggtaatatttctccttttcgtttttgggtttctgttcaaactgtttgtttttatattagacaaatggtggtaaagttaagctag

SEQ ID NO: 4046 - DNA, 2073 bp, Zea Mays
ataccaccaggagcattaacttcaacagatgcaatcaatttcttctgagcttgaggtacttggcaggcatgatcacccacgtctaactgttccatttctgaagtttctgagatttccaaggcatgtagacatgaatccacttgtttgccagatgaggcacaatcattttatgagaaggtcagttctgagggtcaagaagtaaaaattatgattgagaagagaatggaatccagtgcaatatctgaaagaaagaatgttgatgctcgatcttactttatgaccttggaatactgggaagatttattttgtaagctaaatgagatgagaagatataggagaatagttgggtctcttgcgggctcttgtttatcagctgccatcccacttctctcttccaataaggaaacagcatgccttgtggcccttgacattgtggagagtgctgctatatctattgccaatgttgaggaggcttataagtgtgaatgtcaaagcaaaggagtcattgaggaggccatccagttttgttcatttgacgagcttcttgatggtacagatgccaccgaagatgttgatgaaaataggctactcccagcaatgaacaaactgtggccttacttggttatctgtctaaggaacaagatctcagtgccggttgttaggaagtgcaccgaaatgttgaggcgagcaatttgcatatctggcggcgatttttatgtacgcaggtttcataaggatggacctattgtttggaggttgctggctttatctccattccgacgtctgtcaaagatggatgaaaaagcaatcattttaccatatagggatacctcacttaactcagaggaacctatggctgagatctccagccaaaagattcagattgcagtcctggacatgatcgctgcaatatcttcgaacaagagaagtgctgttgcactagaaagcgtactaaagaaggtctgtggccttgtggtaggcattgcctacagtagtttgacaggtttgcaggaagctgctataagggcattggcaggccttgcctgcatggatgctgatcttgtctggcttctccttgcggatgtgtactactcactaaaccaaagggaatctttacttcccaaccaagatctagccctggtatcagatcttttgccccctccagtgtcttcgagagaatacctctttgtacagtatggaggtgagggtgtcaggtgtgatgtagatccctcatctgttcattatgtgttcagaaggatgcagggtgtgtgatcttgtgtgacctgaaaatcaggttcctgatactgtgtatttgtaatcttgctgagtttctttggtcatgctagcaccctatgtcacacattgaacataatatcacctgctacagagaatggtaaactttttcatacgtgttctcgcactgaaaatcatcaaggttggtcacatgtctgaagaatgattatgacaagtctttaccactttgatcataattatattaagcaaacatcaggactcatgatgacaatgaaggatgtgatgggtttgtatctgttagccatataaggttgcacgttaagcatgcccctgacttgccggacgagcagcaagacttcgggacctagattggctaaggcactaagaatagaatagcttatctaccgatatgtaaagtcttatttccacctttcgaattcttttcctcggtagctaagcttatttagttgcctaatggtcgatgtaatctttttattgtgtgattcattccactttcatggtatttccgctcttgttacctccctctaccgcttcttcatctacatctaacctcatgcctggcgacctctaataagtaactgttgatccggccacataattggaatgccttcgcgtgaggttgccggcctttgtgtcagtcactcaacatgctctcaacatgctgaggaaggtcgttgttgtgccgtagccgagcgacgcaacaagtggctgttcagaacacggacaaggtgatgttgaacgtgtagaaacaacggcagcgtgatgcggaacgtctgaaacaacgacagcgtgatgccg

SEQ ID NO: 4047 - DNA, 3164 bp, Zea Mays
tgagatttcgaccatcggtaataaccgagcaaaagtggacccacgctcagtgtgtgacgaccatcgcgagaagggtccatccctaaaaactgcgcaataaaccccaagcaattcacacaaattgcttgggggctcgggggctgctgttgggtacgtaggaacgaggtacccaaaataaggcatataaaccttctggccgactaaagtctccctgccgagcaagaccgcgaggcaaagcgatcgaccaggtctccaccgagcaagtccacgaggcggagcgaccgaccaggtccctgtcgagcaagtccgcgaggcggagcggccaatcaggcccctgccaagcaagtccgcgaggctgagcgaacacccaggtctgtgccgagcaagtctgcgaggtgtggcgatcgaccagatcaccgtcgagcaagaccgcgaggcggagcgactgaccaggtccccgtcgagcaagtccgcgaggcgaaacgaccgaccaggtccctggcgagcaatcccgtgaggtagggcgaccacccaggtccctggcgagcaagtccgcgaggcagggtgatcgaccaggtcccgccaagaaaatcggcgaggcagaaaccgaagtcaaacgtcgcgagtccatgccaactaagacaaaacatgtcatcctagggcatggacatacatacgaacgacaggccgggggcacgccgagtggccgctatcgacatgaccacacctcctcaagtatggccctggcgcacccccactgcctcaatggtttggacgactctgttcatggaggacctcaacatcggagcttctatagtaacccgaatactggatagcgcggaacagatacaccaaccgggtgtacgcctatgcacgccaatgagtgacgcaggctcgtgacgacgtgcaagaccgcacgactgctccacacgactaacctacgggaccccccgcgcactaacacgaagatgtcagcgggagactagctacagggacccgtatgacgagcggacgagtatggctatgcacggccccactgacggcttcagaggaaccacaccacccaaggccaccggccgagctcccttcggtagaacacaagtcccattttctttacacacgagcacaccagttgtaacacgcccactgcaatactacgatcaacactacattggactagggcgcgagcctgaaccagtataacccaccgtcccaagttcatcgttcgagtcctggtggctcaccattcagaatgcaatcaatttcttctgagcttgaggtacttggcaggcatgatcacccacgtctaactgttccatttctgaaggcagtttctgagatttccaaggcatgtagacatgaatccacttgtttgccagatgaggcacaatcattttatgagaaggtcagttctgagggtcaagaagtaaaaattatgattgagaagagaatggaatccagtgcaatatctgaaagaaagaatgttgatgctcgatcttactttatgaccttggaatactgggaagatttattttgtaagctaaatgagatgagaagatataggagaatagttgggtctcttgcgggctcttgtttatcagctgccatcccacttctctcttccaataaggaaacagcatgccttgtggcccttgacattgtggagagtgctgctatatctattgccaatgttgaggaggcttataagtgtgaatgtcaaagcaaaggagtcattgaggaggccatccagttttgttcatttgacgagcttcttgatggtacagatgccaccgaagatgttgatgaaaataggctactcccagcaatgaacaaactgtggccttacttggttatctgtctaaggaacaagatctcagtgccggttgttaggaagtgcaccgaaatgttgaggcgagcaatttgcatatctggcggcgatttttatgtacgcaggtttcataaggatggacctattgtttggaggttgctggctttatctccattccgacgtctgtcaaagatggatgaaaaagcaatcattttaccatatagggatacctcacttaactcagaggaacctatggctgagatctccagccaaaagattcagattgcagtcctggacatgatcgctgcaatatcttcgaacaagagaagtgctgttgcactagaaagcgtactaaagaaggtctgtggccttgtggtaggcattgcctacagtagtttgacaggtttgcaggaagctgctataagggcattggcaggccttgcctgcatggatgctgatcttgtctggcttctccttgcggatgtgtactactcactaaaccaaagggaatctttacttcccaaccaagatctagccctggtatcagatcttttgccccctccagtgtcttcgagagaatacctctttgtacagtatggaggtgagggtgtcaggtgtgatgtagatccctcatctgttcattatgtgttcagaaggatgcagggttcctgatactgtgtatttgtaatcttgctgagtttctttggtcatgctagcaccctatgtcacacattgaacataatatcacctgctacagagaatgcaaacatcaggactcatgatgacaatgaaggatgtgatgggtttgtatctgttagccatataaggttgcacgttaagcatgcccctgacttgccggacgagcagcaagacttcgggacctagattggctaaggcactaagaatagaatagcttatctaccgatatgtaaagtcttatttccacctttcgaattcttttcctcggtagctaagcttatttagttgcctaatggtcgatgtaatctttttattgtgtgattcattccactttcatggtatttccgctcttgttacctccctctaccgcttcttcatctacatctaacctcatgcctggcgacctctaataagtaactgttgatccggccacataattggaatgccttcgcgtgaggttgccggcctttgtgtcagtcactcaacatgctctcaacatgctgaggaaggtcgttgttgtgccgtagccgagcgacgcaacaagtggctgttcagaacacggacaaggtgatgttgaacgtgtagaaacaacggcagcgtgatgcggaacgtctgaaacaacgacagcgtgatgccg

SEQ ID NO: 4048 - DNA, 4896 bp, Zea Mays
tcctcgtcgcttggcgcttccagagaaaaacccgaaagacgtctcgtgtcgcctccactaggcacgtcctggaaccttgcggggccggtattggaaagcaggcaagcacaacagcgatcccacaaaccacagctcggctcctcttcgccgtcgcaaccgatttatatatggcgatggaggcgtcggcggcctccgacgaaaccctagccgccgtcttcgcccagctcaagctccacaccgtcgctctcctcgacctcctccgcactcgccgccccatctctagctccggctcctccctacgcgaaatggccgctttcctccgcgccgccccggccccggcgctgcagctctgcttcgattatacagtgtttccactgctcctgctcctggatgcggcggtgcagtgcaggaagcaaggcaatgcgccggggcaggttgcagggggcattgatataggtgatgccgtcgccgaagctggtctgacctgccttgaggtcctcctcaccaagtgccacctcacctcggtcaatcagatggtagcaatgctgaaaaagttgacttccggggctatgctttcaccttcagaggcttcagaggaattccgtggtgcaattattagatgcttcagggctttggttttgcagttacagccatgcttggaccatttttgttcttgcaaacacggaatagtgttacctacgatcccaaccagtacatgcttggaggttagaagtgtagtccgcccaaatcactctgcgcagccagaggagtgcttgcttgcatttcttcagtctcaaaatgcttcagctgccgtaggacattggctctcacttcttctacaagcatcagaacttgaggcatcaagggggcaccggggaagtgcagatgttaggaaggaatcattgcacacgctgcgcattcttattggcaaggtaggctctgctgatgcacttgcctttttccttcctggaattgtcagtcgccttgggaaggttctctacacagctaagactatgattagtggtgctgctgggagttctttgagcattgaacaagccattcttggattgaccgaggctttgatgatagtactaaatgacaaggaaaatcttagtgcacttggtaagcacaagaatgagaatcattctggtggcagtgagtcaactgagcatatattgcagatgcttcgccagttgccaaccaaaaatatatctgataagataagccatgatgagattacagatgattctgtctccaatgtcaataattcctttgctgatagaaaggcactgcatgtgaagcggaccaaaaaatggcttgaggaaacaactagtaatgttgataaattgctgtctgctacattcccacatcttgctattcattcatctgagaaggtaaggaaggcagtggttagtggtgtaaaagggcttttgtctagttgcagttctacattaaaaagaaccaagatgctacttttggaatgtttatgtgttctggcatgtgatgatgctgcagctgtgtctgaggctgcacaagatgctcttgatcatcttttcaaccaaggccacaatctcgtaacagaaaaggagatttctgatacctttactaggctggttgaaaggctaccacaagtggtacttggaagcgaggagacaaccgcactttcacatgctaggatgttgttggctctgaccttttatgctggtccccagtttctgataaatcatcttcaccgttctcctgtcattgctgctcgtttctttgattgtttgggtttatgcataggtcatagctcacagttttctggttccatggacaagctaattgtatcaaagccactatctattgggtatctttattcagttgctgagttgaagagtggcgcctattctaaagatacaactaacatatctctgcatgccacgtcaacatctgcagcctccaaaatatctgttatccatgataatgctttgccaaatgcattacttggtacagttgaatatgagttgccccatgtgcctccatggttttttcatgctggtagccagaagctttatggggttcttgctggaataattagacttgttggcctatcaacagtgtcaggggaaggaactgctgcaaccttgtctctctttgttgatattctgcttgatcagtttaggaggttgagcactgagctgagagacaaagatgtttacaacgatggtctgcagcggtggtacatgaaaggtgaagctggacaagcattgcgccaggctagttcagctgtctgcatgctcaatgagctcatgtatggtttgtcaggtcgatcccttggtatgtttttacaacttttcagcaacggatcagcacagatgccaaggacagtttgtcagaaaaatcaactgcttgcttgtgttaaacataatgcagttactaacaaaagagaagtgtggggttttagtgaacaaaagggcactaaagacaacattcttcattgcatcagcagtattctgcatgaatatgtatcaccagaagtgtgggatcttccaacagagaaggacactgagctacacctaatagagttgaacctgccattgcacttctaccgtgatacaactgcattgcacacagtagtgcttgaaggaattggagtcttgggtgttcttcttggtcaagattttgcacttagtgggtttatgcactcttccctttatcttctgctccgtgaacttatcagctcaagtgctcagataagaactgcatgtgatgctgtcttgagagcccttgctactgctggcggtcattgttcggttggccaatttgtcgttgcgaatgcagactacattattgactctctttgcaggcaattgcgtcacctggacctgaacccccatgtccctgatgttcttgcttccatgctatgttacatcggtgcttctcgtgatatcttgccattcttggaagaaccgatgcaatcaatttcttctgagcttgaggtacttggcaggcatgatcacccacgtctaactgttccatttctgaaggcagtttctgagatttccaaggcatgtagacatgaatccacttgtttgccagatgaggcacaatcattttatgagaaggtcagttctgagggtcaagaagtaaaaattatgattgagaagagaatggaatccagtgcaatatctgaaagaaagaatgttgatgctcgatcttactttatgaccttggaatactgggaagatttattttgtaagctaaatgagatgagaagatataggagaatagttgggtctcttgcgggctcttgtttatcagctgccatcccacttctctcttccaataaggaaacagcatgccttgtggcccttgacattgtggagagtgctgctatatctattgccaatgttgaggaggcttataagtgtgaatgtcaaagcaaaggagtcattgaggaggccatccagttttgttcatttgacgagcttcttgatggtacagatgccaccgaagatgttgatgaaaataggctactcccagcaatgaacaaactgtggccttacttggttatctgtctaaggaacaagatctcagtgccggttgttaggaagtgcaccgaaatgttgaggcgagcaatttgcatatctggcggcgatttttatgtacgcaggtttcataaggatggacctattgtttggaggttgctggctttatctccattccgacgtctgtcaaagatggatgaaaaagcaatcattttaccatatagggatacctcacttaactcagaggaacctatggctgagatctccagccaaaagattcagattgcagtcctggacatgatcgctgcaatatcttcgaacaagagaagtgctgttgcactagaaagcgtactaaagaaggtctgtggccttgtggtaggcattgcctacagtagtttgacaggtttgcaggaagctgctataagggcattggcaggccttgcctgcatggatgctgatcttgtctggcttctccttgcggatgtgtactactcactaaaccaaagggaatctttacttcccaaccaagatctagccctggtatcagatcttttgccccctccagtgtcttcgagagaatacctctttgtacagtatggaggtgagggtgtcaggtgtgatgtagatccctcatctgttcattatgtgttcagaaggatgcagggtgtgtgatcttgtgtgacctgaaaatcaggttcctgatactgtgtatttgtaatcttgctgagtttctttggtcatgctagcaccctatgtcacacattgaacataatatcacctgctacagagaatgcaaacatcaggactcatgatgacaatgaaggatgtgatgggtttgtatctgttagccatataaggttgcacgttaagcatgcccctgacttgccggacgagcagcaagacttcgggacctagattggctaaggcactaagaatagaatagcttatctaccgatatgtaaagtcttatttccacctttcgaattcttttcctcggtagctaagcttatttagttgcctaatggtcgatgtaatctttttattgtgtgattcattccactttcatggtatttccgctcttgttacctccctctaccgcttcttcatctacatctaacctcatgcctggcgacctctaataagtaactgttgatccggccacataattggaatgccttcgcgtgaggttgccggcctttgtgtcagtcactcaacatgctctcaacatgctgaggaaggtcgttgttgtgccgtagccgagcgacgcaacaagtggctgttcagaacacggacaaggtgatgttgaacgtgtagaaacaacggcagcgtgatgcggaacgtctgaaacaacgacagcgtgatgccg

SEQ ID NO: 4049 - DNA, 4912 bp, Zea Mays
gaaaaacccgaaagacgtctcgtgtcgcctccactaggcacgtcctggaaccttgcggggccggtattggaaagcaggcaagcacaacagcgatcccacaaaccacagctcggctcctcttcgccgtcgcaaccgatttatatatggcgatggaggcgtcggcggcctccgacgaaaccctagccgccgtcttcgcccagctcaagctccacaccgtcgctctcctcgacctcctccgcactcgccgccccatctctagctccggctcctccctacgcgaaatggccgctttcctccgcgccgccccggccccggcgctgcagctctgcttcgattatacagtgtttccactgctcctgctcctggatgcggcggtgcagtgcaggaagcaaggcaatgcgccggggcaggttgcagggggcattgatataggtgatgccgtcgccgaagctggtctgacctgccttgaggtcctcctcaccaagtgccacctcacctcggtcaatcagatggtagcaatgctgaaaaagttgacttccggggctatgctttcaccttcagaggcttcagaggaattccgtggtgcaattattagatgcttcagggctttggttttgcagttacagccatgcttggaccatttttgttcttgcaaacacggaatagtgttacctacgatcccaaccagtacatgcttggaggttagaagtgtagtccgcccaaatcactctgcgcagccagaggagtgcttgcttgcatttcttcagtctcaaaatgcttcagctgccgtaggacattggctctcacttcttctacaagcatcagaacttgaggcatcaagggggcaccggggaagtgcagatgttaggaaggaatcattgcacacgctgcgcattcttattggcaaggtaggctctgctgatgcacttgcctttttccttcctggaattgtcagtcgccttgggaaggttctctacacagctaagactatgattagtggtgctgctgggagttctttgagcattgaacaagccattcttggattgaccgaggctttgatgatagtactaaatgacaaggaaaatcttagtgcacttggtaagcacaagaatgagaatcattctggtggcagtgagtcaactgagcatatattgcagatgcttcgccagttgccaaccaaaaatatatctgataagataagccatgatgagattacagatgattctgtctccaatgtcaataattcctttgctgatagaaaggcactgcatgtgaagcggaccaaaaaatggcttgaggaaacaactagtaatgttgataaattgctgtctgctacattcccacatcttgctattcattcatctgagaaggtaaggaaggcagtggttagtggtgtaaaagggcttttgtctagttgcagttctacattaaaaagaaccaagatgctacttttggaatgtttatgtgttctggcatgtgatgatgctgcagctgtgtctgaggctgcacaagatgctcttgatcatcttttcaaccaaggccacaatctcgtaacagaaaaggagatttctgatacctttactaggctggttgaaaggctaccacaagtggtacttggaagcgaggagacaaccgcactttcacatgctaggatgttgttggctctgaccttttatgctggtccccagtttctgataaatcatcttcaccgttctcctgtcattgctgctcgtttctttgattgtttgggtttatgcataggtcatagctcacagttttctggttccatggacaagctaattgtatcaaagccactatctattgggtatctttattcagttgctgagttgaagagtggcgcctattctaaagatacaactaacatatctctgcatgccacgtcaacatctgcagcctccaaaatatctgttatccatgataatgctttgccaaatgcattacttggtacagttgaatatgagttgccccatgtgcctccatggttttttcatgctggtagccagaagctttatggggttcttgctggaataattagacttgttggcctatcaacagtgtcaggggaaggaactgctgcaaccttgtctctctttgttgatattctgcttgatcagtttaggaggttgagcactgagctgagagacaaagatgtttacaacgatggtctgcagcggtggtacatgaaaggtgaagctggacaagcattgcgccaggctagttcagctgtctgcatgctcaatgagctcatgtatggtttgtcaggtcgatcccttggtatgtttttacaacttttcagcaacggatcagcacagatgccaaggacagtttgtcagaaaaatcaactgcttgcttgtgttaaacataatgcagttactaacaaaagagaagtgtggggttttagtgaacaaaagggcactaaagacaacattcttcattgcatcagcagtattctgcatgaatatgtatcaccagaagtgtgggatcttccaacagagaaggacactgagctacacctaatagagttgaacctgccattgcacttctaccgtgatacaactgcattgcacacagtagtgcttgaaggaattggagtcttgggtgttcttcttggtcaagattttgcacttagtgggtttatgcactcttccctttatcttctgctccgtgaacttatcagctcaagtgctcagataagaactgcatgtgatgctgtcttgagagcccttgctactgctggcggtcattgttcggttggccaatttgtcgttgcgaatgcagactacattattgactctctttgcaggcaattgcgtcacctggacctgaacccccatgtccctgatgttcttgcttccatgctatgttacatcggtgcttctcgtgatatcttgccattcttggaagaaccgatgcaatcaatttcttctgagcttgaggtacttggcaggcatgatcacccacgtctaactgttccatttctgaaggcagtttctgagatttccaaggcatgtagacatgaatccacttgtttgccagatgaggcacaatcattttatgagaagaaagaaagaatgttgatgctcgatcttactttatgaccttggaatactgggaagatttattttgtaagctaaatgagatgagaagatataggagaatagttgggtctcttgcgggctcttgtttatcagctgccatcccacttctctcttccaataaggaaacagcatgccttgtggcccttgacattgtggagagtgctgctatatctattgccaatgttgaggaggcttataagtgtgaatgtcaaagcaaaggagtcattgaggaggccatccagttttgttcatttgacgagcttcttgatggtacagatgccaccgaagatgttgatgaaaataggctactcccagcaatgaacaaactgtggccttacttggttatctgtctaaggaacaagatctcagtgccggttgttaggaagtgcaccgaaatgttgaggcgagcaatttgcatatctggcggcgatttttatgtacgcaggtttcataaggatggacctattgtttggaggttgctggctttatctccattccgacgtctgtcaaagatggatgaaaaagcaatcattttaccatatagggatacctcacttaactcagaggaacctatggctgagatctccagccaaaagattcagattgcagtcctggacatgatcgctgcaatatcttcgaacaagagaagtgctgttgcactagaaagcgtactaaagaaggtctgtggccttgtggtaggcattgcctacagtagtttgacaggtttgcaggaagctgctataagggcattggcaggccttgcctgcatggatgctgatcttgtctggcttctccttgcggatgtgtactactcactaaaccaaagggaatctttacttcccaaccaagatctagccctggtatcagatcttttgccccctccagtgtcttcgagagaatacctctttgtacagtatggaggtgagggtgtcaggtgtgatgtagatccctcatctgttcattatgtgttcagaaggatgcagggtgtgtgatcttgtgtgacctgaaaatcaggttcctgatactgtgtatttgtaatcttgctgagtttctttggtcatgctagcaccctatgtcacacattgaacataatatcacctgctacagagaatggtaaactttttcatacgtgttctcgcactgaaaatcatcaaggttggtcacatgtctgaagaatgattatgacaagtctttaccactttgatcataattatattaagcaaacatcaggactcatgatgacaatgaaggatgtgatgggtttgtatctgttagccatataaggttgcacgttaagcatgcccctgacttgccggacgagcagcaagacttcgggacctagattggctaaggcactaagaatagaatagcttatctaccgatatgtaaagtcttatttccacctttcgaattcttttcctcggtagctaagcttatttagttgcctaatggtcgatgtaatctttttattgtgtgattcattccactttcatggtatttccgctcttgttacctccctctaccgcttcttcatctacatctaacctcatgcctggcgacctctaataagtaactgttgatccggccacataattggaatgccttcgcgtgaggttgccggcctttgtgtcagtcactcaacatgctctcaacatgctgaggaaggtcgttgttgtgccgtagccgagcgacgcaacaagtggctgttcagaacacggacaaggtgatgttgaacgtgtagaaacaacggcagcgtgatgcggaacgtctgaaacaacgacagcgtgatgccg

SEQ ID NO: 4050 - DNA, 1483 bp, Zea Mays
tgcaactgcaagatcgttcccattgaatagtgttctctacttttatcaagggtgtagacacaaggggatcacaatcgagcacttcaaccaattcaaaattcggagagcaaattgctcagcttgatctatcatctacctgggtatttggtgtaaggtggtcaccaagtgggaagacattggcctatgcagggcataactccatggtttatgtcatcgatgaagttgaatcttctcctgtggcccaaaacttgacgctgcgtgatctgcctctccgtgatgtgggttctttttgtctctgagcgcacattggttggtgtcggatttgactgcaatcctatgatctttgctgctgatgatactgggctttggagtttcgtaagattcttggacgagatgaaagctgctccatcagcttcaaaagcctcacagctctctgaagcccttggaaagctatatggacaatcaaagcagggggctagtagcgacactgttgaaccatcgaaagctcgtggtggggcccatgagaattgcataacgtgtattgtacccttgagaaaaggaagcgatggtactatcaaacgattcagcacgtcaggattggatggtaaggtcgtggtatgggatttggaaaaccacgtcagcattgcaaaatagctcgagggaaggctttcgttaacaatcaaatcgagggggcttctgtcattacccatcgtgctcaggggaccaccattcgtggcagcggggtcctgcaggttttcaagatccagggccagccaggtagattttttttgggtgcctgtacacagaaacattgccttagcgtagggagaacttgcatctatcaagtagattcaatttttggcgagtaattgtcctttgaattgagtccatacgtattgtgtatccttgctcccaaacaaacccgtaccgtatagtttttagctaggtaggtaggcaattgacgtcatctcttatttctggcgccatgtgtaaaataaccacacacggaattcatccgcggatgctgtgttgggacttatggacgcctcgtttcttctgccggttcttttgcaggatcgaaaaactcgcctgatggttgaattgtgtgaccgcggaccaccatgtgtaatccaacagtagaataggatggttccatgaaagcaggccctgctgatatgtggcctgtggggagtggggacctgctctattggtggatccccatacgctaatctttgctttgcccctgttcagggacatcccaccgggtcggtcagttttggcagcatgtgcatgagcttctggttttattactagctgtatgctcgctttgcttttgttctcgagggctagttcggaaactctatttatttaagagatttatatttttctaaaaaaaaattattagaaaaatagaaatctcttgtgaaaatgggattcttaaactagctctgaaatttaaacccctttcgggattgaaggggat

SEQ ID NO: 4051 - DNA, 2162 bp, Zea Mays
gcaaaaacgcgaaacgttttcaccaacacggctatctgtcttctgtcccatcccattccaaagcgaatagaggggaaggtgggggcgggaggcaatcggagggcgagggccgaggaggagtcaaaaggcttctccagttgagcggcgggatgccggtaacgcgtaggcgcgccgccgtggcggcggtggcgcaggaggaggggcgcgatgcggcgatctacatatcctctgattccgatgcggggtcagacccggaggattcagaatccgaggaagaggaggatactagcgatgaggacttcatcgacgtcagcgacagcgaggccgatgatggggaaagcagcgacgaggaaggcgaggaggattcggagtcggaggctgaggctgaggctgagcaattgggcgcggatcggagcgaggttgcctgcaacaaaattgctggtcttctaagcagtgggaggagtctggagggtttaaagttggcggagtacaaggtgtatttaaagaagaatggtcttagccaaactgggggcatggacacttgtgtagacagaatagtactccattggaggttcaaagatgcggatccaaggagaatttatcctcggtcatccttttgtatcaactgtaaaggtgatgtttgtaggggcgatgccgttctattcaaacagaaggtgtacgagaagagtggaaaaaggcatgcaaaatgtataggtaatcgtatagtagccggcaaagtcatcaaggaaagttatggtaaacaaaaacagcaacacactttcacgattcaagtgttttggagcaaaggacctgggaaattaccacctttgcatctgttgcttgtcaaagggcgcaacctatacagaatgatgacttttcgtcagaaaggctgaagattctagaagagaagcacaacagaggggatgatgcaaggcgtgttcgtgcattgaatagacctaattctgctggaaacactcttaaaggcaagaaaaaattgcacaaggaaaagcacaagtctcgatctgaaagacctcaccgccaatctaatatcaccgaactggataaaggcaaaaaacgacctgcacaatcctccaagtccgatctgcctaataaaagatctaagaaagaagggtcccaagttccttctaggaaaaaggatactggtggtaggatggcaaagaaaaatggtccctgccaagataagagcatttgtactggccagaacagctctctatgcaaagacaatagggagaagcacagtcatgctacctttcagaaaaagtgtcacgctgaacctctcaacaacggtccatctggttctgggtggaacagaactgctggcggacacagccaattcgaaggaagacacataactccagcttctcacgtcgaggcaaatcatggaaattttgtttctgtacagcatccttgcgtcgagaggcttcaacggcctactcaatcgcgtgaagttgctctggctcaccccggcggcggccatccatacgtactgtccagcgctgcaatgggcctccgacatcaaaatggagcaacggccggtgtgcacgcaccggcatatttcaggggacttccactcagtcaacagagggcagcatttccttcggccagcacgccgcaaactgggtaccatcctcatccagaagaattatttgttgcgccacacttcagatatcctagagggagtgctggtttccgccgataagacagtctggttggcgcctgctgcattttggtaactgcattggtggtaagacatgcggtcttcggcttattttcattgatgccatttcgttgccatgactcatgagcaaggagtatttgagtcttacctaatgtgcagagaggccagaactttgtttcatcttgagataaagcttccttcgtatataagaaaaaggaagatcctcacctcaattgaaggacttgattttctttgctttttttggggggcaggatgtgatggaaaaacagtgttaccatcgagtcgcataatcagggctctgcgtgcttcagacgggggaagggtttaatacaaacatgaatgctgcttttttttgtcgatctgagtccttagctgcaagattgacgcgagacatcggcttccaatatatgtacaccaatggtttctggaatttgagctagta

SEQ ID NO: 4052 - DNA, 2168 bp, Zea Mays
gcaaaaacgcgaaacgttttcaccaacacggctatctgtcttctgtcccatcccattccaaagcgaatagaggggaaggtgggggcgggaggcaatcggagggcgagggccgaggaggagtcaaaaggcttctccagttgagcggcgggatgccggtaacgcgtaggcgcgccgccgtggcggcggtggcgcaggaggaggggcgcgatgcggcgatctacatatcctctgattccgatgcggggtcagacccggaggattcagaatccgaggaagaggaggatactagcgatgaggacttcatcgacgtcagcgacagcgaggccgatgatggggaaagcagcgacgaggaaggcgaggaggattcggagtcggaggctgaggctgaggctgagcaattgggcgcggatcggagcgaggttgcctgcaacaaaattgctggtcttctaagcagtgggaggagtctggagggtttaaagttggcggagtacaaggtgtatttaaagaagaatggtcttagccaaactgggggcatggacacttgtgtagacagaatagtactccattggaggttcaaagatgcggatccaaggagaatttatcctcggtcatccttttgtatcaactgtaaaggggcgatgccgttctattcaaacagaaggtgtacgagaagagtggaaaaaggcatgcaaaatgtataggtaatcgtatagtagccggcaaagtcatcaaggaaagttatggtaaacaaaaacagcaacacactttcacgattcaagtgttttggagcaaaggacctgggaaattaccacctttgcatctgttgcttgtcaaagggcgcaacctatacagaatgatgacttttcgtcagccttgggcaaatgaagcagaaaggctgaagattctagaagagaagcacaacagaggggatgatgcaaggcgtgttcgtgcattgaatagacctaattctgctggaaacactcttaaaggcaagaaaaaattgcacaaggaaaagcacaagtctcgatctgaaagacctcaccgccaatctaatatcaccgaactggataaaggcaaaaaacgacctgcacaatcctccaagtccgatctgcctaataaaagatctaagaaagaagggtcccaagttccttctaggaaaaaggatactggtggtaggatggcaaagaaaaatggtccctgccaagataagagcatttgtactggccagaacagctctctatgcaaagacaatagggagaagcacagtcatgctacctttcagaaaaagtgtcacgctgaacctctcaacaacggtccatctggttctgggtggaacagaactgctggcggacacagccaattcgaaggaagacacataactccagcttctcacgtcgaggcaaatcatggaaattttgtttctgtacagcatccttgcgtcgagaggcttcaacggcctactcaatcgcgtgaagttgctctggctcaccccggcggcggccatccatacgtactgtccagcgctgcaatgggcctccgacatcaaaatggagcaacggccggtgtgcacgcaccggcatatttcaggggacttccactcagtcaacagagggcagcatttccttcggccagcacgccgcaaactgggtaccatcctcatccagaagaattatttgttgcgccacacttcagatatcctagagggagtgctggtttccgccgataagacagtctggttggcgcctgctgcattttggtaactgcattggtggtaagacatgcggtcttcggcttattttcattgatgccatttcgttgccatgactcatgagcaaggagtatttgagtcttacctaatgtgcagagaggccagaactttgtttcatcttgagataaagcttccttcgtatataagaaaaaggaagatcctcacctcaattgaaggacttgattttctttgctttttttggggggcaggatgtgatggaaaaacagtgttaccatcgagtcgcataatcagggctctgcgtgcttcagacgggggaagggtttaatacaaacatgaatgctgcttttttttgtcgatctgagtccttagctgcaagattgacgcgagacatcggcttccaatatatgtacaccaatggtttctggaatttgagctagta

SEQ ID NO: 4053 - DNA, 3242 bp, Zea Mays
aaacagttttaccattttatagaaatgaataaaaaagctgagaagtttgacaatctgcaacagttttttatggcgagaagacgaaaaaaaggccaaataaacagggcccagtgggtggcccgtggctgaacccgccatcggatttcgaaggttcgaggcaaccccaaaatccaaacaaaggaacattccccgggaagcggaaacgaaccactccgggcctccagcttttctatttttcataactacccttatcctccaccggtgtttgcgcggagcgactaggggcacttccgtccgtttcgcacccccgaataaacaaggcgcaggagcagcagcagcagcaggttcttgtccccttccatccgtcccagtcccaccgccaccgtcgcaccgcatcccttctccccagctcgccgccgccgcgcccacgatcgacatggcgaagctggggcggatgagcaccgccaaggtcatgataacatacaagaggaagcgtgctgccacacatgcccatacagaagacgacacagttcttgactcatctcctgctgcctcaagcaatgtggctgtcagcagtctacaacttaagcctgagggccctgctgagactgccgtgataaatgaatataatcatattactcctaaaatgcagcagtctttctccacgtttcaacaaaacatcaaagaagaacgtgaaccagagaaaggacatgatcagctatatgaatcatcaccgtggaaagaacaacctgagatttgttctgccactattgcctcaaccgcagaggcgcatagcaataaatcacaatgcattgatggcacaaatagtcaaacccctgtttcaagttctctgtgtggcaacatgcttgctgataggatgattaaccagacaaaagattcaaatatctctgcccctgtggaaataaattctcctacggggatggaaaatgctgtcgcccctggccaatgtaagagcaggtttagtcctctgctcacctttcgcaggcgagttaagaagaaaacaaatttggatgaaccagcagaagaaatttgttcacttgacaacgacaaacagtgttcaacactgacatgcagcccaccacgctcatcacaggatgctacatcattactaaaacatactgctccaaaccctttggatattgaggataaggtaggtagattgaaaaatactggaccttctacagaagctgaacactcacctgaacaagaaagttcccacgtcgtaaaatcctcagttcaacatgtggttccacagattgctctagatgtaaaccaaaacataattctggaagatgatgttacaccaatgtcgaaccaaaagatgtccttggaagatgatgttacaccaatgtcgaagttcactggtgtgcaagaggtcagtgggcaagatacgccagtggaggacttcaacagaacatcaccaaatactattgaagtgccaaaagttattgatttgcaggggaagggacattgtactggggaaactacttctctgcagtctccaagacaaaaagttgatgccagttggttgaaacggaccaataaatctgtggcagaagatgttccagaatctcaaggttcaacaaaaaatattccaataattctcttggatgatgataatgatgataggggcaaggagctcgaaaattcagaggccctcgatcaagggctccatagtcaaaacaaaagaacttttgggaagattgacctgaactgtactgaattaagacaacagggacttctctgtttagatgactcaacaattcaaaggctgccagatctggatctagctgtcaatgctcgaaagcaaatgtctcgaccgattgaaaggctgtttttcacagaggagaaagataccatccgtggcaaacaagagcatcatgaagaaagctcaaccatgcacgccccatactcaaatttctttgatctgggtccaccgtggaacaccgggagtttgaagggaccaaaaggcttgccttcagaagtaaagtttggaataatggacagggctcctgagttcagtctagacctcaggctggatagtttcacagacaacaacagtgtggctgccctgaggagcgacaagttgtttctcggaagcacctccagcacatctcgtaagttaacagaaaagcttggcatgtactcctacaagaggcagtcggctccgtggtcagaagaagagctggactttctttggatcggggttaggaggtacggcgtgaataactggaatgcaatgctgagggacagtcggctgcggttttcaatctcaaggatgcccgaggaccttgctaagcaatgggacaaggagcagaagaaacttgtgggtcctgcgcaagctgttggttatcttggtagagcttcgtgctctggatgctcaaagtctgcatctgtcggggcccaagcccaaacggacctttcattgggcgaatattaccttggtagagcttcgtgctctggatgctccaagtcttcatttctcggggcccagacggacctttcattgggcgacgtctaccttcgcagtggccgtgctccagagagaggccaccagcatcatttaccaacaagcctgggcgtgggcggcttccctggggcttcttcatcgtatggaagaagtggcggcaggcgcagaagggcgtccaagtcgtactactacgagaacaagtcggcttggttccaggagccaccatcggacagggtgccccagcaacccggcggccgaatgggccctgagatgtggccgagcatcatggtggtgccaccgccaacggcagatccaccgagggacgacgacgtgaagccccatgtcctcctccctgatgctaccctgaagcgcgcgataaggaggagtgcggactgggggtcgttcagcaggaggctgttcctgtccggcgatctcaacgggggggctgcaggcgccccagtaccaagcgacaccggcgcgtcatccgaagagacagtgtctgacagctgagcttcagtttatttgacatgtcccattcccattcccattcttattggatgttgatgaagctgctggcatgttctctgtaatgtcatggttgcctagtactcactagtattgcatcttgtataaagtctctctctctctctctctctctctctgtcctctataacaggctacgagtccactcatgcatggtggttagatcgaacaaatactccgtaacaacatagcataccctaaacccccc

SEQ ID NO: 4054 - DNA, 8729 bp, Zea Mays
gcaaccaggccgcagggcgcaaggctcaagcctcaagccaacaaccgaatagagagagcagaggacgcactacaaggccgcacagacggagcagagcagctagaggagagaggcggcgtcgcggcgaggtggaagagagagagagagagagagtggtgaaggtgcgtgggttaaaaagaggaaacaaaaaagaaaacgagcgaggcagaaaacacaagcaaagagacgacagcaaaaataggaggccggaggcgggcgaggaacgtgaataaaatatcattcggagaaacaagagaggccggggaatcgcgtcggaattccggcgaatcggcgggatccggccgggatctgcgcgccggatgaggggtcggcaccatgaaatggtccacattactcagtaaggtcgtcttcgccggcggccagcagcagcagccgccacctccgccgtcgccgccgccggagtctccgttccacggccagcaggcggtccaggacctcgccaccccgaggctcagctccgcctccaccggcggggacgagggcggcttcgacgcggcggccgggagctcgccctctgccgctgcgtcctctgccagggggagaaatgaattggagtcggactttaggagattatgggaagaatttcgctcttccagctctgaaaaggagaaagaaagggccttaaatttggctgtagatgtcttctgtaggctagtgaagcagtattctagtgtagctcaattagttacaaagttagtagaaggacatattttttcttttgttattggaagagcttttgttactgatgtggagaaactaagaatccacagcaaaggaagaccgctgcgtgtggctgatgttattggcttcttttcggataccacagagcttggtatatgtccaggatcaaatttgttgtacgcagtcgaagtgcttgtgactgagacaaatgataggcaacctctgttggactctggtattttgtgctgccttatatatatcctcaattctctattgagccccaatgagaactccacagataccttgcctgttcaccaagaaggatccagaaatgagaaaaacaaaaatttggatcctatgcaatcacgacggcttgagttcagggatggtattgttccccttcacacaattcagctccatcgccatgcaatgcaggtccttggtcttcttcttgcaaatgacaatgggacttctgcaaaatacatcaggaagcaccagctgattaaagtacttcttatggctgtgaaagatttcaatcctcaaagcggtgatgctgcttacactatgggcattgtggatttattactggaatgtgttgagctgtcttacaggcctgagtctggggccataaggctcagggaagacatacataatgctcatggttaccagttccttgttcagtttgctcttacactttgtagcttacacaaaaatcagactctccaatcctcatccaagttagcatccgaagcggatgcatctgttccttctcacagattagaacaagatatattctcatgtgacctttcacctcagttgtctaggttgcttgatgttcttgtaaatttgtcacaaattggcccctcagaaaatggtggtgttagtagccctaaggccttgaggggttatcatcttcttgcactttttcttcataggagaatgtcactatttgatatgcaatctcttgatatcttctttcgtattgctgcctgtgaggcttcctttcctgagccacagaaatcaaagataaatcgaacagcaggctatgcgtctggaatgtccccagaggccagccttgatgatctcaccttacccaggtttgccgatgatatgtcttctgggggatcacatggggatctagatgacttttcagctcaaaaggattcatttagccacttgtctgagctggagaatgctgacttagctggtgagacttctgaattcatagtcttgtcaaatgctgatatggttgaacacattcttttggactggactatatgggttgctgctcctatatcagtgcaaataactcttcttgggtttcttgagaggatggtgtccatgcattggttcagaaatcacaaccttacaatgctgcggcgaattaatcttgttcaacatcttcttgttacgttacaacgtggtgatgttgaaattcccgtgttggagaagctagttgtgcttctaggtgtcatcctggaggatggttttctagcttctgagctggagcttgttgtaagattcataataatgacatttgatcctccagagcttacaccgaaccgccagattgtgcgggaggctatgggaaagcatgttattgtgaggaacatgttattggaaatgcttattgatctacaagtaaccataaatgctgaagagttgctggagcaatggcataaagttgtttcatccagattggtcacatatttccttgatgaagcggtacatccaactagtatgagatggatcacgactcttttaggagtttgccttacgtcatcaactacatttgcattgaagttccgtacaagtggaggttttcaaggattgaatcatgtgcttccaagctttcacgattctccagaaatatactatatattgttctgtttggtgtttgggaagcctgtttatcctcgagtgccagaggtccgcatgcttgatttccatgctctcatgcctagcgatggaaactatggagaattgaagtttgtggatctcttggatactataattgcaatggcaaaagctacatttgattccttgattatgaaatctatgcttgcacatgagaataacaatctttcacatcttaatggcaccttggtcgcggatcttgttgaggcgacatcggacatgggaggtgatcttcaaggagaagctctgatgcataagacatacgcagcaaggttaatgggtggtgaagcagcagcacctgctgttgctacttcaatattgaggttcatggttgatctggcaaagatgtgcccaccattctctgccgtttgcaggcggcatgatttcctagagagctgcattgatctctatttctcttgtgtgagatccgattttgccctgaggatggcaaaagatcttacaactgttgcaactggcgagatgaatgaacatgatgatgataatggaagtttaaaggatgccctttcaagtttaccacatgatcaggatcaatctaccaaaacattgagtgccacaagttttcctcaggagcagaaaagttccagttcagaaagtactggcatgccaaacccttttgaaactgctgaagccaaagcagatgattcttcgaatcaggagttcagcaataaaattttaaatggagaagcaaatcaaatatttaataatgctcgtgatcaagggcggatcacagcttccggtgcaaatggcatttctgaattccaccatgtaactgattcacccaactcagttgctatgaataatgttggatctcctgttttatccgagaggtcaacccacagagcagctagtacccctactgcatctccaatggccccattcacatcttggcctggcagtgcaggatcgtatactgatggtagacacctgacagcttctccatccatggcttcatctatatctgggatagacctggactcgtcccctgatctgaggacaaatattcagggaccatctgccgcaaatacccttttcccaatcaattccaagcttttgcttgacatagatgatttaggttatgggggtggcccatgctctgcaggagctacagctgttctagattttgttgctcaaattcttgctgacactatctcagatcagcttaaagcagcactctttattgagaacattttggagtccgtgcctttgtttgttgatattgactctgctctagtttttcaaggcttgtgtctaagcagattgatgaacttccttgaaagaaagctcttgcttgatgatgaagaagatgggaagaaacttgacaagagccgctggtcggtcaatttggacccactttgctggatgattgttgatcgtgtgtacatgggctgctttccaaccccactcagggtactacaaacactagaattcttaatgtcaatgttacagcttgctagtaaagatggccgtgttgaagatgccgtgcctccagggaaaggtattttgtccattgctcgaggaagcaggcaacttgatccatacatccacgcgatattgaagaacacaaaccgaatgataatgtactgtttcctcccaatattccttaaaagtatgggggaagatgatctacttgcaaatcttgcattcctgacggaaactgggaggagtttagcttctaaacgttatcaggaagatttttctattgatatttgtacagttcttcagctactagttgccaacaagagattggtgctctgcccaagcaatgttgatacagatctaatgtgttgtttctgcataaatttaatgtcacttctccatgacaagagagtaactgctcaaaacttggcagttgatttacttaaatacttggtagtgcatcgtcgtcaatctcttgaggaccttctagtttgcaagcctaaccaaggacaacaactggacatcctgcatggaggacttgataaattggtcactggaagtacatcaacgttttttgaatggctgcaaagttctcagcaaacaataagtaaagtgttggaccagtgtgctttaataatgtgggttcaatatattaccggctcagcaaaatttcctggcgtgagaataaaaggaatggaggtcaggcgcaagaaagagatgggacggaaatttcgcgaatctgcaaaagtagatgccaggcactgggagcagataaatgagcggcggtataatcttgatttggttcgtgatgtgatgtctacagagctaagagcaattcgtcaagacaaatacggttggatattgcacggagaaagtgagtggcaaagccagctccaagaacttgtccatgagagaggtatttttcctatgcggcaaccatccacagaacctgagtggcagctgtgtggtgttgaaggaccatatagaatgaggaagaaacttgagcactccaaatttaagatagatactattcagaatgttctaaccagcaaccttggatcaaatggtggtaagattatcaataaagaggatggagaattgttgttgacatctgggtcagacacaatgtcaggcttgaatcttttgacctatgacactgagcagagggatcttgatgctgtcgagttttcgtcattcaaagatgatgatgacatattcaaaggaggaagcacaatttcaggtccaattggctggactgatgataaaagcagcgttaatgagcagagccttcattctgcgacggaatttggagcaaaatcaagttccctttcttttcacatgactgagagtcaccagggtaaatctgaacttagttcaccaaggagggcaccttcagtcaaaggtactgatgcaagaacctcagaggataaatcagaaaaggagttgcttgacaatggtgagtatcttatcaggccttatctggagccctatgagaaaataaggcataaatacaactgtgaacgggttgctggtcttgataagcacgatggaatatttttaattggagaactttgcttatacattattgagaacttctacattgatgattccaattgcatttgcgaaaagggcagtgaagatgagctctctgtcattgatcaagctttaggtgtgaacaaggatataatgggaggcagtgaatctcagttaaaatcacctaccacttggggtgggacagcaaaggtcttgcttggtggcagatcatgggcatataatggaggtgcttggggtaaggagaagctttgcaacagtagcaacctgcctcatccatggcatatgtggaagcttgatagtgtccatgagttgttgaaacgtgattaccagctccgccctgttgcaattgaaattttcagcatggatggttgcaatgagcttctagttttccacaaaaaggagagagaggaagttttcaaaaatttgattgccatgaatctcccacggaatagcatgttggacacaaccatatcagcatcctctaaacaggagagtggtgaggggagccgtctttttaaagtcatggcaaaatcattttctaaaagatggcaaagtggagaaattacgaacttccaatatctcatgcatctaaatacacttgctggtcgagggcttgataaacccatgggatgccaaacggaggaaggtgaagaggaattctgcaagagatatgatagctgggatgaccctgatgtaccaaagttccattatggctctcattattcaagtgctggaattgtccttttctatctcttaaggttgcctccttttagcacagaaaatcagaaattgcagggtggacaatttgaccatgcagaccggttattcaacagtgtgaaggatacatgggtaagtgctgcaggcaaaagtaacacatcagatgtgaaagaactaattcctgagttctattatttgcctgaatttttggagaaccgttttaatctggatctgggcgagaaacaatcaggagagaaggttggtgatgttgttttaccaccttgggctaaaggcagcgccagagagttcatcaggaagcatcgggaagcactggaatcggattatgtatctgagaatctgcatcattggattgatcttatttttggatataagcagagaggaaaggcagctgaagatgccgtcaatgtcttctatcactacacatatgaaggcaatgttgacatagacgcagtatcagatcctaccatgaaggcttcaatactagcacaaatcaaccattttggtcagacccccaaacagttattccagaaaccacatccacagaggcggactgacaggaaagtccctcctcatcctctacggtactgtgcctatctaacacagcaggagattcgcaagacagcatcttcggtgtcccagattgtctcctacaatgataagatcctaattgctgcagttaactgcttgctcaagccgctaacttataatgaatacatttcctggggattccctgaccgaagcttgagaatattaacatatgatcaggatagacttttgtctactcatgaaaaccttcatggtggtagtcaaattcagtgcactggagtgagccatgatggcaacattctcatcactggtggtgatgatggagttgttgcagtgtggagatttgtgaaggatggcatccgccgtctcctgagaatggagaaggctttgtgtgctcacacaggaaagataacttgcgtctctgtcagccaaccttactcattaattgtctcaggctctgatgactgttctgttatcttatgggacctgacaagcctagtctttgtgaagcagctaccaaggttcccggcatcagtatccgcgctacatgtgaacagcctcactggtgagattctgactggtgctggtgttctttttgctgtttggagcatcaatggggactgccttgctgtggtgaacacctcccagcttccttctgacctcatcttgtctgtgacaagcgcgacacactcagactggcaggacacaaactggtacgtgacaggccatcaaagcggcgcggttaaggtatggaagatgttgcactgctcgtctgatgaagcagtaaatagcaagagcaaatcacctgcggtatcgtctggtgggcttagcctgaacggccaagcaccagagtataggctacttctgcagaaggtgctcaagtcacacaaacaccctgtcactgccctttgtataccaccggacttgaagcagcttctgagtggggatggcagcggtcacttgctctcatggtcattgaaagacgacagtttcaagggttcatagctcagagaaatatagggattcagctgcacatatagagaaacactggttaaatcttaccactgatttcttcctcgtccagaactgagcattggcgtgcattgacaaaagagctcggatcagcaagcttctacatggtatatgaaatgttcccttgatgtcccatgcctgggccatacagcagtccgggcaggagagagaatacaacagacacaattggaaggatgaagtggacgtggatgcgctgctgcgctgacatcataatcttatactgtgaattatgagatggttgtaccttctcttgtttttttgaggagaaaaggattcatgtgggctgtaggtgccattgtttgtaaagtctatacagggtaattttggtggtgccggttgaggtggctgatggtgtagtgtctcgatgttttgttcggggttgtgggagcaaggaaagaggtattagtttcattttctccccccacctctggaggctagtttgggagccacaaaaccgaaagtgattggatggactaaaagcttctacatattcaaaattgaataagaacgagattttaatcacttcaatcctcttcgattttgtggcttccaaactagccccagaagtgttgattctttgactgggtgtaatttgagcacccttgtgttcagtaagtctatttgcgtatacatgcaagagttttgctgaacaaagcgacgagccccttccatggttcgattggaagtgaagtgtagtgtcgcagatattttctccgccctaaattataagtagtttgattttt

SEQ ID NO: 4055 - DNA, 1710 bp, Zea Mays
agacgaagtaattgcagccaaaggtgtgaagccaacattatcaccaaatctcaatacacttgccttagtcgagctggtgtaaagcggcttcttttctgcggtgtgggctgtcaagtgcaagctttgagatctgtagaaaagtaccttggtttggaaaagctttatgtgcttggaacaaactgtgttgacaatggtacgcgtgaagggcttgataaattcttgaaagcggcaagcagtgagccagaaactgttatgcattatgaatttatgcaagactataaggtgcatctaaagcatttagatgggcacattgaagaggttccttatttttgcctgccagcaaacgacctggtagatgttattgcaccgtcatgctatagctgctttgactacacaaatggcttggcggtaaggtttccatcattttgaatttgaatagggtcccttgttttgaataggaactttctttctagtgctcatctgcacaaatagacagaagttgtacttcctagtgctcatctgcacaaatagaaatgattggatcacgtgtcgtttagaaaagatggaataatcctgaaacacactagactgaatcatctatgtgttgcatgacgtggactgtgtcgttcttattattacgcactaacatagctgaactaattctcttgacctcgagttgcctgggtgcctcttcaaccttcatgttcagaatagcatttgttgtgagatatcatctgttatcttggtatatgtcttcagtctgctctcttggagcagacaaacagctcagagtcactatgttgtttggttaaatgtctgcaggatttagtggtggggtatatgggagtaccgaaatatgctggggtctccatgacacagcatcctcagtacattacagtcaggaacgatcgtggacaggagatgctgaacctggtagctggccttctggaaagcacacctacaattagcagtggctccaggcaaccgtttgttatggagacagtgaaagctgacgatgccgcaaaactggggaaaggcccttcgaaaccagctcctagattcgtcggcgacattctggccttcctgctgaacttggttggacccaagggtctggagttcgcacgctactctctggactatcacaccattcggaattatctgcatgttaggcgggcatggggaaagcaaagagctgagcagcacatcccggggtatgccaagaagatcgtggaggcctacgacaaagacggacggatcgaggcaatggttacgcagtcaggtgactgactcacaccattcacactctactagctggtagtatttgtatactagctggtagtatttgtactgcattgtagtaaagattaaggaatgtagaagaattgtttgtgatgtgacgtagtggcgatgtatacagtagaatgtataggctgcatggcagcagctcagatctgtatgtacatcctgcgcttgccagtttctagtttgcatttgcttttctgggcatgccttttgttttaattatattgtctttgataagtccaagataaaagaagccacagagtcctcaaatgttggaaatcgccaagttaatggctgaattttgttgcgtcaatctaagcacaaccatgctacgattgatttagtgtgtatgatatgatgaggggtagctctatgttaaggtttggacgaagcagaggagagttgggc

SEQ ID NO: 4056 - DNA, 2220 bp, Zea Mays
cgtaccacatcatcttcctcccttcctcttcttcctcctctcccccgagcagatttaaagctatctagcagccgggagcagctatcggtacagtacgtgagcgagcggcggcggcaatgacaaggtgcggacgatgccgccagtgtgaatgcgccggcgcctccaccaccacctcccacggcgacgcgcgcaaccgcgacaacgatgcccccgacgcggtcctcgagggcctcgccatggcaggcctcgtcgacatcctccgccagctcggagacctcgcagagcttgccgcggaggtgttcgacgacatgcaagaccaagtgatggccgcgtccgcgcgagggcgacgactggccgcgagagccaggaagctgctggcggccgacctcgacctcgtcctcgacctcgacctgccgccgccgtccacccaagaacaccgctgcctcagctctgccgccgctgctactgctctcgccacctccggtggtgcaggccgtctgggctgccgctcctatctcggaggcgcgccgccgatgccgcgtgtcgtcgtccaacgtatcgagcgctgccgcgggcctcccaggctgtcactccttgacaagtttgatgctgctggcgatggagcgtgcctcaagaggtacaccgacccctccttcttcttcagggcccactctgccaagattgatgagcaaggcacgctgaagcagcatcgtcggcaggcagaagcagcagcagcagcaggtgccgccgggtctatgttcctgctgatgcagcaaacagctgctcacagggtcgaacagcccaacatggaacagaagctgcaagaaggtagtacagcgcagcccagcccaagtgagctcgagagaacgagctctttcgaggcatggctctctccacaagctcgccgctttcctaccgctactgctgctactactcatcaccatcttcaggaaccacctgatgatgatgatggtggtggtggtggtggtgctactacctgtagtggatccatcagtagtcaggttgataccacatcgaatgctgcggctgttagcagcagttccacggtgaaggcggtcaggctgaactcagcatcattggtgaaaggtggtgagagtaatacgacgaggtcgaggtacaaaggcaagatcgcctcaagagtcagcagcttgccgaggaagctcttcatgaacaccaccaagcatcacaacgaccactcgcgctcttttcgtgcaggtagtagcagcctccgggtgacccaagccacagacatcggggattgcagccctgaacttgaagccatcgccgtcgccatccccaccccagatcgatgcagtaacagtaacagcagcactcctgaaacatgtacagcagctgactccaagaacctgctgctgctgctgccaggaagtggtcctgttctggagccacctgacaattcttctgctgctgctgctgaagacgccaaacaacaatttggtagcagtgggcaatctgatgagaagccaagccaagagcacgaggcttcagaccacagcagcaatctgctgcaggagagcgtgttcttctctgcggcacaagagctagcgaagatgtcccctcctcctccttgggtgccaaggcccaaatatccactgcttgatgttaaggcagttaagctacggaatggtccaagcccgatccatccttcaagaaacattttggacagcaggagtgcacagataaaagacattgcaatttcttccaagctgaaaccagcttctagagcgagctctcatgtgactgggactgggagtcctaccaacgccaccattctgaacagagcagatggcattcggcaggtgcacgatgatgaaactgatcaaatctggagcgatgacactcaatgaataatgatcatgtactaactgatggaagtagagtcattcaagttgagatggccgagttggtctaaggcgccagattaaggttctggtccgaaagggcgtgggttcaaatcccactctcaacaaatatttttttatttttcctgttactcttgtaattgtttgtagagaattcattagctttttttttcaaatccaactctcaacaaacatgtttttcattgtattgtttttctttttcctgtttcaaactactcttctaattgtaattgtttgtagagaattcattagccctttttttactttatcatgcagttcttgtttttggattgtt

SEQ ID NO: 4057 - DNA, 2515 bp, Zea Mays
ccgcgccttcgtcgtcaaggccggggttcctgcggccgcgtctccctcccctcgcccgtacccacacttgattaacgtgtcagctcgctaccggaggccctcgccaactcgactcgtactcccgttcccggcggcgatccggccggcaccggaaccctagggttccaacgaagcaggaatgatgagtcatcaacagcaaattgcccctcctagtaggggttctgtgaatggattcccccatctaaagctggatagggtgggtagtggaaggcatgaaagtaaaatcgtgaggtcatcatctggcggttttaccaattcagggcatggaagccattcgagggaccgactaatctatgttctaacacaacttattgggcatcatgtcaacgtgcatgtgaaaaatggctctataatatctggaattttccatgcaacaaactctgacaaagacttcggagtagtcttaaaaatggctcaggtcataaaggatggttctgccagaggacaaagatttgcttctgatgttgtaaagaaacctgagactatgataataccagcaagggagcttgtacaagtttttgccaaggatgtagcacttggcggtgatgagctgccaaaaggtcctggtcatgacaaaaggaaggacttgctgattgattctgccatttcccgctctcattaccttgaagagagggaacttgagcgctgggcaccagatgaaggagattcagagtgtatcgaactggagaagtatgacagaaagggaaataggagctgggatcagttcgaaaccaatgcagccttgtttggggtaaagagtacattcaatgaagaaatttataccacaaagcttgagagaggtcctcatatgagagagcttgaaaagcatgcttcgagaatagctagagaaatagaaggagaagataccaaagatattcatcttgcagaggagagaggcttattcctgggtgatgacttggaccatgatgaagagataaaatattcagcagtgcgtagagacaccgataacagcaagtacaagccaccatttactaatgtcccaagcagtacataccaagttgatttgtttaacaggacagtcaatattgttcccaaggatttgctgggatgttcatcaacaatggatgaagaatcatcatcccacatatttgatgatattgatgcatctgccactattcaaaccaatagcgttagacagccaacatctgattaccttccagatagactctcgtccaatgatgaaaacaggttggacagaaagctgagcaaagggagtaatgaaaatatggataagagaaagttgcaacctgagaataatttatctgatggtgcaagacctcttatttctgaagggtcggatgggccaccctcaagttcatatgcatatgaaccctcatcttctggccaaggattcaaatctccagaaacacctgatttgacagtatctgtcaaacatccttctaagacggaacatgtgattaactctcaaagacctggtagttcaacatcgtcaacatcagagcgcattgctgcaaactcagctgcgagtgctcttggcttgtcaccaagctcttcaataggatcccttacctctgaaaaatcaactttgaaccctaatgctaaggaattcaagctaaatcctaatgccaagagtttcactccgtcagcatctttgaggccaccacaccctgcatcatctgatgcatcatattactatactaataacattccagcagcaccacttggacctggtttgccagtgggcatggggttcccaccggcatatggcacccagcctgtcatgtataatgctcaacctggagcatcacagcagggttacatgcatcctgttggtctacagcagtatgggcagcagatgatgatgggaggagggcagaatcgtcctgtttattattatgcgcctgagatgcaacaatacagaggaagaaacttctagatatactattttgaactgctgctaggtgaaagtcacaacaatccccacaagtgggataatgacccggcaaaagccgctattagaatggaaagaactggtgatgatctccctgactgtcgctccgattccttggacaaaaagccccatcgactttgtgttgcttggttgcctggtcaaaaagctcttcattgttctgtcactgttgctcagaagcaggttgactggattttttttatgttttttgtcagacttctgttgtaaattaaattgtgggtcatctgttcgacccagaaatgacattcataagggctagtgtggtgacagaaaattgaaggggatccatagaagagaatccacttgctattcaattttgaatagcaagtggattctcttcatggatctattttaatttctcggtcaccaaatcagtcctaaatgtttgagattgccccatattacatttatgtgttctttgacgcttgttctaatgtaaactttaaatggaattctcagctgaaatggattaaaattgctgac

SEQ ID NO: 4058 - DNA, 1593 bp, Zea Mays
tacccaaccgcacccatcgctatatacactactccctatttatttttatttatcgtgttttaattcgaaacttataaatattcgaaaacggagattagaataatcgggctgtcaggattgacttgctcagctcatatatccgtccagtcgtcacatattcacatgcatgcggtctttatatctctctccgcgctgcctcctcgcctcacagagacgttcgccaacgccaaaccaatctcgctcgatcgctacgtctacgtgcagtgcagtgcggggaccgacaacaatcaccatatgggcaactccatgggcgggaagcggcggagggcgagggtgatgacggtggacggcaccacgtacaagtaccgcgcccccgcggcggccggggacgcgctgcgcgagcacccgggcaagggcaaccacctgctggagtcggaggaggtgcggcgactgggcctgcgcgcgcggccgctggacccggacgcgccgctcaagcccgggaagctctacttcctggtggagctgcctccgccgtcgtcggccgcccaccaccatcgccgggcccgggcgccgcagcgcacgtggtccggcgcgctccactacggcgccgtggccggggccggggagcggctggagagcctgatgctggcgcggcggtcggcgtccgacgtggcggcgtcgtcgtccgtcggcgacggcggcgccctgcgcctgcgcgtgcgcctccccaaggccgacgtccagcgcctcgtcgacgacagccgcgacgccgccgacgccgccgagaggatcatgcagctctgcgtcgcccgcgaccagcagcgccgccaccggtccgcgcccgccacgcccctcgccgtgcccgtgcccccggcggtcgtcagcgtcacctcgacgtccagctcgcgcaaagatgatggctccggcggtagcaacaagcccgcggcggcaacaaccggcaagaaagagaaacgggcgaggttcgtgacggtgccggacgagatcatcggcttctgaatccggttcgccggccgatatatatgctagctgcagcatgatgcgtgcgtgcgcgcaaaagagatggccagatgggtgtgagtaaattaagcgtcaggccggccggggaacatgagaagaagctgttgagtttgtgatccaaattctgaagaaggcggccaagttggcgagcgaagcggaggcccgtcgccgggaggcttgggccggagcgcagcgaggccaactggccttcccgaggcccagggacgcctggggggtgcggggggcggagccccccgcggtacggatcgttttagggtttcacctctataaatatctttgtaagccgcaggagatatccatctctctattgtaaatctcctgcgatctgtaaccacccaaaaatagtgagaagttgccggccggcgcccgtggttttttccccttcactttggaggggttttccacgttaaatccgtgtcttctctgtgattgatcctatttgtgtcgcatttatttataacagaagctgcatgtgaatgccttcctgtctcccgggctccatttgttctgtctgtactctctagtgtgctgtgc

SEQ ID NO: 4059 - DNA, 2029 bp, Zea Mays
gaacggacggaaaattgacgacctctcccgttccggcggccgaccgtgcacgatcgtctgcctgccctgctcacccacttgccgtcgcaccggctccgttccttctgccccactaccgccatcccaaccggcaagcgcgccaccgccttctccaccctcgcccaccttgctgccgcagtcgcccataccgctaccgcgcccacgcccgcctcgagggcccgacgccagaggggctgccctcgatctgaccccacggggtaggatggacaaagggaaatcggtggtggccgagctggcggcgtcgttcagcgatgtccgtgtcacgccgcgccagaaccccaagaccaagagcttcctaccgtcgccctccttctattcttcctcgaagaaagttgacaattatgtctattgcaaggaggaggaggctcctgaatgatgaagttttgacttctcttgctgaaagttcctgggaaatcctagatatatctggatctgatgtaactgatgctggtttggctactgtagcgaatgtttgtagtaatttacgagcagttgatattagtcgctgtgaaaaagttactacttctggtgtgtctgagattgtatgccactgcccgtccttggagatattgagataggctgtccaagaagtgaagtaacggcacggaggtgcttggatctcttgaaacccaaattgaataatcttgaagaggactcatgggaggaacttaatacactagatataggaggtggtgcggaatccttaaaatggcttgtttggccgaagatagatgataactcaaaggagactttagctgctgaatgccctcgtgttactgtcaacccacagccatcgctgtttgacctctcaggatccaaagtcccagttgaagcactggcaagcgtaccgctggaccattccatagttgaggatattgatcccaagacatgggctgtttctgctgctcctcgaagacctgttgctcctcccaatccaaatgctccccctgaaataccgatagcggaaaggttcaggctggcctatgtggagagggaagcaaggctggcacccaagagggccaaacgggaaaggcagcagcggcgccgagctgaaagggactacatgatgaatgacatcgacgcgaggtcgatggcacttgctgctcaagcaagcagaaacctgcgcaagagctgatagcgaactttgcttggcttggcttggcttcttgtttatgctgtttgttgtatgcatatctcaatagttgtcaaacacaatgtaaacatagcagttttgtattgggctatagcagtggcgtttacactttcatgtactactacaaaaaagtctaaatgtgaatacactcggtgcaaggaaagcgtgccttcattgggtcgcgatgaattagattatattcgtatcctgcttgtctgcatatcatattatatcctgaagtgcctactgtcggattagcgtctttggttgtgtgggcgtgtcacctggataggctgagcgcatgcaaaatagaacaagcctaactcatttttagaattaagtactccgtctcaaattaatattcatttttacccttttagtagatttatatattaatgtatatgttctatatatgtttaccttcgttatcattcatataaatatagacatactatattagaacggagggagtatttaataagacttgttgtaacttaacccattgttacaatagctagagccgatcaaactaaaaaaatagcgtcgctgatttttagtttcatttagaaatattatataaaatattagtcgttttaactctttatttatgttatgtttaaatggatgataaatctagacacatatataaaacaaatatattaattattgtatgaatcaactaaaaaggtaaaacgaattttattttaggacgtagagagtgcattaattcttatttttgcttttgcttttatcccctccgtcttagaaagatatttataattagattatgaaatagtaatgttccacatgtgtaag

SEQ ID NO: 4060 - DNA, 2181 bp, Zea Mays
gaacggacggaaaattgacgacctctcccgttccggcggccgaccgtgcacgatcgtctgcctgccctgctcacccacttgccgtcgcaccggctccgttccttctgccccactaccgccatcccaaccggcaagcgcgccaccgccttctccaccctcgcccaccttgctgccgcagtcgcccataccgctaccgcgcccacgcccgcctcgagggcccgacgccagaggggctgccctcgatctgaccccacggggtaggatggacaaagggaaatcggtggtggccgagctggcggcgtcgttcagcgatgtccgtgtcacgccgcgccagaaccccaagaccaagagcttcctaccgtcgccctccttctcgttatctccaaatattgacttcaaaattgtacttcagattcttcctcgaagaaaggtaaacctcagaaattggtcagcttgtgccttggcacccttggtcagcatcttgaagatatcatcactgatatttcagaatttgctgccttatttccaccccacataaagttgacaattatgtctattgcaaggaggaggaggctcctgaatgatgaagttttgacttctcttgctgaaagttcctgggaaatcctagatatatctggatctgatgtaactgatgctggtttggctactgtagcgaatgtttgtagtaatttacgagcagttgatattagtcgctgtgaaaaagttactacttctggtgtgtctgagattgtatgccactgcccgtccttggagatattgagatgtggaggctgtccaagaagtgaagtaacggcacggaggtgcttggatctcttgaaacccaaattgaataatcttgaagaggactcatgggaggaacttaatacactagatataggaggtggtgcggaatccttaaaatggcttgtttggccgaagatagatgataactcaaaggagactttagctgctgaatgccctcgtgttactgtcaacccacagccatcgctgtttgacctctcaggatccaaagtcccagttgaagcactggcaagcgtaccgctggaccattccatagttgaggatattgatcccaagacatgggctgtttctgctgctcctcgaagacctgttgctcctcccaatccaaatgctccccctgaaataccgatagcggaaaggttcaggctggcctatgtggagagggaagcaaggctggcacccaagagggccaaacgggaaaggcagcagcggcgccgagctgaaagggactacatgatgaatgacatcgacgcgaggtcgatggcacttgctgctcaagcaagcagaaacctgcgcaagagctgatagcgaactttgcttggcttggcttggcttcttgtttatgctgtttgttgtatgcatatctcaatagttgtcaaacacaatgtaaacatagcagttttgtattgggctatagcagtggcgtttacactttcatgtactactacaaaaaagtctaaatgtgaatacactcggtgcaaggaaagcgtgccttcattgggtcgcgatgaattagattatattcgtatcctgcttgtctgcatatcatattatatcctgaagtgcctactgtcggattagcgtctttggttgtgtgggcgtgtcacctggataggctgagcgcatgcaaaatagaacaagcctaactcatttttagaattaagtactccgtctcaaattaatattcatttttacccttttagtagatttatatattaatgtatatgttctatatatgtttaccttcgttatcattcatataaatatagacatactatattagaacggagggagtatttaataagacttgttgtaacttaacccattgttacaatagctagagccgatcaaactaaaaaaatagcgtcgctgatttttagtttcatttagaaatattatataaaatattagtcgttttaactctttatttatgttatgtttaaatggatgataaatctagacacatatataaaacaaatatattaattattgtatgaatcaactaaaaaggtaaaacgaattttattttaggacgtagagagtgcattaattcttatttttgcttttgcttttatcccctccgtcttagaaagatatttataattagattatgaaatagtaatgttccacatgtgtaag

SEQ ID NO: 4061 - DNA, 3349 bp, Zea Mays
gaacggacggaaaattgacgacctctcccgttccggcggccgaccgtgcacgatcgtctgcctgccctgctcacccacttgccgtcgcaccggctccgttccttctgccccactaccgccatcccaaccggcaagcgcgccaccgccttctccaccctcgcccaccttgctgccgcagtcgcccataccgctaccgcgcccacgcccgcctcgagggcccgacgccagaggggctgccctcgatctgaccccacggggtaggatggacaaagggaaatcggtggtggccgagctggcggcgtcgttcagcgatgtccgtgtcacgccgcgccagaaccccaagaccaagagcttcctaccgtcgccctccttctattcttcctcgaagaaaggtaaacctcagaaattggtcagcttgtgccttggcacccttggtcagcatcttgaagatatcatcactgatatttcagaatttgctgccttatttccaccccacataaaggtatctttatgcatcaatatcttttatttggttgtcaatttgcctcagtgtcgaataaaatattcatatattatactccgtctgtctcaatttataattcatttgaaatttttgtaacaagtttgaccggttcgtcttattcttttatttttgcgaaaaatgaaaaattcaaagccgtatctaaagtatattatgtggtaaacgatatcacagtaaaagttaataacaattatgttttttttaataatactaggcagtcaaacttatggtaaaaaagtcaaacgaattataaattggaatggaggaagtataaggttttttattgttagatagagtttactttttaaggtggaagcccatttcattgccgtggtggtgttcacaaactgaaaagagaagttgatgttcttgttagttctaagttcatcggatggctcccaacactgattagtttgtttatgaaatactctcctttcttccagttgacttgtgagttgtaactcttgcttcaaagtacacatatagagggcattcatcccaaagaagtcaccattaacattttttgtttgattgctgttgagtttgcatttaaaagtttggaagtagcatatattagaatatacaatgctcatattaacatggttctctgaacttagctagagctttgctgttcgctagcgaagagccgaagagttgcagttttgggaggctggccagggcattatctacttctttgcccatgagctacttgagaggcatggtcatgttgtttttcttgtaataggtgtgcatgttttgattgaacctctagatcaaggtgccgtggtgtgtggttgtatgggttcttaaccttttctttcttaatataatgatatgttggttcctgcatgtttgaaaaaaatggatagtaacattaatctcagaaaaacataggaatggatagtaaggaactgttaaaacaaatggttgatgtgtgacatgtactaaggctctctagcattatgcatggccttcttgtaccactgttgttagcaagttgacctcaagcttttcgtcagtatttttaaggttttgaagttaccaggtccagtaaatgcaaaacagcaactgttgatttagttcatatactgacatctgatgtctacgtgtacttatgcatgttattgtgagttagtgacaattgagtttatttgttatatgatacagttgacaattatgtctattgcaaggaggaggaggctcctgaatgatgaagttttgacttctcttgctgaaagttcctgggaaatcctagatatatctggatctgatgtaactgatgctggtttggctactgtagcgaatgtttgtagtaatttacgagcagttgatattagtcgctgtgaaaaagttactacttctggtgtgtctgagattgtatgccactgcccgtccttggagatattgagatgtggaggctgtccaagaagtgaagtaacggcacggaggtgcttggatctcttgaaacccaaattgaataatcttgaagaggactcatgggaggaacttaatacactagatataggaggtggtgcggaatccttaaaatggcttgtttggccgaagatagatgataactcaaaggagactttagctgctgaatgccctcgtgttactgtcaacccacagccatcgctgtttgacctctcaggatccaaagtcccagttgaagcactggcaagcgtaccgctggaccattccatagttgaggatattgatcccaagacatgggctgtttctgctgctcctcgaagacctgttgctcctcccaatccaaatgctccccctgaaataccgatagcggaaaggttcaggctggcctatgtggagagggaagcaaggctggcacccaagagggccaaacgggaaaggcagcagcggcgccgagctgaaagggactacatgatgaatgacatcgacgcgaggtcgatggcacttgctgctcaagcaagcagaaacctgcgcaagagctgatagcgaactttgcttggcttggcttggcttcttgtttatgctgtttgttgtatgcatatctcaatagttgtcaaacacaatgtaaacatagcagttttgtattgggctatagcagtggcgtttacactttcatgtactactacaaaaaagtctaaatgtgaatacactcggtgcaaggaaagcgtgccttcattgggtcgcgatgaattagattatattcgtatcctgcttgtctgcatatcatattatatcctgaagtgcctactgtcggattagcgtctttggttgtgtgggcgtgtcacctggataggctgagcgcatgcaaaatagaacaagcctaactcatttttagaattaagtactccgtctcaaattaatattcatttttacccttttagtagatttatatattaatgtatatgttctatatatgtttaccttcgttatcattcatataaatatagacatactatattagaacggagggagtatttaataagacttgttgtaacttaacccattgttacaatagctagagccgatcaaactaaaaaaatagcgtcgctgatttttagtttcatttagaaatattatataaaatattagtcgttttaactctttatttatgttatgtttaaatggatgataaatctagacacatatataaaacaaatatattaattattgtatgaatcaactaaaaaggtaaaacgaattttattttaggacgtagagagtgcattaattcttatttttgcttttgcttttatcccctccgtcttagaaagatatttataattagattatgaaatagtaatgttccacatgtgtaag

SEQ ID NO: 4062 - DNA, 1917 bp, Zea Mays
atcacacttataaaatataaagggactgaataggaggaattgttggagaggaggtcaaagaggaggaataaaagatatatttaaaaatgaatagaagatacaaatagcgggagatgagagggagacatttaaaaatgaaaagaaggcacaaatacggagagacgagaggggtaattgttgaaatcggtaactataggagcgggtcgccgcaatgcgcacggcagccctcttcctcgggaagatttcaaatccccgcggcctcttccatcttctgctcggcacggcactccggctgcccgaaaaatttcgcacatcccagattcccgcccgctctggttcgcgccctcgtctggttcccttgccaacccggtcattcaacgtcgcagccaccccgcgcggctagggctgggactcgaggcctagggtttggctgtaagtttggtaacacgatggcgggggccgcgggggagagcagcggcgagcggcaggggacggtggagcggcggatgctgcggtcgcggtaccacgccgtgaagaacatcatcagcgatgagcgggatgagatgtcgagggcggattcggacaggttcacagccatcatccagcaggtggattgcctacacgagctcgtgcagaggcctagggagcaaatagcggatgcagaagctctgcttggcattacaaacactttggtaacttcggtgaggtcccactcaagtgaaggaatcagcccttctgatttcataacagctttactcaagaagtttgggcagcaagggaatcatgatgatgagtctgtctcattacgatggggtgatcttgggctttctgtttcacatatcttcaggcctgtgcctggatgctgtaccatgcttggtcctatgaatactgaagtaaagcaacggaaagttgtagctgttggtaggaaacggactgcacggccaacagaaaatacctgtcctgaagagcttgctgagtcttcagaggaagtaaagacagacactgacaggaatgtcttagttatgtttgatatcctcaggcgaaagaagagcgcaaaattggaaaaccttgtgttgaataggctttcctttgcccaaacagttgaaaatgtttttgcactatctttcttagtgaaagatggtagggtggaaataactgtagatgatagcgggcatatagtacggccaaggaatgcacctgctgctagcgctatagcctcaggagaagtctcatacagtcattttgtttttagatttgacttcaaggactggaagagggagaagagctgttgccacacaggacttcccagagcaatctttgcaacgaagaaaacgaccaaccaaatctggaggcacgtgcgcaaataacgcccatcaggaaactcacccggaaccgaggattggtcttgcaggatcatgtagtcgaggaaactcctgaagagaaccaagcgtctaagcgcaggcgccttttcaggaatcaagattgacctagcaattgcttggcatgagtagtgtaggcaggcaacctggcttgtgttgtatgcaaaaaattgcctgagcctgagtaacgtgtctttcactaggtctgttgtgccatgctgtcttgttcttggcacagctcgtgcttatctgaacttccagttgtgccagcggagtagagctgtaattataaattgtttgaagttctggtcacatcttgcaactacagaatggtgtttgtagggctgagtgtaactagctagcttggctcggtctggtctgggtcattaactcatttattatcatggcaagatgtgcctcgggtcagcttgttaggctgtcatagcttactcatcctatctcttattttaaacttcattttgtaaatattacaacttacattgtaaaacaatattatggacgtccatatagatgatct

SEQ ID NO: 4063 - DNA, 2607 bp, Zea Mays
cgcgcccggccgtaaaaaaaccggggtcagcgcgtggactcggccgctgggaggatgtatcgcaaattcgcaatcgaatcggcggccacccggcaccctgcctgcctgtcgagtgtcgacactgtcgtgtccggttggcgccccagcgaaaagcaaaagaaataccggaagaaactgcctcgtgcctcctcctctcctcgcttctccctgtagagaacaggccgaggcgggcgagtgctccagtacacctcgagctacataccccagctcgcacggtccagctctgagctccctcctctccacctccacgcccgatcgtgaatcgtcacttgctctgcaacggcgagagcgccatctttgctgctacccattaactcaggcgggcattccgtcgagcaccttccgttcggcgccgggtggcgtggggagcgagtcctgccgggttgcgtggtccgttgcgtgaacgggcgacagttgctgctttcccgggggcgctccttgatgccgctgttgtggcaggcgctgggttctagcggatggaatgcaacagctcctacgcgctgaagtcaagaaggttcgttgccgtagctgatgcgggatttgaggatgctgtagacggcgccagcgattttggagatacgatgagtctcgcacacaagcagaaggttgtcggggaaaccgtggagacggaggaggagcaggaatttgtttggaaatctagcctgctctcctacaaggatgatggtgattccgttcttccagcacgcatcaacatcaggagagacacctctgcctggcaaaatgaacccgaggattgacaggtctggaagcaatgaaacaagcaaggtccctagactgggttccattgttgggacagccagcatggctggatttggcaaggcagtggagattctagacacattaggctgcttgatgacgaccttgagctcagatggtggctttgtttccaggaccaagaccaaagggtgcaaaatatcaattcttgcttttgaggttgccaacacaatacttaaaggtgctagtattatgcaatcactctcagaagacactgtcacatacttcaaacaagttgtgcttccttccgaaggtgtacagaatttggtgtccagtgagatgagtgaattgatgcgaattgcagctaacgacaaaagagaggagctgaaaatattttctcaagagattgttaggttcgggaaccgctgtaaagatccccagtggcataacctggatcgctactttgtgaagttagaatcagaaaatgcgccccagaagcagttgaaagaaacgtcaatagcagagatgcaaaagttaatgagtcttgttcaacgtacaactgatttgtatcatgagctgcatgcattagacagatttgagcaagagtacttctctaggataaacggaaagggtcacacagatagaattgaaaaaggaggcaatattcaaattgtgaaactggagttgaagacccaaagtagttatgtaaagagcttgaagaaaagatctctttggtccaagacgttggaagaagtagttgagaagtttgtagacattatgcactacttacatgttgagatcaacaatgatttcggatcttctgatggaggtgtgatgaatgccgaatcaactgagagctgtcaaaggctaggacctgctggacttgcattacattatgcaaacattatcattcagatatacagtttctcgatcagggtatgtgccatcaaattcaagagatgcactgtaccagggattgccaccaaggatcaagtcagcactaccaaataaattgagaacgacctcggtgcctcaggagctcactattgatcaaataagggctaggatggagaaaactctgaaatggcttattcccatggccgtcaataccacctgcgctcgaggtttcttgaggtttagcgaatgggcgaaatcagggactgagagggttggtaggcgaccgggtgtagcagatcggattgagacgctataccatgctgacaaggcaaggactgaggactgcattctagagttgctcgtctggctccatcacctcgtcagccagagtaaccggttggcaatgcaaaaagtcactgaccaatgtatctaaccaaaagtcaggaattgtcatatgggccatcacatgctagcatcgcacggcgacttctatccagaaaaaaagaggctgggtttgtcgagtggtccaaggtatccaaaattatatggaaaagaggggacatcaaaattttctgatccagcttgctggttgttttcgtctttgttattaggttgtagatggaatctagagttgttcttgccatggaggtcgtgtgtttttcttctttccatggaggacgtgcggtttttcttgtccggatacagtcgggcatgcagcatgcttatatgtgctccgtacattagctgagtaggtgtagtataagaagagccctttttttttcttctctttgatctgcttgttatttgtaagtgtagttgtgacaatcacattatacaaagaaaacgcacgtcatgtcagtgcagtgaaaaacaaacaaacatgaatctcttttcatatacatatatctgccgtcg

SEQ ID NO: 4064 - DNA, 2333 bp, Zea Mays
cacaaaggccagtgaggagattgcacacctgtaaattccaagcaagtacgctctacaattttcacgaacatgggtttcattttagtattttactgttcatataggaaaacaaaaacaaaaaaagataggaaaacaaaaacaaaataaagaaaggaaaacgagtaaaaagatagccgtgccctagcttccattccgggcctcccgtcttcccgtcccttccagccagcgccgcttcatccttcgaaccccacgctaccgctcgtttatacggcagcgacgcctcccccgctcgcctcctctctcctcctcctcaaggctcaagcgaaggcgagcgcgagagaaagctcaagccacttcccaacccgctcccccctcgccgcgatttcctcacatggcagcgctgcgtctccgcgagtcactcgagaggaacagcccctcctcctgcttctccgacccctgtccctgcgccgccaacacgcgccgcccctgttccgatctcgccgcccccgccgctgggcccttctcgtccctccgcgtccatcgcccctgctcctgatccggctctcttcttcctcccttctcgcgccgtagattgcagccgcggctctgattctgctcccgccgtttgtctcgcggtcgcgggttcctgggagcttctgggttctggctccgtccctaaccggtgttgccatggggaagagcaagaagagcaaggcccgcggcggcggggacgacctgatcgacagcagcgacgccgacagcgtcggctcgtcgtccaccgcgctgtcggatctctccatctcgtacgccaccgagcacgtcaactcgcaggagttcgtcctcgacaagtacatcgacgcgctctacgagaagaggggatctacaagagaggcagcattggttaaactcgttgatgccttcgaaagttttatgctccatggccttgtggagaacaggtatgccactttgctgagtcaattcaacaattctgtcaaaaagggatctactaaggagttttttctggcatctcatgccattgggttactggctattacacttggtgctgggaacagttcacatgaaataatggaggagtcacatccccaactgtgtagggtgcttcaagcttggtccgatgcatcaaagatgatacctgcacttgattgtttggctgtcatcacctttgttggcgcaactgatctggctgaaacagagtcatctttgaaagccatgtgggatgtgattcatccaaaatctggttcaaatgtgggaactgttcggaaacctagacctcctgtgttagcagctgctgtatctgcatggacgtttcttttgactactgttggttcatggaggataaatactgatagttggaaagagcccattgcatttctctctactcttttggaagcagatgatcgtgctgttagaatggctgctgggggaactggtggttctaagaacaagcttttcctggatatgcaagcattaaaagccaaaatatcaggtctggcctcgaatctctctgctgaggctggggggaaaggtgcagataagaagaaccttactgaccaaagagacttgtttcaacgaatcttagattttgtcaagtatggtgactgccctgaagaatcaatcaagattgctggaaaacgtgatgttttaagggtgtcatcgtggtctgaattaatccagttgaatttcttaaagcggttcctggggaaaggctttctgaagcatgtgcaggagaatggacttctccaggatatctttgacattaaggttgacaaaactgaaaccttgtcgtccactgataagaaaatttttaggtccgaagaggaaaaagaaagagctctgagattaaacaaggaacgtcgtctagcccaggtaaggaagaatgccgtcatgttggatgagtaacaaggtcacgaggaagggaaaacaacatcgatttctgtatctcatttcatccgggcctttgtctctgcctgtgtaaactattacaggcacatcccattgtctttgcctttgtctttaaggatactggagttttatagtgcatctaaccgatatgcaagttcgtgcatattgaacgttagtatgatttgtgggaatagttaagttgatttggagtttagtatagtaagaactaaggttgattaaatgtaacgtatgtatgaaatgtaatgtaagtgtaatgatttatactggaggacgggtggtaacaaatttgaatagaatgatatcaattcctaatatgatagttggatctaaacaaacatgttttaacgttgtcagtcagcatctaagaattactttgaagttcactcggt

SEQ ID NO: 4065 - DNA, 2330 bp, Zea Mays
tcgtccggccccaccaggccaccacttagcacgccccgactctcctacttgctcgtagccgctgacgccactctgctcgaggcggtgcggcaggtggacgttgtcatctacgcggtgcccacgaagcaggcgctcgagcagaagcccctgcttcgggctataaaggaagctggatgcgtgaagttggctctgcgactgggtgtttgaagaatgccatatgtttttccttgagggatttcaagtaataaagtatgctatctgcacagagcaacttagggcataataggcattctcgcaatgatgtttccacaaagcacaaaagtggctatgaaccttctgacacagaaactgagtggcatgaaagcccttggaacgatggagcattggcatcgaataggaatcgtcttcctaaagattctggtaggaatgaccaagttggtactaggaggcaaaacatatctcctaactgcacactagattatcatgctgagaaaacttcaaacttgagatacagtcgtactcctccaagggtcacagaacaaaggcgccatccttctccatttacagctgtgaagaatgaatcacgtaagaagagcagccggacgcctcccagatttcgttcttctatggaaacctttagtagatcatcaataaaggcaaggttttcccgcaatcgttcaatttctgcaccaaaattacggccacaagagaaggaacatcctgctagagctcctgcatttcctggcagtaaccctgtctcaacacatccagaaagagaagttgctgataatatagaagaagattcacatgcagaaaactgttcccaggagatcagtgaattgattgcaaatggcaagttacctaattccagatataatgagtatgcatttacgagcacagagtcgatacctgcaggtgatatcttcttctcccgtgattgcagggctccacttgagaaaacgtcaacaaagcttaacaatattgaccaatcatttacctctgactcaaatgtccatactgagaatgatggcactgttactcaaagtaatttgggccagccatcacaatttgtttcagctcggacaggtctttcgcgcacaactacgaaatccagttatgctactggtcgccattgccagatgagcaccaccaccactttgagtagcccatatagcaatggaaaattaagtggggagagtggaaagtttagtgaaatcactgggaaactagttggaggcgtcatgaaattcacatccagcaaggtgcaaaacgatacgtggcttccatgtatgactgggaaggcatgtcgaaaatcaagaacatcaaacaacaaaaaaaatgatgaatctgaatcaagtttcattcagaaggcacttgtcattgagaagattagacttttttgggctgataaatatcgtccacaaaatttaaatggatttacttgccacagggagcaagtccagcagcttaaacaatcggtctctgcagaattttgcccacatattattttcaaaggtcctccaggatcaggaaagagatctttgtgcagagctgtcctcactgaaatttttggcgattcatctttgaatgtctctcactatttgaagagctgcaatggccaggggtccatatctgtgcctattctcgtcccagtttcatccagcaataaccatgtggaactccacatgaggtttcaatcgaagaacgctagatatgctttgatgactctagcaaatgaaatgtctgataagtgtaaaatcactgagccaattgtgagaaagagctttaaagtgattgttctctatgatgttgataaagtcagccaaaataaccagcgtctgataaaatggataatagattcctcctctgatgcatgcaagataataatgacttgccaggatgaatctaatctcctagattctataaagagtcgttgcaagattatttcaattggtgtgcccagtacacgtgaggtggtagatatccttacctatacatcaagaaaagagagttttgatcttcctacaagttttgctactaccattgcgaatcaatccaggaagaacttgagggaggctatattggctctagaggcatgtaaagccaacaattatcccttcattgatggacaagctataccactaggatgggaggaggttctggaggaacttgcagtagaaattttggatgatcctgcccctaaaaggttatttctggcacgaggcaagctccaaaaactcctggtggaatttgtacctcctaaactaatactccaggaatactattttctcaacagagataactatgcatatgaacttcattctcaaatc

SEQ ID NO: 4066 - DNA, 2639 bp, Zea Mays
gttgtcatctacgcggtgcccacgaagcaggcgctcgagcagaagcccctgcttcgggctataaaggaagctggatgcgtgaagggatttcaagtaataaagtatgctatctgcacagagcaacttagggcataataggcattctcgcaatgatgtttccacaaagcacaaaagtggctatgaaccttctgacacagaaactgagtggcatgaaagcccttggaacgatggagcattggcatcgaataggaatcgtcttcctaaagattctggtaggaatgaccaagttggtactaggaggcaaaacatatctcctaactgcacactagattatcatgctgagaaaacttcaaacttgagatacagtcgtactcctccaagggtcacagaacaaaggcgccatccttctccatttacagctgtgaagaatgaatcacgtaagaagagcagccggacgcctcccagatttcgttcttctatggaaacctttagtagatcatcaataaaggcaaggttttcccgcaatcgttcaatttctgcaccaaaattacggccacaagagaaggaacatcctgctagagctcctgcatttcctggcagtaaccctgtctcaacacatccagaaagagaagttgctgataatatagaagaagattcacatgcagaaaactgttcccaggagatcagtgaattgattgcaaatggcaagttacctaattccagatataatgagtatgcatttacgagcacagagtcgatacctgcaggtgatatcttcttctcccgtgattgcagggctccacttgagaaaacgtcaacaaagcttaacaatattgaccaatcatttacctctgactcaaatgtccatactgagaatgatggcactgttactcaaagtaatttgggccagccatcacaatttgtttcagctcggacaggtctttcgcgcacaactacgaaatccagttatgctactggtcgccattgccagatgagcaccaccaccactttgagtagcccatatagcaatggaaaattaagtggggagagtggaaagtttagtgaaatcactgggaaactagttggaggcgtcatgaaattcacatccagcaaggtgcaaaacgatacgtggcttccatgtatgactgggaaggcatgtcgaaaatcaagaacatcaaacaacaaaaaaaatgatgaatctgaatcaagtttcattcagaaggcacttgtcattgagaagattagacttttttgggctgataaatatcgtccacaaaatttaaatggatttacttgccacagggagcaagtccagcagcttaaacaatcggtctctgcagaattttgcccacatattattttcaaaggtcctccaggatcaggaaagagatctttgtgcagagctgtcctcactgaaatttttggcgattcatctttgaatgtctctcactatttgaagagctgcaatggccaggggtccatatctgtgcctattctcgtcccagtttcatccagcaataaccatgtggaactccacatgaggtttcaatcgaagaacgctagatatgctttgatgactctagcaaatgaaatgtctgataagtgtaaaatcactgagccaattgtgagaaagagctttaaagtgattgttctctatgatgttgataaagtcagccaaaataaccagcgtctgataaaatggataatagattcctcctctgatgcatgcaagataataatgacttgccaggatgaatctaatctcctagattctataaagagtcgttgcaagattatttcaattggtgtgcccagtacacgtgaggtggtagatatccttacctatacatcaagaaaagagagttttgatcttcctacaagttttgctactaccattgcgaatcaatccaggaagaacttgagggaggctatattggctctagaggcatgtaaagccaacaattatcccttcattgatggacaagctataccactaggatgggaggaggttctggaggaacttgcagtagaaattttggatgatcctgcccctaaaaggttatttctggcacgaggcaagctccaaaaactcctggtggaatttgtacctcctaaactaatactccagaagctcgtagaactcttcttgaagggaattcagactggcgtgaagagggaagtctactattggcatgcctactatgacaagaggttgcctgttggtgcaagtgctctgcttaaattggaagaattcgttgccaagttcatgagcatccaccggaagagcatgtcgcatgagcccaagattcctgaggtgccgcagtgaaacctggcagagcatgtcctcgtgcggttcggccgtgtcgaaatcccgtttgtggtggtggtttttctgttttatataattcaccttacgtgatcaactgtcatggtccatgtttttcttgttctatgtatatactatatggtacacatatatgctactactgagtacacaaatatgtccagccgaataaatgtctatacggctataccatctgtgttggcaatatcttgttgcaaaagtttgggagtggacgtataataatcttttgatttgaggtacgtgaattttggctatcagtttgttcttttctttt

SEQ ID NO: 4067 - DNA, 2736 bp, Zea Mays
aagcaggctctccgcatttgcgggggcaaagcttgcctcgatttatcccttcctagacccgactcacgtgggagcatccgacactgcaaatgtggagaggctacttcgaacccgcgacctgatgactttgagatagctttcaccactacccttggtctatccttttttggctctgcgactgggtgtttgaagaatgccatatgtttttccttgagagcaacttagggcataataggcattctcgcaatgatgtttccacaaagcacaaaagtggctatgaaccttctgacacagaaactgagtggcatgaaagcccttggaacgatggagcattggcatcgaataggaatcgtcttcctaaagattctggtaggaatgaccaagttggtactaggaggcaaaacatatctcctaactgcacactagattatcatgctgagaaaacttcaaacttgagatacagtcgtactcctccaagggtcacagaacaaaggcgccatccttctccatttacagctgtgaagaatgaatcacgtaagaagagcagccggacgcctcccagatttcgttcttctatggaaacctttagtagatcatcaataaaggcaaggttttcccgcaatcgttcaatttctgcaccaaaattacggccacaagagaaggaacatcctgctagagctcctgcatttcctggcagtaaccctgtctcaacacatccagaaagagaagttgctgataatatagaagaagattcacatgcagaaaactgttcccaggagatcagtgaattgattgcaaatggcaagttacctaattccagatataatgagtatgcatttacgagcacagagtcgatacctgcaggtgatatcttcttctcccgtgattgcagggctccacttgagaaaacgtcaacaaagcttaacaatattgaccaatcatttacctctgactcaaatgtccatactgagaatgatggcactgttactcaaagtaatttgggccagccatcacaatttgtttcagctcggacaggtctttcgcgcacaactacgaaatccagttatgctactggtcgccattgccagatgagcaccaccaccactttgagtagcccatatagcaatggaaaattaagtggggagagtggaaagtttagtgaaatcactgggaaactagttggaggcgtcatgaaattcacatccagcaaggtgcaaaacgatacgtggcttccatgtatgactgggaaggcatgtcgaaaatcaagaacatcaaacaacaaaaaaaatgatgaatctgaatcaagtttcattcagaaggcacttgtcattgagaagattagacttttttgggctgataaatatcgtccacaaaatttaaatggatttacttgccacagggagcaagtccagcagcttaaacaatcggtctctgcagaattttgcccacatattattttcaaaggtcctccaggatcaggaaagagatctttgtgcagagctgtcctcactgaaatttttggcgattcatctttgaatgtctctcactatttgaagagctgcaatggccaggggtccatatctgtgcctattctcgtcccagtttcatccagcaataaccatgtggaactccacatgaggtttcaatcgaagaacgctagatatgctttgatgactctagcaaatgaaatgtctgataagtgtaaaatcactgagccaattgtgagaaagagctttaaagtgattgttctctatgatgttgataaagtcagccaaaataaccagcgtctgataaaatggataatagattcctcctctgatgcatgcaagataataatgacttgccaggatgaatctaatctcctagattctataaagagtcgttgcaagattatttcaattggtgtgcccagtacacgtgaggtggtagatatccttacctatacatcaagaaaagagagttttgatcttcctacaagttttgctactaccattgcgaatcaatccaggaagaacttgagggaggctatattggctctagaggcatgtaaagccaacaattatcccttcattgatggacaagctataccactaggatgggaggaggttctggaggaacttgcagtagaaattttggatgatcctgcccctaaaaggttatttctggcacgaggcaagctccaaaaactcctggtggaatttgtacctcctaaactaatactccagaagctcgtagaactcttcttgaagggaattcagactggcgtgaagagggaagtctactattggcatgcctactatgacaagaggttgcctgttggtgcaagtgctctgcttaaattggaagaattcgttgccaagttcatgagcatccaccggaagagcatgtcgcatgagcccaagattcctgaggtgccgcagtgaaacctggcagagcatgtcctcgtgcggttcggccgtgtcgaaatcccgtttgtggtggtggtttttctgttttatataattcaccttacgtgatcaactgtcatggtccatgtttttcttgttctatgtatatactatatggtacacatatatgctactactgagtacacaaatatgtccagccgaataaatgtctatacggctataccatctgtgttggcaatatcttgttgcaaaagtttgggagtggacgtataataatcttttgatttgaggtacgtgaattttggctatcagtttgttcttttctttt

SEQ ID NO: 4068 - DNA, 3001 bp, Zea Mays
gttgtcatctacgcggtgcccacgaagcaggcgctcgagcagaagcccctgcttcgggctataaaggaagctggatgcgtgaagagtatatggtggatgcagctggagcatgccaggctatatggctcgtgcagctgctgggggacatcaccggcgtcaaagtctagccatcgctgctgaagatggacaattagtatttttttaaaagagaatgatgttgctaaattgacaatatgcaccatagaagattccaggacattgaacaagatgttgtatctgaggcctctaggaaatgtctgctcaatgactgaattggctgacctctaggagacaaaaatcaagaaatccctgaaaaagttatatgtaacagaagatcaacttcttaaagaaatccatgttggctctgcgactgggtgtttgaagaatgccatatgtttttccttgagggatttcaagtaataaagtatgctatctgcacagagcaacttagggcataataggcattctcgcaatgatgtttccacaaagcacaaaagtggctatgaaccttctgacacagaaactgagtggcatgaaagcccttggaacgatggagcattggcatcgaataggaatcgtcttcctaaagattctggtaggaatgaccaagttggtactaggaggcaaaacatatctcctaactgcacactagattatcatgctgagaaaacttcaaacttgagatacagtcgtactcctccaagggtcacagaacaaaggcgccatccttctccatttacagctgtgaagaatgaatcacgtaagaagagcagccggacgcctcccagatttcgttcttctatggaaacctttagtagatcatcaataaaggcaaggttttcccgcaatcgttcaatttctgcaccaaaattacggccacaagagaaggaacatcctgctagagctcctgcatttcctggcagtaaccctgtctcaacacatccagaaagagaagttgctgataatatagaagaagattcacatgcagaaaactgttcccaggagatcagtgaattgattgcaaatggcaagttacctaattccagatataatgagtatgcatttacgagcacagagtcgatacctgcaggtgatatcttcttctcccgtgattgcagggctccacttgagaaaacgtcaacaaagcttaacaatattgaccaatcatttacctctgactcaaatgtccatactgagaatgatggcactgttactcaaagtaatttgggccagccatcacaatttgtttcagctcggacaggtctttcgcgcacaactacgaaatccagttatgctactggtcgccattgccagatgagcaccaccaccactttgagtagcccatatagcaatggaaaattaagtggggagagtggaaagtttagtgaaatcactgggaaactagttggaggcgtcatgaaattcacatccagcaaggtgcaaaacgatacgtggcttccatgtatgactgggaaggcatgtcgaaaatcaagaacatcaaacaacaaaaaaaatgatgaatctgaatcaagtttcattcagaaggcacttgtcattgagaagattagacttttttgggctgataaatatcgtccacaaaatttaaatggatttacttgccacagggagcaagtccagcagcttaaacaatcggtctctgcagaattttgcccacatattattttcaaaggtcctccaggatcaggaaagagatctttgtgcagagctgtcctcactgaaatttttggcgattcatctttgaatgtctctcactatttgaagagctgcaatggccaggggtccatatctgtgcctattctcgtcccagtttcatccagcaataaccatgtggaactccacatgaggtttcaatcgaagaacgctagatatgctttgatgactctagcaaatgaaatgtctgataagtgtaaaatcactgagccaattgtgagaaagagctttaaagtgattgttctctatgatgttgataaagtcagccaaaataaccagcgtctgataaaatggataatagattcctcctctgatgcatgcaagataataatgacttgccaggatgaatctaatctcctagattctataaagagtcgttgcaagattatttcaattggtgtgcccagtacacgtgaggtggtagatatccttacctatacatcaagaaaagagagttttgatcttcctacaagttttgctactaccattgcgaatcaatccaggaagaacttgagggaggctatattggctctagaggcatgtaaagccaacaattatcccttcattgatggacaagctataccactaggatgggaggaggttctggaggaacttgcagtagaaattttggatgatcctgcccctaaaaggttatttctggcacgaggcaagctccaaaaactcctggtggaatttgtacctcctaaactaatactccagaagctcgtagaactcttcttgaagggaattcagactggcgtgaagagggaagtctactattggcatgcctactatgacaagaggttgcctgttggtgcaagtgctctgcttaaattggaagaattcgttgccaagttcatgagcatccaccggaagagcatgtcgcatgagcccaagattcctgaggtgccgcagtgaaacctggcagagcatgtcctcgtgcggttcggccgtgtcgaaatcccgtttgtggtggtggtttttctgttttatataattcaccttacgtgatcaactgtcatggtccatgtttttcttgttctatgtatatactatatggtacacatatatgctactactgagtacacaaatatgtccagccgaataaatgtctatacggctataccatctgtgttggcaatatcttgttgcaaaagtttgggagtggacgtataataatcttttgatttgaggtacgtgaattttggctatcagtttgttcttttctttt

SEQ ID NO: 4069 - DNA, 1861 bp, Zea Mays
cgtactccgtagacacggactcctggattcagagcgggagggcagagagggccggatggcgggctggcggcgatgctggtgcctggagtggaatgcccctaagccaatgcatccttctcttttgaatgaggccttgcgatggacagctacggacaaaagaaagatctatggtcacccttgccatatcaggggtggaaaccatgcttaacgccatcagtttctcacaaattacctctggaaccaagtggatacatccaagtatttcttgatggtggattgaaccaacaaagaatggggatatgtgatgccattgcagttgcaaagattcttaatgctactcttgtgatcccacatcttgaagtaaaccctgtttggaaggattcaagctcatttgaagaaatttttgatgtggatcactttatcaactccctaaaagatgaagtttccattatcaaagtgcttccaaaagaattttcttggagcacaagagagtactatggcacaggcatccgtgctacaagaataaaaactgcacctcttcatgcctcagcaaattggtatttggagaatgtcagtcctatcctgcaaagctatgggattgttgcgatcgctcccttttctcaccgccttgcatttgatgatttgcctgtggatcttcaacgcttgcgttgtaaagttaacttccaagctctggtcttccgttctcacattatctcacttggagaaacacttgtgaagcgcttgaggtctccggtccgggttcattccagtaaatctatccatcaagttgtaggagacacaaatcaagctgaaaaatatgcagttttgcatctccgttttgataaggatatggctgcacattctgcatgtgactttggaggtggcagagctgaacagctagctcttgctaagtacaggcaagttatatggcaaggaagggtattaaattcacagctaactgatgaggagcttcggaacacaggacgctgcccattgaccccagaagagattgggctgttactggtagcccttggctttgacaacagaactcgactctatcttgcatctcacaaggtatatggtggagaagccaggatctctagcttgcgcaaactatttccgttgatggaggacaagaggagccttgcatctgaagatgaacttgctaatgttgaagggaaggcttctgttctagcagctcttgactattatatcagcatgcatagcgacattttcatatctgcatctcctggaaacatgcacaatgctttggtggctcaccgaagctatgagaacttgaagaccataaggccaaacatggcactgcttgggcgcacctttgcgaataagagcatggagtggccagagtttcagcaggttgtacaggcaggacacaaaggaagatacgggcaaatccggttgagaaaggcaacgcaatccatctacacttatcctgcacctgactgtatgtgccaaggataggctactggtttcaaaatttcagaaaaccaatcggttctgcagcaaatgaaggtcgaggatcgccgtctcaaatgttgcattgcggttagtacattccagctgccactagatatgcaagtttgatttttttgggacagctgctatgtactggatctcctctctctctctctctctctctctctctctctcttcacaatacagtttggtgcagatgcagtttatagatattctcatattcgtggttgtgacgggtgttaagatatcacacttgccattaacactttgcgctcttcagcttctacatctattttaatgcatcatgtattcttcagtgccgaactatgtgcttggagcgaaactgaccctgttcgaggtttag

SEQ ID NO: 4070 - DNA, 3597 bp, Zea Mays
caggcttcatctgttcgccagttcgctcccccctccctcacaaagtctcaagacgtctgatggcccctgagtagtgtaaatgtccaagaaacaaacattctctttcgagtcatattctttccgcggaaagcaaaggggtgacagtgaggggatggcgaggcgcaaggatggctggggcgacggcgacaagatcaagattggtgtctgcgtcatggaaaaaaaggtgtcgtgttctcccatggaacagattcttgagaggctgcgtgcgttcggcgagttcgagattataatttttggtgacaaagtgattcttgaagatcccattgaaagttggcctatatgtgattgtctaatcgccttttactcgtctgggtatccactagaaaaggcagagaaatatgctgctttacgaaggccctttttggtgaacgagttggcccctcaataccttcttcatgaccgcagcaaagtatatcagcaacttaagttgtatggggttcctgttccaacctatgctgttgtcagaagagaatatcctaatcaagaattaagctattttcttgaggaagacgattttattgagatccatgggaagcggttttgcaagcctttcgtggagaaacccattgatggtgatgaccataacataatgatatactatcccagctcagctggtggaggaatgaaagaactgtttcgtaaggttggtaatcgatctagtgagttttatccttatgtgaggaaggtgaggcgagatggatcttacatttacgaggagttcatgcctacaggagggacagatgtcaaggtttatacagttgggcctgtatatgcacatgctgaagcacggaagtctccagttgtggatggggttgtcacaaggaattctgatggaaaagaggtgcgctatccggttctattaaccccttctgagaaacaaatcgcaaggagcatttgccaagccttcagacaagcggtgtgcggttttgatcttctaaggtgcgacatgggagaggcaacatcctatgtatgtgatgtcaatggctggagtttcgtgaaaagttcatacaagtactatgatgatgctgcatgcattctgaggaaaatatttcttgatgagaaagctccacatattccatcaaccattcctactaatctcccatggaaaatcagtgagccagctcaagcatctgatactgcgagatgtcgtgagagggtaactgttggattatctaggccatcagaagagctgcgctgtgtcatagctgttatacgccatggggatcgcacaccgaagcagaaggtgaagctaaaagtaactgaagaaaagcttttgaaattgatgttgaaatacaatggtggaaaggcccatgcagaggctaagcttaaaagtgctttgcagctgcaagatctattagatgcaacaagaattctggttccacgtgctagatctggtcgtgaaagtgatagcgacattgaagttgagcacgcagagaagctacgccaagttagagccgtccttgaagagggtggacatttttctggtatctataggaaggtacagctaaaaccatcaaactgggttcgcgttcctaaagataacagagaaggggaggagtatccagttgaagccctaatggttcttaagtatggtggtgttctaactcatgcaggaaggaagcaggcagaagaattgggaagatatttcagaaataatatgtatccaagtgaagggccaggattgcttcgcctccacagtacatataggcatgatctgaagatatacagttcagatgaaggccgcgttcagatgtctgctgcggcttttgctaaaggtcttcttgatttagagggggagttgacaccaatcctggtttcacttgttagtaaggactcgtctatgctagatggacttcaggatggaactattgacataaatgaagcaaaggctcagttgcatgatattattacatcttcagaagttgcacattataatgaacctatggaattcccatggatggttgatggagctagagtgcctaaaaatgctgctcagcttctcacagatttggctgagttgacaaaagaaataaccgcgcaagtaaagatgctttctgatgatgaagatgagaaagctgccataggtagtgattcaccaaatcctccttacgatatagccaaggcactggggaaagcagaaattgatacggatcgtcttttggctggattaccttgtggtagtgaaagctttcttttgatgtttgcccgttggaagaaactagagagggatctctacaatgaaaggaaaaagcgctttgacactacacaaattcctgacgtatgaccttcttcataactcacatctcaaccttactggtctgagtgatctcttcgaagtttctcagttgctagctgatagtgtcattccaaatgaatatggaataaatccaaagcagaaactcaaaattggctcaaagatagcacgccgtttattggggaagattctaattgacctgcataacacaagacgagaggttgctgctgctgctgctgaatctgacatatataatgatataatgacagtgtcatctgcaaaacggaaggagaggagttactatgaggaggttaagcatgaatgtgttgaaagatctatctctaacaagaagggcattgatctagatgactcccacgaggaaacaaaatactgcttggatccaaaatatgctaatgtggttgaacctgagcgacgtgttcgaacaaggctctattttacatcggtacctttggaagacccaaagagattccgtatagagatgacatttagtcgcggtgcagatataagttccttggagggtggaggcaaagaatctttgctgcctgatgaccacacaatgccgattatggagccagaaagattgcaggaagttggatcgtatatcaccttagacaaattcgataaaatggctcgcccatttgcaatgccagctgaagattttcctccagctgctcctcaacctttgcctgttcgcttctgcaaggacatcgaattacgaggaaaactgcagcataagtcagacatgatgagtggtgttttgaaaaggaagacaaaaaggcttcaggaatagcatgcatctgcgcagcttgggcttcagtctgactgagtcgtcgtattgtgggtgctgcaggtgggttttttcaggatttacaggaacgctgaatacaagaccatgtgtctttacactctatgtacattctttttcttaataaaatgacgtgcgcgcggtggtaactctaaggagcataagtggaaacaatcaccatgctttgaatcattttaatttcatctaacctcttttctctctttttctaagcttttgaagtgttgggtgacagaatgcctacacgactatggttatccagttaaaggcatgtttggttcgctacctaatttgtcacactataagtggaaacaatcaccatgctttgaatcattttaatttcatctaaccccttttctctctttttctaagcttttgaagtgttgggtgacagaatgcctacacgactatggttatccagttaaaggcatgtttggtt

SEQ ID NO: 4071 - DNA, 3439 bp, Zea Mays
gcactctcgtgcacaagactagcagagagaacataatccaaagatgggctggagaccacacgttgtctctgcgtcatcatccgcactagtgcttcagttcctcgtgctgctgctgcccctgcccctgcccctgctgtccgccgatgcatcgtcaagccaaacgacgacgacgatctacgtcgtgtacatgggcgagaagaagcacgacgatccttccgtcgtcatggcgtcgcaccatgccgcgctgacctccgttcttgggaggtagcaaggatgaagccctccgttcgatagtctacagctacaagcacggattctctggtttcgcggcgaagctcacccagccccaagcggaggagcttacaaaataccctggagtcgtgagcgtgaagccaaacgcgtaccaccacgtgcacacgacccggagctgggattttcttggcatgagctacggcgaatcgccgtcgttgtcgtcgtcgtcgcggctcctcaggaaggccaagtatggcgaagatgtcatcgtcggcgtcatagactcaggcatctggccggaatccccgagcttcgacgacagcgggtacggccccgtgccgaaacggtggaaaggcgtgtgccagaccggccaggcgttcaacgcgagcaactgcaaccggaaggtcatcggcgcgcggtggtacggcgccgacgtcagcgaggaggacctcaaggccgagtacaggtcggcgcgggacgccaacggccacggcacgcacacggcctctacgatcgccggctcgccggtgcggggcgcgagccacgctggcggcggcctagccgctggcatagcgcgcggaggggcaccgcgcgcgcggctggcgatatacaaggtctgccacgacgtcggcggcggcacgagctgcggcgacgcgtcgatcctcgcggccctcgacgccgccattggggatggcgtcgacgtgctatccttgtcgctgggaggaggcagtgacgaggtctacaggacgttgcacgtcgtggcggccgggatcaccgtggtgttctccgcagggaacgatggcccagtgccgcagtccgtcaccaacgccctgccgtggctcgtcacggtggcggccaccaccgtggatcgcaccttcccgacagtcgtcacgctcggcgacggagagacgaagctggtggtatgtatgactcgtgatttaagagtgtgtttggtttaacttttagctttaattttttcgtcctaaaatcaaaagtcaaacaaaaagctggatctagaaaatatttttttctaaaaactgatttttttcgtagtacaaaattgaaagcatcactaaacctacttttagtagcttttggatagaactgtgaaaacatatatcaaagatcttttaacggattttgtaaaactgatgtgagctgtgatctattaaacctacgtaggtccgaggaggccctcgctcatttctcttttgtaagtaatcgagtctagatttttactataaagtccactgctcagcgccactcaaatgtctttggtgtagcatttttgtgtccattcttgcaattatgtccccactctgattttgttctgggtctgcacatggttgttgaggtatttaatttgagagacaatataattaaaatataaaacgaaaggtacatctgttttaactgcatacaaataaagttataactcacgagagataatgttttttagtttatcaaagtgggtgaataagagaaataaaaaaaatacacgcgaaaagagacgtacgcacgtgtattttgacgagaatacgcgatggacaataaaagtaaagaaaatcgcaaataattaataaaaggcgcacagaataagtatattacatgcatgttgtaaagcagataaattaaagaatatttacgtgtgatgacgagcaaaaacatgagtctcttgcatgcaggggcaatcattgtattaccgcaaccgatcggcggcggcatcgacgagcaacgacgacttcgcttggcgccatttgatggctttcactggctgcgacgacgcggagaagctgcggtcggaaaacatcaccgggaaaatcatggtatgccgagcgccggagttcaagtccaactatcctcccacggcgcagtttagctgggccagccgagccgccatcgccggcggggccaagggcgtcatcttcgagcagtacagtaccgacgtcctcgacggccaggcctcctgccaaggccacctgccctgcgtcgtcgtggacaaagaaaccatatacacgatcctaaatagcgacagcaatgtggccaggatttcgccggcggcgaccatggtcgggccccaggtcgcctcaccgaggatcgcgacgttctcgtcgaggggccccagcgcagagttcccctccgtgctcaagcccgacatagctgcccctggagtgagcatcttggcagccaagcgtgactcgtacgtgctcctgtctgggacatccatggcatgccctcatgtctccgcagtcgtcgccttgctcaagtcggttcacccggactggtcacctgccatgatcaagtctgccattgttaccacagcgtcggtgaccgatcgattcggcctgccaatccaagccaactcggtgcaaaggaaaccggccgacgccttcgacatgggcggcggcctcatagcgccggacagggccatggaccccggcctagtgtacgacatccagccggaggagtacaaaagcttggacgaccgcgtcgaccgcctcaacctcccgtccatcgccgtgcccaacctcatgtacgactccgtcacggtctcgcgcaccgtcaccaacgtcgggccggtggaggcgacgtaccgggccgtggtcgaggcgccggccggcgtggcgatggacgtggcgccgccggtgatcgccttcgagagaggcggcgtcaggaacgccacgttcaaggtgacgttcgtggcgaagcagagagtgcagggcggctacgcgtttgggagcctgacgtggctggacgacgccaagcggcactcggtaaggatccccgtcgccgttcggaccgtcgtccgggacttcgtcgccgatgtgtctcgatgatgaacactgaacgatgtgtctgtcaaagaagaacaccgtctcgatgatcgtccatatatgcgacactgtgtcactgtgtgtgaacactgaacaacgtgtcaaaactgaacttatgttgccaatttatttgcaagcaacaaggcgctcccagctgatcttgtgcctttatgcagtttatacagttcaaataaactatgaggctcagcctagaattcattacaaagcataattattgagcgagagacccgatcgatgatagttttgtctgtaattcatacatgggcactctcctatttgcttgcatgcttcgttgcaaatacaaacaagttttatgtggatttgtgtgcaca

SEQ ID NO: 4072 - DNA, 3520 bp, Zea Mays
gtccgtttgagcatttgtaattgtaacaatggtccaagactccttgttgctagctatatatacacacgcgtgcagaagtgcatatgcactctcgtgcacaagactagcagagagaacataatccaaagatgggctggagaccacacgttgtctctgcgtcatcatccgcactagtgcttcagttcctcgtgctgctgctgcccctgcccctgcccctgctgtccgccgatgcatcgtcaagccaaacgacgacgacgatctacgtcgtgtacatgggcgagaagaagcacgacgatccttccgtcgtcatggcgtcgcaccatgccgcgctgacctccgttcttgggagcaaggatgaagccctccgttcgatagtctacagctacaagcacggattctctggtttcgcggcgaagctcacccagccccaagcggaggagcttacaaaataccctggagtcgtgagcgtgaagccaaacgcgtaccaccacgtgcacacgacccggagctgggattttcttggcatgagctacggcgaatcgccgtcgttgtcgtcgtcgtcgcggctcctcaggaaggccaagtatggcgaagatgtcatcgtcggcgtcatagactcaggcatctggccggaatccccgagcttcgacgacagcgggtacggccccgtgccgaaacggtggaaaggcgtgtgccagaccggccaggcgttcaacgcgagcaactgcaaccggaaggtcatcggcgcgcggtggtacggcgccgacgtcagcgaggaggacctcaaggccgagtacaggtcggcgcgggacgccaacggccacggcacgcacacggcctctacgatcgccggctcgccggtgcggggcgcgagccacgctggcggcggcctagccgctggcatagcgcgcggaggggcaccgcgcgcgcggctggcgatatacaaggtctgccacgacgtcggcggcggcacgagctgcggcgacgcgtcgatcctcgcggccctcgacgccgccattggggatggcgtcgacgtgctatccttgtcgctgggaggaggcagtgacgaggtctacaggacgttgcacgtcgtggcggccgggatcaccgtggtgttctccgcagggaacgatggcccagtgccgcagtccgtcaccaacgccctgccgtggctcgtcacggtggcggccaccaccgtggatcgcaccttcccgacagtcgtcacgctcggcgacggagagacgaagctggtggtatgtatgactcgtgatttaagagtgtgtttggtttaacttttagctttaattttttcgtcctaaaatcaaaagtcaaacaaaaagctggatctagaaaatatttttttctaaaaactgatttttttcgtagtacaaaattgaaagcatcactaaacctacttttagtagcttttggatagaactgtgaaaacatatatcaaagatcttttaacggattttgtaaaactgatgtgagctgtgatctattaaacctacgtaggtccgaggaggccctcgctcatttctcttttgtaagtaatcgagtctagatttttactataaagtccactgctcagcgccactcaaatgtctttggtgtagcatttttgtgtccattcttgcaattatgtccccactctgattttgttctgggtctgcacatggttgttgaggtatttaatttgagagacaatataattaaaatataaaacgaaaggtacatctgttttaactgcatacaaataaagttataactcacgagagataatgttttttagtttatcaaagtgggtgaataagagaaataaaaaaaatacacgcgaaaagagacgtacgcacgtgtattttgacgagaatacgcgatggacaataaaagtaaagaaaatcgcaaataattaataaaaggcgcacagaataagtatattacatgcatgttgtaaagcagataaattaaagaatatttacgtgtgatgacgagcaaaaacatgagtctcttgcatgcaggggcaatcattgtattaccgcaaccgatcggcggcggcatcgacgagcaacgacgacttcgcttggcgccatttgatggctttcactggctgcgacgacgcggagaagctgcggtcggaaaacatcaccgggaaaatcatggtatgccgagcgccggagttcaagtccaactatcctcccacggcgcagtttagctgggccagccgagccgccatcgccggcggggccaagggcgtcatcttcgagcagtacagtaccgacgtcctcgacggccaggcctcctgccaaggccacctgccctgcgtcgtcgtggacaaagaaaccatatacacgatcctaaatagcgacagcaatgtggccaggatttcgccggcggcgaccatggtcgggccccaggtcgcctcaccgaggatcgcgacgttctcgtcgaggggccccagcgcagagttcccctccgtgctcaagcccgacatagctgcccctggagtgagcatcttggcagccaagcgtgactcgtacgtgctcctgtctgggacatccatggcatgccctcatgtctccgcagtcgtcgccttgctcaagtcggttcacccggactggtcacctgccatgatcaagtctgccattgttaccacagcgtcggtgaccgatcgattcggcctgccaatccaagccaactcggtgcaaaggaaaccggccgacgccttcgacatgggcggcggcctcatagcgccggacagggccatggaccccggcctagtgtacgacatccagccggaggagtacaaaagcttggacgaccgcgtcgaccgcctcaacctcccgtccatcgccgtgcccaacctcatgtacgactccgtcacggtctcgcgcaccgtcaccaacgtcgggccggtggaggcgacgtaccgggccgtggtcgaggcgccggccggcgtggcgatggacgtggcgccgccggtgatcgccttcgagagaggcggcgtcaggaacgccacgttcaaggtgacgttcgtggcgaagcagagagtgcagggcggctacgcgtttgggagcctgacgtggctggacgacgccaagcggcactcggtaaggatccccgtcgccgttcggaccgtcgtccgggacttcgtcgccgatgtgtctcgatgatgaacactgaacgatgtgtctgtcaaagaagaacaccgtctcgatgatcgtccatatatgcgacactgtgtcactgtgtgtgaacactgaacaacgtgtcaaaactgaacttatgttgccaatttatttgcaagcaacaaggcgctcccagctgatcttgtgcctttatgcagtttatacagttcaaataaactatgaggctcagcctagaattcattacaaagcataattattgagcgagagacccgatcgatgatagttttgtctgtaattcatacatgggcactctcctatttgcttgcatgcttcgttgcaaatacaaacaagttttatgtggatttgtgtgcaca

SEQ ID NO: 4073 - DNA, 1509 bp, Zea Mays
cgcagcagcacagctcgccgcctcgccgtctcttagctgaggcgtccgacgccaccgcccccaatccggtggcgctcctccgtccggccctgcgcggcggccgtggagcaggagggcggcgccgcgggggaggccccgcggctggtgctgcacgactccctcgactccgtgggggtggccaccgcgcacgctagggcggcgcgggaggggttcgtggcgcaggtggggcggctcacccgggtaagtgcggggagcagcatcgccatcagccgcggccctgacctcgcccgcgcagcgctctgcgtcgctgccgaggacgactcgctcgtctcccactcctcggtcccgctccccgtagatgccttcatcgcgcgcctcgacgacctctccacgggcttctgcgccggcgggaacttcccgccctcgggtgcgccgcccgaggggtttcggagaacaaatggagtgtcagatgtgcggattatgtaccttcactcggtcttgacatgccgttctggatcagctctaatgcttgcgttaatatattcagagatattgaagactgtacgaacatatggcttactggattttgatgcagagattttctttccaaatgatctcaatagcctccctaggggctatgacaaacaaaaaagcaaattggtcgatgagccacatattatgacttcaaagtcacttttggttgagactttgagaactttgaagtgtgcattttggccatttcaatctgatcagtctagtagcttatttctaaatgctgttgctgcaaaccagcgtggccctggtactttaggtgataaccaagcgaggtcatatgggaacacaagtgccattgagatggctgctgctaaagctgctcagcatagattgatgcgtggagtatggactaatgctcgttttggtgatatgcgtcgtgctttagcagcttgtgagcgactgatactactgcatcacgatccgcatgaactgagggattatgcagcccttctgtaccactgtgggtactatgaagactgcctacactacttatcattgtaccaaactgcaaagtctgggaaatccccaaccaatcgattggagatcttggaggacgaagctgtgaatactctcaaagcgcggttaatgcttattttagcagaggatggctggagcagatgtagacctgtggcaaggtactggaccaagaactctgagccgtggtaattagagctggccaacgttgcggctgaagcaaataactacagattgtacatagcattttcaactgtggatatgttgtacagtcacttggtaatccatgcgggatgtgaatcaaattcctaattttatacaacaccgcgttgttgctttatctgagattcgcagggcttttttatatttttgaataaatttgatacaatacaacaacatcctcaaatctgtatctacattttttagtcaaacaatattatgttacagaactatcagttttccgtaagttctttcaggcac

SEQ ID NO: 4074 - DNA, 4812 bp, Zea Mays
aaaaaatatcggttccgtttttgatttggaggggaggggagcggcggttcggagtgggcaggctcgctgttggttcttgcagcggcgcggcagagaggggtgtgcggtgcggccgtgctgttgaattatcctgttccttcagtgctcgcgtctcgatgcgttttctctgatgatggtttcatggccacctgcgtgtgctgctgctgctgctagtacgccagcgctttgattcggcagaggcgttgctttggtttcgggttctttcgcctttcctttcgccaaagattgcagctttcgcagccgcagccttttcttctccggccgattccaaccttggccagactacccccccttcaaaaatcgcgcaaggggtgggggttttacccggcccgtactgcgagcagcgccgaattttttcccctgggcgtgcgattgtcgcttagttgagcttcagagcctggttttttgagagatttctttttgaattttgagcctggtgtggaatttgggggtttgggtgtctgccagttttcaacccttggagagtcagaggctattgtctctgaagatatcgcctgttttgatgcgaaatggggaaatttctggtccctgtgctgttcggccattggatttggcgagttggtgtttgagccctggtatacatcacctgtctgtgctggtggccgtttgatttcacggtggtgatgctctctgcagcctccgtgatggcgccggcagcagccacacagaagagctcccttgaggtcttgcttgagacattaaagaagcgcgatgagcagcccaaggatgcacctccaacattgccagcccggccgacgtgccgtggccggctgcccaccaccagacggtcatcactgcctgctggctttatgctcgagaacggcatggcaacagttgctgccacagaagctgcagtggttgacaagaaggcagatgctaagatggagattgttgggctggaggccaaggaggaaaagctggtgaaaggctgcatctttgggactaagaggaagttccctaacacagaagtgctggaggagtcgccgtatgttggtaaatttcttgaggagaggaagggtacatcagtttgtaagaatcctccacatatttcctcggcaacgataaggatgaatgggaatgtagcatgtacagatatcttggactatattctccagaagaagctaagagtttggtgttcttcaccaaatgcaaagtgggaacttggacagatccaatcaatgtctggagatgatgctgaaatactcctggctaatggaaaagttttgatggtgtcaccagaacaactcttgcctgctaaccctgatatcctcgatggagtggatgatttgatccagatgagttacttgaatgaaccttcagttctttacaatctgcaattgcgatattctcgtgatcttatctatacaaaggcaggacctgttctgattgctgtcaatccattaaaagaagttgctctctatgggaagtcttcaatcatgcaatacaagcaaaaggccaacgatgacccacatgtgtatgcagttgctgatttggcatttaacgagatgctgcaagatggcataaaccaatctataataataagtggtgaaagtggatcaggaaaaaccgagacagctaaaattgcaatgcaatatttgtctgatcttgggggtgctagtggtacggagtctgaggttcttcagaccaatgttattctggaagcattggggaatgcaaaaacatcacgaaaccataactcaagccgatttggcaagcttattgaaatacacttctctgaatctggtaaaatgtgtggtgctaaaatccagaccttcctgcttgagaagtcgagggtggtccaaagggcacaaggagagagatcttaccacattttctatcaactgtgctctggagctcctccccttctcaaaaaaaaattgtttctgaaaagcgccaatgactacaattacttgaagcagagtaattgcttgaaaatcgatggtgttgatgattcaaaaaaattcacagtgctagtggatgcattggatacaattcaaatatctaaggaagaccaaatgaaattattttctatgcttgcagctgtcttgtggctggggaacatatcattctgtgtgattgataatgaaaaccatgtggaagttgtttcaaacgaaggattgtctactgctgcaaagctattaggctgcactgcaaatcaactagtgattgctttgtccacttgtaaaatccgagctggaaatgacagtattgttaaaaagctaacattaactcagggaggcaatttacatggagatccataagtattttggatatttatgggtttgagtgtttcaataagaatggttttgagcaattttgtataaattatgccaatgagaggctgcagcagcacttcaacagacatcttctcaaactacaacaggaggaatacttggaagacggaattgattggacccccatggaatttgtggataacactaattgcttatctctctttgagaagaaacatctagggctattgtcattattggatgaagagtctactttcccaaaggcatccgatttttcctttgctaacaagcttaagcggcaattaagtggtaactcttgcttcaaaagtgaaaaagaaggcacatttaagatttgccattatgcaggggaggtgacatatgatacagctgggttcctggagaagaacagagacccattgcactctgagtcaatccaactactctcatcatgtacatgtgaactttcaaaacattttgcctctgtcatggttgctgattctcagaataaatcaagtctgtcatggcattcagtaaaggatacacataaacaaagtgttgtcatggaatttaaggctcaactgttcaagctgatgcagcagttggagagtacaaccccacattttatccaatgcattcaaccaaatagcaaacatcatcccaggttattcgagcatgatcttgttttgcaccagcttaaatgctgtggtgtgtttgaagttgttcggatatcaagaacatgctatccaactaggatcacccaccaacagtttgctgaaagatacagatttcttctcttgcgttccattgcatctcaagatccacttagtgtttcaattgctgttttgcaaaagttcaacattccccctgaaatgtatcaagttggctacacaaaattatttttccgtacaggacaggttgctgcactggaaaatgctaaaagacagatgcttcttggaaccctccatattcaaacacagttccggggtttgcattctcggcggggatatcaacgactaaagaaaggggcgatgaatttgcaatcatttatacgtggtgaaagaacaagaatacactttgataatcttgtcaagagatggagggcagctgttctcatacagaaacacactaggcgtcgacttgcagctaacatgttcaatgatcaactgaatcatgtcattcttcttcagtccgtgacgcgtgggttcctggccagaaggaaatacaagtgtctgcagaatgaaaaggagtcaaaggccagtcacagcatagttcaagggaacacaaggaagaataactcagagtcaagaatatgccatgaaatgaatgggcattatcctcacgaaccagtcatcactgagcttcagggtcgtatcacgaaagctgaggctgcattgcggggtaaggaggaggaaaatgtaatgctcaaacagcaattggaacagtatgagaggaaatggtcagaatatgaagccaaaatgaaatgtatggaagaggcatggaagaggcagctctcttctctgcagctgagccttgttgtcgctaagaagagcctagctgctgatgatgcagccactagagcagctcggactgattgtactcctacacatgcgcagtatgactctgaagatacattatccaccgggactcgtacacctgaagtgatcgagtcgaaacacgacaaccacaaccctgaagctaaagtttcagcaggaaactcggataggcgagtgaatgctgtgaaccacctagcaaaggagtttgaagacagacgacaggtgttcgaagacgatgcgggcttcctagttgcagtcaggtccggtcagattggttcaaatatgaacccagatgaggaactccggaagctcaaggaccgctttgcgacatggaaaaaagactacaaatctcggttgaaggagactaaggtaaaccttagtaaggttggcacccatgatgagaaatcacggaaaagatggtggggaaagaagagctcgaagtgaaacgtgtaagagaatctccacaacattttgcaacgacactgggtcaaggaaagtggccaggaatgccagggcaggcgagaagaatctgcctctgatcccaaaagcttggtgagatgatgaactcccatgttggtggcagtgccgttactcatctgatgtcacgagtgtcgaaaagatcaaagtagacaataggtgaagccagagttctgtacatgtatattagtcagctctgagtcatcacttgacagtgtgtttatgtcatcgtgtatgtagagtgataaatccgaggcgtggaagggtaactaaatgcagattatccaccatgagcgaagagatgcgaaagcagagtactgtaatatgtgtacagtgagaacattgttgaaatgtgcaaggcattttactctgaaaactgtgattgcatcgccccatattttgcactatcttttgagacctttacacttacacatcagttttattttttt

SEQ ID NO: 4075 - DNA, 2645 bp, Zea Mays
gcccaccagcccagaacccattcatgataaatctccgtttccagcaaaaaatcaggcccacgatccgatttccgtttctgccggatgaaacggcccaaacagggggcaagccggcaactccagatgtgaatagcgacgcttgcgccttgttttggctgtttccctaaaccgtcctccgcctcataatcgcaaaccctcctcccctctcgctgcatcggcgccgccgcgatgaagcgctcggccgacgcgatgactgagccggcgaagcctgtgttcctcaccaaggcggagcgggagcgcctcgcgctcgagcgccgccaggccgccgtctccgaccagcgccgcaccgcgctcgacctcctccagtccctgccccgggcccctcctccgccgcctcccagcggcgctcccccgtccggctccaaccccgctcctcgcgactcatccaactctcatcgcgattcctccgaccgggaccgggaccgggacagagacagagacagagacagagacagagacagagaccgggaacgccgccgcgacgacgattcccgccgcgaccgagatcgggatcgagatagggaccgcgaccgcgaccgcgaccgagatgactcctcccggcgcgaccgcgaccgagaccgagaccggcgcgaccgcgaccgtgaccgtgaccgggatatggagcgggagcgagatcgcgacagggagcgtggggatcgcggggaccgggagagggaccggctggagaagatggcggagcgggagcgcgagaaggagctcgacgcgatcaaggagcagtacctcggctccaagaagcctaagaagcgtgttatcaagccctctgagaagttccgcttctcgtttgactgggaaaacaccgaggacaccagccgcgacatgaacgcgctctaccagtcgccgcatgaggcccgactgctctttggccggggcttccttgctggcatcgaccgacgtgagcagaagaaggcggcagctgcgcatgagaaggagacccgtgcagagctgcggcgcaaggctggtgtggaggaccgtccagaggatgacgctgtagataagaagaaggccgccgctgctgaaatgtatgacgcttttgatatgcgtgtggacaggcactggtctgagaaggcgcttgaggagatgactgagcgagattggcgtattttccgtgaggatttcaatatctcctataagggttctcgcataccccgaccaatgcggaagtggagtgaaagcaagcttggcaccgagttgcttcgtgctattgacaaggctggatatgaaaaaccatcaccaatccagatggctgccattccgctaggtctacagcagcgtgatgttattggtattgctgagacaggttctggaaagactgcagcctttgtactccccatgttgtcttacattacccgattgccgcccataagtgaggagaatgaggctgagggtccctatgccgttgtgatggcacctactcgtgagcttgctcaacaaattgaggaggagactgtgaaatttgcaacctatctaggcatcaaagttgtctcaattgttggtggtcagtcaattgaggaacagggtttcaagattaggcagggctgtgagattgtaattgctacacctggtcggcttcttgattgcttggaaaggaggtatgctgttctcaaccagtgcaactatgttgtgctcgacgaggctgataggatgattgatatgggctttgagccgcaagttgttggtgtccttgacgcgatgccatcgagtaacttgaaacctgaaaatgaggatgaggaacttgatgagaagaggatttacaggactacttatatgttcagtgccaccatgcctcctgctgtggagcgtcttgctaggaagtacctccgaaacccagttgttgtgacaattggtacagctggcaaggccactgatctgatcacccagaatgtgatcatggtgaaggagtctgagaagatgccacggctccagaagatactcacagatctcggagacaaaacagccattgtgttctgcaatactaagaagacagcggacatgcgtgctaaggatctggacaagtcaggcttccgcgtcacaacccttcatggtgggaagtcacaagaccagagagagatcagccttgatggatttagaaatcgtcggttcaatgttcttgtggctactgatgttgcagggcgtggtattgatattcctgatgttgcacacgtgattaactatgagatgcctagttcagtcgacacatacacacatcgcattggaagaacaggtcgtgctggaaagaagggggtggcaacttcatttttaactttagagaacactgatattttctttgatctgaaacagatgcttatacagagcaacagtcctgtgccacctgaacttgcaaggcatgaggcatcaaaatttaagccaggctcgattcctgatcgacctccaaggcgaaatgatacagtctttgcaaatcattgaagcaatcttttggactattatgagctcaacttctaccatagagggaggaatctagattagtatttatgagtttgatttgtgttcatatatatgaatccggttttgagaccttgctgaaagtatgttaaactatacttgtg

SEQ ID NO: 4076 - DNA, 3686 bp, Zea Mays
  misc_feature (3685)..(3686): n is a, c, g, or t
ctggccactgctcactctctcacccacccactctcctactgcgcgttgacgaacgctgtcgctggctagctgcaggcggagttcgctttcgtcttccagtcaaaaaggactgactggcctgcacgtcttctccagttcagagtttggacactgcttggacttggagtggcatttcaagccagctaagggtccagatccaccatccatggctgtgcttccaacgcccaggagaatcaacaacttggcccttgcaagcacggtgcttccaaaacgtgtgccgctccatttattacagaaaataacaaatgatttctctaaggaccgtgaacttggttccggtgcatacggaaaagtttacaagggagtgcataaaaatggcgaaacgatggctgtcaagttgcttcactccatggctggacttgatgataaactttttgaggaggagtttcacaacattgcaagactccaacacaagaatattgtgcgtcttgttggcttttgccatgaaactcaacgccaattcataccgcacgatggaaaaatgatttttgctgatagcaaatatatggccctttgcttcgaatatatgcataatggaagccttgacaagttcattattgatgaaaatagtgtccatgactggtccacacgctatgcaataatcaaggggatctgtgagggcttgaaataccttcacgaggaattgaatcctcctatttatcatttggatttaaaaccagctaatattttgttggatgacaatatgatgccaaagcttgcagattttggcttgtcaaagatttttgaacaggaacgaacacgaatcacacaaagttgtgtaggaacacagtacatgaaaaatggaggaataagttacaaacaacaatggatgcagctgcattggagacatattgtgaacaagtagtgagatgcattgaaatggctttaagttgtgtggagaccgatcggcacaaaaggccgagtataggggctattattgatgagctaaataagatggagacaaataccgaccaggtattttcagtggatatatgctcgactccagcacaaacacaaccaccaccccttcctgattctagccacagcacagaagaaacaagcaacacaaagggagttagcagactgggaccgagagagtacgtacagagcacaatgcgggacctggtaattgggataaccaagtcggtggtggagggggtgatcagcaaggcccagtcggtgatggaggaagaaaatatgctacttattagcatgcagcatgacctccacttcatcaccgatgagtttcagatgatctattcattccttagcatcactgatgaggagcgtatcaacaacgcggtagtgaggatctgggtgatgcagacgcgtggtctggcctatgacctggaagactacatggatgccttctcctgcctggacaagaccagaaaatggtggtcccgcttgttccgagcatgcctggcaccaccggggtctccatacatgtcagtgacatctctggccgtggaactcaagcatctaaaggcaagggtcgaggacgttagccacaggaacactcggtataacctcatcagcgacgccggctcaaagcccggcctcgtgaggcaacagccggtgcctcctggtgctgtggcatacgaaaacgacacaagaaggaaacacatcttaggggatctcacccagcttatcaccaacaaggacgatgctgatcttcaattgatttcaatgtggggtgcaggtggaggcaccgggacgacatccatcataaggaagtgctacagtgatccagagatcatccaaaatttcatatgccgagcctgggtcaacctcagccatccattcaacccccatgagtttgtgcggtctttgatggctcacttttatgcaaacagttgccaagaaagacaaggagggatcatcggtgttgatgtcctaactagcatggatgcgactgccacccagggggatctcctcagcgagttcgttcagctagttgacaagaacaggtaccttgttgtcttggaagacctgcccaccatggcagagtgggactctatcaggacgttccttcccgacagaaagaatggcagctggatcatcgtgtcctcgcagaaatatgaaattgcaagtttatgtgtcggacatccctaccaaatattggacctgaagcagtcctcgcccactgagcactccgtatgtgccttcttgagagaggaggtcacattaaaagaaaaaaaaggaggcaatagaaaagaaaaaatttatgtcggagatgaaagcgaggtgaacaacggtagtacatcaaccaacagcaaggtgatatcaactgagtatgacttaagccataaccataggatggtcgccaactctaaatggaaagaagccagagactggatgcagaattcttcccttgtcggacgcagattgcagatgtatcaaattcatcgctgtatagctgaagcacaaaggaaccattcccatgttatgtctgtttggggaatagttggcgttgggaaatcagctattgtcagaaatttttactgcgacaggatacttgagaatcagcaatttcaagaatacggttgggtggatttatcacactcccaacccttcaatttgaaggacttctcacagaacttgcttacgaattttcaatcagattctcttcaagccaatgaaactacaccctctcgtggtatactggggacagtccgaaaatgttgtgagtttctaagtacacgtcattgcctcgtggtcatagatggccttcagtccaaagaggaatgggatttgatacaatcatcattggtatctagatactctaaatctaatactattatcattgtgataacaactgaagcaagcattgcagcatactgcgcagataaggatgaccttgtgtttaatgtcaaaactttagaaactgatgcagcctttgatctcttcgaaaatgagatatctaagaaggctccgttgtggaccacttcattatgtgatcgaggaaattcagtgacgcaagaacttgtttcaaagtgcggggggctcccaatggtaatagtggctatagctggcatattggctaccaaggtagtctcctggatggacactgcaacatccatcaatttgaggtttatgtttgagctagagatcaatccagacctgcaggatctgtttagctgggtgcattcctgcttccgtacttgtccagatttcatcaagccatgtatcttctacctatcattttttccaagagaccacaacattcgacgaaggcgtctagtaaggcgttggatcgctgagggttactgcagggacagtgatgataaatctgcagaggagaatggggagttcttcttctccaaactcctcggtatgagcataatccaaccggagtccagtgacgcgaggatggtctcgtgtcaaatcaatggatttttccgtgagtgcatcctctcacggtcaggggaaatggaagaccttgtcattgaactggccgacagatgcaacctaaccacccaacgcagtgggcgtcatcttgtcatatcggaaagctgggacagagataagattttattcgagagcatcgacttctcacggctacggtcaatgacagtgtttggaatgtggaaatcattcttcatctccaaaagtatgaagcttnn

SEQ ID NO: 4077 - DNA, 3056 bp, Zea Mays
aacccgtgccgtgcctgccgagcccaaccactccaccaccctctggctctcctcgtcctcggcgacgagttctcccccttctctctcctcttctcgccctcgccttcgcgtagtcgagtctcatcgtcagctcctcgcctgtcgcctccgctgcgcgtcgccggacgagaggagagacagacagacagacagagaggggaaagggatccctccgaccaggcccaccgccgtccatccgcccccggatctcctccgtccccaccgccgtcgccgacacacgactccagatctttgcaagtctcccgaagagcaacttaatgaggtcctaagagatcttgacaccgctgtcaatgaagcttcaggtcttattggaaactggcaccagacaaccggcaaaatatgttttggttggcaaattgagtcagtaatatcagatattcagggatgttcccttcagttgtgccagctggttcattcgctattgccttctctgactgctcgtgcatgcacatgtattgagaaactccaggacataaattatgagcacctgtttgatctggttaaggaggttgccatggagcttgcagagacaggtgcagtgagttctgagaatctgttgaaactatcaagtttgttgagcttgtcaacaaacatggaattgtacatggaagctgtttcccttgagaatctcagaacaagggcactacgaagtgagaatcgtgaagaactggagctagccgagcagatgattccactggtcaactatatgcatgatcatcttctcagggaaaaacaacagcttagcatcaatggtgtccctattcctcctgatttttgctgtcccctttccttggagctgatgtctgatcctgttattgtagcgtctggacagacctatgagcgggtttatatcaagttatggcttgatgagggttttactatctgcccaaaaacacggcaaagacttggccactccaatttaatacctaattatactgtgaaggctctgatagctaactggtgtgaatcacatgacattaggctccctgatcctataaaatcactgaagttgaactttccttctgctgcctcctcccttcaggatttgagtgctgcaggtggcagccctctacatcctactcttgtgtcaaggtctaatattcctgggtccccagaagctgatgtgcacttgagaaacttaaatggcgcatcttctcctcgtagtttggccaatcagaattctcatgtgcatgcaaaccgtcctggtcatgaggtatcgacgagtcaaacttcagaaaatgcaaatggttctgcaccagatgtttcgaggttatctctcgcaggttctgaaacaagagagtctagtatggaagcaaagcgtgctggttcgattggacaaatgtcagaacattctactgatgaagcatttcaatcttctaatttagataggaatctgcaggacaacttggctagctcttcattgaatggtagtctcccaaatagtggtcaacttgatggggaatgtgacaatggggtgacaagggttccaagcgataggacaaattacagtagtgatgcatctggagaggttacagatggcggtgctgcgcccgtagcctcttctgttcctcaaagggaacacttaattcctgcaagattgggtactagacaatttataaggcggcaaccatcagataggggtttccccagaattatatcttcatcaacgatggatacacggagtgatctctctgccattgagaatcaggttcggaagctgattgatgatttgaaaagtgattccatagatgttcagagatcagcagcatcagatcttcgttctctagctaagcacaacatggagaataggattgtcattgcaaactgtggggctgtaaacgtgctggttggtcttcttcattcaccagatgccaaaacccaagaacatgctgtgacagctcttttgaatttgtcgatcaatgacaacaataaaattgctattgcaaatgctgatgctgtcgaccctctcattcatgtccttgagactgggaaccctgaagctaaagagaattcagcagctactctattcagtctctcggttgttgaagaaaataaagtgaggattggacgatctggtgccatcaagcctctagtagacttgctaggaaatggcacccctcgaggaaagaaagacgcagctacagcattgtttaacctgtcgattcttcatgagaataaagctcgcatcgtgcaagctgatgctgtacagcatctggttgagcttatggatcctgctgctggaatggtcgacaaagctgtggctgtgttggcaaaccttgctacgataccagaaggaaggaatgcgattgggcaggcacgtggcattccagcccttgttgaagttgttgagttgggctctgcaagagggaaggagaatgctgcggccgcgttgcttcagctctgtacaaacagcaacagattttgcagtatagttcttcaagagggcgcagtgccccctctagtcgccctttcacagtcgggaacaccgcgtgcgagagagaaggcacaagcgcttctgagctacttccggagccaaagacatgggaattcagcaaggagatgattttcccccttgtgttgtagtgtacattaaagcgtcaccttttatgcccatcatcgtgattgggtcctgttgactgttactgattggcgctggtaaatgcgttggctggaattatgcagtgccctgtgctctgtttatagattgagattgttattgctcatctcatgtaagtgttgtgggcggtgagtgttgtctgttgagatggtatgtttttttttcttctctttttcgtttttgaggattttttgtacagcttatccgttggtagcaacttgcatattcactgattttgtcctgtatgtatattctattagctgtggcctgtggaattatgatggttcgatggttgtacaagttatttatttgatctgtagtaccagctaccaaataaggccacatttggacgcaaagtatttttgaagtattggataaa

SEQ ID NO: 4078 - DNA, 3061 bp, Zea Mays
aacccgtgccgtgcctgccgagcccaaccactccaccaccctctggctctcctcgtcctcggcgacgagttctcccccttctctctcctcttctcgccctcgccttcgcgtagtcgagtctcatcgtcagctcctcgcctgtcgcctccgctgcgcgtcgccggacgagaggagagacagacagacagacagagaggggaaagggatccctccgaccaggcccaccgccgtccatccgcccccggatctcctccgtccccaccgccgtcgccgacacacgactccaggtcagatctttgcaagtctcccgaagagcaacttaatgaggtcctaagagatcttgacaccgctgtcaatgaagcttcaggtcttattggaaactggcaccagacaaccggcaaaatatgttttggttggcaaattgagtcagtaatatcagatattcagggatgttcccttcagttgtgccagctggttcattcgctattgccttctctgactgctcgtgcatgcacatgtattgagaaactccaggacataaattatgagcacctgtttgatctggttaaggaggttgccatggagcttgcagagacaggtgcagtgagttctgagaatctgttgaaactatcaagtttgttgagcttgtcaacaaacatggaattgtacatggaagctgtttcccttgagaatctcagaacaagggcactacgaagtgagaatcgtgaagaactggagctagccgagcagatgattccactggtcaactatatgcatgatcatcttctcagggaaaaacaacagcttagcatcaatggtgtccctattcctcctgatttttgctgtcccctttccttggagctgatgtctgatcctgttattgtagcgtctggacagacctatgagcgggtttatatcaagttatggcttgatgagggttttactatctgcccaaaaacacggcaaagacttggccactccaatttaatacctaattatactgtgaaggctctgatagctaactggtgtgaatcacatgacattaggctccctgatcctataaaatcactgaagttgaactttccttctgctgcctcctcccttcaggatttgagtgctgcaggtggcagccctctacatcctactcttgtgtcaaggtctaatattcctgggtccccagaagctgatgtgcacttgagaaacttaaatggcgcatcttctcctcgtagtttggccaatcagaattctcatgtgcatgcaaaccgtcctggtcatgaggtatcgacgagtcaaacttcagaaaatgcaaatggttctgcaccagatgtttcgaggttatctctcgcaggttctgaaacaagagagtctagtatggaagcaaagcgtgctggttcgattggacaaatgtcagaacattctactgatgaagcatttcaatcttctaatttagataggaatctgcaggacaacttggctagctcttcattgaatggtagtctcccaaatagtggtcaacttgatggggaatgtgacaatggggtgacaagggttccaagcgataggacaaattacagtagtgatgcatctggagaggttacagatggcggtgctgcgcccgtagcctcttctgttcctcaaagggaacacttaattcctgcaagattgggtactagacaatttataaggcggcaaccatcagataggggtttccccagaattatatcttcatcaacgatggatacacggagtgatctctctgccattgagaatcaggttcggaagctgattgatgatttgaaaagtgattccatagatgttcagagatcagcagcatcagatcttcgttctctagctaagcacaacatggagaataggattgtcattgcaaactgtggggctgtaaacgtgctggttggtcttcttcattcaccagatgccaaaacccaagaacatgctgtgacagctcttttgaatttgtcgatcaatgacaacaataaaattgctattgcaaatgctgatgctgtcgaccctctcattcatgtccttgagactgggaaccctgaagctaaagagaattcagcagctactctattcagtctctcggttgttgaagaaaataaagtgaggattggacgatctggtgccatcaagcctctagtagacttgctaggaaatggcacccctcgaggaaagaaagacgcagctacagcattgtttaacctgtcgattcttcatgagaataaagctcgcatcgtgcaagctgatgctgtacagcatctggttgagcttatggatcctgctgctggaatggtcgacaaagctgtggctgtgttggcaaaccttgctacgataccagaaggaaggaatgcgattgggcaggcacgtggcattccagcccttgttgaagttgttgagttgggctctgcaagagggaaggagaatgctgcggccgcgttgcttcagctctgtacaaacagcaacagattttgcagtatagttcttcaagagggcgcagtgccccctctagtcgccctttcacagtcgggaacaccgcgtgcgagagagaaggcacaagcgcttctgagctacttccggagccaaagacatgggaattcagcaaggagatgattttcccccttgtgttgtagtgtacattaaagcgtcaccttttatgcccatcatcgtgattgggtcctgttgactgttactgattggcgctggtaaatgcgttggctggaattatgcagtgccctgtgctctgtttatagattgagattgttattgctcatctcatgtaagtgttgtgggcggtgagtgttgtctgttgagatggtatgtttttttttcttctctttttcgtttttgaggattttttgtacagcttatccgttggtagcaacttgcatattcactgattttgtcctgtatgtatattctattagctgtggcctgtggaattatgatggttcgatggttgtacaagttatttatttgatctgtagtaccagctaccaaataaggccacatttggacgcaaagtatttttgaagtattggataaa

SEQ ID NO: 4079 - DNA, 1243 bp, Zea Mays
aaagcgaaaaatgcccgcccgcacctgcgtgcgtgtgctgtgtgggcatgggcagcgtcaccaaagcgaggctcctctcgtcccaagcgccggttaactccgtctcagcgcacgcggcacgcccctaatcttcattcccccgaaaccctagccggtccttggccttgtcccggtcgcgccgctcccgtcgcctcttccgcggaagccgtcctctgcgcgtcggcggcggtggagatggcctcctcgtcggcatcttcgaggcaccaggtcaccatcaccctcggccgcagcggtcaggttgttaaaaggaggactatatctgatgatattaacggcgatgaaatgccattgtcggggaaaaaacgatctgtgagggataggttaggaagtaatgtgtctgattctgatttttatggaagccagcagaggaacaaaaggcaacagacagaaattaatagctcacatggagatgatggttcagatcgcttggttggcaaggatgatctgagactgaaactcatgaggaaaggctcgtttcagaggagcaatggtggtgcagaacagaatacaatggatctccgtgaaaagctttcccgaaatcataagaagttgccaagatatgattctagaggccatgctgcagaatcaagggctagttatgatatgagagatgagccaccagagttaaggtccagatatttttcaagggaggatgtcctagggtcaaggaactcttctgttgtaagtcgagttccttattcaagaactgcggatgacttgttaaaatcgaacccttcaagaaaatcttacccctcatggacagacgatggtttgaggcacagatcacctgaaaggattttaagtgttcgtagtgatgtgtctccaccagtaggttatgatcagattaggtccatgccaccacttagatctgccggttcctcaagacctcaaagttttattacaagaggtgctcctgatacgccaaggagtcaaccatatgctggcaaagccaccatttctgttgatacagtacagagaactaatgggatcactccatctagtgcacctttgcctaaggctgaagccccgcttacagttactggattgttgaattcgttgggtcttgagaagtatattgttctctttcaggctgaggaggtggatatggctgcattgaggcaaatgggggagagtgacctcaaagacatgggggtacctatgctgaagttcactggaagcatgg

SEQ ID NO: 4080 - DNA, 2844 bp, Zea Mays
gaaagtctggtgaccatgagtcaagttttaggaagcattgcagctaatggaaagaaatgtggttgctgttattggcccacaatcctccgggataggccatgtcatctcccatgttgttaatgagctacatgtacctcttctgtcatttgcggccacagatccaactctttctgcatcggagtatccttacttcataaggacaaccataagtgactacttccaaatgaatgccgttgctagcattgttgattactatcagtggaaagaggtgacggctatattcgttgatgatgattatgggcgaggtggtgtgtcggcccttggtgatgcgcttgcagcaaaaagggcgaggatttcatataaagcagctatccctcccaattcaaatacagatgtgatcaatgatgtactgtttaaagcaaatatgatggaatcaagggtcatggttgtgcatgtcaatcctgacacagggacgagaatattttctgttgctaacaagctccagatgatggccactggctatgtctggatagtaactgattggctagctgctgtcttggattcctcgacgtcaagagatcgtaaagaaatgagtcatattcagggactaattgttctgcgccagcacactcctgaatctgttgccaagaataagttcatatcaaaatggaataatgctgctcgtaatagaagtattacttcgggcttgaactcgtatggtttctatgcttatgactcagtttgggccattgctcgtggtgtcgatcaatttctcaataatgggcagcagatcaacttttctacagatccagtattgcacgatactaatggtagtagtttgcatctatcaactctcaagatatttgatggcggtgagcagatgctacagcaacttctgctcacaaattttacaggcctaactggtcgagtccaatttaattcagatcgcaatttggtgcacccagcatatgacatccttaacatcggtggttctggctcccggttgattggctattggtccaattactcaggcctctctgttgctgcacctgaaatattgtatcagaagccaccagatacttcttcaattgctcagcggctccacaatgtggtttggccgggtgattccacaaccactcctaaagggtgggttttcccgaacaatggccagccgctgcgggttggtgtcccaatcaagccaagctttaaggaattagtggcagctggaaaaggccctgataatgtgactggttattgcattgatatattcaacgcagcaattagactgcttccttaccccgttccatgtcaattcatagcaattggggatggtagaaagaaccctaactacgacgacattattagtatggttgctgccaatctgtaggcgactttgctattgtgagaaacagaacaaagattgcagaattcacacagccttatattgagtcagggcttgtgatagtagcgccagtgaaacaagcaacttcaagtgcctgggctttcctcaaaccgttcacattggagatgtggtgtgtaactggtgctctttttatttttgtggggatagttgtctggattcttgaacatcggagtaatgaggagtttcgaggatctccacgacgacaacttataacaatattttggtttagtttctcaacaatgttcttttcacacagacagaacactgtaagcgcgctagggcggtttgtgttgatcatatggctcttcgttgtgctgatcatcaattcaagttatactgccagcttgacgtcaatcctcacagtccaacagctcgcaacaggaataactgggatcgatagtttgatttcaagtggtttacctattggatatcaggctggaaaatttaccagaaattacctgattgaagagctcaatattcctgagtctcgattggtaccactaaatacaatccaggagtatgctgatgcccttaagcgtggaccaaaagatggtggtgttgttgcaattgttgatgagatgccctatgttgagatcttcctgtcataccactgcaatttcagaatagtgggacaggagttcaccaaggagggatggggttttgcattcaagagagacttcccccttgctgcggacttgtcgacagccatccttcaactctcagagagtggtcagcttcagagaattcatgacgagtggttcacccggcctagttgctcctctgatgacagcgaagtgggggcaaccaggcttggcctcggaagcttttggggccttttcctcgtgtgtgccctgatatgcctcttggctttgctggtgtttttcatacggatatgctggcagtataacaagtactccaattctgaagctgctggtgagcccagtgcagcagcagctgctgctgcagcagtagatgctgctgctgccgccgccgatgctgtcgaaagacagaggaggccatcacgtcttggcagcttcaaagatattatacagtttgtcgacaaaaaggaggaggaaattaagaagacgatgaaacgaagagtaagtgagaaagacaataaccaagctgcaggatcctcagaagctcattcagtggcttcagcatagaacattctttccaactcctgtccttcacaaggcaaaacaaggaagcacatatacgataggaaaaagtcaaaattacttccctctactatgaacgatgtccatatagcccctaaaatattttttagtttaatttacctctccatatgtttgaattggttcaatttatcccttaacaaattttttctcttttttatttcttcatgtataaactgagtttgaggttcaaattttgttcgttagtagttaagtcataac

SEQ ID NO: 4081 - DNA, 3339 bp, Zea Mays
cccgcgtctcccccgttccgtcccgtcccgtcccgtttactccacccctcatctctccttccgcctcctcccccttccccccgcgggtggtcgccggccaccgccggtggggcccactgcccggtgctcccattgctggcctggccctccccaccgcctctgtccggccggcgtcgcgcgcgaaaccaaccgaccccaaggagagagagggagagtgagaggaacaggaggagaccgcctgcctcggatccccggcctctcccgcgcgccggggggacctccggaggtgaatgtgggacctgtgccgccggggatttctctagaggcttctccgacccaccgccctgcgacgcgaacgcgacatggtggagggtaggagctatctccctgcagaggtcaggaacggcctcgagaccctgaagcggaggaggctcgagagagtgcgtttgagtgctcagaacgaagctggcgacaatcctgctgtggctgcgagaagtggcggtgatgccttgcggagccccgctaactgtggagtcagattgcattccaacaacagtacaggtttacctggaaatgtccatgacaagagtccttttgcaaagcgcaaggtggagaagtttgatatgtccaaccttgagtggatagacaagattccagagtgccctgtgtattgtcccaccaaggaggaatttgaggatcccattgcatatatacagaagatttcacctgaggctgctaaatatggtatttgtaaaatcgtctctcctgtatgtgcgtctgttcctgccggtgttgtgctgatgaaggaacatcccaattttaagttcatgactagagttcagccccttcgactcgctgaatgggctgaggatgatacagtcactttcttcatgagtggaagaaagtacaccttccgggactatgagaaaatggcgaacaaagtgttctctaagaaatattccagctctagttgtctcccagctaggtatgtggaggaggagttctggcgtgaaattgcttttggcaaaatggatttcgtagaatatgcttgtgacgttgatgggagtgccttctcttcatctcctcatgatcaacttgggaaaagcaactggaacctcaagaatttttcatggctccccaattctgttctaagacttcttcagacgccaattccaggagtgacagatccaatgctttatattgggatgctcttcagcatgtttgcgtggcacgtggaagaccattacttgtacagcatcaattaccatcactgtggggcatttaaaacatggtatgggataccaggcgatgcggctcctgggtttgaaagggttgctagccagtacgtatataacaaggacattttgattggtgatggagaggatgcagcatttgatgtcctactagggaaaacaacaatgttccctccaaatgtcttgctagatcacaatgttcctgtctataaagctgtacaaagacctggagaatttgttattacttttcctcgttcttaccatgcaggcttcagtcatggcttcaattgtggagaggctgttaattttgctattggcgattggtttcctcttggttctctggctagcaagcgctatgcacttctgaacagaactccattgcttgcacatgaggagctactttgtcgttctgctgtgcttctatcccaaaagctgttgaactgtgatccaagatccttggacaagttggaacatccatattcccagaattgtgtgaaatcctgctttgtgcggttgatacgattccagcgacgtgctcgtggccttcttgctaaaatgggttctgaaatatgctataagccaaagacatttccaaaatctgtcctgtagcatttgtcggcgtgattgctatatcacacacgtgttgtgtagatgtaactttgatcctgtctgcctacatcatgaacaagaactgcggagctgcccttgtaagtccaatcgcgttgtctatgttagagaggacatactggagctagaggctctatcaagaaaatttgagcaggatgtcagctcgtataaggaaggaagttgcattagcccatgtaaggaggttgagatctctgatactactgatgaacaacttccaaatcttgggattactctggatttcgttaatagtaaagctggtagctcaggctttatgactgttgatggaggaaacagttcttctgcagtatcaattttgacatcttctgtgcatcatgaggcatataagcatacagaagcaagggcaataaatacatcaatgaccaaaggaacttacactatggatgagagttcatccggcatagatggtgcttgtaatgaacacggttcatgtaatgcttcagccatggaatgcagtgataattcggattcggagtgtgaaatcttccgagtcaagcgcaggtccacctcatttgacaaacctacttctgaagctaagacatcaaccttgtctgaacagcaggttctgaggcggctgaagaaggtacatcctgaagtacagcaagtcatcagtaagcgtcaagaagaatctggtaatggttcagttcgcgctgcccacatgagccagaaaagctcaaatcctgcccctgctgatgacgaaacagaggacatggctcccataatgtggagaataaagcggcgacagtcagaaacccaagatgctacatgtcctggtacgagaccgcagtcatatccgccttccagtggtggttctggagaagagtttgtggaaagaactagagatgctgcagtagaactccgtccaaaacgagtgaaaatccggctaccttctaatgccagtaggcagattgagcagcagcgcagttcagggcagagatttgctagggaggacaggttgccgcttggttttccacgtacattttagggaatcacaggtgctactaacctctacttgagcagacgaattctttgtttagggcctccaatttgaggccactgggggcacgcttagaagatacacgtgataatattcttgttgctggaggttccgtgtcactgccgatagctctttgatgcctggctatcagtgacacagattaaagagaacctcgctaccttgatatgtccgctagtgtttagagcatgtagctagcttagctgttatctctctcactgtaccaacggcctttcccttgtaatttcctgtaaacaggcttagctgctacactatggctaactctattcttttgttggtttagccttaacgttaaattcaatgcatttcttttttggttagttggtacttgttatggtgttgctgctctcaactgtgggtggaatattctgatggcatgatact

SEQ ID NO: 4082 - DNA, 3354 bp, Zea Mays
cttcggttgctccaaccgaacctccctcctccccaccccccataaaagtaaccaccacccgcgtctcccccgttccgtcccgtcccgtcccgtttactccacccctcatctctccttccgcctcctcccccttccccccgcgggtggtcgccggccaccgccggtggggcccactgcccggtgctcccattgctggcctggccctccccaccgcctctgtccggccggcgtcgcgcgcgaaaccaaccgaccccaaggagagagagggagagtgagaggaacaggaggagaccgcctgcctcggatccccggcctctcccgcgcgccggggggacctccggaggtgaatgtgggacctgtgccgccggggatttctctagaggcttctccgacccaccgccctgcgacgcgaacgcgacatggtggagggtaggagctatctccctgcagaggtcaggaacggcctcgagaccctgaagcggaggaggctcgagagagtgcgtttgagtgctcagaacgaagctggcgacaatcctgctgtggctgcgagaagtggcggtgatgccttgcggagccccgctaactgtggagtcagattgcattccaacaacagtacaggtttacctggaaatgtccatgacaagagtccttttgcaaagcgcaaggtggagaagtttgatatgtccaaccttgagtggatagacaagattccagagtgccctgtgtattgtcccaccaaggaggaatttgaggatcccattgcatatatacagaagatttcacctgaggctgctaaatatggtatttgtaaaatcgtctctcctgtatgtgcgtctgttcctgccggtgttgtgctgatgaaggaacatcccaattttaagttcatgactagagttcagccccttcgactcgctgaatgggctgaggatgatacagtcactttcttcatgagtggaagaaagtacaccttccgggactatgagaaaatggcgaacaaagtgttctctaagaaatattccagctctagttgtctcccagctaggtatgtggaggaggagttctggcgtgaaattgcttttggcaaaatggatttcgtagaatatgcttgtgacgttgatgggagtgccttctcttcatctcctcatgatcaacttgggaaaagcaactggaacctcaagaatttttcatggctccccaattctgttctaagacttcttcagacgccaattccaggagtgacagatccaatgctttatattgggatgctcttcagcatgtttgcgtggcacgtggaagaccattacttgtacagcatcaattaccatcactgtggggcatttaaaacatggtatgggataccaggcgatgcggctcctgggtttgaaagggttgctagccagtacgtatataacaaggacattttgattggtgatggagaggatgcagcatttgatgtcctactagggaaaacaacaatgttccctccaaatgtcttgctagatcacaatgttcctgtctataaagctgtacaaagacctggagaatttgttattacttttcctcgttcttaccatgcaggcttcagtcatggcttcaattgtggagaggctgttaattttgctattggcgattggtttcctcttggttctctggctagcaagcgctatgcacttctgaacagaactccattgcttgcacatgaggagctactttgtcgttctgctgtgcttctatcccaaaagctgttgaactgtgatccaagatccttggacaagttggaacatccatattcccagaattgtgtgaaatcctgctttgtgcggttgatacgattccagcgacgtgctcgtggccttcttgctaaaatgggttctgaaatatgctataagccaaagacatttccaaaatctgtcctgtagcatttgtcggcgtgattgctatatcacacacgtgttgtgtagatgtaactttgatcctgtctgcctacatcatgaacaagaactgcggagctgcccttgtaagtccaatcgcgttgtctatgttagagaggacatactggagctagaggctctatcaagaaaatttgagcaggatgtcagctcgtataaggaaggaagttgcattagcccatgtaaggaggttgagatctctgatactactgatgaacaacttccaaatcttgggattactctggatttcgttaatagtaaagctggtagctcaggctttatgactgttgatggaggaaacagttcttctgcagtatcaattttgacatcttctgtgcatcatgaggcatataagcatacagaagcaagggcaataaatacatcaatgaccaaaggaacttacactatggatgagagttcatccggcatagatggtgcttgtaatgaacacggttcatgtaatgcttcagccatggaatgcagtgataattcggattcggagtgtgaaatcttccgagtcaagcgcaggtccacctcatttgacaaacctacttctgaagctaagacatcaaccttgtctgaacagcaggttctgaggcggctgaagaaggtacatcctgaagtacagcaagtcatcagtaagcgtcaagaagaatctggtaatggttcagttcgcgctgcccacatgagccagaaaagctcaaatcctgcccctgctgatgacgaaacagaggacatggctcccataatgtggagaataaagcggcgacagtcagaaacccaagatgctacatgtcctggtacgagaccgcagtcatatccgccttccagtggtggttctggagaagagtttgtggaaagaactagagatgctgcagtagaactccgtccaaaacgagtgaaaatccggctaccttctaatgccagtaggcagattgagcagcagcgcagttcagggcagagatttgctagggaggacaggttgccgcttggttttccacgtacattttagggaatcacagggcctccaatttgaggccactgggggcacgcttagaagatacacgtgataatattcttgttgctggaggttccgtgtcactgccgatagctctttgatgcctggctatcagtgacacagattaaagagaacctcgctaccttgatatgtccgctagtgtttagagcatgtagctagcttagctgttatctctctcactgtaccaacggcctttcccttgtaatttcctgtaaacaggcttagctgctacactatggctaactctattcttttgttggtttagccttaacgttaaattcaatgcatttcttttttggttagttggtacttgttatggtgttgctgctctcaactgtgggtggaatattctgatggcatgatact

SEQ ID NO: 4083 - DNA, 3415 bp, Zea Mays
ccaccacccgcgtctcccccgttccgtcccgtcccgtcccgtttactccacccctcatctctccttccgcctcctcccccttccccccgcgggtggtcgccggccaccgccggtggggcccactgcccggtgctcccattgctggcctggccctccccaccgcctctgtccggccggcgtcgcgcgcgaaaccaaccgaccccaaggagagagagggagagtgagaggaacaggaggagaccgcctgcctcggatccccggcctctcccgcgcgccggggggacctccggaggtgaatgtgggacctgtgccgccggggatttctctagaggcttctccgacccaccgccctgcgacgcgaacgcgacatggtggagggtaggagctatctccctgcagaggtcaggaacggcctcgagaccctgaagcggaggaggctcgagagagtgcgtttgagtgctcagaacgaagctggcgacaatcctgctgtggctgcgagaagtggcggtgatgccttgcggagccccgctaactgtggagtcagattgcattccaacaacagtacaggtttacctggaaatgtccatgacaagagtccttttgcaaagcgcaaggtggagaagtttgatatgtccaaccttgagtggatagacaagattccagagtgccctgtgtattgtcccaccaaggaggaatttgaggatcccattgcatatatacagaagatttcacctgaggctgctaaatatggtatttgtaaaatcgtctctcctgtatgtgcgtctgttcctgccggtgttgtgctgatgaaggaacatcccaattttaagttcatgactagagttcagccccttcgactcgctgaatgggctgaggatgatacagtcactttcttcatgagtggaagaaagtacaccttccgggactatgagaaaatggcgaacaaagtgttctctaagaaatattccagctctagttgtctcccagctaggtatgtggaggaggagttctggcgtgaaattgcttttggcaaaatggatttcgtagaatatgcttgtgacgttgatgggagtgccttctcttcatctcctcatgatcaacttgggaaaagcaactggaacctcaagaatttttcatggctccccaattctgttctaagacttcttcagacgccaattccaggagtgacagatccaatgctttatattgggatgctcttcagcatgtttgcgtggcacgtggaagaccattacttgtacaggcgatgcggctcctgggtttgaaagggttgctagccagtacgtatataacaaggacattttgattggtgatggagaggatgcagcatttgatgtcctactagggaaaacaacaatgttccctccaaatgtcttgctagatcacaatgttcctgtctataaagctgtacaaagacctggagaatttgttattacttttcctcgttcttaccatgcaggcttcagtcatggcttcaattgtggagaggctgttaattttgctattggcgattggtttcctcttggttctctggctagcaagcgctatgcacttctgaacagaactccattgcttgcacatgaggagctactttgtcgttctgctgtgcttctatcccaaaagctgttgaactgtgatccaagatccttggacaagttggaacatccatattcccagaattgtgtgaaatcctgctttgtgcggttgatacgattccagcgacgtgctcgtggccttcttgctaaaatgggttctgaaatatgctataagccaaagacatttccaaaatctgtcctgtagcatttgtcggcgtgattgctatatcacacacgtgttgtgtagatgtaactttgatcctgtctgcctacatcatgaacaagaactgcggagctgcccttgtaagtccaatcgcgttgtctatgttagagaggacatactggagctagaggctctatcaagaaaatttgagcaggatgtcagctcgtataaggaaggaagttgcattagcccatgtaaggaggttgagatctctgatactactgatgaacaacttccaaatcttgggattactctggatttcgttaatagtaaagctggtagctcaggctttatgactgttgatggaggaaacagttcttctgcagtatcaattttgacatcttctgtgcatcatgaggcatataagcatacagaagcaagggcaataaatacatcaatgaccaaaggaacttacactatggatgagagttcatccggcatagatggtgcttgtaatgaacacggttcatgtaatgcttcagccatggaatgcagtgataattcggattcggagtgtgaaatcttccgagtcaagcgcaggtccacctcatttgacaaacctacttctgaagctaagacatcaaccttgtctgaacagcaggttctgaggcggctgaagaaggtacatcctgaagtacagcaagtcatcagtaagcgtcaagaagaatctggtaatggttcagttcgcgctgcccacatgagccagaaaagctcaaatcctgcccctgctgatgacgaaacagaggacatggctcccataatgtggagaataaagcggcgacagtcagaaacccaagatgctacatgtcctggtacgagaccgcagtcatatccgccttccagtggtggttctggagaagagtttgtggaaagaactagagatgctgcagtagaactccgtccaaaacgagtgaaaatccggctaccttctaatgccagtaggcagattgagcagcagcgcagttcagggcagagatttgctagggaggacaggttgccgcttggttttccacgtacattttagggaatcacaggtgctactaacctctacttgagcagacgaattctttgtttaggtacactgttaactacaaaacgtggtgacagaagggaggagtgggagggatcagttgcagactgactttagaattggcaggaaaggaagcggctatctaatcgattcttttgtgcagcagggcctccaatttgaggccactgggggcacgcttagaagatacacgtgataatattcttgttgctggaggttccgtgtcactgccgatagctctttgatgcctggctatcagtgacacagattaaagagaacctcgctaccttgatatgtccgctagtgtttagagcatgtagctagcttagctgttatctctctcactgtaccaacggcctttcccttgtaatttcctgtaaacaggcttagctgctacactatggctaactctattcttttgttggtttagccttaacgttaaattcaatgcatttcttttttggttagttggtacttgttatggtgttgctgctctcaactgtgggtggaatattctgatggcatgatact

SEQ ID NO: 4084 - DNA, 1749 bp, Zea Mays
tccagaactcccgaacctctctgctatcttcgcttttaaccccatcgatgcttcccagtaagctacacgctcacccgcctcgtccttccatggccgatcccaacctccaggccgaggtcctgaccgcgtcagtgcgggtcaacggcaccgaggcggaggcaacgctcaggggcggcgagctgacgtggcgccccgccgacaccggcggcggcggagaggggcaggagcgggggctggagctggagtcggaggtgctcgggtgccgggtggacgggaggaagctcaaactcgcgacctttaccgcgagcggcggcggtgatgggaaagggggaggaggggatgggaatcggaggagagaggaggtcgtggtggagatggagaccgaggatgccgcgctgcgctggggggacatcatcagggattgcctcgcttcgctcggttgtcaatggtctcctgcagagggaggactgggaaacagcaataaaagtgccccttgggatcgttccggcaggtactggaaatggaatggcacgatctctattgcatgctgctggtgaaccattctctgtatctaatgctgtgtttgcaatcatcagaggtcataaacgtgcacttgatgttacttctgttgtgcagggaaacacaaggttctttagtgtcctgatgcttacatggggtctggtggctgatgttgatattgaatcggagaagtataggtggatgggaagtgctcgccttgaattttatctcctactccgcatgctgaacctgcgacggtacaatgggcgcatcctttttgttccagcaccaggatatgaagaagttggtgatcccgtggaacaaactaccggtcatgaaacaaatggggttagcgggggcaactgacaaaaatggtgaaacgtgcggctatgtcggcccgtcgatcaaagaagccgatcttagatggagatcgctgaacggtccgttcgtttcagtctggctcggcaatgttcctttcgctagcgaagatgccatggcagcaccaaaagcagagtttgcggatggctacttggatgctgctataatcaaggactgcccgcggtgggatgttctggggctcgtgctccagatgaaggacggcgcctacgtgaactcgccgtgcgtggagtatttcaaggtgaaggcgatccggatcgagccgggcctgcgcgtgggcagcagcaccaagggcggtatcatcgactcggacggggaggtgctcgcgaggggcgacgggtcccactcccgcgccggcgacgagccggggcacctgatggcgtacggcccgcccatccagctgacggtggaccaggggctggccaccatcttctccccgagatgacgattcttctatctgttctccaccgcctgcgaggactttgcttcgttagccctgccattttctcgagtagaaccatgtgactctatatgtaaatattagtcacacggtcacaccccactccagtggatgagcgatgagccaaaacacaagagggacagatcctttatctccgtcaagagattgttttcttttcacggccacagcccacatggccgccgcttttagtgttagcgtgagaaaatgacaagtgggctgtgggcagctcctattctttttttcaccttgtgtgtgttgttgattgtcccttgacaaacagtggactgttttcctgcaaaattggtgtttaattaacctgaaaagcttccacttgcatctaagtcttggcttgg

SEQ ID NO: 4085 - DNA, 2107 bp, Zea Mays
caacagaccacgccccagtgagagctcagtttcccctcttcagtctttgctctcaactgctgccatggcaaacgcatccgacagcgatattccatccgtcactcacgacctcgacgaggatgaagaattcgacgacgacgacctcgatgacgaagacgacgatggcggcgaacccctcgcgtcctcatccgaggcggctcgcctagaggccgtgctccggcgtctcaccgcggacgaggtccggatccgggtgcaccaggtcacgatccggggctgcgcccgcacgcgccgcgccgcggtcgaggcggcggtcggcccggacgtgtcgcgcgccgccaccgtgcgggacctcgtgcgcgccgccgccgccgctggtgaccggctccgttgcctcggcgccttcgacacagtctcgatcaccctcgacgcggcgccgcccgggatccctggcagcgccgtcgtcgtcctcattgatgttgcggaggcccgcggccgcgctgccggtgatttcggcgtcttcgccaacacacagatcatgctcacttgaaggttcagtgaagttgaagaacctatttggatactgtgagacctgggatgcatcaggcgctcttgaattagataagacagcagaactaagtgccggagtccaaatgcctaggatcggagcaataccaactcccttgatggctagaatatcgtttgtatctgacgactggttaaagtcctcactgaaagaacacttgatgggcgtttctgtcggcttgctctccaccataaaccacaacattgcttacaatttgacatggagaaagttaactgatccaacacgcatgtcatccaattctgtacaagaggaattaggacatagccttttgtcctctattaagtacgcgtacaaggttgaccgaagggactcaagcataagacctgcacgcggatatgcttttatgtcgacttctcaagttggagggcttgcaccagggagcaaatattcacgttttcttaggcaggaatttgatcttcgagtggctttgcctctgggtgtgctgaatggtgctctcaacgccggagtggctgcgggagtcatccatccattggaaaggggatctgcaggatctgtctcaccacttgtagaaagatttaacttgggtggtaatagggctctcgtgtgccgcttgggtggaccatcttcactattaggcttcaaaacaagagggctacgggcagcaacagagtccagaacacaagaccccaacactcctggcaatggcacttccccttcccctgagctaaatggtcttggaggtgaagtagcggtgacagccttcgccgacctgtcatttgatctgcctctgaagccgctcagggagctgggaatccatggtcatgcttttgtctgtgctggaaatcttggtagattaacggagtgtgatctgcggaagttccctgttactgaattcctgcagacgttcagaagttgtgcaggatggggcgtagttgtgccgaccagactgttccgcgtagagatgaattactgctacatcctaaaacagcttgatcatgacggggggaagacaggcatacagttgaacttctcatcctcctaatttgtaagatgaaaccaaacagagccctagtggtaacaaagctccttgtaaacatctcaatggcaaacctcaaaaaaccggatttattaataaaaaataaggtcaaaaaccggatgtgaaagattacgtaaaaaaaaaaccggagttctttagactttcatggtccactgtctgcgtttgaatgacagccagaaactcggctttgcattggggatcttgtatgttgactatttgctcctctccagtctccaccatatctatatgggagtgatgaagcatttggctaggcagacagtctccatccccatctactgtccgtcttgttcttgtatgagctgcagcatcagccattttcatgtctaagctgacattcttgtaacttgagaattattaaggagggaataagtaagtttttatagaatttcttttttttaataaaaaaactacagagtgcgtttgtaacgtacagtgcgagagtaaaagaaatcaaaacagcacat

SEQ ID NO: 4086 - DNA, 2079 bp, Zea Mays
gccaaattaaaactttcggaacgaaacgagggaaaggcaacaacacacatttggcgcgccctctgcggtgtatcaaaacaaacaaaccgcatcgtcgctttcctcgcctctctttccgttttccttcctcgtcgcggtcgtgggtcacttgccgccgcgccggcaacgtccccttcccatccccagccacgcataaatcaatcgatgcattggtccttggcacgacttgattcctgattccctctgctgttctccacccgctctctctctttcgcgtggcatttcttcctgccagcgacgaattggcgcgcgccgccgccgccgtctgcccaggcccttcgcccacccaccagacagacgtgtataagcgagaggaaattatctgccggccattttcactgacagctggtggagtccgagagacctaaatagatgaagctgcatcaagtttggcagttaggcgttaaggatatgaaggccgttccacttccacgtccgagatcagctccaaaaagacccagggaattgaccgatgaggagagggcctcgcgtgttgtttttaggcagatcctaacaacacctcctgttctatccaagaattcaaaaatagctttcatgttcttgactccggggacattgccatttgaaagattatgggaaaagttctttgagggccatgaaggaaggtataccatatatattcatgcctcaagggagaagcctgaacatgtcagtcccatatttgttggtcgagagatacacagtgaaaaggtaacttggggtaaaatttctatggttgatgctgagaggaggttgatggcaaatgctctacaagatattgacaatcagcattttgttttgctatctgatagctgtgtacctttgcacagttttgattatgtatatgactacctgatgggtgcaaatctcagttttattgactgcttttatgatcctggaccacatggaaattttagatattcacaaaatatgttgcctgaggtcacagagactgattttagaaagggttcacagtggttctcagtcaaacgccaacatgcgttgatgattattgcagatagtctttactatactaagttcaagcttcattgcaggcctgggatggaagatggtcgcaactgctacgctgacgaacattatttgccaacagtattccgtatgatggacccagatggaattgctaattggtctgtaacccatgttgactggtctgaagggaagtggcatccaaaagcttaccgggcaaagcacgttaatttggagcttctgaagaatatagcatcaatcgacgtgagccaccatgtcactagtgatggcaagaaagtggtcacagagaacccctgcctatggaatggagcaaagaggccatgctacctgtttgcgaggaagttctaccctgaatccataaacaatctcttgaccttgttcgcgaattacacacttatttgagcttctaggtgacgcttagaggctacagggaatattttgttatagaaatccttgtacattggttaggaacataataggagattaattaacaggatagcagttggtgaggagaaggctttcggctttcgctgcagcaacacagtggcttcggatataccacaactggtcattgctactcctttagcctcgtgttgctttcatagtttcttctacccacatttttagctgcggcgttttaccatgtacatcaagctttgtttttacaaggaatggtcattcaataggaaaatctgagatcatggtcttgtatttgccctcaagttctcggttctgactgccaaagcacggttcaaagggatacatggaaaattttactttataggaaacaaatcctacgagttcctgcacgagtcctttgctgcgaagagatccaagactgaccacacgatgcttcaagtagatgatagagaagcgtcatgagctgcctggtctcgatgttcaggtcccactgccccagcccttccactgtcttcccagcacactgctatttggtttatttaggaccagcttggaaactcaaatccttctggaattcgaaattggagattg

SEQ ID NO: 4087 - DNA, 2031 bp, Zea Mays
ggaagtcaggaagtgggaagtagtagctgagggagccagaggttcgcgcggagcaatggagctctttaatagcttcggcgcattcaccgctttaatggccacttcttccaacgcctctgtcccggcttccacgcgttctcagtgagggctagggtttgcccgcgccgcgtcgctcggcaaggaggaggacagggtgcgctgccgtcggcggcggaggcgcggagctcgttcgtcgccgtcgcgcccccctggcatcgctggttgtctagaggaagaagatgattgtgggctcttcccagcagcagctgctgctgcagaggaaggggaagcccgtggctggcaagggagcggcctccatgaccgtgaaggcagagaaggtggtggtcgcggtaagggcagccacgagggagatctccaagacagccgtcatctgggcgctcacgcatgtcgtgcagcccggcggaagcatcatactcctcgtcgtcatcccggcacagagctctggcagaaaattctggggttttccactgtttgccggagactgtgcaagtggccataagtctatggtggatcagaaatgtgatttatcagagttgtgttctcaaatgttgaagaaattggatgtgtatgatattgacatgataaatgtaatgtataagcttgtttccggctctccttctggtgttgttgctgctgagtgtaagcaagcacaagcaagctgggttgtgctagacaagtaatgggatttgaagcacgaggagaagcgttgtgtggaggagcttcagtgcaacattgttgttatgaagcgttctcagcctaaagtccttcggcttaatcttgtgggatctcctgataaagagtctaaagcaacatgtgcagttccacctgtgttagattgttctagtggtaaaactgcaactgatgttaaggaggcacgaagttcaattcgaggacctgctgtaaccccaaatagcagcccagacctggatacacctttcagaagtactgaagcgggaacttcctctgtctcaagttcagaccctggggcatctccattttctgcttctgaaataaatggttctctgaagaaagaggtactagcaacaaaggataaaattcagcattcagatgtcaatatttctgattcggacagtgaaacattgagccctccagcaaatttctcttttcagccatggatgtctgatattctacagggatcagcatcctcaaggtcgcttggaaaagttccacggaaaactcgtactgcaactgcagatgttttgttggaaaagatttccaagctggatctcctgaatgaaattagtgctatgagaagcaggtcagacttaaacttccgcggagatgtcagggatgctgtctcattggcaaggaatgcacctcctggaccacctccactttgttcaatatgtcagcacaaggcacctgttttcggaaagccacctcggtggtttagttatgctgaactggagcttgcaactggtggtttctcccaagcaaatttcttagctgaaggtggatttggttctgttcatcaaggtgtccttcctgatgggcaggctatcgctgttaagcaacacaagcttgctagttctcagggtgatgttgaattctgctcagaggtggaagttcttagttgtgcacaacatcgaaatgttgtaatgctgattggtttttgtgttgaggacagaaggcgtttattggtttacgagtacatctgcaatagatctttggactcacatctctatgctattcttgaaatatcattcaggtcgtaatagagaaacattggagtggactgcacggcataagattgcagttggtgctgctcgtgggctgcggtacctccacgaggaatgtagggttggctgcataatccatcgtgacatgagaccaaacaacatccttgtcacacatgatttcgagccactggtacagtcctactttgctgattgtggtgtaaagttgactatttgttcttgtgcatttgacattaggcacctttccatatag

SEQ ID NO: 4088 - DNA, 4268 bp, Zea Mays
tcaggcaggcaggcaacgcccaccccccacagaggagagagagagagaaagaggcagcagagcacataaccaaacgacacccatccgaaaaccccgaaaggaggagggaaaagggtgagagaaaaccacgcagtcgcttgtccagacaaaacaagaacaagaacccaccagtacgcacttcctcctcctcctcctcctctctgcctctctctcctccctccctccgccagtccgctcccccctggcccatcagatccaattccttcccccgacccccgtcccggatccgccgcaattccttcctgcgtcgagctcgactgctccctctccctgcccgcaagaatcccgccgtggccggcggcttagtgggactcccaagtcgaagccaaggctggtggggggcgcgctcctgccgggcgtagcgggccatgggcgcgctgttgccgttcgtgcgtcgggtaaccagggccgtcaggctcagtccgctgcagcgcagcgccgaggatcggtgaggtaatttctcgtgaacgcattccgctattgactgctcgccctgtcgagcagattgagctatccaatatccatttagctcgacacagtgaagaactgaagatacacattgggcttgcttgtgttccgtctctctcaaacatcctgttggtgtgctgtgaaggtctgaaggtcacataatccacttggctatatgccggggtgggtaatgtgagtcgggcttgataaatgcagacttgttaacttgttttgcaacaagaatgggggcaaaagtagaacgggaaagttatatgcctggatattatgccacgggggatctcaatttggaaccaaatggtagatggtctccatactatgaggagatgacatcaaatgatcagttatgcaatggcttcacaacaaaaccaacaaatgactattcagaatttgacaaagaaatactcaagcatcaaatacttgaacatgaagctgtgtttagacaacagcctcacaacccactcgctatccaggtgtatgaactgcaccgagtttacaaaatacagaaggatatgatgaaacaacatcaaagcaaagaggtatattcatacccaactttggcagttgcatcacatacaaattcaccatcacaagtgccacaaaacggtgcaaagatgatgtggcagatgccagttcctccaatgtccacaacatacaggaaagctattggagagcataatgatacaaaccagtcctccatgaagttccttagagaaggcagtgtgcagtcctcaccaaatggatttatatcaagtgatgttggtccaagaagcagacaaggcacttttgaccttcaacttccagctgatcattatatagatgacgatggcacatcagataacaagcccatagatttccttggtttggcatcagatacaaaaccccggaatgatgctgagcttacattagttagtgcagaaggcttgggcaagttcagtgataatagttcatcctcgggtttgcagactacaaataatcttggaccccggcaggttaccgacctgaatgaatcaaatactggcttccatatgggtagagcaaatggatcagtttccagaggccttccgcgtacccttgagaactcatggaaccaaccaatattgagagcaaacacaactaatttcagtttcagtaaaaaacactccaaagaaaagcacacagatgaaggtacaagctcaaatttctttgacacaagtgtgaaaacaatacatgacgacaaaccatcaatcaataaaggtaaacaagtcagcagtgtaacttttttagcacccagatataatgatgctgaccccccaaaatacttcaaagctgttgatgggaggcctgccactgccagttataaccactttgtttaccaaggtcagaatagttcagttggatggattgcacaaagtcctctggaaccttctgttatcaataattttgctagagttgaccgtccacatcatttgaatatgggtacatttactgcccccgtctctattcctcaaatagacaatccttcaattgtctccccgatgggttcttgcacagcagacccaaggagcagcgttatcaataatcctgctttaattccaagattcaatgggttctcaactgtgaattcgtacaccagtcttagtgctgtgacgcagagcattggaacttcaatcccaaagctgataaatgtggataatgtagataaacgctatcgtggttttccacttgattcgttttccgtgtctcactcacgacatcaggtagcagtttcaagtaacctggagcaaaagaattcccagaagttggaagattcagatcaacagtcccatggcaagggtatgaagaacttcaatttgaatgagacactgtcagattgtcaggaagatggtcttgtagaacaagatgggagatgtgcttccagttttcagcatgataaagatggggggtcagtacttgggatctcttggctcaaaaaaaaacttatgtctgctgacccaacagctgtggagaagccagggaagatttttggacattcattgggaactgcaatagagctgaaaaatactaaagaccagaatgaaccagctgtgactattcggaatttgtcagattctgcttctacatctgttggctgtgcaattaagaaggataggccttcggataacattgttaccggaactctgcctgtctgtaataaagcccaagagggtgctacatgtttacctctttcgtgccagaagcatgtgcctaaagatggacaagccgctgaaggagccaccaagaaaagtggcgcccccatcaggaacttcatcgatctcaatgatgatgtaccaaatgatgacaattctgaggaatcagtagtgtcacacgaatgccacgtggaaccttcacggaacaaccatcctaaacgagcatttgtgattgatttagaggtgccggcctgtgaagaggacgcttcgtgggatattgatcaagaatgcgcgcagccgaaacctgatgcgtaccaggaagttgacgacggatctgatacatccgctctagctgcagccgagaacatcgtagcgttgtcaaggaatacgccaacagccgcagaggcatcggacgatacgttgcagtggtttgcagatctcgctgtattaaacatcaacgaccttgctgagcaagctgaactccaagcttgtacgaatgattccagtaactacgagtcggattcattcgagtccttgacactgaagctggaagagaccaagatcgacgatctctggagcaggccactggaacctgaaaccgcaaccgatgaacagacagtttcagctgctcaccttctcaccaagcccagaaggggccagcaaaggagacggcggcagaagcgagatttccagagagatgtcttgcctggcctttcgtcgctttcccggcctgagatcacagaggacgtccagttgctcgaggggttagtccaggcttccgggggatcctgggagtcgagcttgactaggcgaggacgttgtggtgggcgtgctagaggcaggaaacctcggaaaactgtagtaaccgtaattgtagaggaggaggaagaggaggaggtagaggttagcccaccgccaaaacctgctggcactggggaattggaagccgatggcaggggtatgatcgggtggggcagaacaacaaggcggtgtcgcagagcgagatgtccgtcaggtaacagcatggctactgcgtcttgagtgggagggtatttcttggcagcaagcattggacctgattaggtactgggtggttcacaattgttgtattgactccgatggatgggctggtggtataaggtgatcacactcatatgagtgtcggcctactggtctcagcacaactttcgtgcttttgggtcgaaacatggtttacgttcttataataagttcggtaaattagctggcgagacatttctgcgacagcattgtactaagctgttccaggttatgaggcccggtgccccggtatatattcattgtgagaaaaactgcaatgcatgtaaaccaccttgatctctgaagaatagctcatcacatgtgtaacaaaagggtgtgaatgaggctctgagcctgtattctttttgtagctgtatgccctgcctaattggcgctagtatccagcatgcgaattgctaatttagttttataccgtggatattgctcatatcgtgtcccaacgcttttcttccctatgggaatgcatatgccact

SEQ ID NO: 4089 - DNA, 3199 bp, Zea Mays
gtatcaccccacctcgtctcgtcgcctaccctcccaacccgcattcgcggcgcgggcgccttggaaccctagtcacccgcgccccccctccactgtccactcaacccccgtcccctccctcggcggcggcggcatcggcgtcaaccaagatgtcgggcggcttcttccgggggacgtccgctgaccaggacacgcgcttctcgaataagcaagccaagctgctcaagacgcaaaagttcgcgcccgagcttgaccatctggtggatacgtcaaaggtaaagatggacgtgatgaagccctggattgctaagcgggtcactgagctccttgggttcgaggacgaagttctcatcaacttcatttatggcctcctcgaggagaaggaagccgatggaaagaagattcagatccagctgacagggttcatggagaagaacacagtgaagttcatgagggagctctggaccctccttctcagtgcacagcagaatgccagtggggtgcctcaacagtttctggatgaaaaagaggctgagatacagcagaaaaaggcagaggatgataggattgcacaggagattcaaaagaagcgagagatggaggaaaatgattcagaactggtaaagaacaaagtgatggatggggatgctggtaactcaagatcctatggcgatccagttggctctgctttaaatagtacaaatttcaataccgaggaagaaaagaacaatgatttcaagcgtagcttaagagcaaagaacaggggaagtcgcagatccaggagcatatctttgtcgccacgtgctaggcaaagatccatctctcctagaaataattctcgttctcctcctaggcgttcccactctattgatagacaccatagatcatcatggcgttcaacttcacctagacgttctatttctccccgaaggcattctccaagaagtaccccttcaatttctagaaggagatcaccttactcaaggagagggtcgccttccttgtcaagatatccatccccatttacacgccggagatctcctcttcgcagaaaatcaccatcatctgggccactaaggtcactttctcctcgccatcgccgctcaccagctcgtgtaccaaggaggtcaccatctcctgcaagtcgaaggtctcctgttcgacgcagattctcaccaggtagacgtacatctccatctccagtaaggcgcaggccaaggtctccatcacctgggaggcgtaggccaaggtctccatcacctgggaggcgtaggccaaggtccccatccccaagaaggcgtaggccaaggtccccatccccaggaaggcgcaggccacggtccccatccccaggaaggcgcaggctacggtccccatctccaggaaggcgcaggccacggtccccatccccaggaaggcgcaggccacggtccccatccccaggaaggcgcaggccacggtccccatccccaggaagacgcagaccacgatccccatcgcctggaaggcgcaggccatggtctcggtctccaataagacgtcagtccccatctccaaaacgccagaggacatcaccaagttcaccgaagactcgttctgcaaatcgacctttatcgccagagggaaggaggagtaccagtccgtacaatagcaggagtcctaatcgctctcgccagagtttaagtaaagatactgagaaagaaacaaatggcaccccttccgttaaggacagagttgtgcactcaagggggcaagaacaaaaatcagatgataataatagggatggtgcaaggattgttggcaataattccccagattctgagcatagattgtcaaagtccttgaggcctcctaactatgaagaaaggaattccacacgtgacagttcttacaagaactcagacaaacctatacctagtcagggcagcacagatacaagtggagatgaggaacacagtcgtgctagagaaaatgcccggaaagcaaattcatgtcgtaggaaaacaaaggatctctcggcaggtctgcaacctaagaaaatcagtgctggtgactcaagccccagagacaaatctccattcattttacaacagagtggcaaggtcgtccaaaagaaacaccccgatcaattgtcagaatcatcagaagatgagcttgctggtagaagaacaaagcatcaaactgattcacctgatgattctcgtcgaaaacagcattccccgactagaattgaaaatgatgagtcttattcaaagggtggtagaaacagtgagcatgtcatgagaggtttgcgtgatgattctgatgatgctattgatacaaagaaatatttgtctaaagtcaatgaggactcccaatcggacgatggaagtcctttgaaaaaaactaagaaaaaaacagatggtaataggcacattgattctggtagttcagggtctgaagagcctgacaaacatagaacccactcggagaagcgaaggcacaagaaaactcataagcataagaaacagtatgatgatagttccgagtctgattctgagccagatggcaaagacgcaaagaggaggaggaggaaggaagagaagaggctaagaaaagaggaaagacgtcgaagacgtgaagaacgacaccgcagaagggcagaacgccatgccagcaaacgaaaattaaagaacaccgatactgttacaatgccttcagactctgagaaggatcgggattctgattcagatggtgatgttaggaaaagagtttcaaacgctggaagagaagagtctgatcagaagaaactagaaattgaactccgtgagaaggcccttgaatctcttagagcaaagaaagccatcaacaactagactgagaatttttttgtgacacatttgagtttctattttcaagtggaagtgtccttatatgatactatttaatgttctgtgtgtttatgtggcagttgatctgatgattcctgagctgtttacttgatgcagctgaattcaggcttagcagccagttatctggtaatgtttgcttctacagatttgtacgcgaaccataaccctgaaaaggatatgttttgttatattagctccatgtgcacaagctttttatgttcctcaggatgatatgatcaacgcctcaacaaaaacaagttggtaacatattgattggaaaatctgctaaagcattccttcttagtttc

SEQ ID NO: 4090 - DNA, 1545 bp, Zea Mays
cgagtggatgggaccggcccatgcccacccagactagctgagtcgcacccgtccatctccctcgccgcgtaaaccccccccggctcgttcgactgccgactcggccgcgctcgcctctgttcaatcaccggcgacggaggacgccgaggaggctcttcgccgccgagtccatttctgcgagatccccgccgagcaagaagcgcagcaccgcgtctgcctgcaccagcgggtggccggccgcgtctccttccgagtcccgagcgcctgccgccaaacttctgacgagtgtcagtgacatcgggtcgggttcgctggagaactgaggggggcttgccgccgacgcgatgaacgcctccgcaatcccgtcccccgcaggggtacgggaggccggttcttcacgggcttcaccaaactgtgcaagggcctcgccgtcatcatcttcctcgtccacattttggtccacctcttcccttcagccgccacctatctcacgctgataccagccaggtgataatgagcatagttggtcttcttctactcgggaaggtgttggagcctttatggggagctaaagagttgctcaagtttatttttattgttaatctctcaacttcagcttgtgtcttcgtaactactattgtgctgtactacataacacaggaggagacctacctttacacacctgtttctggattttatggagttctttcaggactactggtgggcatcaagcaaattttacccgatcaggagcttaacctttttgtgctcaagattagtgcaaagtggattccatctattgttgcatttacctctgttgttgtgagcttcttcgtaaaggaatcgatatcatacctccccatcatattatttggcatctacatgagctggatttacctgcgttacttccaaaggagtttggaagtaggccttaaaggggacccaagtgatgaattctcattttcaagcttcttccctgtatttttaaggccagttttggaccctattgcttctatattccacaaacttttctgtggacgatctgcaaaacctgaaggcacaggccagacactggatgggtcacagttccctggtttaggctccattgaggcaaacaggaggagagaaaggggtcagagggcactagagcagaggctggcagagaagccggccgcggtcaggaatactgagggcacgcctccgccgaagcagcagctggaggacgcggaggatgatgcttctgacgaagtctgagcccttctgttttcagttggtggaattcgctggcaggagatccttgtcaagttttcgacccgcagtacacagtagctcatggcatggagattgtaacgaagcagtgcaaccgggcaagaaggcaaatgcgacacgcatgctcgaaccagttcttgcaagacagcgagtagtgtttttttttttgttgttaatgggtgtttcgtgtcgtgctcagtacccaactcttgccaaatgctttacattgtttcatgtgctacctgaccgaaacgctacgctgctagtgctacgcgc

SEQ ID NO: 4091 - DNA, 2245 bp, Zea Mays
caaatttcggcgagacgggcggtgacacagcgcctcatctcgatctccctcccggctccccgacctttgtaaaccctaaaaatcaatctagttcgcaccaaatcgatcgcgcctcagctcaaaatccgaaacggttcgaacgatcagaacgattcagcttcagctcctgaatccagcagcaatggatcgctcccgctccaagcgcggctaccactacgaccaggactccccgccgccccgctccaagcagcgcttcgaccgccgcagcggtggcggccagaatgctaactcgagctatcaccgccgcggccccctcggcggcggcggctccgaccgccgcgggttcctgccccctgcccccgcgccgcccccgcccccgcccccaccgccgcttcctccctcgtcggccacggcgggtggcggcgctggtcccaccaccaccaccacctccttccgcatcctgtgccccgagtgcaaggcctacggcttcccacccggcttcgttgccaaggtccgggacgacagcggcgcgcttgtcactgtgcacccgcccttcgcgggcgactacgtccgggtcatcgagacggtggacggcgcgaggcgcgaggcagacggccgcccgcccatgttctccccggcccaagaggcccttctcatggtgcaccgccggattctcgagaccgacgctgacgacggcgacgaggatggcgagtatgggcccaggggcaaggactccagggacagggggaagaccaccacacgactcatcgtgcccaagatgcacgtcggatgcttgctcggcaaaggtgggaagatcatagagcaaatgaggatggagaccaagacgcacattaggatcctgccgcgtgaccagcacactccgcgctgcgtttccttgtccgaggaggttgtacaggttgttggagatggaaattgtgttaagaaggctgtagcaataatcactgatcgcctaaaggaaagcttacaccgtgaccgtggtcccttccgtgggcgaatgaattcaccagagcctcgaatttctcaggaagatgattatttgggtgtttcgcagatgcctgcatacgaggaatctctgggacgatctgatcagattaggaacaacactagcatggagccaccaggatatgagtttgattcaaatgatggcaaggtgattgaacatccagatatcctgtacgatgacataatttttcgaattctatgcccaaatgacaaggttgacaatttagttgcaacaaatgatggaatactggagatgctacaggctgatgttggtgttgatgttagactatctgatattattgctggttctgatgaaagggtagtaatcatcacatctagagagggaccagaccatgagcttttcccagctcaggaagcagtgctgcacattcaaactcatattgtagacctcggcccagacaaggataacattatcacaacaagactacttgtaccttcaagtgaaattgcttgctttgatggaagggaggggtcattatctgatatacagcgacagactagtgcaaacgtgcagatattaccaaaagaagatcttccattatgcgctttagagtcagatgaactcatacaggatagtggaggcagtgcaagtggctcatttgatcaaggcagcaacattattgatgagatcagacaaggtgctacaaaaagatttgccgttcctctagtaactaggagcacactagaagttgtcataccaaatagtgctgttgcaagcctcaccatgagagctggtagcaagcttgctcaaataagcgagatctctggtgctactgtaacgctagctgaggacagacctgacatcttagagaaagttgttcgaatatctggtacccctgagcaggctagcaaagctgagaatttgctgcagggatttattctaagcattccagatgacattccttcaggctagttgaagacactctgcatgtcatagttgttagttcgtaaaattcctgtgtatattcgaggtagaatatgctgatgtcatgtgattatttgtttaattgagcagcatgtattcatgtgtggatacatgctgttttccttgtagccgttaactggctgacgggggtgtaagattagcatgtgaatttacagattgattcaacattcaattctcatgtccatatgtgaccgctgaacatgaaacctccaacttatttaattctcagtctggtgcttagctgtgaaaacagta

SEQ ID NO: 4092 - DNA, 2847 bp, Zea Mays
tctccctctacccattctgggttttcctctacaccacaacgctacgaaactcttcatccatttgatccacatcaaacggctgatagggcccctcctatctctcctacatcttctccactcccctggattgagttggacaacttggcgcttcacctcgctcgctgctctcctctcagtcctctggttctccgtcctctcgcctcgcgcggccgcgcctgcgcctcgtcagcaagataaggctgcagcctgcaggccacagtgcaggcccatgcttccagaatcttccggaaccttgcgccgagcctgaactccccggcggcgcctggccctgtgaaggctgcatgagtagtcgcgccgccgccgccgccgcagcggagccatggggatgctcgccgccgccgttgcccccgctctcctcgcctcgccacaggcatccctcgtccgccgccgcctctccggtgcgtggacgctgcgcctgaagcccgctgctgcctcccacggcgtcgcggcgctcagggtacataattttctcccaaagtgttacattaccaacgttgaggttgatgttagtactgtaaataaagaagaaactttcgatgatcatccatcattggcaccaggacgcaacattccgcttgttaatcttcgaggagatattctagattctagtccttttccgctgcacgatagggcttcctgtccttcaggttttgaagagttgccggtcttgtctgaaggagagcaacatactttggcatccactcctgctcatcctgctggactatatgctctatatgctagttacttatttggtaacttggtggaacaactgtggaattttgcttggcctgccacactggcaattcttcatccaaatctattgcctgtggccattgttggtttcttcacgaagctttcagtgtttgttggggctcccatagttggcaaacttatggatcatttcccccgaatacccatgtacacagcattgaatgctgtgcaggtaggcactcagttgatatcagctgcaactgtcatctatgctctaagaaacctgagccatgcttctacaacagctgtggttctgagaccttggttcattgcactagtggcagctggagctatcgaaaggcttgcaggattggcgctaggagtttccatggagcgcgactgggttgtgttgttagcaggaacaaacaggcctgttgcattagctcaagctaatgctgtgctcaatcgacttgatctagtttgtgagacagttggtgcttctgtttttggccttcttttgtccaaataccatcctgtgacctgtttaaagattgctagtggtctaatgatatgcagtttccctgttctggtcatgttgggtcaactaatcaatagagtttcttgccatgcacttgattcctctagaactgccactgatgaatctatttgtgctgatcttttagatgtacgcaggatagttccaaatagcttgagggctatcaaacatggatggaatgagtataagcagcaaacagttctacctgcaagtgcagctaccgtgttcctaaatttcaatgttgcacttgctccaggtgccataatgactgcattattgatgcatcgtggtaccagtccatccattgttggtgctttcagtggattgtgctctatcatgggccttgttgcaacattcatctcctcaagcctggtgaaaagagttggaattctaaaggcgggagctgctggattgatatttcaagcttcactcttgtcaatcgcgctcacagtgtattgggctggttcaatttcgcaaacgacacctctacttatattcctagcatccattgcattgtcgcggttggggcacatgtcttatgatgttgtggggactcaaattgtccagacaggtgttcctgcttcaaaagcaaatctaattggaggaatggaggtttcaattgcaagccttgcggagctagtcatgcttgctatggctataattgcgaatgatgtctcccatttcggcttcctggcgatcctgtctgtgtcatcagttgctggggcagcatggatgttctgtcggtggttaacaaatccaacagatgagcagagggaactattcatggttgatcccctttatcaagttcaggcaatgtaagtactggtttttgtatctttgctgttactttattaggaaatccgggatcagaagtttttgaacttctaattgacaagggatatttgtatgtctctcaatcttattctttggcaggatatttgcatccctgatttccagtttagctattatctaaatggaaactactattattaatgtccagacataaaatattaatcactcgtaacgtaataagatgttacctcacgttttgcagatagtggatgaggcaggaaacaaccaggaaaactgcaggcgcctacttgctggtggtgcttgttggatctgcaataccgttacgatgatactaagatacagtgtgacatttaggttcaatacgggatacacttagggtagaagcatttgctcctcgtggcctcagccatgcgcagaattcaatttgtatactcgttcatctcctcacctgtacaacacatatttgatctgtataagtgttacttgttatagctgatgtagaacaacattaacagccatcggtagcacacagtcaatgaaatctaaccccctcacctttcctctgatgctgcaaatgtgtaactgtatcttttattggatccactgtcttctttctcctgtcatcttggttccttgttaggcatgtacatccctgaacctcttacacatagacagtacatcaagcataagacataattaaaaaaaac

SEQ ID NO: 4093 - DNA, 1785 bp, Zea Mays
aagaaacatcaagcattgaggccaaggatgaactaatatgatgggcatctattttaagaagctcgattttcagacatcaactatcagttctaggatacagaagactctgaaaggccgcaagaaggtatcaacgacatatctgataactaaatatatgcaccaactgtaggaaaatagtaaaggaaggccctaaatgcccaaaattggccacaatatttcaccgtcaggtctacctactctgttatagtactgtccacactcaacagccgatctttgactgctttagttgcccctcctgttagtttaacaattctgttgagtgttgactccttccatgaattggtcacctagaaaaggtagtaaacatgtgaatgagtgggttgaagaggatgataattacctcaattatatttctgctttcataacttagtttactactttgtattaggtcaactttcagcctctgttaacaacacaattgaccaagagcggggatgagtagaagaggatgatcctggtgtgtatattactgttcgagcattgcatggtagcatcagagaactacgtaacgacgaggctgagcgacaattccagtgtcccaatgtgtgacccgagttcaactcctctttcgtcgacctcgagatcccaggtactatgacacacagctaccttctcgcaacgtgatgtgggatgaattttgacctgtaggttgaataagtgaagtggatgagtcagaaagtggaggagacagtgtgcaggagcagcctgtttatgtggccgtagtggatctcgcatcctgtttgtgagcttggtattcctcctgaaaacatcactgcaaaccaattgttatttggcacattgggggagtacgccggatttgatcccacagagcccacttcacgcagtgggggtaaagcaaaagcagtgcagcaaataaaacaggctcggcaacctggcggagcagactgtgtgccgccagagctagcggagggaggcgggtcattcgatttgccatgcttaggattggagaatcactagagtaatagtatatacatggtggggagtgaaaccaacagaggaagaatccgttcttgatcaaaattagtcggctgcttggttcgtcgtctgcgtgttcgatcggaggttggcgacgccttggcgtggccgctttccgcaagaaagcaaggaaattgtgctgaccgccgctaatgcgctggatatttctgggagtggaaacgaaagtgtactctgaatttcaagttcctgtcaaaagtaagatcctctgacgaaggtgtggttgtgatcatgcataaactaactgttgctgccacatggatcggagagggagatcgatccacagaagatggtatcatttgtcaagtgtatgttgggacttgatgctgttgtttgggacattattgggtcgtcattgttggagaaagttgtgtatctacttacagaattggatgttaatataacatgggaagatattcttcaagataaacacaacaaaggtatatttgacatggagcttgaggatttggctgaggatgaacataaccttggccgcacaagtgtggagacttgaattcatatatacttagttaggctcaatgttagcataaacagttgatgaacaagttttcccattagtattttagtttgaatttagagtacaattatgtatgagttatttgacaatgcttatttatgagatattgaatgatatttatctatattgtattaattatagtgttattaaatatatgtgtttgtatttttctc

SEQ ID NO: 4094 - DNA, 2119 bp, Zea Mays
gcgcactgcactcttctctgcagtctgcacatctccgggaagccaaacccgagcgtcctgactcctgagttcctgaccaaacaatcccagtactgcgattcgctcgggatcgtctgcaggccccaccggccgatccatccccccgtaaggccgtaaaccgtaaccttccgccgatcgcttcaatggccgtggcctcggccgcgcggacggcaacaccggcgtcgccggcgcgactggggtcgctgtggtcgacgctggaggaccagcgcggggcggcggtgccgctgctctcctcggcctggaccctgccgacgacctcccagggcggcatcgccggggacggggagcagctgcccaaggagggcctgctccggcgggctggcggcgttgttgcccgctggtggggggcggcgtgcggcgcggtggcggagctgtgggccttcgcgcgggccgatccgcggaagcccgtgttcgcggggaaggttgcgctcgcgctcgccctcatctcgctgctcgtcttcctccgggagccgcgcgacatcgtcagccactccgtctgggcaatcctcaccgtcgtcgtcgtcttcgagttcagcatcggtgcaaccttaagcaaagggtttaatcggggattggggacactaaccgcaggagcttttgctctagtagttgcagaattgtccaaacacctgggaaaactggaggaagttattcttataacaagcatccttattgttgcctttttcacaacattgacaaagctacatccgaagatgaagccgtatgatcttggaatcaatgtaggcatctacccaatctgggcgggagaggatttgcataacttgatagcaaagaatttcactggtgttgcaaaatccttggaaggttgtgttgatggatatctgagatgcatggaatatgaaaggattccttcaaaaatacttgtgtatcaagcatctgatgatcctgtatatagtgggtacagggcagctgttgaggcatcagcacaggaagaaaccctgcttggctttgctatatgggagccaccccatgggccttacaaaacaatgaactatccttggaggagcttcaccaaagttagtggagcattgaggcactgttcctttgcagtaatggcattacatggttgcattctttcagaaattcaggcaccaccagaaagcagaagagtattttctgcagagattcaaagagtgggacaggaaggagctaaagtattgcgcgagctcggaagcagagttaagacaatgaccaagctgagttcttcaggtattctgttcgaagtgcacatggcagctgaagagctgcaaaaaaagattgatgagaagtcatatcttctggtgaacactgaacgatgggatgctagcaagcaagctcaaggaatcaaagaagttgtaaatggtacccgtgctgtggaaacggaaaacaagaacaaagaaaacaaggatgatggcaccagtgctgtcgaaaaagaaaacaaatccaaagaaaacaacaatggagggctggaacctaccatagttgatcaaactttagtgcatcagtcaaagagctttcttgcaaattcatttctgagcagatatgattcagcgtcaacaattgacggttttaagccagcactttcttggcctgctcgtaaatcattccatccaaacataccacttgaagatgaggattcccaaacatatgaaagcgcgagtgccttgtccttggctacatttgcatcactcctgattgagtttgttgccagactacagaatgttgttaacgcatttgaagagttgagtgagaaggctaactttaaggatcctgtggtggagcctactgcagttagcacaagtaatgttaggtttctcgataaactgtgcaaatttgtaggtttctagagttgacacggatcctgtgaaggctaactctaaggatcctgttttggcatccagtttccctttttaaaattaatttgggggtacggaatgtacactaaacttgtaaatgtgcaatcagatgattgcaagttgtattgctggagttcagtttacagctacagaaatcatcaatctggtaaatgttgatctctgcatctgctcaaaaaaaaaaa

SEQ ID NO: 4095 - DNA, 2442 bp, Zea Mays
ctcagaccggcaagcaccaagcacagaggatagccgcgctcacctcctcagtccccacacgccctaggcgctggcgctgcaagctcgggcagtcgagccgagcgctccctgctcggcggacgctggccgtggctcgccctcgctgtgccgacacgccggcaaccatctcccctccagggccaaagtgagctccagggaaaaaaaaagagcaccatggagaaaggggacgtgctggtggacctggacaagctccctatgaagcgccttgaggccatcgacgagactggcaacgagcactacccaccggacactagcaacgaggagcagcggctcgcggccatccgccggattgacttctcttgggtcatagagaaggatgcaaagaaggccaagaaggcggctgaggctgatactacccagcaggcatggccctggcagggccttatggagagcctgcagcaggcacatcaggagctctccgtcgtcatagacctcatcggcacggttgaggctaatgacgccatggcagtcgcctcgacaacgaagcccaagtcacagccaaacgaaatactagttgacatggcagtgtgtgctgccaccaagctccagtgccttaggcatttgtcacggtacttcaaacaatctgctacgacaatggagcaacagttccaaaaggagactaggttctacagctccttaataagattacagcagaactggaaagtgaagcggcagcggtctgttgggagtccaggaagtgagggcttcatgtttgatctagttgatacttctcagctagacacaacaacaatgcctcgattatcaccattatctttgattccaattgatcaagactcttcaggcactttgtctgtacaaattccacagaagtgtttccattccttgagccttcgatttcatggagacatagccaataatgcagaaagcagtgctgtcaaaaggaaagaaggcacattaaccaacactactaccggagccgaaaatgatgttttggagaacgatgatgtcaataagtctactgaacatgcacattccatcttgcgcgacatccataagtccatatttgaggagcaggtttttgatatggtgatccaggagacatttatccaatctcaaggcatcaatgttactggaatgtgcgaagattttctccaattagcgattggtcaggaatgttctttgtgcctttcgcatgatctctctgggcagaataataactcggggacagtagggcaggaagatcatatggatatagatcatactggaaatcttgcagtagccactgtaaatgggaaggagtcttcaaataaggatgtgagagggtttcctaaccccaaaagcttagaaatttacctgctacatgtgttccatgaaggcatccttagaaaactcagggagaaatctcgtcatgtggttcggtaccagagttctgctcagggtacacctgacgagtgtggcctgctaagtcatttttgcatgacagtgtctcacaggatattttctagcaaagtacatttggagcttgaaagtgtggttagtagggttccttatctccatctgtgttcccttcctacatggcattctcgaacgtcctcctggtctctctgcctgaaagttcctcagcctatcctggccactgatcgagtcagaaggccttcagactacagtgagttgaagtgcaaatccaggtcacagttcggtacaaaggtgatcttgaaagatggacagattagtttaatgggcgagggctctccaagcattgctggatcgttagctgggaagccatccgatggacgcctggtaaatagttacaattgtgacttggaagatctcccaatgatgcttctgcagcaggttgccagccaagtaatccactggctccacgatgaagcggtggtccttgggatgaacgcgacaatagatttcctgtgcctgtacttggaccttgaccaaggtgaaacactaggcctggtggcacacgttgacccggatgacacctacggctgcgtctcatggtacctcactcttgatcatcacccaacggaggaagggaagatgtcagcgggtagtccggagctagaggagcgcaggtttttggggtacctttccccggaattgctttactctaccctgatggacctggtaaaactgtgcagcacaggtgtccaacgctgagactctgcccacggagtagtgggagtctcatgcgcggtaagtctcacggataggggtagtaatgggccttaaaattttgcactgtgaaatttaagaattagatcagattaggatataatcatcaaactctatctttatccattttaaactaaattagttaagaagtcaaacactttggatctgggatccgttaccaatcatctctactcgctgccctcctccaagtccagagaaacgtgcaagtgc

SEQ ID NO: 4096 - DNA, 2500 bp, Zea Mays
ctcagaccggcaagcaccaagcacagaggatagccgcgctcacctcctcagtccccacacgccctaggcgctggcgctgcaagctcgggcagtcgagccgagcgctccctgctcggcggacgctggccgtggctcgccctcgctgtgccgacacgccggcaaccatctcccctccagatccgccactgatggttggctcaaacttatgaaaagagctagctaaggaaacagggccaaagtgagctccagggaaaaaaaaagagcaccatggagaaaggggacgtgctggtggacctggacaagctccctatgaagcgccttgaggccatcgacgagactggcaacgagcactacccaccggacactagcaacgaggagcagcggctcgcggccatccgccggattgacttctcttgggtcatagagaaggatgcaaagaaggccaagaaggcggctgaggctgatactacccagcaggcatggccctggcagggccttatggagagcctgcagcaggcacatcaggagctctccgtcgtcatagacctcatcggcacggttggttgaggctaatgacgccatggcagtcgcctcgacaacgaagcccaagtcacagccaaacgaaatactagttgacatggcagtgtgtgctgccaccaagctccagtgccttaggcatttgtcacggtacttcaaacaatctgctacgacaatggagcaacagttccaaaaggagactaggttctacagctccttaataagattacagcagaactggaaagtgaagcggcagcggtctgttgggagtccaggaagtgagggcttcatgtttgatctagttgatacttctcagctagacacaacaacaatgcctcgattatcaccattatctttgattccaattgatcaagactcttcaggcactttgtctgtacaaattccacagaagtgtttccattccttgagccttcgatttcatggagacatagccaataatgcagaaagcagtgctgtcaaaaggaaagaaggcacattaaccaacactactaccggagccgaaaatgatgttttggagaacgatgatgtcaataagtctactgaacatgcacattccatcttgcgcgacatccataagtccatatttgaggagcaggtttttgatatggtgatccaggagacatttatccaatctcaaggcatcaatgttactggaatgtgcgaagattttctccaattagcgattggtcaggaatgttctttgtgcctttcgcatgatctctctgggcagaataataactcggggacagtagggcaggaagatcatatggatatagatcatactggaaatcttgcagtagccactgtaaatgggaaggagtcttcaaataaggatgtgagagggtttcctaaccccaaaagcttagaaatttacctgctacatgtgttccatgaaggcatccttagaaaactcagggagaaatctcgtcatgtggttcggtaccagagttctgctcagggtacacctgacgagtgtggcctgctaagtcatttttgcatgacagtgtctcacaggatattttctagcaaagtacatttggagcttgaaagtgtggttagtagggttccttatctccatctgtgttcccttcctacatggcattctcgaacgtcctcctggtctctctgcctgaaagttcctcagcctatcctggccactgatcgagtcagaaggccttcagactacagtgagttgaagtgcaaatccaggtcacagttcggtacaaaggtgatcttgaaagatggacagattagtttaatgggcgagggctctccaagcattgctggatcgttagctgggaagccatccgatggacgcctggtaaatagttacaattgtgacttggaagatctcccaatgatgcttctgcagcaggttgccagccaagtaatccactggctccacgatgaagcggtggtccttgggatgaacgcgacaatagatttcctgtgcctgtacttggaccttgaccaaggtgaaacactaggcctggtggcacacgttgacccggatgacacctacggctgcgtctcatggtacctcactcttgatcatcacccaacggaggaagggaagatgtcagcgggtagtccggagctagaggagcgcaggtttttggggtacctttccccggaattgctttactctaccctgatggacctggtaaaactgtgcagcacaggtgtccaacgctgagactctgcccacggagtagtgggagtctcatgcgcggtaagtctcacggataggggtagtaatgggccttaaaattttgcactgtgaaatttaagaattagatcagattaggatataatcatcaaactctatctttatccattttaaactaaattagttaagaagtcaaacactttggatctgggatccgttaccaatcatctctactcgctgccctcctccaagtccagagaaacgtgcaagtgc

SEQ ID NO: 4097 - DNA, 2020 bp, Zea Mays
cctccctccatccttccctctcaggcacgcagctcgcgtggcattgcgttgcgcggcctgcttctctccggtctccaccgcgccgcgatcgacagcccggccagcgagctcctctcctccgccttctcctcttctaccgctcccgatcacgcggccgcgacatggaggacgacgaggggaagaagcagcaccaacggatcatccccaacgccaacggccacgtcatgatcgtggtccccgacgacgcgcacgcgcacgcgctgcccgcctccgcctccgctcctcctcgtgacgccgacggcccagacgaggagagcggggacgaggaggagcggacgccggcgggggccacgtcctcgctgtggcgagcagcggtgctggcgctcgcggcgctggcgctggcggcggcggcctacgcctgcctgtacgcgggtggggacgacgacgccggcgcggcctggcgcctcttggaggcgcggcggcaggaggacggcggcgacgacgagcacccgggcggccgcacgtccttcctgctgccgctctacccgaagccaccacgccgcggcggcgacgactggccgcagaattccacgttattcccgcactcgctcgccggcaacctcttcccggaagggctatactacaccgctatctctttgggcagtcctccaaggccttattttcttgacgtcgacactgggagccacacaacatgggtccagtgcgacgcgccgccatgcgcgagctgtgcaaagggagctcaccctttatataggcccgcaaggacggcggatgcacttcctgccagcgacccactttgtgaaggagcccagcatgagaacccaaaccagtgcgactatgagatcagctatgccgacggaagctcctccatgggcgtttatgtaagggacagtatgcaattcgtcggcgaagatggtgaaagggagaatgcagacattgtgtttgggtgcgggtacgaccagcagggagttcttttgaacgcactagaaaccaccgacggagttctcggcctgaccaacaaggcactgagccttcctacacagctagccagcagaggtatcatttccaatgcgttcggccactgcatgtcgacagatcccagcggtgctggtggttacttgtttcttggcgacgattacattcccaggtggggaatgacttgggtccctatccgcgatggtccagcagatgatgtacgcagagcccaagtcaagcagataaaccatggggatcaacagctcaatgcgcaagggaagttgactcaagtggtctttgacactgggtccacatacacatatttcccagacgaggcgcttacaagattgatatcttcgctgaaggaggctgcatccccaaggttcgtacaagatgactcggacaaaacacttcctttctgcatgaaatctgattttccagtgaggtctgtggaggatgtgaagcattttttcaagcccttgagtctgcaattcgagaaacggtttttcttctccaggaccttcaacatccgccccgaacattacttggtcatcagtatgtttctcttcgtgggaaattggttgcttacgacaacgataagaatgaggtcgggtgggttgatttcgactgcaccaaccctcgcaaacgaagcaggattccttccttcctgcgacgagcgttgcgcaaccaacttctgtaaatactggctactgtgagactggctatgcttgttcttattacagacgtgctattccgcgtctgaattctgaaactgccatggaaccctcctataatcgtcgctgtaatcgtgtggagggatgtaactacgaggtagtaaaaaagcggttacaggacaggaaatagtggaaaggtagataagcatagatagtatatagtcaaaagaggtcatgtttgctatgttgtagagatctctcactttttaagactaaagtggggaagcataatccatagcagttcatttaaaaaaattggctggagcactgccatgtcatagaggctggga

SEQ ID NO: 4098 - DNA, 3032 bp, Zea Mays
tagaaaattggactgattgaccgcaccgattccgcgatacgttcccgaatccaacccatcttcgtccgctccggccactcgtttcgccgccgtcggtcgccacccgcaaggtttggaggataagattcgggagggatggcttccggtgggcagccgcagttccggtacacgcagccgccgtcgaaggtgctccacctgcggaatctgccgtgggactgcactccagaggagctggtcgagctggggacccccttcggcaaggtcgtcaacaccaagtgcggcgtcggcgccaaccgcaatcaggcattcatcgaattcggcgaccaaaatcaagctattgccatgatatcatattacgcatcgtcaacagagccagcacaggtaagagggaaaaatgtgtaccttcagtactcaaatagacaggagattgtcaacaacaaggcaactggggaaggttcaggcaacgttttgcttgtgggaatggagggtgttgcaccagattctgtcagcattgatgttctacacgtgcaagccgttgtcacggagtatcatggcaggaagcatctggaacacatgattttagctccttattacagatctgcaagctaccaactcgagttatttgcatctgtatgttgattaaaagaattactttacaatcttctacatgatgattagattataattcttttgcaatcttttatgtgttaattacaagaactatcttgtgtttatcctccatagtgtcatttggttgacgcacctttaatacgctgttaaggcgagcttcaaaattggaacatgtggattatcagttcataaagaaacatctgtctgaacagtttaatgagtttcactcactttccactgtgaatattgtagatttgatcactttgttactggcgcatgaatgaatgcttgttagctgtgctcgtttctgatctctttctctagacaatccttacaaagcctagaaatgcattgattgatttgattctaatactttaataacagcttgatgtcacaattttacccaggagtgatgataaattcatctgcattatctgtactagcaggttgaaaggttttgaacatgtacagttgtgtgctagtctgctagtacccttgattcattgttattggttattgccgacaaaaactttattgtagttgtaagcttttctgtatgtttgtataaatattaattttgtttggcgtagagatcagacaacctttggctgccactttcaatttaagatcatttcactttccagatatattggtgcatgcatttggttttactataatgtttcacatgtggtattaacagttgacgtatgtgtgcacaggtattttctgctttcggatttgttcataagatcgctacctttgagaaagcatctggttatcaggctttgattcagttttctgatgctgaaactgcaacatctgcaaaagctgcactggatggtagatgcattcctagctatttgctaccagaactggatgtggcctgcactttgagaataacctattcagcacacagtgttctcaacgtcaagtatcagagccacaggagtagggacttcactaatccttaccttccttttctggactctgctaaagatggctctggaccggatggaaaaaaacaggaagcagagagcaatatactgcttgcttctattgagaacatgcaatatgttgttacaatagatgtgcttcatgaggtcttttcagcttttggatttgtacagaagattgctatttttgagaagaatggctttcaagcattgatccagtatccagacattcaaactgcgtatgcagcaaaagaagcactagaagggcacagcatctatgaaggtggctactgcaaactgcacctcacattttcacgccatactgagcttaatgttaaggttaacaatgagcgaggtagagattataccaaggggaatgccactccaagcagtgatcaaccttccattcttggtcctcagccaataccaagcgttggtgctgctattccaccagcacagggtagtgttccttctgcagccaccaattcagtaatgccaccaggggatccatcagttgctctaccttctaatccttccagtgagccactcctgcaagcacctgttgtttcctctggagggcctccgcattaccctaatcaggccatcctacaaggcccacttggtgttgttgcacggttcccaggctatggtgccctgcagtttgctcagggctcagctcaagctcaaatggtgcagccttcaggccaaggaagtcaacatatgtcaggtcatgtaaattatcagctacctccaggttcagcccaattcatgcagtatctcagcaacggaagccatccacttccaaacgcacctgggccacagacaatgccttaccctgccctcagtgggcagcagctacctccgggtcttcagatgatgcaagctcaaggttttggaggcctgccgttttcacagggtcctggacaaccaatgccacagttcccaatgtatggcacccagcagtttcctccgggtatggagcccaagatgatgcgcttctctgagcagggaggccagcagtttacatttgcgccgcggggtccaaatagtcgttagcaaatttgaacttagcaacgttagatcgttgatggtgatgaatggatgtcaagccttctatgttgctgttttctaaggtgaataccgatgctgttccattactaggatctatacttggtttatctctcgtactgtggccaaaacaaatgtctaatctgaggtttcgtagccttgtatttgtatcgatttcctcacgcccgcagcttctgcctgcactgtgttacattacggttatactgcagtagtggaagcaaatgtaaaagaaacctagagacctgatgtgccaggttgaaagcccgtagctgcaaactgtaggctcacatcgcgtccagttataaatttgtttgtgctatgttaagagtacaattgtacaaaccaaggtttaggagaacc

SEQ ID NO: 4099 - DNA, 694 bp, Zea Mays
tttttttcccttcttggtggttcactgaagctgctgaaggctgctggtctgtttgcgggatccatcttcctgatgcggaacttcggtgatctgatggccatttagtaggcttatcagcgttgtttacttggatcctatgagtgttgttttgatgttccaataattcctgctatgaatatgaaaggctattttgctccgaagaggactagatctgtgccgatagtgcttgatcttagactttgtagccatagagattagaccctttaatattcggcatgtaccgtggatattttggaacgatggtatcagtctgcacccataataatttttgatgggtcattaatattttaagagaagatgttgcaccgcagggcagggtctaagatgtcttaagatgcacaaaagtgtgctattaaaaatgagggcagtggtttttactggatgagtactgttcatcgtatgtccatggccagcatatattcacatgggattatgtgtcattgagcagagtaccaggatgggaatctgcttgctgaaaccctgttgcagccttgtgatggacacttgcatcagtttgcacaagaccgttaaagaaaagaggacaaaggggtgaagaacgatgataacagactgctgattggaggaagggagagaccgagagagcggatcctcccctgaaaaaactggtagacag

SEQ ID NO: 4100 - DNA, 1780 bp, Zea Mays
cccacggcccacggcaagtctcccgcgaagtcgcaagtctcccgcacgaaccacgacaaatgtcaaccccgattcctcgccgtcgctcatctcctctctcccatctctgctagggttaggtcgtctcggcaagtcgccatgatgcagcagcccccgcagccgcagccgggtatggcgctacctcctccccctcagaccggtggcgggcagccaccgcagtggggcgcgatcccgccgccgatgacgcagcagtacggcgcaccacctccgcagcagcctccagcgatgtggggccagcctccgtcgcaggcgcactacgggcaggcgccgccccctcagccgtattatgccgcgccgccggtgccggccgcccccgctgcggcggacgaggtcaggacgctctggatcggggacctgcagtactggatggacgataactatgtcttcgggtgcttttcgaacaccggcgaggttcaaaatgtgaagctcatccgcgacaagaattcaggacagcttcagggctatggttttgttgaatttacaagccgtgcagctgcagagcgagttcttcagacatataatggacaaatgatgccaaatgttgacttgacatttcggctgaactgggccagtgctggtgaaaagcgtgatgatactcctgactatactattttcgttggtgatttggctgcagatgttacagattacttgttacaagagacattcagggttcattatccctcggtgaagggtgcaaaagttgtgactgataaattgacaatgcgtaccaagggttatggatttgtgaaatttggcgatcctacagagcaagctcgtgcaatgactgaaatgaatggaatgccttgttcttccaggcctatgcgtattggtcctgcagcaagtagaaaaaatgcaggtggtgttgttcaagagagagtaccaaattctcaaggagctcagtctgagaatgatcctaacaataccactatatttgttggtgggcttgaccccaatgtcactgaagatgtcctaaaacaagcattttctccttatggcgaagtcatccatgttaagatccctgttgggaagagatgtggttttgttcagtttgttaccagaccttctgctgagcaggcgctgctaatgttgcaaggggccttgattggtgcacagaatgttcggctttcgtggggtagaagcctgtcgaacaagcagactcagcctcagcaggaatccatgcaatggggtgcgggtgcgcctgctggtgttggtgattactatggtggctatggacaaggttatgaggcttatggcagtgggtatgcacaaccccaggaccctaacatgtatggttatggcgcttatgttggttatcccaattaccaacagcaaccagctgcacagcagccacagcaacaacagtgaggcctctttgctcgggtaggtcattgggttgtctgagatgggatcaattagtattatttctaggcattcatatattgatttcttgaaaatagaggtggtttcgaaaatctcctgattttgatggccccatggcatgttttcttcgagttatatcatatatatatgcactatgttatgtctatgaacaagtggtgctcaactgtgattgctatgttgaggcatgcttcgtagtttccttccagacttgtcttatatattgttctctcttttactctgtattgttatctctattagtgtgtattgcatatctactgcgatgctatatatgcgctgtgccgcctttcgttcaaaaaga

SEQ ID NO: 4101 - DNA, 1513 bp, Zea Mays
atgccccattttcataggttatgtagccatttaaggtctcataggctgttagaggataccgtcaatgtctctgttgaagaacaggttgctatgttcttaaagtttgttggccatagatggacaaataggtcagttgggtttgaattcctacagtccggagaaacagttagcatgtacttcaaccttgttttagatgctccatgtgtcatgtcacatgacctcattactatgagaaccacagagacacatccaaagatatctagtagcccgggaagatttcacccttactttgagatgagtaaaggaaaagagaagattgagaggaccattgtgtgggatgaggatcaaagcaagtttatgcttggttggtttactgacttcataaaagaacaatatgctggttttaagattaaaaaacaacgccacttcaagtgtgctgaggcattgaacagacaattcaatatgggggtcactgctactcaagttgaaagacattacaggcattataaagagaattggaagtttgttgctgcagccttaagcaagagtggtaacacttttgacacaataaggtctatggtagtcatatctgaatcagagaaagctaacctaaaggatagggcaagaaggctcatttctaagcctatcaagtttttcaatgaaatgcaagagttgtttattaacagcagtgctgatggctctctagccatggaagctacaacttgtatgaatgaaactcatcctggagatgacagtgacttcaatgatgatgtgtgcagtgacttctccaactatcctcagcctgtgcatgatctagctcgtcaagttctggactgaagcgcccacaaggagagggagtaccagcgaaaaggaatgtgaaaccaaagagtcgcacaacaaaggtagtagatgaactcagtgctactttggtagaacttcgaaatgatcttaagaagccaccacctccagtgcctatgccttttggtaaccctgatgcaatattgtggcaaaggcttgagaatatgacaattactactgatcaaaagttaatggtaggaacgtatctagcacacaaagatcaaaagggtatgcgtggtttcttatctgctgcatcagacataacatttgagtcatgggtactaaagcatctgagtgatttggacctatgaatcgactaggatgatccatgtaggagatgaatggtgtgatagttgggttttttgcatttcttctaggttgatggatgtcaattgatggagatatttggtggttgtgactgctgttacattgctctttttgttgatttttaactttgagggtaccaatgagcatagtgcatagcaccagtaccttttacaattatggaatctctgcaaagcaaggaaggcattggactgtaataaattttgctccaatttcgcattgcaaatgttctagtagtgtcagatttttctctaatgcttctagtgaaaaatgagaccttttggagacagtttctaaattttgtgtgctg

SEQ ID NO: 4102 - DNA, 3509 bp, Zea Mays
gatgagatgaggaggcgctgcagctggctctcgtctttgttccgccctcgccgggctgaccgctcgctcccgcaaccagatccacagggtcccgattccgagcccaaggctgagcaggcaatagataagcacagtgcttctgaagaagttgtaatggataacattctgccaaacagtgatttttctgaaggtttacatttgtggcaatcaaatagttgtcatgcatttgtagccgttgaaggatcaggttaccattatggtgtaaggccacattcagggtcaacctatgctgttcttactcatcgcacacagagttggcaggggcttgagcaggacataacagaaaaggtcacccttggtaccgagtactttgttgctgcatatgttagagttcatggggaagttcatgagcccattggagttcaggtcactctcaaacttgaggaggacggttcttctaccaactatctttctattgcaaggattttagcctcacaagaacgctgggaaaaggtggaaggttcgtttaatctaacaactctaccgagacgtttggtgttctaccttgaaggcccccctcctggtgtggatttgctcatagattcggtcaccatctcctacaagaaaacagcttcatcagttggtggaacagagaacatcattttaaattatgatttttcgaaaggccttcatccttggaatcccatccgctgccatgcatatgtggcatcacaatggtctggtttccttgatggtattagagggaactcaggagagaactatgctgttgtttcaaagagaacagaacactggcagggtcttgaacaagatattacaaatcaagtgtctacaggcactgtttatgtcgtttctgctttcgttagagttgatgggattgttcaaggccaggttgaagtcaaagcaacccttaggttgcaaaatgcagatggatcaacacattataaccctgttggaagtgtggttgcctcaaaagaaaagtggaacaaattggaaggttccttttctttaacaaacatgccaaaaaatgttgtattttacctggaaggacctcctgctggtgtggatcttgtcattgattctgtcactgttgcttgctccagacataaacagtcaaaagaagtaaaagtaccaagtggagttgagactataattaaaaatcctcacttcgaagatgggttaaaaaattggtcaggaagaggatgcaatatctgcagacatgagttcagtgcatatgggaatgtccggcctttaaatggcagctatttcgcttcggcgactggacgggttcacaattggaatggcatccagcaagagatcacgggcagggtgcagcggaaagttctttatgagatcagttctgctgttcgaatatttgggagtgccaatgatactgaagtgcgtgctactctgtgggtacaagaatatggtcgtgagcgatatgtgggactggccaagtaagttgtttttgtttcttgttctctgttgataatgctctttttcagagccaatgacattattccttttctttctataaccaaagaaaccagacttctgatcagcaatggacacatttgaaaggaaagttcctccttcatgctccctttaccaaagctgttattttcatagaagggcctcctgctggaattgacattcttgtagatggtcttgtcttatctccagcaagaaagctccaagctgcaccatgcccaaaaattgagaatgttctgtatggaactaatctattgcacaataatggcttcactcgtgggctttctgggtggagtcctatgggttcatgtcgattgagtatccagactgaagcaccccatatgttaccttctatcttgaaagaccgtgcaagccagaagcatataagtggtcattatatccttgccacgaaccgcacagatgtttggatgggtccttcgcaggtcataactgataagctaagattgcatgtcacttacagagtatctgcttgggtacgagttggttctggaggacatggacgtcaccatgtaaatgtctgtcttgctgtggataaaaaccaatgggtcaatggtgggcaagtggatgctgatggggatcaatggtatgaaataaaaggagcattcaaacttgaaaagcagccatccaaagttactgcatatgttcaaggccctcctgcaggtgttgatatcagagtcatggactttcaaatatatgccgtcgacagaaaagcacggtttgagtatctgaaggagaaaacagacaagtgaatcttctaggttcatctttgaggatacaacagaccgagaatagctttccatttggatcttgcatcgcgagacacaacattgagaacgaggatcttgctgagttttttgtgaagaacttcaattgggctgtatttgagaatgaattgaaatggtaccatacagaagcagaacaagggagacttaattataaagattctgatgagttgcttgagttttgtgagaaacataagatacaggttcgtggccactgtttattctgggaagtggaagacgctgtccaaccttgggttcagtcattgcaaggtcaccacttaatggctgccatccaaaatcgtttgcaaagcctattgtcaaggtacaaaggtcgatttagacatcacgatgttaacaatgagatgctacatgggtctttctatgaagacagattgggaagggacattagagcttacatgttcagagaagcacataagcttgatccttctgctgtcctatttgttaatgattacaacgtcgaagatggatgtgacacaaaatctacccccgagaaattggttgagcaggtcgttgatctccaagataggggcgctccagttggtgggatcggtgtgcaaggtcatatcagccatccggtaggagaaatcatatgtgattccctggacaagctcgccatactgggtctcccgatctggattactgagttggatgtcacagcagagaacgagcacatacgagctgatgatctagaggtgttcctccgggaagcatttgcacatcctgctgtggggggaatcatcctctggggattctgggagatgtttatgtttcgagagcacgcccatctggtcgatgctgatgggacaatcaacgaggctggcaggaggtaccttgctctcaaacaagagtggctgacccgtatgaacggcagtgtcgatcaccaaggagagtttaagttcagaggataccatggttcgtacacagtggaagtgaacacgccttcaggcaaggtagctagatcgtttgttgttgacaaggatagcccggttcaggtgatcgctctgaatgtttaatgtgtgggaaatcatgcgcgtgtcctgtattttagcgatgtactgaggtgttgaacacagatagtttcatagctgatgccacgccttcagtgtacagaatattttcacgtttattctctgttctattttttgggtgattataacgcgatatttacattaccat

SEQ ID NO: 4103 - DNA, 1445 bp, Zea Mays
tgcgccgtgttctgccgcgcctacgctcccaccgcgtgtccgcagctctgccccacctcacatctgcgcccgcaatccacgcctccgtcgccgcagcccttcctccacgcagcgtccgtccatccatggctctccctacacgcagcgtcgtgccgctttccgcaatccgtgccttaatccccttccttcgcgcagcacccttccatccatggctcgcttccagaaatccccctacctacggcgcagcgtcgcagtccggaatccacccccaaaatcactacccactctgcggcgatggaagggaatcgaaacgcgtgcttcccccttccatcctcggcgttgcgcggattgcatggccatcgtttcgcgcccccaatccgtcgatgcaaggaacacgtgcttcccccttccatcctcgacgctgcgcgaattgcagattgcgaattgcatggtcatcgtttcgccccagttcattgcccgcatcagatggaagggcgccccgatctgcctcacctccatcaatgaggtgtctgcctttcttgcatggagacgccaaagagaaggaaccagtcactaagtcggcctctgtacggtccatgaacacacatcaacggagcgtgatgtccgctccggttcagacttcacctccttgaatgtttccgacatgagcgccgagtcgataaggaggacacagtaccccagcttcactgaccgcccatctaacctgagggtgttctcctttgctgaattgaagagtgccacccgcaacttccgccggtctctcatggttggctagggtggctttggctgtgtgtacaggggtgtcatcaagacctccgacgatctgaacgaacgaatcgagatcgctgttaagcagttgaatcgtaaaggacttcagggaagagacgacgacatggatgtagattccattctttgtgtgagcactaccgccatatagttgacaacgatgaccgacactgtagattccattctttgtgtgtacaccaaggtatcggtgtctacgttgatctggcgatgcgcttttcacggttactgcgaccgtgatgggcatctaggtgctcaaaccattagttggactgaggaacacggagcagcagcaacaatatcgtaaggagagtgcagaagttggacaaatggaagtagctcttccactactggagcaattgctggtggagtggttgctggcgcagccttgctatttgctgttcctgctatcagttttgcctattggcggcacaggaaaccacaagagcattttttcaatgtatatggcttcaaagttagtctttgattattatctttcttgcaacataagggcaaacaacgtttatatgtagcaaacaaatacagtttgcaaacgttttaggaacatgtttttacaataaagatatacttatagtttcaccaatggatggccaaaaaat

SEQ ID NO: 4104 - DNA, 1707 bp, Zea Mays
tgcgccgtgttctgccgcgcctacgctcccaccgcgtgtccgcagctctgccccacctcacatctgcgcccgcaatccacgcctccgtcgccgcagcccttcctccacgcagcgtccgtccatccatggctctccctacacgcagcgtcgtgccgctttccgcaatccgtgccttaatccccttccttcgcgcagcacccttccatccatggctcgcttccagaaatccccctacctacggcgcagcgtcgcagtccggaatccacccccaaaatcactacccactctgcggcgatggaagggaatcgaaacgcgtgcttcccccttccatcctcggcgttgcgcggattgcatggccatcgtttcgcgcccccaatccgtcgatgcaaggaacacgtgcttcccccttccatcctcgacgctgcgcgaattgcagattgcgaattgcatggtcatcgtttcgccccagttcattgcccgcatcagatggaagggcgccccgatctgcctcacctccatcaatgaggtgtctgcctttcttgcatggagacgccaaagagaaggaaccagtcactaagtcggcctctgtacggtccatgaacacacatcaacggagcgtgatgtccgctccggttcagacttcacctccttgaatgtttccgacatgagcgccgagtcgataaggaggacacagtaccccagcttcactgaccgcccatctaacctgagggtgttctcctttgctgaattgaagagtgccacccgcaacttccgccggtctctcatggttggctagggtggctttggctgtgtgtacaggggtgtcatcaagacctccgacgatctgaacgaacgaatcgagatcgctgttaagcagttgaatcgtaaaggacttcagggaagagacgacgacatggatgtagattccattctttgtgtgagcactaccgccatatagttgacaacgatgaccgacactgtagattccattctttgtgtgtacaccaaggtatcggtgtctacgttgatctggcgatgcgcttttcacggttactgcgaccgtgatgggcatctaggtgctcaaaccattagttggactgaggaacacggagcagcagcaacaatatcgtaaggagagtgcagaagttggacaaatggtatgccatatcttcagttctcttatgatgcttcagcgctacatcttcagttttctcggctaaaaagagatcatagtcaatagtatacctatgtgtgaaagcgctatgctatttgcttgtttgctgggagaaagaaaagatagatgaagttttgtgaacaaccctaacttatgtggtcctgacaccacaaaaccttgtcctgatgctcctcccttttctccacctcctccatacaaccctacaaccccgatgcaatcaccaggaagtagctcttccactactggagcaattgctggtggagtggttgctggcgcagccttgctatttgctgttcctgctatcagttttgcctattggcggcacaggaaaccacaagagcattttttcaatgtatatggcttcaaagttagtctttgattattatctttcttgcaacataagggcaaacaacgtttatatgtagcaaacaaatacagtttgcaaacgttttaggaacatgtttttacaataaagatatacttatagtttcaccaatggatggccaaaaaat

SEQ ID NO: 4105 - DNA, 2417 bp, Zea Mays
tgcgccgtgttctgccgcgcctacgctcccaccgcgtgtccgcagctctgccccacctcacatctgcgcccgcaatccacgcctccgtcgccgcagcccttcctccacgcagcgtccgtccatccatggctctccctacacgcagcgtcgtgccgctttccgcaatccgtgccttaatccccttccttcgcgcagcacccttccatccatggctcgcttccagaaatccccctacctacggcgcagcgtcgcagtccggaatccacccccaaaatcactacccactctgcggcgatggaagggaatcgaaacgcgtgcttcccccttccatcctcggcgttgcgcggattgcatggccatcgtttcgcgcccccaatccgtcgatgcaaggaacacgtgcttcccccttccatcctcgacgctgcgcgaattgcagattgcgaattgcatggtcatcgtttcgccccagttcattgcccgcatcagatggaagggcgccccgatctgcctcacctccatcaatgaggtgtctgcctttcttgcatggagacgccaaagagaaggaaccagtcactaagtcggcctctgtacggtccatgaacacacatcaacggagcgtgatgtccgctccggttcagacttcacctccttgaatgtttccgacatgagcgccgagtcgataaggaggacacagtaccccagcttcactgaccgcccatctaacctgagggtgttctcctttgctgaattgaagagtgccacccgcaacttccgccggtctctcatggttggctagggtggctttggctgtgtgtacaggggtgtcatcaagacctccgacgatctgaacgaacgaatcgagatcgctgttaagcagttgaatcgtaaaggacttcagggaagagacgacgacatggatgtagattccattctttgtgtgagcactaccgccatatagttgacaacgatgaccgacactgtagattccattctttgtgtgtacaccaaggtatcggtgtctacgttgatctggcgatgcgcttttcacggttactgcgaccgtgatgggcatctaggtgctcaaaccattagttggactgaggaacacggagcagcagcaacaatatcgtaaggagagtgcagaagttggacaaatggtatgccatatcttcagttctcttatgatgcttcagcgctacatcttcagttttctcggctaaaaagagatcatagtcaatagtatacctatgtgtgaaagcgctatgctatttgcttgtttgctgggagaaagaaaagatagatgaaggtaattatacaatttctaatacattgttcagcttttgttatttctgccatatgatacacactggtcatgaggacatgtcgattgtagttcactggtattgtttttttaaaggaagcggcaaaagacttgcctcttcattgtattagattaggaaaaataagataatccacaggaccgaaacacacaccggaagagaaaaaaaaacaaaatcaaaatacaaaaaaagttcactggtattgtaagctttgcagataagagcacaactttttccctcttttctaaaagggaagctcatgttcatttcagcaattcagcttcaaccatttggcattcatgtaatatttcacaggagttaaagtgcacatacctaatcaagtctgtgggtctccaattctgaaatagaaagataatttatgttctcatctttctgaaatgaacaagatgactggcttctgggttaaggttttttatagagcaccatgacttatcaggtaaagttatagttgtgcacaaaatgtcattttttaatccttaatgcgtgtgctattcacacatgtcttcttttgcagttttgtgaacaaccctaacttatgtggtcctgacaccacaaaaccttgtcctgatgctcctcccttttctccacctcctccatacaaccctacaaccccgatgcaatcaccaggtgatttatttagattgtccagtgaaatccttgagttcaataggacctttccttccttactctttcatctaaatgacatcctaattgggaaaatgtatacctccaaaacaagcataatgttgtcaaggctggagagcggtaaggaataactgcacgttttcctgaaaattaagttgaaaataatttgtaatcaggagctagagcgttacatggtactatgactatgtgctgctattagtctgtggctcagcggtatgtgtgttgtactgctattaatttgctatactagaatactggaatacaataggaagctactaacctgtacctcgtgggatgcaggaatgcagaataagtcaataactaccttgtccttttggttttccctaccctacattagtacgggagtgattaagggtatggaacatatgg

SEQ ID NO: 4106 - DNA, 1588 bp, Zea Mays
aaacgatctccggggaatattttattccgtgggattccgatgcggccagtcctcctcccctctctcctgtttcttctagtagtacaaataaagaagaagaagctgagctgctcgaggcacggcgagggagacacaaggcgagtgtccctactccgagggcagtctcggtgtgcaagcgcatagcatagcaggagccacaagaaaaaaggcccatggcttccttctcaccgagtggccggatgacacggacggcggcatcttctctggcagcgcgcgtggtcctcgcgctcctcctcctcatcggggtatccggttccggagccacccaggcagcgtctccccacacccaccacagtcggcagctggatgtgaaccacaagaagccagtgcagacgtttcggcccatcaacattgcccaccgagggtcaaatggcgaactgcccgaagagacagcggccgcctacctgagggcgatcgaagaaggcgcggacttcatcgagacggacgtactcgcgtccaaggacgggcatctcgtctgcttccacgatgtgacgctggacgcgaccaccgacgtcgcggaccacgcggagttcgctggcaggaagaggacctacgaggtccaaggagaagatgtcaccggatggttcatcgtggacttcactcttgaagagctcagatcactgagggtgaagcagcggttcagtttcagggaccagcggaccgtcgggatctacccggagatcaagaaccccgtgttcatcaaccagcacgtgaagtggtcggacggaaagcgattcgaggacaagttcgtggagacgctgctcaggtacggctacggaggcgagtacatgtccgatggctggctccggcagccgctgttcatccagtccttcgcgccgacctcgctcatctacgtctccaacatgacggactcccccaagctgctcctgatcgacgacacgacggtcccgacgcaggacaccaaccagtcgtaccacgagataacctcggacgcctacctcgcgttcatcgggagctacgtggtggggatcgggccgtggaaggacacgctggtgcctccggacccgacagacaaccgcctgggacgccccgccgacctcgtcgcgcgagcgcacgctctgcgtctccaggtgcacccgtacaccttcaggaacgagaaccagtacctgcacttcgacttccggcaggacccctacgccgagtacgcgtactggctcgacgaggtcgccgtcgacgggctgttcaccgatttcactggtagtctgcacaagtaccaggagtggactaggccgtaccggaaggagcaggagaagacgagcccggaggcactcttgcgcgagatcgcgggcatgctcaagaacgacggctatgactgatgacttaggttgccttcagttttccccgtctgtcactctctctgtaatggttaactaaataataaagcgacggtttcatggatgcatcatctggacgtgggtgtatcattaccagacactgaattttcagtaacgctctttaaaacatcagtggagtatctcgtttccttgggaacgggggatgttgccaa

SEQ ID NO: 4107 - DNA, 1646 bp, Zea Mays
aaacgatctccggggaatattttattccgtgggattccgatgcggccagtcctcctcccctctctcctgtttcttctagtagtacaaataaagaagaagaagctgagctgctcgaggcacggcgagggagacacaaggcgagtgtccctactccgagggcagtctcggtgtgcaagcgcatagcatagcaggagccacaagaaaaaaggcccatggcttccttctcaccgagtggccggatgacacggacggcggcatcttctctggcagcgcgcgtggtcctcgcgctcctcctcctcatcggggtatccggttccggagccacccaggcagcgtctccccacacccaccacagtcggcagctggatgtgaaccacaagaagccagtgcagacgtttcggcccatcaacattgcccaccgagggtcaaatggcgaactgcccgaagagacagcggccgcctacctgagggcgatcgaagaaggcgcggacttcatcgagacggacgtactcgcgtccaaggacgggcatctcgtctgcttccacgatgtgacgctggacgcgaccaccgacgtcgcggaccacgcggagttcgctggcaggaagaggacctacgaggtccaaggagaagatgtcaccggatggttcatcgtggacttcactcttgaagagctcagatcactgagggtgaagcagcggttcagtttcagggaccagcggcaagtaccagatcattacgttcgaagagtacatcctgatcgcgctctacgctgacaggaccgtcgggatctacccggagatcaagaaccccgtgttcatcaaccagcacgtgaagtggtcggacggaaagcgattcgaggacaagttcgtggagacgctgctcaggtacggctacggaggcgagtacatgtccgatggctggctccggcagccgctgttcatccagtccttcgcgccgacctcgctcatctacgtctccaacatgacggactcccccaagctgctcctgatcgacgacacgacggtcccgacgcaggacaccaaccagtcgtaccacgagataacctcggacgcctacctcgcgttcatcgggagctacgtggtggggatcgggccgtggaaggacacgctggtgcctccggacccgacagacaaccgcctgggacgccccgccgacctcgtcgcgcgagcgcacgctctgcgtctccaggtgcacccgtacaccttcaggaacgagaaccagtacctgcacttcgacttccggcaggacccctacgccgagtacgcgtactggctcgacgaggtcgccgtcgacgggctgttcaccgatttcactggtagtctgcacaagtaccaggagtggactaggccgtaccggaaggagcaggagaagacgagcccggaggcactcttgcgcgagatcgcgggcatgctcaagaacgacggctatgactgatgacttaggttgccttcagttttccccgtctgtcactctctctgtaatggttaactaaataataaagcgacggtttcatggatgcatcatctggacgtgggtgtatcattaccagacactgaattttcagtaacgctctttaaaacatcagtggagtatctcgtttccttgggaacgggggatgttgccaa

SEQ ID NO: 4108 - DNA, 934 bp, Zea Mays
attaaagcatcaacatgaaggaaacctggttggctgggaagtgtttgtcggggacgttgtcttgttaaaagacccagagaaatctggcaattttgttattcgacgactggctgccctggaaggctatgagatggtctctaatgatgagaaggatgagccgtttgtgctcgagaaagaccaatgctgggtcctggcagacaacctagtccttaagccaaaggaagctagagatagccgcttgtttggacctgtcccaatgactgacatccttggcagagtgatatactctttaagaaccgctgttgatcacggtctagtcgagaacagcggcatggccacgaaactggatggtccagtactggcagtggagcttgatgtggaagagttggcgaagaacaataaggcgtagacacttgatgttttcgacatgctgcgctataactcaccttaacaatggatgttttttttttgtttatgatctgctgctgcttcaagtagaagtgcattggaatgttttttcacggtttgcctgtggagcagtcaataatggtcttgacagataacccagaggccgctggaccgtgttcactcagaattctcagcaggatacatcgtgtgactgtaatggttgtttttagggtttcttattcatgaagttgccgtgaatcttgtatctgcttgtgttcatggagccacggtccacgggtaagctgctgctgctgcgtcttgtagcagataaaccgtcaagattgtttaggcctgaaagggatcaaaacgttatgctgatatattgatctgaagtggacataggtaaaaaatgtctgcataaattttcgtccaatctgggtactgggagaaaagagcagaaaatatatggttacgggttcttgtctgtacattctaatatattttattacatctctttaaaatattc

SEQ ID NO: 4109 - DNA, 3248 bp, Zea Mays
ccaaagttcttcaggacgcagtccccgcgaatcacaatggcaacaacctgctgtgctacatatgccagctcgggatggtatcgatatccaaaatcatcagctcaccctgcacatgcgcattcctgggcgactatacggaaagataggtttttgcatcgctggagaagcgctgcaaagtcgcattccagatctcccctgcctccgctgtataaatagaccctcaagctccctgcaagcagacttcaaagcagcagcagaagaggctgggcatcctgagtgggatttgcctgatgatgctgggacgtacaatgacactcctgagaagacccagttcttcgcggataacggaacataccagaccgacaaggggaagttcttcctcacatggtactcaaacaaactgatcaagcacggtgataagatcttggacgaagcaaacaaggtcttcctgggatgcaaggtgcagctggcaatcaaagtctctggcatacactggtggtacaacgttccaaaccatgcagctgagctcactgccggatactacaacttagatgacagagatggctacagaaccatagcacacatgctcacaaggcatcgtgctagcatgaacttcacttgtgctgagatgagggacagtgaacagagttcagaggcgaaaagtgcacctgaggaactggttcaacaggtgctgagtgctggatggagagagggcctaaatttggcatgtgaaaatgcactcaaccgatatgatgcaacagcttacaacaccatcctcaggaatgcaagacctcaaggcatcaacaagaatggccctccagaacacaagttgcacggattcacctacctccgagtatctgatgaactgttccaggaacagaactacaccactttcaaaacttttgtcaggagaatgcatgctaacctggattataatccaaatgtcgatccagttgcaccattggaaagatcaaaggcagagataccaattgaagaaatcctagaagtagcacagccaaaattggagccatttcccttcgacaaggacaccgacctaccagtttaaacactccaatgatgcaaactacaggaagaatcacgagacacttaaaaaatcaagacaaatagtaagcctattgtcgagcagtagtctattaactaaataaaatgctgtgtggagcatattataatcgcatattgccctaataatattgtgttgttaaacctgaggcttgatggttatctgatgagttgtaataatagccttggtcttcctgttgtatgtatgtatttgagctaaggaataaaaattgtggctttgtgggttatttattgtgccctttagagagtatgtgtggtttacaagtgcttgaaataatagttctacctgcacattctggtgatgataaaaacaaatcattacacaacatcaagagaaaaataataatcaaatcaaaatggtgtgatgataaaagaataaaatgtgttgtgaagctaagagagcaccatggttgtatatgatttggatcacctattttctgtgtcagttttatgcatactgttatggctctggaccggatttatgtccgacgccgtctaggttcagggttagcaaatcaataaccttatctttctatctttagagtttctacattttcctttggaaggttgagtcagcctctgtctaggttcaggttagcagattaataaccttatctttctatatttaagtctttctacctttagagtttctatattttcctttggaaggttgagtcatttatggactataaataaagggttcaaggaagagcaaggcatgcttgattgccaacgattctattagcaggcactgccaatgacaactggtcggtgacgccgtacagccattatcgtgacgataggttgtcatcgatttcctgcggctgcctctaccaattctataattcaaaagaatacaaacctttcatgtaactaaaaaaatgtttgcttcacctcaacccaaagccaaagatgtcacaaattggcataaacatgtactatgtagtgtggatcatcatgcaacccgtgctcgaacttgaactaaaaaaggatcaaacctgaggatcgacagatcggccacttggttagtggaggtgggatttaacatcctgccaatctagtggtccaactcaggcaaaagtccttgaataaaagccagatgacctaacattctctgttttaaaaaataccaggacaaatctcctagaaaatgctacaagatttttttttcgtgaccgtgtcattgcacgtttttcattaagagggagtagagtgaacaaagtacaaaccccctgtcggtaattagagttaccgaataggagggttcccaaaggaccactaaagcgatactacagaacgcattttgcaacacaacataagccggtaatagaaggtaatcgtagaagaataggaagcgactgcaagtgtctgaaacccgctgaagaccattcacttgtttcgtccaagatcaagcacagcagctcccgtggctggcccaacgaaggtcttcgtgttcctcttttttcaatttctaaaatgctacaagatttgtctgtggattcgtcaacagaagcacaggaattgtctttagagtaaggagaaaatcaaagtaacagagcaaaagtaacaatatgtttttcttccagctcagggagctcactagggccatacatgctaattgattactgatagagcaaccgaattaagggtacatatgcatgaatccttgtaggtttttaacgaaacggaaggaagagtgccagagaggaacaccactatttcagtttcagtcagttaattagcggactggtgtagctagagcagaaaatgaatctatcagaacatgttatagggctgatcccaccaagtttagcaaatcacaaaagtactacatggagaaaataaaaacccctacatattatggctcacacatatccgtgacagatatcctattgcttttgatcctgaaaatatcatatagcaacttgggcgttacaaacaatacggaatacggtgtgtggtatgctgtgaatgaaggttaacgctactgcttcagttaagcgctagcaggcgcgcgggccttgacttcgattgaattgattgattgatggaactactcgcaaatcatgattcggggtcgactgcgtgatctcaacgagggtgtggtactgtggtcttgagcctggaacaggcacagagcggccgac

SEQ ID NO: 4110 - DNA, 1528 bp, Zea Mays
tgggggagtagaaaatcaacagcttgctcggggacgcgccggggtttgcggaggcgagatttccggaggtcgggcgagcggaggaggggcgggggcggtctacaaccacaagcagtgatggccacggcacaagtattgttccatcgcttttactgcaagaaatcatttgttcgatttagtgcaaagagagttgctgctagctgtgtttggctggcagggaagttggaggagagtcccaggaaatcaaggcatattatatttgtcttccacagaatggaatgtaggagagaaaacttgccaattgaatttttagatgttttttcaaagaaatattcggaactgaggcatgacctgatacggacagaacggcatctgttgaaggagatggggtttatttgccatgtcgagcacccccataagttcatatcaaactaccttgcaacacttgaagcccctcctgagcttactcaagaggcatggaaccttgccaatgatagcttaaggacaactctgtgtgtgcgatttaagagtgaagtagtagcatgcggagttgtgtatgctgcagctaggagacaccgggttccccttcctgaagatcctccgtggtggactgtctttgatgctgatgaagcaggaattcaggaagtttgcagggttcttgctcacctctacagcttgcccaaggcccaatacattccagtatataaagacaacgattcctttactgttaagagaatctctgatctacaggcttcaaaggaaagtccagcaagggctgttgctagcgataagggtacccctgtaccctcaagttctagccaggagaaggatccagtggctaagactatactgaacaaggtgaaggaaaaaagtgatgacgaaggtaaaccattgcccgctgaatttgatggaaaagaaaacccggtggcaaactcaaaaaatgacaagtctgattctggtgtcgaccggagtcgagaaagagagagatcaagagggcgggaacgtgatgccaggggtagggattctgatcgtgatagcaggggtcgcgagtctgatcgtgagagggaccggagacgctgctctagggaaagaagttcaggacactcagacaaggagaaatcaaggcgccattcatcacgcgaccgggctgactactacaattcgcattcatctcgtgagaaagatcggcataggcaccattgatcaaggtgacgaggatccccggtctgcagggcttcgctgcatggagaccaccacttggcagtgccgaccggatcatgaaaacttgtggattatcatcccactggtggttgtattggcttgattgtgttttgcaccttggattgtaacttgcaagatacgctagccatgagctgtgtgcaacttgaatttataaacacaacatataagatacaattgacgcacgtgcactaactgccattccagcagagcttgtggaatgttataaagaaacagtttgtggaatgttggcactgttagacctagtttggtgactagggaaacgaag

SEQ ID NO: 4111 - DNA, 653 bp, Zea Mays
ggacaagccccgccgccgcctggaaggaggaggacaagccccgccgccgccaccctcgcattgccagcccccgccctggcgacttgtccggccaatgtgggtgtttagctcatgtcgttgccgctcatccacatgcaggaggagggagccaccattgccgcatatccctaggagcttcttgagggttagcagatacgggaggatgacagttagagtagtgatgaggtaccttgttaacaagctgggccttgaggacgattcacagattaatccaaaagctgcagagtctctagcagatccttctgaatatccaaatctatttgaagactgacaggttgctctaactgtagaaaaaagtgttgcgtctcagaggggcaattatcttcctgctgaccagtatgatgctagggtccccctggacactgtgttcacagcttcagttatcctctgtacatgagcagattgagaatcagcatgccagtttgcttaatcttctccagtgagcagcactgaccgtttggtatgaatcatgcacccattcaatgagtcctccaagcagtactcaaatcagtatgcattcaggcctgatcagtggcatggtgtgggtggaaacctggacggcattacaacattcactaacatcggtatagata

SEQ ID NO: 4112 - DNA, 2173 bp, Zea Mays
atgctaactgtcatggagcatggtgaaaagctctctggaatggcacaccttagggagttacaaaacacacttattcagcatggctcaagcacccatttttcacctcagtcgaaaacccaaggtactggtgccctttggaaccttattcagttggttggtgagaaagctcgaagaaacatggttcttttaatggatcgtgataatgctgaagtgttctacagtagggtttctgatatagaggatctattttattgtttatctcatgaacttcaatacatcattagtagagaagaacacccttctgttcagatgcaacgtgcacttgagttagcaaatgcttgtatcaccatagttcaggcagcatcacactacaagaaggatcacaaggaatggtatccatctcctgaaggactgataacatggaacagccaacctgttctacggtctggaatctggaatttggcatccttgattatggagcttttgggagaatcaggagctgcagacatgtcaatgaaatccagtctatggtctcagctggaaggacttacagatattctactggaggcatatatgtgccttttaactgcccaatttgaacgtgggcaggaacatggtgtgctagtgcaagaatattgtgaacgaagagatgaacttctcagatccctctacaaccttgctaaacaaatagtggaggccaaataccaggagtcaagaaatggtgcggacaagccagatctgaaggaatctatacttagagaggttatttctcctattttagcgacagccaaacgacatgaagggtaccaaacactgtggcagatttgctatgatctagatgattcagcatgatagcgtagggcctcatgggggattcagtttctttgtctttaaggagttagtcaacagaggagactactctaatctgttaaggctaggtgaagaattccaggaagagcttgcaagctttctgaaagagcggagtgatctgctgtgggttcatgagatatgcttaaaccagttctcatctgcttccgacacccttcatacctatgctctgcgtcgtagtcctgatggagatgccagcttcacaaccagcagaaagccactatcctttgctgaaagaagacgtcttctttatctctctaaaattgctgcaacagcaggtaaggacattgattatgaagtgaaggttgcacggatagaagcggacattcggattctaaaactgcaggaagaaattgttcagcatgatccagaatatgcacaagtcaaatctacaaacacattgcttggtccatcagaactgattgagatgtgcttgaggagagaccgagagctctcccttaaagcctttgaagtatttgctttgacaagctcatcgttccgaagttccaacagaggccttctagaggcatgctggatgaatgcaactgaccaagatgattgggtaaagctttcagaggcatccatgtcagaaggttggagtgacgaggtcatcgaagaatctcttcaagcaactgtcctcttcaaagcttccaggttgtgttacagcccggatgctgtggtgtatgacggcacctttgaggatgttctgcctgtgaagaaagaggatgtacatctgagaggtttggagagtaaatgtttgtcagttgaagaagtgttgatgcagcacgaggattttccagatgctggtaaattgatgatgactgcagtgattaggggcaaggaaccaatttttacagccacagaacccgtggagatggactcatgaatacccgttttagatttctatatgatagactgccaccatatcgcagtcatttcattgtaattcatccatcgggtagtttcatcatcgtaaaaatcttgtcttagcgacaaggggtctgtactctgtagttttggttgtttctgttctgcgcagtcacagaaacttgattccgtagcacaagaatcagttcacgccgggttttagcatgagctatatcttctaatggttagtttggaaattagcaggaaatttgctcatttttctcgcagggaatcctggggatttaaatttccaaactagcttttgagtttttttaaggaaaatgccttctgtgttaatcagcttagagtaaagtacatttctggttctggtagaggtgtcaattctgcctataaattt

SEQ ID NO: 4113 - DNA, 1700 bp, Zea Mays
  misc_feature (1699)..(1700): n is a, c, g, or t
tccagtctccaccggaggcgggaggcgtagggtttaggcgcggaatggcgggaggaggaggggggcgcggcgaatcctcgccggcgatcaagccaattagtaaggcggtagtgcaccgcatctgctctggccaggtcatcttcgacctttcctccgccgtcaaggagctcgtcgagaacagcctcgacgctggcgctacctccgtcgaggtcagcctcaaggcctacggcgaggagtggttcaaggtcgccgacaacggatgcggtatatctccctccaacttccgggctcttgctcttaagcaccacacgtccaagatatcagatttctctgaccttggatccctggttaccttcgggttccggggcgaagctctgagctcgctctgcgcgcttgggaaactgacggttgagacgaggagcaaggatgagctagttgggacgcatttggagtttgagcactctggcgtggtggttagtgaaaggaagaccgcacggcaggttggaaccacggtgacagtagaaaagttgttctccaccttgccggtccggagcaaggaatttagcaggaacattcggaaggaatacgggaaagtgatctcgctgctgaacgatcaacagtgtggtcgatgccattcagcttctggtgctcccaacaaatattcagaatcacgacatcagaatgcattggctgatagtcctttgcctgatgctcaggattatggtgatggtgctgcagtatgttatgcatctgtacaatatcccattattcaatttacggttgccgagcttaggagaagaagaaagaattgttttatggttgttggacaatttaatcttggttttatcattggaaagcttggccaggatctgtttattgtagatcagcatgcttctgatgagaagtacaactttgagtgcctttcgcagtctacaattttaaacgtacagcctcttctcgagccactgagacttgatctatcaccagaggaagaagtaattgtttctatgaacatgagcaccatcagaaaaaatggtttcgttttggcagaagatttgcatgcttctcccggtaaccattatcttctgaaagctgtacctttcagcaaaaatattacatttggtgttcaagatgtaaaggagttgatctccatgcttgccgatagtcaaggagactgttcaataatcagtagctacaagctggatacagccgactctgtttgcccttcgagggttcgtgctatgttggcttctagggcttgccgaatgtctactatgataggcgatccactaacaaaagctgagatgaagaagatacttaaaaacatggctggattgaggtccccttggaactgcccacacgggaggccaacaatgcggcacctagctgacctgcgtactatgaaggcgaaagatatcgcgtttaaacgctaggccctgttggctgccggcctgccgcgcgtggggggcctacgctcaacggaaggatgtttctatgctcttccgctttatgttgaagaatacaagaagtgcatatgtgccccgcccccgcttgtaaattacggcgtacgcacgtcgcgccgcccccgcatgcaaggtccatttgtttgtttgttttttgtcagaaggaatacctgtggtgatatttatgtccagtctccagggatgtatggtgttctgttttggcaaatagaagcttnn

SEQ ID NO: 4114 - DNA, 3211 bp, Zea Mays
gagacccattcagcccaccggctacacggcccatattccgtactcgtgaacctcgtgctgacgtgctcacacagtcactccgtttagctcaaatccttatcggcgactcggcgtcggagctcacgaccacgaccgcttccacgccctcgaccccgaacccccaatcccggacgcgaccgctgaaccctagcatactccggccatctgctgccggccccggcgatcccccgccatggcctcccccgagggcacaacgtgggtcttcgactgtccccttatggacgacctcgcggtcgccgccgacttcgcggcagcccccgcgggaggatttttctgggcagcgccgccgtcgctgcagccgcaggcgccagtgcagtctgtcgttgccgcgtcggctcccaacccatggtaattgccggattacggtctcgatttgggctcggccgtggcggtggttggttggacttcgtggggttgggttgcatttggtcggggttcgttgccagcatatctgtagattctgtacgtatagtagttcgttatatggatcaatgacttgattggaattcggtgaagcggctgaactgtgggatttggaccgtgtccttggaatcgtgtttgcccaacattaatagtagaactgattatggttctttatgtttccaatttactataccagcgtcgtcctgtggaaggtgtgggctgtggactctgttggttctgccagtggagttgtgtgagaggactgaggaaatggttcacaggatgggtcagtggacctttactataagttctaagtagtatggcgtgaaaggactgttcccatcttatggtgtgcaagctggtaggtaggtgcatataggtagtctcatcaagcctagatgctttcctttgggcacacctttgtgtcatctatactcttgtcacaaaaacatattgtttattaaaacatttaataaagcattagaaactacaaacatcaataaccatcacattatttatttggaaatatgtaagttatatatgtgtagatttgtattcaaaatctgttaaacttgaaggattttaagaatttattctgtgtggccctgtggaatgtgtggatgagtcggtgtacctttactgtaataattctcggtagaacggtggaaaggattgttcacatcttatggtgctccgctggtgggtaggcaactaggcatatataaggcctgtttagtttagcttttttctgactattttttctaagaatctggatgtggagaaaatctgactgtgggaagaatctgaatatcgtggggattacacgcggaggaagatgaagtggtccaaagggtcaatgatctagaaagcgatgtatttctaatatcgtgacgactcgaccgattatgcgttcatgttgattttggacggtttttaccaaaacaattcttatagaagcggactgaaaagctggggcgtttggcagtccgcaacagattttggtggccggaagttgaaaaaagcccaaacaaacagggccacaggtagtgttatggctcctcatctagcctagattgcttttgtgcacactttgtgtcatctatactccctccagtcaccattgaaaatatttagctaaaccttggaaactacaataataactgtttagggttacattatttatttgggaacttaaagttttatgtgtagatttgtatcaaaatacttgcaaaatctcgtaaattcgaagaatttaatctatagaaaaaggtggtcaaatatacgtattgaagactactccaagtcaaaggtggtcaaatattcttgactgaagatagtagtttgcagaatctgttagaaacatacaatcctcattctgcaatcaacttgtggctgctctattgttgggcctttataaggctagttactacccttgttcacagagaagaatagataaattccttttgggtcagtatattctttatgtattgatctcttggttcatccaatagtctgcagaaacaggttgcacacaagttgttgtaattgaatccttcatgattggtgtggtgtgaagaggattaccatattgtgctggggttctgacagctccattgctctttagtacatacaagctcatctttgatgttaagttggagaagttttgaggtgtttggttggctgctttaaacagttgtattgtgtgctgtctgtggtaaattcttcttctatttttccacatatatttcgttagatgtagtttgtagggttatgacttgctatttgctaagttgaaaagcaccaagtagtgattttttatatttactaattattgtcttcgatttgcttgcatagatattttgtttaccatgctatgttatttgtctttttttgcttcttattatggcgcattatcttgatatttggcatcctaagggcgtacccagtgctgtaggcttcccgcactgtgcggggtctggggaagagtatctttaaatatttggcatcctaacattggcttttattttagcagtatggaaatcagtagctctgtggactgtggtcaggaaaaagaacagccaacaaataaacgtccaaggtcagaaagtactacagaatcaagcacaaaagcatccagggagaaaattagaagggacaagctgaacgagaggccgagaagaatgagctgcgagacgagaagcaaaggctgaaggccgagaaggagagcctggagcagcagatcaagttcctgaatgcccggccaagcctcgtaccacaccacccagtgatcccagcctctgcgttccctgctccccaggggccagcagccgccgccaggcacaagctgatgatgcctgtgattggctaccctggattcccgatgtggcagttcatgccgccttcagatgttgacacctctgatgaccctaggtcttgtcctcctgtggcgtagaagccgtgcgaaatcctgttggaaagaggcgatgctgccttccattgattcaaatcttgatcggtccgcagtgttgttggtgtagttgattccagaactgaaggggatgttacatgtgtcggacggtgacatggggtgatctgatgacccctttgtatattatatatggtatggtataaataaattccgcgaccagaagctaatgtggatcggtggattagcttatgtctattcttgcctgtttggttatgttcctcctcgcatgtgaaaactgac

SEQ ID NO: 4115 - DNA, 892 bp, Zea Mays
actacgtcgtcttcgtctctccaacccggggacattttccaccctccaaatcgaaaccagattgaaatcctaggggctagggttaccctccatcccatcgtccgatccgatccgatcccgccgctcatccatgtcccaccacgacggaagcaagccataccagccgcgccgggggcccgagcggcacccgcagccagcggatgggatcgccgccccgcctcccgccgccgttgccccgtcggtggagagcacgttcccatggacgcggatgctgctgccgcggcggcggcggccgcagtctcgcagatggacccgcactcggcgttggtggctgggaccgtgccacccatggcgaccaaccagctcaccctctcgttccagggcgaggtctatgtgttcgactccgtctcccctgataaggtccaagccgtgcttttgctgcttggagggagggagctgagcagcctgggcggagcgtcgtcctctgcaccttatagtaagaggttgaattatccacatcgggtggcatctctgatgagatttagggaaaagcggaaggagcggaactttgataagaagatccgatactctgtccggaaggaagttgcacttaggatgcagcgtaatcgaggtcaatttacatcttcaaaaccaaagcctgatgaaatagcagcatcagaaatggcatccgcagatggctccccgaattgggcattagttgaaggccgacctccatctgctgccgaatgtcatcactgtggtactaatgcaacagctacaccaatgatgcgtcgcggacctgatggaccaagaacattatgcaatgcatgtggcctcatgtgggcaaataagcttagactacgtaatggaccaagaggcgagtgtgagtaag

SEQ ID NO: 4116 - DNA, 1540 bp, Zea Mays
ggtgttccttcgccatggctactctggcggccatctcctccgtgtcttatgacacagacaccgattccgactcctcgcggtgcagcgaggcaagcacatgggattctcaagtgttaagcaggcatgctgaatgtctggagctggaggagttgactgcaatatcagtcaatcccagtctgcttccagctttgaatcagttgcttctcgaggcgtatgccattctacgtcccaagccgcttgactatgaccagcgcaacaccttggttgatgtcttcaggaagatggtgaatcaaagatttgcctagatgtaaaccaggattcctacagctcatcgtaaacaggagagtaggcctcatatgcagcagcagcaacagcaaccagaacgctattctgtaacagctggtggacttgcacgtgggacctattctccagtttgtgaggggctgcaaagatcccggtagcaacagtgggtctccggttgtggaaccatttggatcattcacgatggatttatttactcctcacagtgacctggacctctctatcaattttagtgctaatactgatgagcaatatactcgcaagcaaatgatctctattatcaagaaattttccaaggttctattttcttatcagaggagtggaattttctgtggggttttacctattgtaagtgctagggtgcctatactgaaggttattgatcgtggcacaggggtcgaatgtgatatttcggttgaaaacaaagatggcatgacaaggtcaatgatcattaaatttgtttcctcacttgatgaaaggtttcagatactaagttacttggttaagttctgggctaaggtacatgatctgaataccccaagacaactaactatgagctccatgtcaattatttcactagttgctttccatttgcaggtaccatgggttaattattattttggtttggttattaaattgcaagtaactgtcccattaccttttgttttaattaattgacctactaaccaatctgcatttgaagacacaaactttggattcatttgtatagaaaataagacgatacttattggggaaattatgaattatcttctttactatcgacaaattctggatatgctttatgccagttcagaaaacatgatagatacccttcttctacacttcctcagtctaaattcctacacttcatgctattgcattctatgtaccagaaaaaatggattttactccattttccttaatggtagtgtttgagtagcaactcattagatgcatggctaagaagataagcatcaatgtgcagtgcagacccggcatcctccaatattgcctgcgttctctgacttgttaaaagatgggttagattgcgaaagcattgagaggaatgctttacggtttagggattttgggagtagaaataaagaatctgtcgctgaactgtttgtatcattgataagtaaagttactacacagttctgatactctcaccatggttcaggcgttgtttgaattacttgctgaagagactcgtcttaag

SEQ ID NO: 4117 - DNA, 2271 bp, Zea Mays
gggtgttccttcgccatggctactctggcggccatctcctccgtgtcttatgacacagacaccgattccgactcctcgcggtgcagcgaggcaagcacatgggattctcaagtgttaagcaggcatgctgaatgtctggagctggaggagttgactgcaatatcagtcaatcccagtctgcttccagctttgaatcagttgcttctcgaggcgtatgccattctacgtcccaagccgcttgactatgaccagcgcaacaccttggttgatgtcttcaggaagatggtgaatcaaagatttggtagcaacagtgggtctccggttgtggaaccatttggatcattcacgatggatttatttactcctcacagtgacctggacctctctatcaattttagtgctaatactgatgagcaatatactcgcaagcaaatgatctctattatcaagaaattttccaaggttctattttcttatcagaggagtggaattttctgtggggttttacctattgtaagtgctagggtgcctatactgaaggttattgatcgtggcacaggggtcgaatgtgatatttcggttgaaaacaaagatggcatgacaaggtcaatgatcattaaatttgtttcctcacttgatgaaaggtttcagatactaagttacttggttaagttctgggctaaggtacatgatctgaataccccaagacaactaactatgagctccatgtcaattatttcactagttgctttccatttgcagacccggcatcctccaatattgcctgcgttctctgacttgttaaaagatgggttagattgcgaaagcattgagaggaatgctttacggtttagggattttgggagtagaaataaagaatctgtcgctgaactgtttgtatcattgataagtaaactattgtcagcagagagtttatgggagcatgggctgtgcgcaagcaattttgaagcgtcatggatctcaaagacctggaagaaaggagtaggcaatttaagtgttgaagatttcttggaccggtcgcaaaattttgcaaggtcagtgggaaaggtgcagatgcagaagatttgcaaatgccttagagaatgtgctttgaatttgttagatttcatgagagggaaaatggacacaacgaagctgaagacccttttatttgggcggcttagcccagacgaattagtcagcaaacctcgtctgaagcatgtcaagagaaaaaggaattgggaacggaccccgcaagggggaagatgtgtgctccagaagagtgcaaagcatgctggtagtgctactggcagtgattcattacccactcctaacaaggtcttgcatcatgcactccattatcgagttgctggccatcagtctagcattcatcagtttgtgcccattattcgatggccacgaatcattccttctggttttggctatggattatcgcttgggattccatcagttgctcctcaccttggcaagggaatactgggcaagccaccaatcattccttctggttttggctacggattgtcgcttgagattccatcagttgctcctcaccttggtaacggaatactgggcaagccaccaagtaatataacacccttagatcaacggagctcaactcaactagtgcacgtacggaatccacaccagcatacatgtcagcaatcatgtggcggagctatggagccgagcagctccggcgtggcttaatgataaggtccggtgatgagcagctctagtagcggttaggagtttgaggttagatttagggtgtgtttggtttgacttttggctttggcttttgccccctaaaagttaaaagccaaccaaagggctggatacaggaagcagcttttttctaaaagccgactttctcgtagtgtaaatctgaaagcacccctgaacctgcttttagtggcttttcggatggaactatgaaaacatatatcgaagaatttttaacgacttttagtggttttcactaaacggtttttagattttttaacagcttacaacctacaacagctttttacacagctcacagcctacaacaacttttttccatagccacagcccaaccaaacagacccttgatgtggagctccctcttgtgttgaggcacttttcattgctcttgttagttcaagttttagttttttttcttctttcattgaagggatcatgaatgacgtataatgtcttatagatttttaactttaaaatcaatcacttttaaaatctacttattaaaac

SEQ ID NO: 4118 - DNA, 2869 bp, Zea Mays
ggtgttccttcgccatggctactctggcggccatctcctccgtgtcttatgacacagacaccgattccgactcctcgcggtgcagcgaggcaagcacatgggattctcaagtgttaagcaggcatgctgaatgtctggagctggaggagttgactgcaatatcagtcaatcccagtctgcttccagctttgaatcagttgcttctcgaggcgtatgccattctacgtcccaagccgcttgactatgaccagcgcaacaccttggttgatgtcttcaggaagatggtgaatcaaagatttgcctagatgtaaaccaggattcctacagctcatcgtaaacaggagagtaggcctcatatgcagcagcagcaacagcaaccagaacgctattctgtaacagctggtggacttgcacgtgggacctattctccagtttgtgaggggctgcaaagatcccggtttgcatttggtctgcaaataattttttccattgatttgacctttatctaacacaaatttcaggtagcaacagtgggtctccggttgtggaaccatttggatcattcacgatggatttatttactcctcacagtgacctggacctctctatcaattttagtgctaatactgatgagcaatatactcgcaagcaaatgatctctattatcaagaaattttccaaggttctattttcttatcagaggagtggaattttctgtggggttttacctattgtaagtgctagggtgcctatactgaaggttattgatcgtggcacaggggtcgaatgtgatatttcggttgaaaacaaagatggcatgacaaggtcaatgatcattaaatttgtttcctcacttgatgaaaggtttcagatactaagttacttggttaagttctgggctaaggtacatgatctgaataccccaagacaactaactatgagctccatgtcaattatttcactagttgctttccatttgcaggtaccatgggttaattattattttggtttggttattaaattgcaagtaactgtcccattaccttttgttttaattaattgacctactaaccaatctgcatttgaagacacaaactttggattcatttgtatagaaaataagacgatacttattggggaaattatgaattatcttctttactatcgacaaattctggatatgctttatgccagttcagaaaacatgatagatacccttcttctacacttcctcagtctaaattcctacacttcatgctattgcattctatgtaccagaaaaaatggattttactccattttccttaatggtagtgtttgagtagcaactcattagatgcatggctaagaagataagcatcaatgtgcagtgcagacccggcatcctccaatattgcctgcgttctctgacttgttaaaagatgggttagattgcgaaagcattgagaggaatgctttacggtttagggattttgggagtagaaataaagaatctgtcgctgaactgtttgtatcattgataagtaaactattgtcagcagagagtttatgggagcatgggctgtgcgcaagcaattttgaagcgtcatggatctcaaagacctggaagaaaggagttgaagatttcttggaccggtcgcaaaattttgcaaggtcagtgggaaaggtgcagatgcagaagatttgcaaatgccttagagaatgtgctttgaatttgttagatttcatgagagggaaaatggacacaacgaagctgaagacccttttatttgggcggcttagcccagacgaattagtcagcaaacctcgtctgaagcatgtcaagagaaaaaggaattgggaacggaccccgcaagggggaagatgtgtgctccagaagagtgcaaagcatgctggtagtgctactggcagtgattcattacccactcctaacaaggtcttgcatcatgcactccattatcgagttgctggccatcagtctagcattcatcagtttgtgcccattattcgatggccacgaatcattccttctggttttggctatggattatcgcttgggattccatcagttgctcctcaccttggcaagggaatactgggcaagccaccaatcattccttctggttttggctacggattgtcgcttgagattccatcagttgctcctcaccttggtaacggaatactgggcaagccaccaagtaatataacacccttagatcaacggagctcaactcaactagtgcacgtacggaatccacaccagcatacatgtcagcaatcatgtggcggagctatggagccgagcagctccggcgtggcttaatgataaggtccggtgatgagcagctctagtagcggttaggagtttgaggttagatttagggtgtgtttggtttgacttttggctttggcttttgccccctaaaagttaaaagccaaccaaagggctggatacaggaagcagcttttttctaaaagccgactttctcgtagtgtaaatctgaaagcacccctgaacctgcttttagtggcttttcggatggaactatgaaaacatatatcgaagaatttttaacgacttttagtggttttcactaaacggtttttagattttttaacagcttacaacctacaacagctttttacacagctcacagcctacaacaacttttttccatagccacagcccaaccaaacagacccttgatgtggagctccctcttgtgttgaggcacttttcattgctcttgttagttcaagttttagttttttttcttctttcattgaagggatcatgaatgacgtataatgtcttatagatttttaactttaaaatcaatcacttttaaaatctacttattaaaac

SEQ ID NO: 4119 - DNA, 1101 bp, Zea Mays
aggaccgccctcttcgctgcacccaatcccttgtcctgtcctcgaaccgtccgccgccgcgttcaacatgggcgacccgccgacgctcaagaggcccaagctcgagaaggccgacgacgactccacctactgcccccgcccgtcctccaatggcgccgcgcccgtacgcacaccaggcgccaccgccgccataggggcggcgccgggtgacgacgtggaggaggaggatgacatcgcggaggaggcggtcatcgccctgatcgcgcaccgcgagcgcgacgtcgagcgctgcaagctcaagttgctccactaccagtctctcctggacaccgcggagatgaagctggaggaggcgcactcgaggctcgccaggttccgagatcgcaagccgccgccaactcggtcggaacccaagccaccgacgccgccaatccagagggaacacaagccatccccgccgccgatccagagggatctcaagccatcgccgcagccgctaatccagaaggctccttcgcccgcgccgcagccgtcggcgaggccgcagcttgtcatccctgggaccagcaaccgaccgaccccgcgccctgagcccatgcctgggttgaagagggccgccgccccgtcatcgtcttcatcaccggcgccaccagagcggtcaaggaaagaggagaagaagcccaagataaagatggaacagaaggagcatcagaacttgattccgagtgttgggaaatcatctgcgactgtgcttagatttcaaggcggaaatttggtctcgagccaacacaggaggaagcttaggtgtcttgagctatgccctgctaatgatcagcttgttgttaccagtgcgctggacggattggttactttatggcaagtggagactagaggaccttctctctcatttcgtggcaaaacggatttcttttccccaaagcatagatggcctgaagatatagcttggcatccagatggtgagacaatttttgctgtatacactgctgataatggtgattctcaggtttcaatgacaaaccttatatcaggacaaataatctactttcttgaaatattactaaatggtgttccacaattttt

SEQ ID NO: 4120 - DNA, 2026 bp, Zea Mays
ggctaaacagaagtgacagcagcagctatccagctcacccgagaacagtttgtttactgtgaagaactgaagacacatcacattccggctgccgtcccttcccttgcatctggctctccttgcagtcgcagcctcgtacaccgcttgtgcgagcttttactcctaccccaatctccctttgctacttttggggacctccagacctctcaaatcgagagaaccaaaaacgatagagaaagagagcctgtcagcccaagaaaaggttcctcccctccttccccacctcgccctcagccctcatcatcctctaacatccgattgtgccctgtgctctgcggttctcggatccaagatttcgccggccggccgccggcggtggctccggcctccgggagcgggagaaagactggatttttcgggccatggagatgtggcctgatccgttcaggcccgggcggtggggtggcttcctgagcaggtctgattcgtatcggttcaaatgatctcggcggcttgattggtcggttccgcttccgccgggggatcggagctagggcggtggtttcttggccggccggtggattcatcggctcgggtctggtgggatcttggtggttgctggttcagcacacgagccgcaggtctgcgtagatcccctcttcgcttccgtggcggatttgtactgctagggttttggttgggtctggtggaagatgattaagcagatccttggcaggctgccgaggaagccggggaaggctggggatagccgggaagctgctgctgcggggaatggaactgagccgtcgaattcctacagtgttgcgaggagcatggacccaggtaacaaaagggctggaaatggagattacccagttccatctggtgtaattccgaatccagtgatgaatggggctgtggtgtatcactccaatgaacccttaccggcattcaaggacgtgcccatgtcagagaagcagaatttgtttgtcaagaaggtgagcctatgttgcgctgtgtatgactttgtggatccaactaagaacctcaaggagaaggaggtgaagcgccagacacttatggagcttgttgattacgtcgcttccgctaatggcaagttctctgaggttgtcatgctggagatcacaaagatggtgtcaattaatttgttccggagctccagccccacacctcgtgagaacaaagccattgaaggggtcgatctggaggaggatgagcctctcatggatcctgcatggtctcacctacagatcgtgtacgaggttttcttgagatttgtagcttcacaggagacagatgcaaagttggccaagagatatatagaccattcctttatccttaggctgctagacctttttgactctgaggaccccagggaaagggactatctaaagacgatacttcatcgaatatatggtaaattcatggtccatcgaccattcatcaggaaagcaattaacaacatattctacaggtttatattcgaaacagagaaacataatggtgttgcagagttgttggagatcctgggcagtattatcaatgggtttgcccttccacttaaggaagagcacaaattgttccttgttcgtgcactgatccctcttcacaagccgaaatgtgtatctatgtaccatcagcagctatcgtattgcatcacacagtttgttgagaaggactgcaaacttgctgacacagttattaggggtttacttaaatattggcctgtgacgaacagttcaaaggaggtgatgttcttgggtgagttagaggaggttttagaggcaacacagcttgcagagttccaaagatgcatggttccactcttccgtcagattagccgtagcatgaacagctttcatttccaggttttaaacatggcctttgcgtattcgaagcatgattatttgctaccctcttgctaatcattctacttaataattgtgtacgtgtgctgcttggatcctgctgattatgtgaaatggaatgtagttttttctttgct

SEQ ID NO: 4121 - DNA, 664 bp, Zea Mays
cccctcgccctcgcccgcctgtttaaacctgactgtctataacttaccgccggtccgcacccgcccaccgtccctgtccccttccccgtctaagcactcggatcctctgccgccgcgatgagctactacggccagcagcagccgcccgtcagcgcgccgccggcgcaaggttatcccgggaaggacgcgtacccgccgccgggctacccgcccgcgggatatcctccgccggcgcagggctaccccccgcagggctacccgccgcagggctaccctccgcagcaggggtatccgcagcagggatacccgccgcagtactcgcagccgccgccgccgccccgccagcagcagagcagcgggccctctttcatggagggatggtacgttctctcctctgtccgccccctcacctccgattccatgcggttgcagatattggagccgtcgattcgttttcagttttgccggagacgacgccctgggcggtggcgctagtggccgcctagtgggcgtgttgtgtggcgcagacgtgatcgcggtcgcggactcgcggttggcctgccactgtcagcgccaatcggcgagcggttggatgggtcgtggtcgtggagggtccaggccaggcgccctccgcgcccgtgaagttgaccgcgccctgcgctcc

SEQ ID NO: 4122 - DNA, 2565 bp, Zea Mays
agaggacgtacgacgaggagggcaatggggatgggcagcgacgccgccgcgctgttccccttctccaccagcaccaccgccacgtcgccgcggctctgcggcgccaccgccgtcagccacaggaggatattctcagacgtcgctgaggacgtgacggtgtcggtggacggccagtcgttcctgctgcacaagttccctctggtgtcccggtgcgggcggatacgcaagatgttggcggactcctccagctccaacagcaaggacgcagacggccaccagaagctggagctggcgaacgtgccggggggagcctacgcgttcgagctggccgccaagttctgctacggcacaaacttcgagataaccgcggcgaacgtggcgcagctgcggtgcgtggcggagtacctggagatgacggaggaccagcacgcggacaacctggtggcgcgggcggaggcgtacctggccgaggtggcgctgcggagcctggacggggcgctggaggtgctgcgcaggtgcgacgacggcgggcccgtggcggagcaggtcgggctggtggcccgctgcgtcgacgccgtcgccgccagcgcgggcaaggagcagctggtctccggcctggcggcgcacctggagacgtgcgactgcgccgccgccgcgcgctgccgggaggactggtgggtggaggacctctccttgctccggatcgaccactaccgccgcgtcatcgccgcgatgcggcggagcggggtccggccggagaccatcggcgcgtccgtggcgcactacgcgcagacgtggctcaagggcgtggacgtggagcagcggcggcgccagcgcgcctgctgggacggatcgggcccgttcgtcggcgacggccagcggatggtcgtcgagacgctcgtcgacgtgcttgccacggagaacgtcgcggccgtcacgctctccttcctgttcggcatgctgcgggtcgccgtcgaggtcgacgccagcctcgactgccggatcgagctcgagcgccgggtcgggatgcgcctggagatggcggcgctcgacgacctgctcgtccccgccgcgcagaccagcgactccatgttcgacgtcgacaccgtccaccgcatactgctcagcttcttgcagaggattgatgaggatagctcgggggacctgtcgtctcccccctgcgggtacgactccgacggcctcaagtctcccagccacggatcggtgctcaaggtcgggaggctcatggacggctatctcgcggaggtggcgccggatccgtatctcaagctgcagaagttcatggcccttattgagctgctcccggattatgcgcgcattgttgatgatggcctctatcgcgccatcgacatatacctcaaggacgcgtcgagccacgcggcgcagaacgaccggctgccgatccagatggtggtgcgcgtgctctacttcgagcagctccgcctcaagtcgtccttctcgggcggcgggtccgggtgcgtcggcttgggcggcgccgacgggtccttctcgcagcggttcgtgtgcagcagcagcggcgtgccgagctcgtgcgtgtccccgcagcgggacaactacgcgtcgctgcggcgggagaaccgggagctgaagctggagatctcgcggatgcgggtgcggctgacggagctggagcgggagcaggggctgatgaagcagcaggggaggatgcgcggcggggacggcggtggcggcggcgggcggggcggtggcggcgagcacggccgcgccttccttgcgtcgctgtcgaggggcatcggccgcatcaccatgttcggcggcgggcctgcggcggccgacaggcggcgcaagaagagcggcggccggagctcccagtgctccgacggcaaggcccgcaggcggcagaaggcgtccttcgcctatgactgaagcttcgctgctggcgtcgacaatggaggcgcggcaggcggcgatcgtggatggatgcggtctcagcgtctggaggatcggtcggagctaaagcagggacggtggctgctgacagctgagtgggtgacgatgatcaagaattcaagactgcggttttagctgttggtgatggcagtccgtcgctcagacgaacaaacaacagggaggaatggaacggatcaggaggagtttattgcaggaaatgctacaggctagcgagagattttttagcatgcaggaacgacgcaggatcagtaaagtagtgtagcaaactgttttagcctgaactctgaatgcctgctttcactggattgcatttgcataatgcatccatgcatcgcagtatcgcacagctttaacgcgcgaaaacggaaactagcgttacgaccacaccgttctggagaacggagatgtgccgttctggtaaattctagagcatggcaaaagacatatttcaccgtttcctcaaagtgtggaattatatttgcgtacatcgctatggttttatataccacatatgtatatcttattcaaattcgatagttatttaaaaatgtttcaaatctttactataaacatgcaaaaaagtcttgagca

SEQ ID NO: 4123 - DNA, 1707 bp, Zea Mays
ggctgtcgtcatccaccggccggcacattgtgcatgcacttgcgcatcggatcgcatcagctgctgcttttgtccaccaagcaactattccctttccttccgccgcccaaatgccctcgtgcccggcaccggcaccggcagtggccaccttcctcctcgtcgcgcttctctcgtgcggcacacgggccatccggacgcacggcggctatgtctccgcggtcggggaccccggcatgcggcgcgacggcctccgcgtggcatgggaggcgtggaacttctgcaacgaggtcggccaggaggcccccggcatgggcagcccccgcggtgccgattgcttcgatcttctcgagacgagctccgacgaggaggggcggccggtgtactcggtggcgcacctggtgagcgacgccgacaaccgcctgggcgcgggcgacccgttcccggggtccccgccgggcgcggcccgcgtcacggacgccgacctctacgcgccggccaaggagctgtacctcggcgaccgctgccaggtggccgacaccccggcgccgtggcagttctggatggtcatgctcaagaacggcaacctcgacaccaccgccgccgcctgcccggagaacggccgccccgcgcgcccgttcccgcagacgtcccgcttcccgtgccccgccggcgccgggtgcatgaaccagccgctgctgttccacaaccgcaccgcgctggacgacgccggccgccggctccgcggcggcctgttcgggacctacgacctcgacgccgccgcgggtctcggcgccggcgacgtctccttctactccgtgacgtgggagaaggatgtggcggcgagcggtcgcggcggcgggtgggcattccaccacaagctgtgcacgtccaccaagtacccgtggctgatgctgtacctacggtccgacgccaccaggggcttctccggcgggtaccactacgacaccagaggcatgaccaagacagtgccggagtctccggacttcaaggtgcggctgaccctggacgtgaagcagggcggcgggcgcaacagccagttctacctgatggacatgggcagctgctggaagaacgacgggcgcgcctgcgacggcgacacggcgacggacgtgacgcggtacagcgagatgatcatcaacccggccacgccggcgtggtgctcgccgtcgcggatcgaccagtgcccgccatggcacaccttccggaacggcagccgcgtgcaccgccgcgacggagcccgcttcccctacggcgcctaccacgtgtactgctcccccgggaacgcggcgcgcgcggagcagcccaccacctactgcgacgcctacagcaacccgcaggcgcaggagatcctgcagctgctgccgcaccccgtgtggggagagttcggctacccgacggccaggggacaggggtgggtcggcgaccccagggcgtgggacctcgacgtcggcgccatgtcccaggcgctctacttctaccaggaccccggcacgccgccggccaggaggcggtggacgtcgctcgacgtcggcacggagatatacgtcagcgacagggccgaggaggcggagtggacgctcagtggcttcgacatccttgtgccggacaagtgtatcaagtcacagcaacgggccagcaacagctgctggcacccaaaaattctggaggtggagaaatgatttcaat

SEQ ID NO: 4124 - DNA, 1893 bp, Zea Mays
ctttgccttcctctcttccgcagtagtgcagtaccaagaccaaccactgtccggcaggctgtcgtcatccaccggccggcacattgtgcatgcacttgcgcatcggatcgcatcagctgctgcttttgtccaccaagcaactattccctttccttccgccgcccaaatgccctcgtgcccggcaccggcaccggcagtggccaccttcctcctcgtcgcgcttctctcgtgcggcacacgggccatccggacgcacggcggctatgtctccgcggtcggggaccccggcatgcggcgcgacggcctccgcgtggcatgggaggcgtggaacttctgcaacgaggtcggccaggaggcccccggcatgggcagcccccgcggtgccgattgcttcgatcttctcggtccgtccattccatctctttctctcctctttcgccggggtggttgagtgggttgccaccaagattaggtttttgaggaagcgtggatctctgttccgttccgcagagacgagctccgacgaggaggggcggccggtgtactcggtggcgcacctggtgagcgacgccgacaaccgcctgggcgcgggcgacccgttcccggggtccccgccgggcgcggcccgcgtcacggacgccgacctctacgcgccggccaaggagctgtacctcggcgaccgctgccaggtggccgacaccccggcgccgtggcagttctggatggtcatgctcaagaacggcaacctcgacaccaccgccgccgcctgcccggagaacggccgccccgcgcgcccgttcccgcagacgtcccgcttcccgtgccccgccggcgccgggtgcatgaaccagccgctgctgttccacaaccgcaccgcgctggacgacgccggccgccggctccgcggcggcctgttcgggacctacgacctcgacgccgccgcgggtctcggcgccggcgacgtctccttctactccgtgacgtgggagaaggatgtggcggcgagcggtcgcggcggcgggtgggcattccaccacaagctgtgcacgtccaccaagtacccgtggctgatgctgtacctacggtccgacgccaccaggggcttctccggcgggtaccactacgacaccagaggcatgaccaagacagtgccggagtctccggacttcaaggtgcggctgaccctggacgtgaagcagggcggcgggcgcaacagccagttctacctgatggacatgggcagctgctggaagaacgacgggcgcgcctgcgacggcgacacggcgacggacgtgacgcggtacagcgagatgatcatcaacccggccacgccggcgtggtgctcgccgtcgcggatcgaccagtgcccgccatggcacaccttccggaacggcagccgcgtgcaccgccgcgacggagcccgcttcccctacggcgcctaccacgtgtactgctcccccgggaacgcggcgcgcgcggagcagcccaccacctactgcgacgcctacagcaacccgcaggcgcaggagatcctgcagctgctgccgcaccccgtgtggggagagttcggctacccgacggccaggggacaggggtgggtcggcgaccccagggcgtgggacctcgacgtcggcgccatgtcccaggcgctctacttctaccaggaccccggcacgccgccggccaggaggcggtggacgtcgctcgacgtcggcacggagatatacgtcagcgacagggccgaggaggcggagtggacgctcagtggcttcgacatccttgtgccggacaagtgtatcaagtcacagcaacgggccagcaacagctgctggtagacagacactttaatgtcactgcacccaaaaattctggaggtggagaaatgatttcaat

SEQ ID NO: 4125 - DNA, 3292 bp, Zea Mays
agtcattactgctattggtgccaaaattaagctgtggtacatgaccaaagctagccttatctcagctaagcgcatacgtagcatctaacagaaactatttggtgttttaaggtgaatgcattctcatccactgctatgttgcaacaacaaaattatattgtgttctttgtttacattaattttgatcaaatatgttggatctgtgtactgccatttgactgctggggaaggggaaccggacggtcggaagatgacggcgaggaggtgtacttggacagagggagagggagggcgtccagtgtcctagttctttggaccccggtggctgccacgacacccgacacccgccgcctgctccaccgtcgcggctgctcatgccctcgctgctgacctagcgcatgcaaacctcacatttcgaggcctaaaaccctcagcgtcagtggccggcacgtggcctctctagtgcccatcggtgccatggcagctctcgcgccgtggatcctacggcggcgacccgtccgctctgtcgcttctctggtctccattcgtgattcatggcatcgaaggtgtgggtcctcttcctcatatccttcagcatcgttcaagtgtttgtggggatggtttggaccagaggcacacgggcggaggaggccgtggtttcagcagcccgtgaggtgcgggagcacgacgatcacacttgatacagatggcaagtttgcgaggtttggagtcggcgatatgggtgtcaccaagcagaagtggaggcagcagccgcctccaaagaagaagatgtcgagaaaggccaaggtcaaccagctcaagtggtaccgcctgaaggccaagaagaagatgaagtcacccaaccccgaagttaggatcagatacaagcttgaaaaggctaagaggaaggaggaatggttgattgagaagctgaggaagtatgaggtcccgaggacaccggagccagttcatgaccctgagattcttactgaggaggaaaagttttatctcaagcgaacgggggagaagaagaagaattatgttcctgttgggaggagaggggtatttggtggtgtggttctcaacatgcacctccattggaagaagcatgagaccgtgaaggtggtttgcaagccttgtcggcctggccaagtttacgagtatgctgaggaattgacaaggctcagcaaaggcacagtcattgatattaaacctaataatacgattatgttttatcgcgggaagaactatgtgcaaccaaaggtgatgtcacctcctgaaactctttcgaagcagaaggccttagagaaatatagatatctacaatcccttgagcataccagccagtttattgagaagctggagaaggagcttgaagattacaagaagcatgttgctttattcaagaaccataataagggggttgctattgagaaaatcagcaatgaagataccactgttgatgatcctgcaactacctcagattctaaatgagctaactatttggacatgctggcatgatagatctttcagtcgtcaaatcttgcaagcctacatagctcaatgttcactattcatattaaatatgctggcttcagttgtggtgatatagggagctagcttgaaaactcagattcagatagaagaagtaatagccataggattttaaaggcttgcaagattaaaatcctggttgatggaaagctgtattacttgaaaaatacctcgttcatcaatctatctctataaggaaaggctagtagcatgatactgagtgcagatcagccttttaatatttctgcaatctttcctgtaaacacttttatgataaaataggacattcttttgaattgtggcccccttttatgtaggcttttcacttcttgggccttccttgctacataaaagacaatgaaattgtaattttggagctggaatagttctgcaggaccctctcagaaatgaagacatttactgtgccacacgttcacgtactgggccgttcctgagctgagaagatgggcatgtgcagaagcacaatgatgactttaaggatttggcttgataaaaaggaagcgaaaagacagcttcgtcagagatagagctctagtcctacgggagttgcactctgctgcacagcgcgagtcttgcattggcaacaagaaattctggaaagagagaacctaccaagagctgagacgtctattcatggaatcgtgacaaacatcgatggttgcagctttctctttccagaaagacctgatctgaagtctgtagtgcttaaagagcaaccattctctttgcagagggaaacatcgatgaacaaaccatttttcatgctgttgacattaaatttcagtgatggttgcagctgtttgagctcctcaattggatggcctgttgattttcagaagcgaaaagacagcttcgtcagagatagagctctagtcctacgggagttgtactctgctgcacagcgcgagtcttgcattgggcaacaagaaattctggaaagagagaacctaccaagagctgagacgtctattcatggaatcgtgacaaacatcgttaggtatgacactgaagatgaaaagttggctccacccaagaatgatttgatgaatcacagccgcagcaaccctgcaaaacggcacgtggaaggcactgattgccactcgtcattgccaaagaaactgaagtactttttgaaagacaagaagctgaactgctaaaagtgtaaaaccgtagaaggtagatagagaatgctgtaggtttgtttattttggttattagacgagttatacgtagcatagatgcatgggaagttcgcatgctaaggttgaactcttctgctgcataggaaagttggctgacttcttatattatgcgagcctagcttaggtacctcctgtggggagaagcgattgcaatacatggtagcatgttgtagagctcctcaccccagttagtcagtgactgatgatggtatcctcttaccagtcctctggtggtatcatcttttgttcacggaggtcgatgaagtactgcctccgataaaaaaaagacgcttttgacattattgctccccaaattcttattttgacggctatactttgcccagcgagtaatatctaataaatatacgttttaacgcaattacatttttttttgtccaagaaaaatatttttggaagctgttgaaggtcaagtgtcaaaattttggatagacgttgacgtagtaggttgagagcaggtacttgcgtgcttcccctgtgaagttttgtttcataat

SEQ ID NO: 4126 - DNA, 2190 bp, Zea Mays
ttttagcctttttttaaaaaattttgtaggctaggcccacaatactgcagaactaaacactgctcagctgctctcggctctcgcgcctgcctgccctagccgctcgcccggtcccactcccgcataggcgccgccgccgctacccgctacccccgcagccggcactcggcaggttcttcccctggcatccggcactcggcttcttcttgccccggctcccggcgcggcggcgcccgctcctcctccccccgctcgcccgctgcaggtcctcccccgcggcacgcgcccgctgctgcagcctgcagctcccaccccaactggcgattgcagctcctccggtcctccccctgccggcgccgcctgcgagctgcacagctgcagctccccccctggctggcagagctgcagcttcaactctcttgaaggcaaaagcttgcatgctctgcgggcgccgacgccgctcgttgggagcactaggattggcttcagttcggggctccgcttttgctccaacagagtcctcagagggttaactcccattggcgcgatgaagtcgtataggctatcggagctcagcgacaccgaagttagcggcctcaaagctcgtccccgcatcgatttctcatctatttttggcacggtgaatccaatcgttgaagatgtccgtgtgagaggtgatgcagcagttaagcactacacagaaaagtttgacaaggtcatgcttgatgatgttgtcgtctgtgttagcgatcttccagatgcagagcttgatccagctgtgaaggaagcctttgatgttgcatatgacaatatatatgccttccatgtttcacaaaaaatacctgagaagacagttgaaaatatgaaaggcgtaagatgtaagagaataactagatgcattggttctgttgggctgtatgtcccaggtggcactgcagtcttgccttcaactgcattgatgcttgctgtgcctgcacagattgctggatgcaaaactattgttcttgccacaccacctagccgtgatggtagcatatgcaaggaggttctttactgtgcaaagaaagctggtgtgacacacatattgaaagctggaggagctcaggcaatctcagcaatggcatggggaactgcatcttgcccaaaggctgagaagatttttggacctggtaaccagtatgtaacagctgccaaaatgattcttcagtgaagctatggtatctatagacatgcctgctggcccttctgaagttttagtcattgctgataaatacgcgaacccagttcatgttgctgctgatctgctatcccaggcagaacatggcccagatagtcaggttgttctagttgttgctggagatggtgttgatctgggtgccattgaggcagaagttagcaagcagtgcaacgcgcttccaagaggtgaattcgcttcaaaagcacttagccacagcttcactgtgttcgcgaaagatatggttgaggcgatatcattctcaaatctgtatgcccctgagcatttgatcatcaacgtaaaggatgctgagcagtgggaggagttcatcgaaaacgcagggtcagttttcttgggccaatggaccccagagagcgtgggcgattatgcgagcgggacgaaccatgtccttccgacctatggttacgcaaggatgtacagcggtgtatcgctgaactctttcctcaaatacatcactgtccaatccctaacagaggaagggctgagaaagctggggccgtacgtcgcgaagatggccgaagtggaggggctagaggcgcacaagagagccgttacccttaggctgcaagaggttgaggccaatgtaactgtctagccgctgtccatggtctattgcaacgttcagactcgatgtgggatgctggagttcttccctaggaacctaggggaactggactattgatgtcttccaaacaggctctggaatgttagaaagaggcgtttcaactggtgcagctaataatgttcattggaccctgatttgtttcacgaataaacttgagcagaacttactgtgtatatatgcagtgttctcgtattagttatttccctagttgcttctgtaccgattttttggattgcgcatatgcatctaatgtgcttcgtgacatgtatgtgtgaggttttgatggaaaataaaaaaaatggcatcgagc

SEQ ID NO: 4127 - DNA, 2214 bp, Zea Mays
ttttagcctttttttaaaaaattttgtaggctaggcccacaatactgcagaactaaacactgctcagctgctctcggctctcgcgcctgcctgccctagccgctcgcccggtcccactcccgcataggcgccgccgccgctacccgctacccccgcagccggcactcggcaggttcttcccctggcatccggcactcggcttcttcttgccccggctcccggcgcggcggcgcccgctcctcctccccccgctcgcccgctgcaggtcctcccccgcggcacgcgcccgctgctgcagcctgcagctcccaccccaactggcgattgcagctcctccggtcctccccctgccggcgccgcctgcgagctgcacagctgcagctccccccctggctggcagagctgcagcttcaactctcttgaaggcaaaagaattgaatcgcactctgttgatgggcagcttgcatgctctgcgggcgccgacgccgctcgttgggagcactaggattggcttcagttcggggctccgcttttgctccaacagagtcctcagagggttaactcccattggcgcgatgaagtcgtataggctatcggagctcagcgacaccgaagttagcggcctcaaagctcgtccccgcatcgatttctcatctatttttggcacggtgaatccaatcgttgaagatgtccgtgtgagaggtgatgcagcagttaagcactacacagaaaagtttgacaaggtcatgcttgatgatgttgtcgtctgtgttagcgatcttccagatgcagagcttgatccagctgtgaaggaagcctttgatgttgcatatgacaatatatatgccttccatgtttcacaaaaaatacctgagaagacagttgaaaatatgaaaggcgtaagatgtaagagaataactagatgcattggttctgttgggctgtatgtcccaggtggcactgcagtcttgccttcaactgcattgatgcttgctgtgattgctggatgcaaaactattgttcttgccacaccacctagccgtgatggtagcatatgcaaggaggttctttactgtgcaaagaaagctggtgtgacacacatattgaaagctggaggagctcaggcaatctcagcaatggcatggggaactgcatcttgcccaaaggctgagaagatttttggacctggtaaccagtatgtaacagctgccaaaatgattcttcagaacagtgaagctatggtatctatagacatgcctgctggcccttctgaagttttagtcattgctgataaatacgcgaacccagttcatgttgctgctgatctgctatcccaggcagaacatggcccagatagtcaggttgttctagttgttgctggagatggtgttgatctgggtgccattgaggcagaagttagcaagcagtgcaacgcgcttccaagaggtgaattcgcttcaaaagcacttagccacagcttcactgtgttcgcgaaagatatggttgaggcgatatcattctcaaatctgtatgcccctgagcatttgatcatcaacgtaaaggatgctgagcagtgggaggagttcatcgaaaacgcagggtcagttttcttgggccaatggaccccagagagcgtgggcgattatgcgagcgggacgaaccatgtccttccgacctatggttacgcaaggatgtacagcggtgtatcgctgaactctttcctcaaatacatcactgtccaatccctaacagaggaagggctgagaaagctggggccgtacgtcgcgaagatggccgaagtggaggggctagaggcgcacaagagagccgttacccttaggctgcaagaggttgaggccaatgtaactgtctagccgctgtccatggtctattgcaacgttcagactcgatgtgggatgctggagttcttccctaggaacctaggggaactggactattgatgtcttccaaacaggctctggaatgttagaaagaggcgtttcaactggtgcagctaataatgttcattggaccctgatttgtttcacgaataaacttgagcagaacttactgtgtatatatgcagtgttctcgtattagttatttccctagttgcttctgtaccgattttttggattgcgcatatgcatctaatgtgcttcgtgacatgtatgtgtgaggttttgatggaaaataaaaaaaatggcatcgagc

SEQ ID NO: 4128 - DNA, 2849 bp, Zea Mays
ccgtccctcctctctccctctctacgccacgcctccacctccacacctgcacgcctctcgctctctctcctcacctgtcgagctgcccacagcccgtacgtacctgcccccagtcccagtccccgccgccccgcctgcccgacccgcggcttatccaccacgtccgccgctgggctggatcgatcgggaccggtatcgcgccgccgccgctgccctcggcactcgcgggatcctgttcctaccatgcagcagcgctgcgcccttgcccgaccgcgccggcccgccgaaccgcgcgttccgctccccgacgatcactccctcgtcgccgtcttctccttcctcttcatccccacctaaatcaacctcctcgccgcgaaattctgctacaatttcttcatcttcccttcccgccgggagcggacggatcgccgcttcctcggccggcgggatgagccgggaggcgcagaaactcgactgcgccgccggcgccggggggatcggggtcctgtcgctggacctactgggccaggtgctggaacacctgcgggagccccgggaccgcaagacgtgccgcctcgtcagccgcgccttcgagcgcgccgaggccgcgcaccgccgcgcgcttcgggtgctccgacgcgagccgctcccgcgcctgctccgcgcgttcccggcgctcgagcggctcgacctctccgcctgcgcctcgctcgacgacgcctccctcgccgcggccgtcgccgacgccggcggagggctcgccggcctccgcagcgtgtgcctcgcgcgggccaatggtgtcggctggcgcggcctcgaggcgctcgtcgcggcctgccccaagctcgcggccgtcgacctgtcgcactgcgtcaccgccggggaccgcgaggccgccgcgttggcggcggcgtccgagctcagggacctgaggctggacaaatgccttgccgtcaccgacatggggctcgccaaggtggctgttgggtgccccaagctggagaagctcagcctcaagtggtgccgtgagatctctgacattggaattgatctgctggccaagaagtgccctgagctccgcagcctcaacatatcctacctcaaggtgggcaatggatcccttggatcaatttcgtcacttgagaggcttgaggaattggcaatggtttgttgttcaggtatagatgacgaaggcttggaattgctgagcaaggggagcgattcgctgcagagtgttgatgtgtcaagatgtgatcatgtgacttccgaggggttagcttcactcatagatggtcgcaattttcttcagaagttatatgctgcagattgtttgcattttgttgaaattatattgataggagataggacagcgttttctatccaagttggcaagactgaaggaaaccttgacattgctgaaactcgacggtcttgaggtctcggactctcttcttcaagccattggtgaaagctgtaacaaattggttgagattgggcttagcaaatgcagtggtgttactgatggaggaatctcatctcttgtagctcggtgtagtgacctaagaacaattgatctcacatgctgcaatctcattaccaacaatgcgcttgattcaatagctgacaactgtaagatgcttgaatgtttgcggttggaatcatgctctttgataaatgagaagggactagagcgaattacaacttgttgccccaaccttaaggagatagacctcactgactgcggagtagatgatgcagcattgcagcacttggctaaatgctctgaattgcgaatattgaaattaggcctatgctcaagtatttctgacagaggcattgcatttatcagttcgaattgtggaaagctcgtggagcttgatctctaccggtgcaactctattactgatgatgggttggcagctttagcaaatgggtgcaagaggattaagttactgaacttgtgttactgcaacaagatcactgatactggtttgggtcacctaggctccctggaggagctcacaaaccttgaactgaggtgcttggtccgcgtaacaggcattgggatctcctcagttgcaatcggatgcaagaacctgatagagctggacttgaaacgatgctattcggttgatgacgctggcctgtgggcccttgctcgttatgctttgaaccttagacagcttacgatatcgtactgccaagtcacggggttgggcctgtgccacctgctgagctccctgcgatgcctccaggacattaagatggtgcacctctcatgggtctcaatagaagggtttgagatggctctgcgagcagcctgcgggaggctgaagaagctgaagatgctctgcgggctgaagaccgtgctctcccctgagctcctccagatgctgcaggcttgtggctgccgaataagatgggtcaacaagcctcttgtctacaaggactagacagactcgtgttcctcattgtgtgtgcagtgtcagcatcagcatgtattgtcaagatcttgcaggtttgccctggctcacgttgtgagtccgcaataatcgttgggggcgtaagctcccgtcccccagatgtggttatggtgcctttggggcacttcttgcgccatttgtcactctctgctccggtgtatctgtgtatgcaaacggaggcaccggtaatgttcatgtgtatatagcgtgcagtagaatgatcccattttatgggattagttagtgtgtaattgttacctcatttcgcatgattcgaatcttgagatgaaagaatcataaggggtatgatcgatgcattgcattcaccggttcttacttttgactggcattatcttatttgacaat

SEQ ID NO: 4129 - DNA, 1358 bp, Zea Mays
tcccgttcctgttcccttcccacctctcccggcttcagacctcgggctccccgctcctgcgccgccgccaccgtcgcggccctcatccctcaaattaaacctctaggcctccactcgttgaagccacgtcactcgtattagcacacctgtccctcgctgtaacggaggcccgtccctcgctgcaacgaatacccctctccctttagctgcactagcactgcactggttcgtatcgtctcccactctccctctccctcccattcacacggtctcagtgaagaactcctccgcgacttggtggccatcgatggcgacgcactgccctaccacgacatgggttgtttggagatggtcatgtacgagcggtggttcatgttctagaagcggcggcaacatcctacacctgagagcggccgagtcatcccgaacccgcacggcacacgcggacgcgctcacgcgcctgggctggggatttatgcttctgacggaaatatttggtggttcagtttgaatcaagagtttttgtgtatttctttcttactatgatttggtagggagggactgaatattatcatggaattggaatacaaataaacaaattcaatctattgcagcggaggataagcatgtaattagcagaccaacaacatttgcacttgtccatgctgatggcactacaaaattcctggcgtgtttcagggacatggaatggagaagatctaccccctcctgatactaaagctattagggatatctgtgtactgcatggcgggcatgttgtattgcatcactgagcaggaagttcccttttcaggtctacaaagaaagtggtgcacccataaggtgagggcatctatcacaaaagtttgtcatgaagcgaaagagatctttcaagagacaaaaaagccaagttggtcatggaatgcttgaaattttattgcatgacaatgatgaagaggaggcagcattgcagagagttgcccaagctgaacgtgcggcaaaataggctgtacaaagagctattcgactgcgcaacaaggtccaattctcatgacaaacacagaactcgcaacatacaaatctatcatagttctcaggattgtcgaggctgctagtatatcagactcgtcccaagatattatttgtattatcctcgactaaagaataatatgggttgttcattatttttgtgaagagcatgggaaacactctttgtagccatgatattggcttttgatgagttgttcattgtttttaagaatatactgccatgtaagtcattttgtttacatcttaatatgacggtttccataatgtccaatatatgtcttttaaataagatgattttcttgttgcaa

SEQ ID NO: 4130 - DNA, 3739 bp, Zea Mays
cgcgctgcgcccgcctgattccgcctgccagccacgctcgcagatctcgcctcgacgccctgccttccatcgtcgcccccatgccacgctccccttccatcctcgctcacttccagccgcccccattcccagttgaaggagccgtccaagaaccgggaaccccatctgggatcaggagcagccgtgtcgcgccactcgtgcgcctgcgcctcgaacctgactttggacgacgccgacggggaccaccctccctccgcatcgaagccgatgagcctctggtggtggtgtccgcggtcgattgaccgattgagccaccgaacagcaccaatcgagcggcattagccccgacctgaagcacacctggccggaatccaaaggatatcgtgcccccgccccgcatcgcgcgatgctcgttgctgagctcccgatgacccacctctcccggagaggacatccctcttctgcatcgacgtcgaactcgaggtccacgccaagatgaagtccgctgccgtagcgtcctcggatccacgtccaccgcgtcgccgtagtccgtaggaggtcgccgccgccgagcaagctgctgtcaccaacgacagcgaggccgccacgctccgcagcgaggttgagcgcctcgagggtctcctcgccgcggagaaggctagccatgaggaggagatgcgcaggggtgcatggctcggggaccagctgcagaccgcgtaccaggagaaggccgccctcgaggaggagatcgagaccctgaagggttccgccactgccgagggcaagggcatggaagagggatgtgattctgttgctgctagggccaggacgcctaaggatcagggcgtggtgcctcccgcactggtccgcggctgctggagcagctgccacggctggcatcgcagtggtcttgtttaacctcaagaggtaatctggtggtccgatgcgcggaagttttgatctgctgctatggcctatatgagaataggcctacatgtatggcaagtacctttactttctgaagttttcaatggtaataagagtcgtgaacacaaacatgaggtataattgagttcttgtctgatcttttgagttgcacctgatcttttgagttcttgtcttggttcgttcttgattcttggacgaggtgggatttggagagccaagggcggcgcggcagcagcgggtttctcggtcggactagattgtttccatcgagatggtgggcggcggagggcattcgtcgatggaccaccctggcgccaaggacgatggagacggggaagaaagccagtacttctcggacgcggaggaccggtcgtggccgtcgcactcgcgccacgactccaccgcctacgaggactacgtctcgctgtgcgtgtccgcccgcgcgagctccgtcgacgccgacgccgatgccgacggcgaggccgtcagacaacactgcaggaagtcgtcgtgcgtgtcagagggctcgctggacgacgttgacctggaggccggactgagcgagatcatcaaggccagccctgagaaggccgaacagaactgtcgcatttgccaccttggcctggagagcacggcggtcgagtccggtgccggcatcacgctcggctgctcctgcaagggggacttatcctacgcccacaagcagtgcgccgacacctggttcaagatcagaggcaacaaatgccaatcggctggagtagacaccctgtttgtggaaggaggtaccatttcataattcggaatgaatacaaaacctgcaagcattgtgaccattgtgggcttatggcccagtcgtttggaacacggtgctcgacatgcaaatatgtgatctcctctgatgatccggaagattgggactataggcagttggataatccacgtcacttgctgcatggtattgtacatgacaatgggtttggtcaccttgttcggataaatgtgtgttagggtcaagaaatactttctatatgtagatatggatctaattctctaacctcctaacaaacctgctacttctcttatccaaaatcttgtaaatagaattagtgtaagtaattctgcatttttataagcttcttctcatggtcccatgactacccaatgtgagaacaaagggggcatcggccctgaaaaccacgcagacaattgacttcttttttttattcatcattttttgctcgtaaggcttgttctacaagtgtttattatactatactatactcattcagatatatgcctttttgcactttgtttcctgtagtttagtcaccttaggaggtgttatcgataattcttagatcttgtctgtacatgatccctcattcactactagcttccttagcaactcacatttgtattatggttcagaaatgcctccacaataaccaatgacttgtctctggtatgatgtccactagcatgaatccaccataaggatgtttagaaattcattgcatttgctataactgagatttcggatccactggcatcattgtggcttgcatgtcagtactttgtacagtagtaaatatagtaacatatatcattttatgttttgtgatagttccatttttacacttacagagtgttgagtatatacttcaaatttgcttttaggctgggtgagaagtacaaatcaatacatctctgtagctcactgaattaactgatttttccttttagtgcaaatatattatatatgtttgccagaagatcattttgctcttgttttaatccatgtatggtaacttgcactgacattctaagtttgattattggatattattgcctttctttccattttccccaatactcatgagtccatggcagccatcatccagtaagttatctggctatcatttagttgcttcatgtagcagaatgcttcaatagctttggcaatatctataagcttttggatttcaggttcctaagcttgtgattttcagctcttgtattaggctataaatgatatgttgttatcccattttcagcaaatcagaacattcatccagatgaggactaacttgaaggtggtcgataactctggggccaagtgagtgatgtgcatccagtccctgagggggaagaaaggagcaaggctcggggacatgatcatcggatccgtaaaggaggcccagcctcgtggcaaggtcaagaaagaagacgtagtctacggcgtggtcgtccgcgccgccatgaagaaagggcgcagcgacggcagcgaggtccagttcgacgacaacgaggtggtcctcgtgaacaagaagggtgagctgatcggcacccgcgtcttcggccccgtcccccacgagctgaggaagaagaagcacctcaagatcctggccctggctgaacacatcgtttgaggtgtgtcgcagagccaagagccaagtgtttatgggaatgtttttttgtctgtgttctctgtttgaataatgcattgtgaaacgatagcatggaccgtttgaactattttgatgatattgctcgcccatttggatggccaatacgtgttgtgatctattctggagtttcattttttggttacaagctgctttcacatgtatgcagatatccttgtctgcgagttcgtctatgtgatgaacttcgaattagttgccaatagcataatcctattaatcctgattgtatatgtcatacaatttacaaattaatctgtgtaaaatttctaaaaaatcaatagttttaaactcgaaaataagtagca

SEQ ID NO: 4131 - DNA, 3909 bp, Zea Mays
ctccgctccctgaagtcgtgatcgaagccgcaatcaacaccctcttccccctccggtcccctccgcgatccgattccgcggcagccgacattcccagcccccaaaatctcatttccctctcccacaccacgcgctgcgcccgcctgattccgcctgccagccacgctcgcagatctcgcctcgacgccctgccttccatcgtcgcccccatgccacgctccccttccatcctcgctcacttccagccgcccccattcccagttgaaggagccgtccaagaaccgggaaccccatctgggatcaggagcagccgtgtcgcgccactcgtgcgcctgcgcctcgaacctgactttggacgacgccgacggggaccaccctccctccgcatcgaagccgatgagcctctggtggtggtgtccgcggtcgattgaccgattgagccaccgaacagcaccaatcgagcggcattagccccgacctgaagcacacctggccggaatccaaaggatatcgtgcccccgccccgcatcgcgcgatgctcgttgctgagctcccgatgacccacctctcccggagaggacatccctcttctgcatcgacgtcgaactcgaggtccacgccaagatgaagtccgctgccgtagcgtcctcggatccacgtccaccgcgtcgccgtagtccgtaggaggtcgccgccgccgagcaagctgctgtcaccaacgacagcgaggccgccacgctccgcagcgaggttgagcgcctcgagggtctcctcgccgcggagaaggctagccatgaggaggagatgcgcaggggtgcatggctcggggaccagctgcagaccgcgtaccaggagaaggccgccctcgaggaggagatcgagaccctgaagggttccgccactgccgagggcaagggcatggaagagggatgtgattctgttgctgctagggccaggacgcctaaggatcagggcgtggtgcctcccgcactggtccgcggctgctggagcagctgccacggctggcatcgcagtggtcttgtttaacctcaagaggtaatctggtggtccgatgcgcggaagttttgatctgctgctatggcctatatgagaataggcctacatgtatggcaagtacctttactttctgaagttttcaatggtaataagagtcgtgaacacaaacatgaggtataattgagttcttgtctgatcttttgagttgcacctgatcttttgagttcttgtcttggttcgttcttgattcttggacgaggtgggatttggagagccaagggcggcgcggcagcagcgggtttctcggtcggactagattgtttccatcgagatggtgggcggcggagggcattcgtcgatggaccaccctggcgccaaggacctcgagcgcggcgagctgcgccgtggcgcgcctgagtttgcggacggcgacgatggagacggggaagaaagccagtacttctcggacgcggaggaccggtcgtggccgtcgcactcgcgccacgactccaccgcctacgaggactacgtctcgctgtgcgtgtccgcccgcgcgagctccgtcgacgccgacgccgatgccgacggcgaggccgtcagacaacactgcaggaagtcgtcgtgcgtgtcagagggctcgctggacgacgttgacctggaggccggactgagcgagatcatcaaggccagccctgagaaggccgaacagaactgtcgcatttgccaccttggcctggagagcacggcggtcgagtccggtgccggcatcacgctcggctgctcctgcaagggggacttatcctacgcccacaagcagtgcgccgacacctggttcaagatcagaggcaacaagctggagtagacaccctgtttgtggaaggaggtaccatttcataattcggaatgaatacaaaacctgcaagcattgtgaccattgtgggcttatggcccagtcgtttggaacacggtgctcgacatgcaaatatgtgatctcctctgatgatccggaagattgggactataggcagttggataatccacgtcacttgctgcatggtattgtacatgacaatgggtttggtcaccttgttcggataaatgtgtgttagggtcaagaaatactttctatatgtagatatggatctaattctctaacctcctaacaaacctgctacttctcttatccaaaatcttgtaaatagaattagtgtaagtaattctgcatttttataagcttcttctcatggtcccatgactacccaatgtgagaacaaagggggcatcggccctgaaaaccacgcagacaattgacttcttttttttattcatcattttttgctcgtaaggcttgttctacaagtgtttattatactatactatactcattcagatatatgcctttttgcactttgtttcctgtagtttagtcaccttaggaggtgttatcgataattcttagatcttgtctgtacatgatccctcattcactactagcttccttagcaactcacatttgtattatggttcagaaatgcctccacaataaccaatgacttgtctctggtatgatgtccactagcatgaatccaccataaggatgtttagaaattcattgcatttgctataactgagatttcggatccactggcatcattgtggcttgcatgtcagtactttgtacagtagtaaatatagtaacatatatcattttatgttttgtgatagttccatttttacacttacagagtgttgagtatatacttcaaatttgcttttaggctgggtgagaagtacaaatcaatacatctctgtagctcactgaattaactgatttttccttttagtgcaaatatattatatatgtttgccagaagatcattttgctcttgttttaatccatgtatggtaacttgcactgacattctaagtttgattattggatattattgcctttctttccattttccccaatactcatgagtccatggcagccatcatccagtaagttatctggctatcatttagttgcttcatgtagcagaatgcttcaatagctttggcaatatctataagcttttggatttcaggttcctaagcttgtgattttcagctcttgtattaggctataaatgatatgttgttatcccattttcagcaaatcagaacattcatccagatgaggactaacttgaaggtggtcgataactctggggccaagtgagtgatgtgcatccagtccctgagggggaagaaaggagcaaggctcggggacatgatcatcggatccgtaaaggaggcccagcctcgtggcaaggtcaagaaagaagacgtagtctacggcgtggtcgtccgcgccgccatgaagaaagggcgcagcgacggcagcgaggtccagttcgacgacaacgaggtggtcctcgtgaacaagaagggtgagctgatcggcacccgcgtcttcggccccgtcccccacgagctgaggaagaagaagcacctcaagatcctggccctggctgaacacatcgtttgaggtgtgtcgcagagccaagagccaagtgtttatgggaatgtttttttgtctgtgttctctgtttgaataatgcattgtgaaacgatagcatggaccgtttgaactattttgatgatattgctcgcccatttggatggccaatacgtgttgtgatctattctggagtttcattttttggttacaagctgctttcacatgtatgcagatatccttgtctgcgagttcgtctatgtgatgaacttcgaattagttgccaatagcataatcctattaatcctgattgtatatgtcatacaatttacaaattaatctgtgtaaaatttctaaaaaatcaatagttttaaactcgaaaataagtagca

SEQ ID NO: 4132 - DNA, 2091 bp, Zea Mays
tcctcgccttgctttctccgccatcctctctgctttccaccaccctataccaaaccagccaaagccctccactcctccccgcctccgcctccgacgtcgaacattcttctccaatggcgacggcccccgcatccctctcgctctccgcctctaccctgcccacccggctccgtgccgcagcggtgctggcgggcatgcgctggaggcagccgcagcgcgggcggatggtggtgcgcgccaagatccgggagatcttcatgccggcgctgagctccaccatgacggagggcaagatcgtctcctggtccgctggagagggtgatcgcgtctccaagggtgacgccgtcgtggtcgtcgagtctgacaaggccgacatggacgttgagaccttccacgacggcatcgtggcggtggtcctcgtccaggctggcgagtcggcgccggtgggcgcgcccatcgcgctgctcgcggagtcagaggaggaggtgccgctcgctctcgccaaggctcaggagctctccaacgggcagccgcagcaggcgcctcctgctccgacggaggatgccgcagcgacgccgccccctccttctgctccggccactgctcccacgccggtggccgtgggtacgaagggcattgccagcccgcacgctaagaagctggctaagcagcacagggtggaccttgccaaggtgactggcaccgggccgtatggtcgaattacgtcggcagatgtcgaggcggctgccggaatccagccgaagtcaaagcccgctcctgctgctgctgcgccaccacctgtggctgcaccttcagtgggtgcggtgcctcaatcggcagttctaccaccggttcctggcgcgactgttgttccattcactaccatgcaggctgcagtgagcaagaacatggtggagagtctggcagtgccagcattccgcgttgggtaccccattattactgataaactcgacgagctgtatgaaaaggttaagccaaagggagtgacaatgacagtgctgctggcgaaggctgcagccatggctcttgcacagcaccctgttgtcaatgctagctgcagggatggaaagagcttcacatacaacagtaacatcaacattgcagtggctgtggcaattgatggtggccttattacacctgttcttcaggatgctgacaagctggatatatatttgctctcgcaaaattggaaggatctagtgaagaaagcacgagcaaaacagctccaaccaaatgagtacagctctgggacttttacactgtccaacctgggtatgtttggtgtagatcggtttgatgcaatccttccacctggccagggagctattatggctgttggagcctcgaaacctacagttgtggctgataaagatggtttctttagcgtcaagagcaaaatgctggtcaatgtcactgctgatcacaggattgtatatggggctgatttggcagcattcctacaaacttttgcaaaggttattgaggatcctgagagcttaactttgtaaggtccttcccgacaagccttatcaatcgagccagtccacgtgatagattcgagattgaacttttcaaggtatctaaatctatacttgctaccttcttgacattgccaagctcattacttaactctgaaacaaattctgttcccatttccgaacacccttctctttctgccagtgtggcttgacaagatccagaagttccactgggcttatctgaagcctttgatccctgcgatcgctccatctcttggacgacaaagtgcaggagggttgtcttcccgtcagctccacgtatatctgacagcttcagcagtgcgtcaagtctgaaagcatttgcccctcctcttatagttccaacattcattctgtttccagtcttgagtaccgcttcaagtaatcttagaaacaatttgctcgacctgagctcgctgcaggctccctagtaaacaaagaagcagttgcagcttcaatagagtgtttctatctttttaaattaatcaaatagctctacttactctaatcagtgcaaaggacatcctgagatgggcaacttcgtcgtcaaaag

SEQ ID NO: 4133 - DNA, 1738 bp, Zea Mays
aaaaggcacatacggacgtgatctggactcaaaagcgtgtccttgatcgcagatgaacatgggctgttttatgcactggatcttggagggaccaacttccgtgtgctgcgagtccagctaggaggaaaggagaaacgtgttgtcaaacaacagtatgaggaggtttccattccaccacatttgatggtcgggacttccatggaactatttgatttcattgctgctgcattggctaaatttgtcggtactgaaggtgaagatttccaactcccagagggtaggcagagagaacttggtttcactttttccttcccggtgaaccaaacatcaatatcatcaggaacactcatcaagtggacaaagggcttttccatcaatggcacggttggtgaagatgttgtttctgagttgagcagggccatggagaggcagggactagatatgaaagctacggcattagtcaatgatacagtgggcacattggctggtgggagatatatggataccgatgtagttgcagctgtaatattgggcactggtacaaatgcagcatatgtggagcatgcaaatgcaattcctaaatggactgggttactgcctaaatctggaaagatggttagtgcttgaattctttatactagggatcacatagttgtatgaaaccatcgtatggtcttacaccattagaaccgtgtaaccatgaaatattattcttggtgctctaggtaattaatacagagtgggggagcttcaaatccaacaaacttcctctttcagaatatgacaaagccatggactttgaaagtttgaaccctggagagcagatatacgagaaaatgatttctggtatgtatctcggagagattgttcgaagaattttactgaagttggcacatgaagcttctctatttggggatgttgttccacctaagctggagctgccatttatattgaggacgccagatatgtcagccatgcatcatgactcctcacatgacctcaaaactcttggagctaaactgaaggacatagtcggggtcgcggacacttccctggaagtaaggtacatcactcgtcacatctgtgaccttgtcgcagagcgtgcagcacgcctggccgccgcaggcgtgtacagcatcctgaagaagataggccgggacaaagtaccaagcggtggcggtaaaatgccgaggaccgtagttgccttggacggtgggctctacgaacactacaagaagttcagcagttgcgtagaagcgactctcacagacttgctcggcgaggaggcttcttcctccgtggtcgccaagctggccaacgacggctctggcattggagctgcgcttctcgcagcctcacactcccagtatcagtatggcgcgagtgactagtagtcctgaaatgggcgcggatcgagattttgagtgtagctctcatttatcttttcttttttcccttttcaaaacatctttttggggatttttttcggcttccttttgttggctattccgtggatgcacttacggctctgcattgggatgtagctagtatagagccaatgagtttggaggttatctaatggcacaaggcaggagcatggaaatggaagcagagcaatgacattcatgctctgcccattcttttttccccttgtatggtgttgtaaaccaataaaaaaatgttaacccttttttttgtgtgtgttggcaataaagagaatacgataatttgaccatgt

SEQ ID NO: 4134 - DNA, 5814 bp, Zea Mays
gcccagatccagatccacgcggcgcggcgcgaccgcggctaccggatcccgccgcggaataatggcctccgcggttgcggcgccgccgccaaccccgccggagtccgacccgcgcctcgtcgagatcttctcccccttcctcgagaagctcataaaaaatgcctcgtggcgcaacaaggcgcactccaagctctcgcacaccgccaagtccatcctcgaccgcctccagaagcccccgccgccgcccgcagccgaggcgcaggcgccgtccacgccgacctcctccccctcgacgccgacctcctcttccgcacagcctggtccgttgcgcagcctgtcgctcgcggactcggagctgctcctcgcccctgtgatctcggcactcggctcgggcagcgccaagctcgccgaggccgcgctggagctccttcacaggctgatcgcacactcctacatccatggcgaggccgacccatctgctgatccctcagcacagctcgtcgcctcactcctggacgccgcctgcaatgcgcttggccttgatgacgagcacattgagctcctcctcctcaagacactcctctcggcggtcacctctacgtctgtacgcctccacggcgattgccttctacgtgccgtgcgcgcatgttatgatatgtacctcgggagccgtagtgccgtcaatcaagccactgccaaggcttcgcttgtgcagatgctggtgattgtgttccgccgaatggaagctgactcctcgaccgtgcctgtacaacccatagtcgtggctgatgtgattgagctacctgatgcaatttcgggctcctcgcccactgctgaccccaacgttgtacagggattcatttcgaagatcattggtgacttcgatggtgcactcacacctctggctcggacaacttcatcagcaggggcaggacccaccgttgcccatgatggtgcatttgagacaacggcagcggcagaggaaggggcaaacccagcggatttgcttgattcaacagataaggacatgcttgatgccaagtactgggagatcagcatgtacaaaacagctattgagggtcgtaaagatgagcttggtgtcgagggggcagtggttggcaccttggacgatgatgctgatgtgagaattgggaacaagttacggagggatgctttcttagttttccgggctttgtgtaagctttccatgaagacaccacccaaggatgcaccagcagatcccatagtaatgcggggaaagatccttgctcttgagcttctcaagatcttgcttgaaaatgctggggctgtgttccggaccagtgagaggtttctcggtgctatcaagcagtatctatgcctgtcacttttaaagaactgtgcctcatcccatatgattgtttttcagctatcttgttctatttttattagcttagtggcaagattcagaccaggattgaaggcagagattggtgtattctttcccatgatcatcttgagagtgttggaaaatattgctcaaccaaattatcaggcaaagatgattgttcttcgttttttggaaaagctctgtggtgattctcaaatcctagttgatattttccttaattatgattgtgatgtccactcatcaaacatatttgagaggatggtaaatggtctactaaagacagctcaaggacctcctgctggtgtccctaccacattggtaccacctcaggacaccacaatgaaaagtgaagcaatgaaatgcttagttgctattctgaggtccatgggagattggatgaataagcagctacgaattccagatcctgcttctcctaatgtagaatcagagaagaacgacaatgatgatggcaatgagcttccgcaggcagataacaatggagatgagtctagtgaagcatctgattcacattctgagttatcgaatggaatttcagaggcagcatcattggaacaacgtcgagcttacaagatagagcttcaggagggtatctatttgtttaatcggaagccgaagaaggggattgagttccttgttaatgcaagcaaggtgggggagacaccagaggagatagctgcgttcctaaaaagtgcttctggcttgaacaagactatgattggtgattatttaggtgaaagggaagatttatcgctgaaagtcatgcatgcatatgtggactcatttgattttcaaagactggagtttgatgaagcaattagagctttcctccaaggcttcaggttgcctggagaagctcagaagattgatcggattatggaaaagtttgcagagcgttactgcaaatgtaatccaaaggccttttccagtgcagatacagcttatgttctggcttattcagtcataatgcttaacactgatgcacataacccaatggtcaaaaataagatgtcaccagaagatttcattagaaacaatcgtggtatcgatgatgggaaggacctacctgaagaatttatgagatcattgtatgaaaggatttggaaaaaggagattaagatgaaagaagatgaatttgttccacagcagcaacaatcaacaagttctaacaaaattcttgggttggataacattcttaacattgttgtacgcaagcgaggttcatctatggagacaagtgatgacctcattaagcatatgcaggagcaatttaaagaaaaggcccgcatgtctgagtctgtattttatccagccacagatgtagttgttttgaagttcatggttgaggtttgctgggctcctatgcttgcagcattcagtgttccacttgaccagagtgatgatgaaattgttgtatcccagtgccttgaaggatttcgctctgcaatccatgttactgcagccatgtcaatgaagactcaaagagatgcatttatcacttcacttgccaagtttacatcacttcactctgctgctgatattaagcagaaaaatgttgaagccattaaggcaattctattaattgcagatgaagatggaaattacttgcaagaagcatgggagcatatattgacatgtgtttctcgttttgaaaatctacatcttgttggagagggagcacctccagatgccactttctttgcgctgcagcagccggaccttgataaatcaaaacaggctaagtcatcgattcttcctgttctgaaaaagaaggctcctaatgctacttcagcttctaaaagaggctcttatgatagcgctggtgtcggtggcaaagcttctggtgtggatcaaatgaataatgaggtgacaagcctcttggagcaagttgggatggctgaaatgaaccgtgtatttgtaagaagtcaaaaactcaacagcgagggtataattgattttgtgaaggctctctgtaaggtttcaatggaggaattacgttcggcttctgatccacgagtttttagtctgacaaagatagtcgagatagcaaaatctttcaatcgcaatatttgctatggactccttgcggcagttatctatgaagttcctggagcgtgaggagctcacaaactacaatttccaaaatgaatttatgaagccttttgttgttgtaatgaggaagagccgagctgttgagatcagagaacttatcattaggtgtgtctctcaaatggtattggcccgtgttagtcatgtgaagtcagggtggaagagtatgtttatggtctttgcgacagcgtcatatgatgatcacaaaaatattgtactattggcctttgaaattatagaaaagattttgcgggaatactttccatacattactgagactgagacaacgactttcaacgattgtgtgaattgtcttatcgcgtttactaacagcaggtttaacaaggatataagtcttaatgcaattggatttcttcgattctgcgcagcaaagttggccgaaggtgatattggatcctcaaggttgaaggacaatccttcaaacagtaatccaccctcgcctcatttgactaatgatggaaagcaggaatgcacagttcttgttgacaaggaagaccatatacacttttggtttcctttactagcgggactgtctgaacttacctttgacttaagaccagaaatcaggaaaagtgctttgcaagtgttatttgatacattaagaaaccatggccatcttttctctctgcctttatgggagaaggtgtttgattcagtgcttttccccatatttgattatgtacgtcatgctattgatccatctggtaatcctccacaaggacaaagcgtggaaaatgatcctgcagaacttgatcaagatgcttggttatacgagacatgcactttggcacttcagttggttgtagatctctttgttaagttctatgatacagtcaatcctcttctaaagaaggttctgctgctcttgacaagtttcataaagcgtccccatcagagtcttgctggtataggtattgctgcatttgttcgtttgatgagcagtgctggatctatgttcgtggatgaaaaatggctagaggttgtattgtcattgaaagaagctgccactgagacacttcctgatttcacttatgtttcatctggagcctacctggaaaatgtgccaacagaaaatggagtctctgctgacaatagagaggacgaatctgaaccagtagcggatgacaatgaagaatcctctagatcaaggaatctatactttacaattggtgatgccaaatgtcgagctgctgtacaactcctgttgattcaggctgtgatggaggtatataacatgtacagaggacagttatcagcacagaacacagtaatcctcttcgaagccttgcatactgttgccgcacatgctcacaaaataaacagtgatagtgatttgcgttccaagttgcaagagttgggctcgatgacacagatgcaggacccgccattgttacgccttgagaatgagtcgtaccagctgtgcctcagtatccttcagaacatatttctggacagctctcctgatcatggaagcacagaggtggtggagagtcaccttattggcttgtgcaaggaggtccttgaggtatacttgagcacagcaagaccttctcagccttccagtggcacacagccgctaggccattggcttatccctgttggttcatcgaagcgaagggaacttgcggcaagagcacctcttgttgtctcaaccctgcaagctatcagcggactaggtgactcagctttcgagaagaaccttcgccagttctttcctcttctcgctgggctcataagctgcgagcatggttctagtgaagtacaggtggccctgagtgatatgttcagcacttgggttggcccactcgttctccagtcttgctgatgctgaacatcatgttatacatagtagtatacatcccatcgtgttcctcctttcctccattatgttatgttaatcttttagtcgctgggagttcatattgttgtgctgaactgatcatgcagatcaatttttccttgacgttattttcttgttcgtatcgggaggagtgtatgtcactatagagaactgaattatgtacggtagtttagctaaaattgtgcccattctgttcctaatgtgctgatttctagatttttaggcatgttttgcatgcttttgctcagtagcgtttctcctttctggaattctggaatgtggtagggttggattataattcttgcgagttgggtgtgttaggctatcttcttttatcttaccttctattttaaactctattatgtaattagtgcaatttatagtataaaacattgttttgcacgtccatttacac

SEQ ID NO: 4135 - DNA, 5869 bp, Zea Mays
cctgagtcccctcccctcccatctctatccacgacaaccgacgccccactccccgatccaaaccacctcaaacccccgccccgcccagatccagatccacgcggcgcggcgcgaccgcggctaccggatcccgccgcggaataatggcctccgcggttgcggcgccgccgccaaccccgccggagtccgacccgcgcctcgtcgagatcttctcccccttcctcgagaagctcataaaaaatgcctcgtggcgcaacaaggcgcactccaagctctcgcacaccgccaagtccatcctcgaccgcctccagaagcccccgccgccgcccgcagccgaggcgcaggcgccgtccacgccgacctcctccccctcgacgccgacctcctcttccgcacagcctggtccgttgcgcagcctgtcgctcgcggactcggagctgctcctcgcccctgtgatctcggcactcggctcgggcagcgccaagctcgccgaggccgcgctggagctccttcacaggctgatcgcacactcctacatccatggcgaggccgacccatctgctgatccctcagcacagctcgtcgcctcactcctggacgccgcctgcaatgcgcttggccttgatgacgagcacattgagctcctcctcctcaagacactcctctcggcggtcacctctacgtctgtacgcctccacggcgattgccttctacgtgccgtgcgcgcatgttatgatatgtacctcgggagccgtagtgccgtcaatcaagccactgccaaggcttcgcttgtgcagatgctggtgattgtgttccgccgaatggaagctgactcctcgaccgtgcctgtacaacccatagtcgtggctgatgtgattgagctacctgatgcaatttcgggctcctcgcccactgctgaccccaacgttgtacagggattcatttcgaagatcattggtgacttcgatggtgcactcacacctctggctcggacaacttcatcagcaggggcaggacccaccgttgcccatgatggtgcatttgagacaacggcagcggcagaggaaggggcaaacccagcggatttgcttgattcaacagataaggacatgcttgatgccaagtactgggagatcagcatgtacaaaacagctattgagggtcgtaaagatgagcttggtgtcgagggggcagtggttggcaccttggacgatgatgctgatgtgagaattgggaacaagttacggagggatgctttcttagttttccgggctttgtgtaagctttccatgaagacaccacccaaggatgcaccagcagatcccatagtaatgcggggaaagatccttgctcttgagcttctcaagatcttgcttgaaaatgctggggctgtgttccggaccagtgagaggtttctcggtgctatcaagcagtatctatgcctgtcacttttaaagaactgtgcctcatcccatatgattgtttttcagctatcttgttctatttttattagcttagtggcaagattcagaccaggattgaaggcagagattggtgtattctttcccatgatcatcttgagagtgttggaaaatattgctcaaccaaattatcaggcaaagatgattgttcttcgttttttggaaaagctctgtggtgattctcaaatcctagttgatattttccttaattatgattgtgatgtccactcatcaaacatatttgagaggatggtaaatggtctactaaagacagctcaaggacctcctgctggtgtccctaccacattggtaccacctcaggacaccacaatgaaaagtgaagcaatgaaatgcttagttgctattctgaggtccatgggagattggatgaataagcagctacgaattccagatcctgcttctcctaatgtagaatcagagaagaacgacaatgatgatggcaatgagcttccgcaggcagataacaatggagatgagtctagtgaagcatctgattcacattctgagttatcgaatggaatttcagaggcagcatcattggaacaacgtcgagcttacaagatagagcttcagccgaagaaggggattgagttccttgttaatgcaagcaaggtgggggagacaccagaggagatagctgcgttcctaaaaagtgcttctggcttgaacaagactatgattggtgattatttaggtgaaagggaagatttatcgctgaaagtcatgcatgcatatgtggactcatttgattttcaaagactggagtttgatgaagcaattagagctttcctccaaggcttcaggttgcctggagaagctcagaagattgatcggattatggaaaagtttgcagagcgttactgcaaatgtaatccaaaggccttttccagtgcagatacagcttatgttctggcttattcagtcataatgcttaacactgatgcacataacccaatggtcaaaaataagatgtcaccagaagatttcattagaaacaatcgtggtatcgatgatgggaaggacctacctgaagaatttatgagatcattgtatgaaaggatttggaaaaaggagattaagatgaaagaagatgaatttgttccacagcagcaacaatcaacaagttctaacaaaattcttgggttggataacattcttaacattgttgtacgcaagcgaggttcatctatggagacaagtgatgacctcattaagcatatgcaggagcaatttaaagaaaaggcccgcatgtctgagtctgtattttatccagccacagatgtagttgttttgaagttcatggttgaggtttgctgggctcctatgcttgcagcattcagtgttccacttgaccagagtgatgatgaaattgttgtatcccagtgccttgaaggatttcgctctgcaatccatgttactgcagccatgtcaatgaagactcaaagagatgcatttatcacttcacttgccaagtttacatcacttcactctgctgctgatattaagcagaaaaatgttgaagccattaaggcaattctattaattgcagatgaagatggaaattacttgcaagaagcatgggagcatatattgacatgtgtttctcgttttgaaaatctacatcttgttggagagggagcacctccagatgccactttctttgcgctgcagcagccggaccttgataaatcaaaacaggctaagtcatcgattcttcctgttctgaaaaagaaggctcctaatgctacttcagcttctaaaagaggctcttatgatagcgctggtgtcggtggcaaagcttctggtgtggatcaaatgaataatgaggtgacaagcctcttggagcaagttgggatggctgaaatgaaccgtgtatttgtaagaagtcaaaaactcaacagcgagggtataattgattttgtgaaggctctctgtaaggtttcaatggaggaattacgttcggcttctgatccacgagtttttagtctgacaaagatagtcgagatagcaaaatctttcaatcgcaatatttgctatggactccttgcggcagttatctatgaagttcctggagcgtgaggagctcacaaactacaatttccaaaatgaatttatgaagccttttgttgttgtaatgaggaagagccgagctgttgagatcagagaacttatcattaggtgtgtctctcaaatggtattggcccgtgttagtcatgtgaagtcagggtggaagagtatgtttatggtctttgcgacagcgtcatatgatgatcacaaaaatattgtactattggcctttgaaattatagaaaagattttgcgggaatactttccatacattactgagactgagacaacgactttcaacgattgtgtgaattgtcttatcgcgtttactaacagcaggtttaacaaggatataagtcttaatgcaattggatttcttcgattctgcgcagcaaagttggccgaaggtgatattggatcctcaaggttgaaggacaatccttcaaacagtaatccaccctcgcctcatttgactaatgatggaaagcaggaatgcacagttcttgttgacaaggaagaccatatacacttttggtttcctttactagcgggactgtctgaacttacctttgacttaagaccagaaatcaggaaaagtgctttgcaagtgttatttgatacattaagaaaccatggccatcttttctctctgcctttatgggagaaggtgtttgattcagtgcttttccccatatttgattatgtacgtcatgctattgatccatctggtaatcctccacaaggacaaagcgtggaaaatgatcctgcagaacttgatcaagatgcttggttatacgagacatgcactttggcacttcagttggttgtagatctctttgttaagttctatgatacagtcaatcctcttctaaagaaggttctgctgctcttgacaagtttcataaagcgtccccatcagagtcttgctggtataggtattgctgcatttgttcgtttgatgagcagtgctggatctatgttcgtggatgaaaaatggctagaggttgtattgtcattgaaagaagctgccactgagacacttcctgatttcacttatgtttcatctggagcctacctggaaaatgtgccaacagaaaatggagtctctgctgacaatagagaggacgaatctgaaccagtagcggatgacaatgaagaatcctctagatcaaggaatctatactttacaattggtgatgccaaatgtcgagctgctgtacaactcctgttgattcaggctgtgatggaggtatataacatgtacagaggacagttatcagcacagaacacagtaatcctcttcgaagccttgcatactgttgccgcacatgctcacaaaataaacagtgatagtgatttgcgttccaagttgcaagagttgggctcgatgacacagatgcaggacccgccattgttacgccttgagaatgagtcgtaccagctgtgcctcagtatccttcagaacatatttctggacagctctcctgatcatggaagcacagaggtggtggagagtcaccttattggcttgtgcaaggaggtccttgaggtatacttgagcacagcaagaccttctcagccttccagtggcacacagccgctaggccattggcttatccctgttggttcatcgaagcgaagggaacttgcggcaagagcacctcttgttgtctcaaccctgcaagctatcagcggactaggtgactcagctttcgagaagaaccttcgccagttctttcctcttctcgctgggctcataagctgcgagcatggttctagtgaagtacaggtggccctgagtgatatgttcagcacttgggttggcccactcgttctccagtcttgctgatgctgaacatcatgttatacatagtagtatacatcccatcgtgttcctcctttcctccattatgttatgttaatcttttagtcgctgggagttcatattgttgtgctgaactgatcatgcagatcaatttttccttgacgttattttcttgttcgtatcgggaggagtgtatgtcactatagagaactgaattatgtacggtagtttagctaaaattgtgcccattctgttcctaatgtgctgatttctagatttttaggcatgttttgcatgcttttgctcagtagcgtttctcctttctggaattctggaatgtggtagggttggattataattcttgcgagttgggtgtgttaggctatcttcttttatcttaccttctattttaaactctattatgtaattagtgcaatttatagtataaaacattgttttgcacgtccatttacac

SEQ ID NO: 4136 - DNA, 757 bp, Zea Mays
ctcacactctcactgatatcagagcatctactttcgagaccttgtttgctgttatggttgatgatttggtggaggcgtccaagtcaatttcaacattgccttctatggttgagcgagacattcagaccgacactgtcaggaaaccagggagccatacaaggaatctgcttagagtgaagcgcgggattgatatggttaaagtcctgtttgagcaaattcttgtcacagaaggcaactcactaagggatgcagcatcggtggcttatgctcaggtctttgctcctcaccatggatgggcaataaggaaagcagtttctgctggaatgtacgcccttccctcaaagtcccagctgttgaagaaattgaatgaagatgaggaatcagcaaaggttcaaatgcagaactttgtcaggtcatcagctccagtaatctgctatgttgatgaccttttcacctcaaggaatttgggcatagattggtgaagaaaaatatggatacgtttgtttgatgtactaatccagtcagatggtgtgctgtgtgagctgggctcagaaaacctttttctggatccgtgtttccaagtcgtaaactaatataactacttagcgatcccgttctggagttatttgtgatgtttgcgcagtataaatatacgtgtcgacaaatataactacttagcgatccctgataatactggagttaggcgatgagaaaatatacgtgtcggctgattggaaaattttctagacatgctgct

SEQ ID NO: 4137 - DNA, 880 bp, Zea Mays
tttaaggactggatggtctcacactctcactgatatcagagcatctactttcgagaccttgtttgctgttatgtgtgcagctgtcgtactttgggctcaaaacgatggtggtgatgattagcttcaattctttctcggtgcacggattttggcttgtgattagtaaccaaaactatgaggttgatgatttggtggaggcgtccaagtcaatttcaacattgccttctatggttgagcgagacattcagaccgacactgtcaggaaaccagggagccatacaaggaatctgcttagagtgaagcgcgggattgatatggttaaagtcctgtttgagcaaattcttgtcacagaaggcaactcactaagggatgcagcatcggtggcttatgctcaggtctttgctcctcaccatggatgggcaataaggaaagcagtttctgctggaatgtacgcccttccctcaaagtcccagctgttgaagaaattgaatgaagatgaggaatcagcaaaggttcaaatgcagaactttgtcaggtcatcagctccagtaatctgctatgttgatgaccttttcacctcaaggaatttgggcatagattggtgaagaaaaatatggatacgtttgtttgatgtactaatccagtcagatggtgtgctgtgtgagctgggctcagaaaacctttttctggatccgtgtttccaagtcgtaaactaatataactacttagcgatcccgttctggagttatttgtgatgtttgcgcagtataaatatacgtgtcgacaaatataactacttagcgatccctgataatactggagttaggcgatgagaaaatatacgtgtcggctgattggaaaattttctagacatgctgct

SEQ ID NO: 4138 - DNA, 3716 bp, Zea Mays
cgcgtaacccacatggtccacaaccccccggctgtctctacctccttcctcgctcacctcctcacgacgtgaggaatcgatcaggccaccgccgtacccgtcggagatccgctccgcccgcgcgatttcgatccgaaacacctcgtcggatcttcagggatctgactgaggggcagcgcgccggctgctgacacggcgggcacgcgcgcagccagccatggcgcgtggtggcggaggcggctgctgcccgccaatggatctgatgcgatcggaggcgatgcagctggtgcaggtcatcatacccgctgagtcagcgcacctcaccgtctcctacctcggagacctcggcctcctccagttcaaagacattaaaaggtgtagtgaaatggctcgtaaattaaggttttttaaggagcagatgtcaaaagctgacataacagcctctcctacacaactaaatggaactcatatggattttgatgaattggagataaagcttggagaactggaagctgagctaactgaagttaatgcaaacaatgaaaaattacagaggacctataatgagctattagagtaccatactgttctccaaaaggctggtgaatttttctattcagctcaaagaactgctgcagcgcaacaaatggaaatggaggcaaatcaatctggtcaaacttcactggagagccctctgttggaacaggagatgacaactgatccatcaaaacaagtgaagcttggctcattgagtggacttgttccaaaggaaaaggcaatggcttttgaacggatcttattccgtgccacaaggggtaacattttccttaggcaagagcctgttgatgagccagtcactgatccagtttctagggagaaggtaacgaaaaatgcatttgtcatattctactctggagagagagcaaaaaccaaaattctgaagatatgtgatgcctttaatgcgaaccgttacccgtttccagaagatgttggcaaacaacttcatgctgttcaggaggtatctgggaagatctcagagttgaagacaacaattgacatgggtttagctcatcgtgacagtatactaaaaaatattgcttctgattttgaacagtggaaccatctggtcaaaaaggaaaaggcaatttatcacaccttgaacatgctaagtgttgatgttacgaagaaatgtttagttgctgagggctggagtccaatttttgcaagcattcagattcaagacgctcttcagcgtgctactcttgatagcaaatcccaagttggctcaatatttcaagttctcaacacaaaagaatctcctccaacatatttccagacaaataaatttacttcagcgttccaggaaattgttgatgcgtatggtgtagccaagtatcaagaagcaaatcctggagtattcaccattgtgactttccctttcttatttgctgtcatgtttggtgattggggccatggaatttgcttgttacttgcaacactctatcttataatccgggagaagaaactagcttcacagaaacttggagacataatggagatgatgtttggtgggcgttatgtaattatgatgatggcagttttttcaatctacacaggattaatatacaatgaatttttctctgttccatttgggcttttcggtaaatctgcctatgcatgccgtgattcttcttgcagtgatgctactaccgaaggacttcttaaagtaagagatgcatacccttttggtgtggaccctgtctggcatggtagccgcagtgagctaccgtttctcaactcactgaagatgaagatgtcgattcttcttggagttgcacaaatgaaccttgggattgtgattagttacttcaatgcaaaatttttcaggaacagtattaatgtgtggtaccagttcattccccagctgatcttcttgaacagcttatttggctacctgtccttgctcattattattaagtggtgcacggggtcgaaagcagatctataccacgttatgatctacatgttccttagcccaacagatgatcttagtgagaaccagttgtttagtggccagaagacagtgcagcttgttctacttctgcttgctttagtgtctgtaccttggatgttgattccaaaacctcttcttttgaagaaacaacatcagcaaaggcatcaaggtcaccagtacgctatgcttcagggcattgatgaatcagtgggagcagaattgggggaacatcatgaggacgcacatgaccacgaggagtttgagttcggtgaagtttttgttcaccaactgattcacacgatagaatttgttctgggtgcagtctcaaacaccgcttcataccttcgtctttgggctctgagtcttgcacactctgagttgtccactgtattctacgagaaagtactaatgacggcatatgggtttaacaatgttttcatccttattattggtgtcgtcatcttcatctttgccacgattggtgtcttgcttgttatggagaccctgagtgcattccttcacgcgctgaggcttcactgggtggagttccagaacaagttctatgaaggtgatggctacaagtttgccccattctccttcgcgctgattcgtgaggaggaagattgagcttgtctcaacatttgtatttattgtagccgataaaaaatctttggtggtctttgttcccagaccaaatcattttttcatctgttgtgtcggatgtggatcataaaccaccgtccctttgtttaaactgggacgaacagcatcatttttccttagctatgcagaggattcttgggttggttggcaacagatatggggtgatgtcacccttgtatgatgctaataagtagttgccgattgggcggtgtgttggatataaataagcactgtattgaaggttagacaatctccatcacgttcattgtcaataaaataaagagtgctatttacgctgctggtgttaatcatctcctggtctgttgttaaccattgtcagtgcttcatcttatcccattgatactctgaatcagctgtctcttataaccaaagcaaaagctaaaccagaatcacgttataaaagtagttaaacatgtcgagtctgtctgcttgtgggcaatctagtaacataggtagctgcagcctagtttcgtcagtcgtcaacgacgttgggaacgctgctggtgctgcgcctagagctgctgaaaggtcccgtgacagtccggccaacgaacttgccggccttgctgagtccgctaccgaacgcgccaatgccggagccgacggcgccgatgcccgtgccaaccatcccaacgccggagccggccgcgctgacacccgtgccggcaacggtgccggccgccgcgatgcccgtgccggccacgttggtgaccgtggacgccatgccgcttgccgcgtccgcggcgccgctgacggcccccgtctcgctcttcaccttccgccgctcatccacggtctgcttctccagctccagggcctcccgcgcctctgcgttggtgaactggtggtacgccaccttaatgctgagcacgcccctgtccttcttgtccttgaccttggtcgtgtccagcgacgacagcagctgcagtttcacctcctgcacggtttccatctccaggtcgctcaggggcagcttggcgatgccaagcctcttgtcttgcttcatcttgtcctcatc

SEQ ID NO: 4139 - DNA, 2832 bp, Zea Mays
ggacaatgtttggacacttgaagcttggtagaaaatactttccaagaggtaaagagcaagcgcgacaagaagaaagagattaaagaggttcctgagacaagatatcgatcggcaaatagttctactaatcgaagccttagaagtggtgcagatcgtggtggacgtagcaattctgtgcactccagctctactgataacatgacctcaaggccaccagtctcagggtcttgtacggcatcagttaattccaatcaaatgcagacaattgcaagttcctctgcaaacaaacatatggttactgatggactagctgtatcattgcaatcatcgtgtgggtttcagcatggtggttggtctgggacacctggtcagttgtcgatggttgacattgtgaaaatgggccgccctcagggaaaggcttctagcaaacctgtggtcacagctgacagaggttatgctggacagtacccatctttgccaagcacaaaccagaacctcaaacaatctggaagcatggtttccccagcagagcttgacaaggggttacaacctgcccacaatttggttcaggttaagaatcatggtcattttactgctgatagcaagctcccatatggtactgattggtctccacaagacgacccaacatctgagaaccaatcttcccagcctgagacgtctggtgatccatctttgtatgaatcatcatttcagtcatctacattggttactgatgtagttaattcacatgaaaattcacacttggagttggatgaaaacagcacctttgcaatgagatcaacacctgcctctgagagacacttggaacctagtgacagtattcctgaatacaatgatggaatattaaacaactcaagttcatatcagcctcataattactcttacacagaacaagatgttgaggattccagtgctgatgtatcagcagcagcagaaaatttccagagtttaagcctacataatgatgagttagctgcaaaaaagactgctgaagataaccctgcagtgataattcctgatcatttgcaagttaccaatacagaatgtgttagtttgagctttggcagttttggatctggtgcattttctgggctactcccacaaaagaccactgatagcaatgtggaattccttgttcaagaggattctgcaacagtagatccaatagatgccaggaatcaagattactatgaaagtggtgcagtaacttcaccagcagaagaaaatcttgaggccatgctaggaactaacatggagaatgtcgatgcaccttctgtttcacaggctaatgagctcagtcaggacgtacttgatccttctgtacttaaatatgacgtgtcatcagtttcaagtcatgcttattcgaacatgaacactccacaacctagcacaatagaggacccacaaggaaacaaccaagcacatacgctttcccatttgtcaaacatgatgcaagcaaatcctttgagcactagcagcctattggcgtcaaatcaaaatcatccatctcttcatggcttagagtttgatttgccttatcttgaagcaaaatataacgcaggcacgactacaaatcctagaccagccatatccatgcaggaggccctgaaagcaggggttttctccaacgctcggtctacgcagtctcttccaagtactagcattccgacggggcatcctctccctcagcaattagcacatcacccttactctcagccgactttagcacccatcacacatttcccaaatatcgttggctatccgccgtatttgccacaaaactatgctgcttacctatcttcgggcaccttccagcaagcatacccgagcaatggagcattccatcagtctgctgccgctttgctcggatctggtatgaagtactcggcccccgagtataagaacaacctgtctgccacaggcttacaacagcaacatcagccacaaccgcaaccaccttcatcagtcatctctggttatggaggccttggaagctcaagcaatatacaaggaaattttacccttaatcagagtactggcactggatcaactcttgtgtttgatgatgcattgggcagacagtacaaagacaccagtcaacacatagctctccagcagcccgacaactctggaatgtggcttcatggctctggttcaagagcggcggcgcttccgcctaaccacttttatggttaccagggacagagtcagctgggtggctttggtcaggcgcagcagcaacagccttcccaattcggaggccacgggtacccgactttctaccagtctcagggtgggctgacacaggagcaccacccccagaaccttgctgagggcagcctgaatggcttccaggtcgcaccgtctcagccgtctcatccgagctggcagcatcagcacacctactgagcattgttctcccttgttatggtctgtctctttcgccgtcacaagccaagtttcgcgtgcttgtgcccttactcgatgcagagtaagctgctcggattttagctgagcttgtaccttcagcgctgagaagggtcccaggacccaggcatacaacagttagagcgttttaacatgctgcgtgcgtgcgtgtgtgtgtgttgccagaccgatgccttgtggtttttcgatagcgagttatatgtgcggaggcgcagtcatgtataactgagacatgataacataacaaccaatcgtttcgcttgcatttttttggtcatgcacacatgcggttatcgcttcaggaagaaaaaaaggagcacctctgactcagcttatggattataaatattttcaatctcacca

SEQ ID NO: 4140 - DNA, 3858 bp, Zea Mays
atggatttgtccaggctcgcctccgtcgccgggcccagccgcgcggccccgcgggcgggcctgcagatcggcgccgccgggaatggcttccgcgtctgctccctgcggcaccgcggcgccgggaacgggcgcctcacgtccgccgccgccctcctccgcggcagcagcgggctcttctacctggctcccgcgcgcgggggccctccccgtctccgcgccagagggcggccgcggtgccagggcagcgactcgttggcctacgtcgacggccccttggaggccgccaagggctccggcgaggtctacgacgacgatgccaccagctcggggcccgacgacgacgacaatgacaagggccccgccgacgtggacggtctccgggagatgctgcagaggtgcaggaacgagctcgaggtggccaggctcaacagcaccatgttcgaggagaaggctcagcggatatccgagtcggccatcgcgctcaaggaccgcgccgaaggcgcccagagggacgtgtccgcggccgtcgccaccgtgcaggaggtcatcgtcaaggaggcggacgccaaggaggccgtccagaaggctaccatggcgctgtcgatggccgaggccaggctgcagctggcgtccgaggcgctggatgccaagcgggggtcggtcgggcccatggaggttagcatcgaaggcgtggaggaggaggcccttgtgtctgctcaggaagagatcaaggattgccgggcagccttgttgcggtgtgaggaggagctggaacgcatccaggaacagaaaatgaacctgcagaaggaggttgataggctcaccgagctcgctgagaaggcccagttggatgcatccaaggccgaagaagatgtcaccaatataatggtgttggctgagcaggcggtggctcttgagatgaaagccacgcagcgtgtcaacgacgcggaggcggtgctgctgaaagcggagaaggtcatatcctcggttgacaccgtggtggagctaacatcacttgctgaagagcagaaaagcgctgaagaggatagcgtttctgaagggtatgagtatagcagcaatggcactgatgatgttcctgtgagggatgaggtgtcaagtatcgagcgtctaatggtaggtgacttgactgttgagggcattgagcagcttgaaccatcccgtgaaatatatgatgaagcaagcagcgataagatgtccgttgagcctcagaaagaagctgagcctgattcagacaagttgaagcaagggaagaagcaggaaatggaacgaaaggagttcaccaaggaaccactgagtgctcaaaaatcactgaagaagagatcatcccgcttcttcccggcatctttcttctcctccaaagctgatggagagtttacacctacatctgtctttcgggggttaatgaaatcagtgcaaaaacaggctcccaagcttgttgttgggatattgcttcttggtgcaggagctgagaagagtcaactatttcagcagcaagaaattgccacaagtattggaaaggtaacctccacgacaaagcccatagttcgtgagatacggcaaattccacagagagtaaagaagctaatagagctcttacctcatcaagaggtaaatgaggaagaagcttcacttttcgacatactgtatttgcttcttgccagtgttatttttgtaccattatttcagaaaatccctggagtcctgttcttggatatcttgctgctggtgtcctcattggtccatatgggctctccatcatccgtaatgtgcatgggacaaaggcaattgcggaattcggagtcgtgttcttactgtttaacattggacttgagctttctgtggaaaggctaagttcgatgaagaagtatgtcttcggcttgggatctgctcaggtgctagctactactgcagctgttggtgtgatagctcatcgttttgctgtgctaccaggaccagcagcaattgttgttgggagtggcttggctctgtcatccacggctgttgtcttgcaagtattgcaagagcgtggtgaaagtacgtcgcgtcatggacgtgccacattttctgtgttattgttccaggatttggctgtggtggtcctgttgatattaatacctctcatatcacctaattcttcaaaaggaggggttggtttccaagcaatagcagaagccatgggaatggctgcagtcaaagcagtagctgctataactgccataattgctggaggtcgtctgttgcttcggcctatttacaagcaaattgctgaaaatcagaatgctgagatattttcagcaaatacactccttgttatttttggcacaagtcttcttacagcccgggctgggttatcgatggcacttggagcttttttggctggtctgttactagcagaaacagagttctccttacaggttgagtcagatatagctccttatcgtggtcttctgttaggacttttctttatgacggttggaatgtctattgacccaaagctgcttctgtcaaacttcccaatgatctctatgatattgggtctcttgataattggaaagacattgttggttacatttgtgggcagggtatttggggtttctactatagctgccattcgtgttggtctcttgcttgcgcctggtggtgagtttgcttttgttgcctttggagaagctgtcaaccagggtcttctatcacctcaattatcatcgttactgtttttagtcgttggcatttcaatggctctgacaccatggttagctgctggagggcagtttctggcatcaaaatttgagcagcatgatgtgaggagtttattgcctgtggaaagtgagactgacgatttgcacgaccatattattatattaggctttggacgtgttgggcagatcgttgcgcaactcctgtcagagcggttaattccttttgttgcccttgatgttagaagtgatcgggttgcagttgggcgtgcacttgaccttccggtatattttggggatgctggaagcagagaggtactgcacaaagttggagctgaaagagcttgtgctgctgcaattactttggatacccctggtgcaaactatagagctgtctgggcattgaacaaatatttcccaaatgtgaagacatttgttagagcacatgatgttgatcatggtgttaatttggagaaagctggtgcaacagcggttgtccctgagaccttggagccaagtcttcagctagctgctgctgttcttgcacaagcaaaactcccaatgtcagagattcaggaaagcatcaacgagttccggaatcgtcatctgtcagagcttacagagttgtgtgctacgtcaggaaattctcttggctatgggttttccagagttatgtccaaatcgaagtctatcagctccgatgatgaaagcgaaacagtggatggcgcactagcaatttgaagacgattagataaaatgggatcccttgatagtactagatcgattgcactgttagtagataagcttgttgcatgtagaaaaatggaataaaaattaatgcaagagctgtcacaaaaatcggcgtgcaattttgtatgttagagtacttatatatttcttctctcccccaaaaaaattgtttgcatacaactcttcacaaagaaaaataatacactctagcagtgcacgtgaaaatgagacccttgtaagcagggaagaaaatagatgtcagaatgctgaatacttcccatgcttgctcaaaggagcatatggtacagtcaggccagttggacggttgggacctggctttgggtatgtttagtacaatttttgggtgtgtttgggacagttttttaaagag

SEQ ID NO: 4141 - DNA, 4305 bp, Zea Mays
gcccagcccagggttgttgcggtgcgggaaggagcaagtttggcttgacaagttgggcgcagttggcttttgcctcgtcccctccgccgccccgttgccgaaacaaaactcgctcttcggacaaaacgccaacgccagggcgagcgagcgaggtgaggtcacctaccagctcccacagtcgcactcccccctcgcgccgtcccgtcgtaggaatggaatgaggccgaggcccctcctcctcctcctcgtcgtcgtcgtcgtcgtcggtgcttctcccgtgacaggcctcccttcctccggtccggtcgccctctgacccaatccgcatacatccaccaaccagctttgatttgcgctgtttccgattgtactcgtgctccgcccgctacgatacaggacaggggaggatggatttgtccaggctcgcctccgtcgccgggcccagccgcgcggccccgcgggcgggcctgcagatcggcgccgccgggaatggcttccgcgtctgctccctgcggcaccgcggcgccgggaacgggcgcctcacgtccgccgccgccctcctccgcggcagcagcgggctcttctacctggctcccgcgcgcgggggccctccccgtctccgcgccagagggcggccgcggtgccagggcagcgactcgttggcctacgtcgacggccccttggaggccgccaagggctccggcgaggtctacgacgacgatgccaccagctcggggcccgacgacgacgacaatgacaagggccccgccgacgtggacggtctccgggagatgctgcagaggtgcaggaacgagctcgaggtggccaggctcaacagcaccatgttcgaggagaaggctcagcggatatccgagtcggccatcgcgctcaaggaccgcgccgaaggcgcccagagggacgtgtccgcggccgtcgccaccgtgcaggaggtcatcgtcaaggaggcggacgccaaggaggccgtccagaaggctaccatggcgctgtcgatggccgaggccaggctgcagctggcgtccgaggcgctggatgccaagcgggggtcggtcgggcccatggaggttagcatcgaaggcgtggaggaggaggcccttgtgtctgctcaggaagagatcaaggattgccgggcagccttgttgcggtgtgaggaggagctggaacgcatccaggaacagaaaatgaacctgcagaaggaggttgataggctcaccgagctcgctgagaaggcccagttggatgcatccaaggccgaagaagatgtcaccaatataatggtgttggctgagcaggcggtggctcttgagatgaaagccacgcagcgtgtcaacgacgcggaggcggtgctgctgaaagcggagaaggtcatatcctcggttgacaccgtggtggagctaacatcacttgctgaagagcagaaaagcgctgaagaggatagcgtttctgaagggtatgagtatagcagcaatggcactgatgatgttcctgtgagggatgaggtgtcaagtatcgagcgtctaatggtaggtgacttgactgttgagggcattgagcagcttgaaccatcccgtgaaatatatgatgaagcaagcagcgataagatgtccgttgagcctcagaaagaagctgagcctgattcagacaagttgaagcaagggaagaagcaggaaatggaacgaaaggagttcaccaaggaaccactgagtgctcaaaaatcactgaagaagagatcatcccgcttcttcccggcatctttcttctcctccaaagctgatggagagtttacacctacatctgtctttcgggggttaatgaaatcagtgcaaaaacaggctcccaagcttgttgttgggatattgcttcttggtgcaggggccttcttcttaaatagagctgagaagagtcaactatttcagcagcaagaaattgccacaagtattggaaaggtaacctccacgacaaagcccatagttcgtgagatacggcaaattccacagagagtaaagaagctaatagagctcttacctcatcaagaggtaaatgaggaagaagcttcacttttcgacatactgtatttgcttcttgccagtgttatttttgtaccattatttcagaaaatccctggaggcagtcctgttcttggatatcttgctgctggtgtcctcattggtccatatgggctctccatcatccgtaatgtgcatgggacaaaggcaattgcggaattcggagtcgtgttcttactgtttaacattggacttgagctttctgtggaaaggctaagttcgatgaagaagtatgtcttcggcttgggatctgctcaggtgctagctactactgcagctgttggtgtgatagctcatcgttttgctgtgctaccaggaccagcagcaattgttgttgggagtggcttggctctgtcatccacggctgttgtcttgcaagtattgcaagagcgtggtgaaagtacgtcgcgtcatggacgtgccacattttctgtgttattgttccaggatttggctgtggtggtcctgttgatattaatacctctcatatcacctaattcttcaaaaggaggggttggtttccaagcaatagcagaagccatgggaatggctgcagtcaaagcagtagctgctataactgccataattgctggaggtcgtctgttgcttcggcctatttacaagcaaattgctgaaaatcagaatgctgagatattttcagcaaatacactccttgttatttttggcacaagtcttcttacagcccgggctgggttatcgatggcacttggagcttttttggctggtctgttactagcagaaacagagttctccttacaggttggaatgtctattgacccaaagctgcttctgtcaaacttcccaatgatctctatgatattgggtctcttgataattggaaagacattgttggttacatttgtgggcagggtatttggggtttctactatagctgccattcgtgttggtctcttgcttgcgcctggtggtgagtttgcttttgttgcctttggagaagctgtcaaccagggtcttctatcacctcaattatcatcgttactgtttttagtcgttggcatttcaatggctctgacaccatggttagctgctggagggcagtttctggcatcaaaatttgagcagcatgatgtgaggagtttattgcctgtggaaagtgagactgacgatttgcacgaccatattattatattaggctttggacgtgttgggcagatcgttgcgcaactcctgtcagagcggttaattccttttgttgcccttgatgttagaagtgatcgggttgcagttgggcgtgcacttgaccttccggtatattttggggatgctggaagcagagaggtactgcacaaagttggagctgaaagagcttgtgctgctgcaattactttggatacccctggtgcaaactatagagctgtctgggcattgaacaaatatttcccaaatgtgaagacatttgttagagcacatgatgttgatcatggtgttaatttggagaaagctggtgcaacagcggttgtccctgagaccttggagccaagtcttcagctagctgctgctgttcttgcacaagtaaactcttgtttgattatcatccactgtgcttattagtaacgtatggaatttgatgcataggcttcatttcaggcaaaactcccaatgtcagagattcaggaaagcatcaacgagttccggaatcgtcatctgtcagagcttacagagttgtgtgctacgtcaggaaattctcttggctatgggttttccagagttatgtccaaatcgaagtctatcagctccgatgatgaaagcgaaacagtggatggcgcactagcaatttgaagacgattagataaaatgggatcccttgatagtactagatcgattgcactgttagtagataagcttgttgcatgtagaaaaatggaataaaaattaatgcaagagctgtcacaaaaatcggcgtgcaattttgtatgttagagtacttatatatttcttctctcccccaaaaaaattgtttgcatacaactcttcacaaagaaaaataatacactctagcagtgcacgtgaaaatgagacccttgtaagcagggaagaaaatagatgtcagaatgctgaatacttcccatgcttgctcaaaggagcatatggtacagtcaggccagttggacggttgggacctggctttgggtatgtttagtacaatttttgggtgtgtttgggacagttttttaaagag

SEQ ID NO: 4142 - DNA, 1864 bp, Zea Mays
cacaaacagactctgctcatcaggtattttcgggtctacggtcggtcaatcggagtgtacacagcaagcgccggcccgcgggcgctctcccgaatcccgacacccggagttggagttggaggagcccggagaggcggcggagcgcagccaaaaaaaaaaaaaaaaaaccctgagtcccgcaaaacccctaaaccctagcccctcacctctcgcctccgccctcatccgcgcgacttgcagcggttggaggcgaagccggctccatgacgaccctcctcaggcgcgcgtcgctgcggcgcgtcattgccgccgccgccgcctcttcttttcaccctgagagctataagcaagggatctgtggctccacatttcattgccgagagttcgcatcaaaagcaaaaaagaagtcaagtggaacagactctggggaggagaacatgtcaaagaaagacttggctttacaccaggctattgatcagataacgtctgcatttgggaagggggcaataatgtggcttgggcgttcacaaggccatagagatgtaccagtcgtgtctactgggtctttggatttggatatggctctaggaactggtggtcttccaaaggggcgtgttgtagaggtatatggtccagaggcttcaggcaagacaacgcttgctctacatgtcattgcagaagcacaaaagaatggaggttgctgcgcttgttccaaagactgagcttgatggtgagatgggtgatgcacatattgctcttcaggctaggttgatgagtcaagcccttcgcaagcttagccactccctttcactttcacaaacaattttgttatttattaatcagatcagggccaaggtagccacatttggatttggaggaccaactgaggttacttctggtggcaacgccttgaagttttatgcatctgttcgcttgaacatcaggcgtattggtttggtaaagaaaggcgaagagacaataggtagtcagattgctgtgaagattgtaaaaaacaagcatgccccacccttcaagactgcacagtttgagcttgaatttggaaaggggatatgccgcagttctgagctttttgaacttggattgaagcacaagcttatccgaaagagtggtggttcgtattatagtttcaatggtaaggctttcaatggtaaaagtaaccttaaatcttaccttactgaaaacaagagtgttgccaatgatctggagatggaactaaagagattgatgggaactgatgcgtctaaagagcaggaggcaggagacagttcgcagagtgattttcctgaagagagtgtcacacctgaagcatcgtcagaagaggatctgggagccataattgaaggttagccagtgatctgatgtgctggcaagtgggaacagaatttctggagcagttgttcctgtaaaacaatatcttgggtcctgaagtcaccaccgtttggatcgacatgcctgtggtgttctggtgatctcatcatagcagacttcagtctttactgtgcttatacagtagtgcagcaggaagagaattcacattgtgtgaaatcatggtgatatctgagaggtggaagttgtagtaagccgggaagggtgaggtattgtggtccgtggcatttaaacttcagtaagcaaacgccgtgtatatatgatgtgcacattttgaaaccgggcattctttattgactgctgctagatttacattgagctccctccacttccaatacctaccttttttttgcgtggagctagttttttggatggtgcttctgcggaagcctgttgctggaagatccaatgtcgtagagctggggcatttctgaccttggctgatctatgttcgccg

SEQ ID NO: 4143 - DNA, 4259 bp, Zea Mays
cccgactcgagccgacgaggagagagctcaggaggcggcggagagaagggagaaaatccccggtagggaggggggaaggaagccaaaggcccaaaggtctcggcgctgccgtagtaccggctgaggcaagatggtgaaggcacgaatgacgacgacggacgtggcggcggaggtgaagtgcctccgccgcctcatcggcatgcgcctagccaacgtctacgacatcacccccaaggggaaagcgagaaggtcttgttgctcatggagagtggtgtcaggttccacaccacccaatacgttcgtgacaagagtaccaccccttcaggtttcactctgaaactacgaaagcacattcgtaacaagagacttgaagatgtccgtatgctcggatatgacaggattatccttttccaatttgggcttggtagtaatgcacatttcataattttagagctatatgcacaaggaaacattcttctcacggattcagaatacacagtattgacactactccgttctcacagagatgacaacaaaggattggccatcatgtcacgtcatcgctatccagtagaagcttgccgtgtttttggcaggactgactttgcaaagttaaaggacatgttgacaaagcctgataaggctgatgataaagaggaaattacgtctggatcaaccgatgctcaggaaacttctcaatccaccaatgatgaagtgttggtaactgaaatatctgaaaaatcactgagtaaaaaagaaaagaaggctgctgcaaaagctaagcagtttggttcaaatgcaaaagtaaacaatggtgctcaatccaataaagctactctgaagacaattcttggtgaggcactggcttatggccctgcactagcagagcatatcatattggatgctggtttggttccaagtacaaaggttgggaaagacccagagagcactatcaatgacagcactgttcagtctctaatggaatctattacaaggtttgaggactggcttgtagatattatatccggccaaaggattcctgagggttatattctcatgcaaaataagatgaccgcaaagaacatcacacccttggaagaggcttcgattaatcataagatatatgatgaatattgccctgttctgttgaatcaattcaagtcaagggaatataatgaatttgcgacatttgatgctgcattagacgagttctacagcaaaatagaaagtcaaaaggtgaatcaacagcagaaagcaaaagaggaatctgcagctcagaggctgaacaaaataaaattggatcaggagaatcgtgtgcatacattgaggaaggaagtggaccattgtgtcaaaatggcagaattaattgaatacaatttagaggatgtagatgcagcaattttggctgtgcgtgtttctcttgcaaatgaaatgagttgggaagctcttactcgcatgattaaagaggaaagaaaggctggaaacccagtagcaggacttatcgacaaactaaattttgaaagaaattgtatcactctactcttgagcaataatcttgatgacatggatgaggatgaaaaaactgcacctgtggagaaggtagaggttgatatagcactttctgcacatgcaaatgcaagacggtggtatgaaatgaagaagaaacaggaaagtaaacaagagaagactatcacagctcatgataaggcgtttaaagcagctgagaagaagacacgccttcagcttgctcaggaaaaaacagtagccgcaatcactcatatgcgcaaagttcactggtttgagaaattcaattggttcatcagcagtgaaaactacttgataatcagtggccgagatgctcaacaaaacgagttgattgtgaagcgctatatgtccaaaggagatctgtatgtgcatgccgagttgcatggagcttccagtactataatcaagaatcacaaacctgacactcctattccaccattaacattaaaccaagcaggatgcttcactgtttgccacagcaaagcatgggattcaaaaattgttacaagtgcttggtgggtgtatccacatcaagttagcaagacagctcctactggcgagtaccttactgttggtagttttatgatccgtggcaagaaaaattttcttccacctcacccccttgttatgggctttggtatactcttccgtttggacgagagctccctagcatctcatttgaatgaaaggagggttaggggtgaagatgaggccctccatgaaatggaagcagagtctcgcaagaagcaaagtaaccctgaatctgatgaagatattggtagtgaaggtgcaaataaggaaactcatgaagatgaatcaaacgggcaaactacaaacattcaacaaaacaatgatcttgagcttcctgatctgtctagcaacattggtactgccaactcatctgaactccttcctgaaatccaagctgaggaaaccttggacaatggaagttccattcttaaggaagaaacaatcgaagcttctgtttcatctcaacttgatgatctgctagataagactctttgccttggccctgcaaaggtgtcaggtaaaagctctctgcttaccagcatcccttcaagtttagcagaagatgatgatgatcttgaagtgaaaaggccaactataagagacaaaccatacatatcgaaagcagagagaagaaaattgaagaagggccaagttaatgatgaaactgctactgattctcaaaatggtgaagctgtagaaacaccaggtacatcaaagcaagaaaagggaaaggcagagacaaaggctactgattctaaagcaagtcagccagatacttcacagcaagaaaaaggaaaggcaaacacaaaggctactggttctaaattaagccagccaggtaattcacaacaagaaaaaggcaagggaagcactcacgctggtaacgctaaagtaagccgtggacagaaagggaagcttaagaagattaaagagaaatatgcagagcaggatgaagaagaaagagagatccgtatggcattgctcgcgtcatctgggaaagcattgcggaaggataaaccttcacaagatgtagaagaaacctctgttaaagaatcaaaaccatcagctggtgaagatgattcgtcaaaaatatgttataaatgcaaaaaggctggacatctttctcgcgattgcccagaaagcacatctgaggtggaccgaaatgatggcagtattagtagaagcagagacgatacgggtaccaatactgctcctgctggtggcaacagtcctatggacgaagacgatgttcaagaaattggtgatgaagagaaagaaaagttgattgacttggactacttaactggaaacccactaccaaatgatattttgctatatgctgtacctgtgtgtgccccttacaacgcattgcagacatacaaatatcgtgtaaagattaccccaggcactgcaaagaaagggaaagctgcaaaaaccgcgatgagcttgttcctgcacacacctgatgctaccaaccgtgagaaggagctcatgaaggcatgcacagaccctgagctggtggctgcaatcgtcgggaatgccaagatcacagcgcctggcctcactcaactgaagcagaaacagaagcagaaggggaagaagtctgcaaaacagaactagtgtgaaactggtgggtccaaagaactgatccatccccgattcgcaggaagtgaagctttgcctttgcagaaagtctgtggatgttgtggtttgtcagttgtcgctcgaggcgcatttgggggtatatgcagcctgtcagggagtacacccctttggcgtcacactggtgaggccagagcgacaggcacgcagtaggggacccaagctgcacgtctatgatgcaattgcgatatacagctcataataaaagaagtattgatttcatatgcaactgattggttctttattttatttgtgataccctgaaatgaattccgcacatacatttcatgtgcaattcccactaggcatgaatgagtcgtcgattgtgactcgatggtacatgcagaagcatgtcagaacacaagaaaattatataggttcgggttgcctgaatgagtagtaccatacattttatttggtgctaagtattgagtttgctggtggtgcacatattacaaatgagttgcaggtggtgatggatgagatcttacgtcagtctaatggtagtgagagggatgtcg

SEQ ID NO: 4144 - DNA, 2344 bp, Zea Mays
acaggtctcgctagggttcttcggtcctccacccacctttgcccgcgaaatgtttcccgccatttcgtgtccgcatttcccgctacccgcctcgctctgctccccagatccctcgccccctcttccctctccgctcccccacgtcatctagtcgccgcccccgctcaccgattgtcctccgctgtggagcgagcaagcagcggcgaagcgatggaggaggagatccgaaaggagttccagagtaacggcttctccatcggaggagccggccccgaggacgccgcccagatcctctccacgctgctgacctactgcatcaactacaagatgagccccgcggatctcgtctcaaactgggaggtctactacctcaataggcaattggatggcttaaagctcgaaagctcgtatcttgatggttttctgtcacaccttcaaaatgaagttaaagacaggataataaaagaagaagccaaccttcacatttactccagtaacgatgttgacatgctcttaagcaattcacatgtagatgaagcagcattccatgacacaccaggctatgaacaggaaaaggcacctgaaggatcatctatctctgagttaactcctctgttggtgtgccaagtaaaagtgctgaaatcacagaagatgaaataattagaagagttcaacctagtcaaagatgttacttacaagttcagcgctcacagcctgaaccaggttgcagattcatgtatgacagaatggaagacagatttaattacttggaagatcggatacggaaatcggcgagcttgttttctgcatctggattttgtggacaacctgcagatgctacccttgcttcagaggagaaaatgtttgcagtcggtacagtagcctgtgacggggaaggtcatttgaatgaaaagtctatcttgctacagggcagtgttgaacactccagggggcagtgtgtgcgccttgacttgaaggatcttgatcacttctctttgtttcctgggcaggtggtgggtattgaaggccacaatcccagtggacactgttttgttgcatcaaaattatttgattccataccggtctctgtggatgctcaacttcccagtgctaagaaacaagctattgataatgaaagcaaccaaaattctgacgctggcactctgtcaagagcattgtcatcgatcatcgcagcaggtccctatacaacaaccgataatatgttgtttgagccacttcaagaacttctttcatatgcttgtcgaaagccgcctcagcttctcatattgatgggacccttcattgactctgatcatcctgacataaaaaagggaactattgaccagagctttcatgacatttttcattttgaagttctgagaaagattcaagactttacccagtatctggggaacaccgttcgtgtaattctcattccatctgtgcgagatgctcaccatgactttgttttccctcagcctgcatttgatttgaatttgctagaagataccacccatcagattacttctctggcaaatccatgtctcttcggttccaacgagataaattttggctgttgtacagtggacattctgaaacagctcagtggccaagaaatttctcgcaagccacctggcggaaagcctggagacaggattggtagacttgcctcacacatactaaagcagcaaagttactaccctctatatcctcctgcccccggtgtgccgttagacttgtcactcgctaaggaagcgctggagatcccatcagcgccagatgttctcctccttccttctgatctcgcaccatttgtgaaggtgctctcccttggagaaggtagcgacgacgacagacggtttatctgtgtgaaccctgggaggttggcgaagggtattggcgggggcacatttgtggagctttactacaacgagggcatcgacaagaccaatgcctccatcatccgcatataggatcgctgaaactagggtgcgccgcagaaaatcacgtacgtagtttttgagctcggaaaatccatctcagcgtttgttatcccaggaagtgttgcttaacatgtggcatctccgctgcaaccgagtacctggactgaaatgttcatgttatcgtcaactaacaactgacctggtttacttcaggccctactgtataattacaggaattggttggtccatctttgctgttttccacagcattcttatggtaaaattattactgggagtttgttgtccagattaagctgtaatgcgccatacaacttccccgaatactggaatatgaagtgattgatgaacctaaactttgggagacaaaaatgtgatgaaca

SEQ ID NO: 4145 - DNA, 2377 bp, Zea Mays
aaataagattagccgattaaattgacaaaaaagtctaataaattataaatcgggaccgtggaaatattaattaactgcaaagtaaaaatagagagtaatcggttttgtacggggcaagaagcaaatgagatttcaaatggaacggcgtgatgttttacaactgcaaggagaggcagccacccggccccacgtccatccctaaaacatcgccacgttccgcctgcgccaccccccaatgtccgtggccaccggaggcggcggcgtccaccaccaccgagtccaatgcccaagtcccactacgccgcttccccacccccgcacccgccgccgctcctcccgctcgcgctcgtcccgccgcggcagtgcccgctcgtcgcggccctgctggcgctgctctcggtgctgcttgccaccgcgctctggctcctcctcgtgctctccccgtcccagggggctacccccgccgcctccgagcgctcggtgctgccggatgcgggagcggccgcggccgcgggccccggcgccgcctcgcccctctcgctcggccacatcgtcttcggcatcgcggggtcggcgcatctctggccgcgccgccgcgagtacgtccgcctgtggtgggaccccgccgcgatgcgcggcaacgtctggctcgacgcgggcgcgcccgccgcgccggggcctagcgccccctgggagggctccctcccgccgatccgggtgtccgaggacacctcgcgcttcaggtacaccaaccccacgggccacccgtcggggctccggatcgcgcgcatcgccgccgaggccgtccggctcgtcggcagaggggcgggcgcgcgctggctcgtgctcgtcgacgacgacaccgtgctgtgcgcggacaacctcgtcgccgtgctcagcaagtacgactggacggagatggtgtacgtcggggcgccgtccgagagccactccgccaacacctacttcagccatagcatggctttcggaggtggcggcgtcgcgctcagctttccgctcgccgctgcactcgcgcagacgctcgacgtgtgcatcgagaggtaccccaagctgtatggaagcgacgaccgcctccatgcctgcatcacggagctcggcgttcccctatcccgcgaatacggattccaccagtgggatatcagaggcaattctcatgggttattggcatctcatccaattgctcctttcatcagtatccaccatgtggagcttgtggaccccatataccctggattgaactctcttgagagtctggagctgtttacaaaggctatgaaaatggaacccatgagcttcctgcagcgttcaatttgttacgatcaaagccaaaagcttacatttgctatctcgttgggctatgttgttgaagtatatcccaatgttcttcttccgcgtgatttggagcgatcacaacgtacttacgttgcttataataggatgagtcagagaaatgaatttgattttgacactagagatgtccagaaatctttgtgcaagaagccgatcttatttttcttgaaggatgtctggaaggatggaaacataactaggggatcttatgcacgatcaagtgctagggatgacctcaaaagaaaggtgttctgcttccggtcaccccctttacctgacatagatgagatccaagtttcctcgtctccattaagcaagcgctggcatctggcaccaagaaggttgtgcagtgcacttaaaggatctattgatggtactctgtttatgtttgttcagcaatgtggacgtgggacttttggttcagcttctgattccttatgacatgggaaatagagatgtatattttctgttcagatgatacctggaagatgtagttaccaccctacattctttgagtcaagtataattggggctctttttctgcctcaaacgcttgacagtagccaactgtttgttataattggtagttactgaagggcatctactaccaagaacagattaagtgagccatcattcgtgggctaatatttttaacaacttcaagttcaacatgaataaaatgatgcagtgatgagagttgtctcattgagtcactaggtcgcatatttgatgtagcctctccagatttgcaggggaaggcttgcctaggtttatccttttcctagacctcactcatgtgggagcctctggcactgggtctgccccaagttcaacattaatgagatatggaaatgatatgtaataaagttaacaactatttcatttttacttgggaaaagccttgtgtcaggcaggcaccctagttactggagttccaagctaatttcatgtgcacattgttaatttaatgaccatgattgtccttaatgttctattttcatacctt

SEQ ID NO: 4146 - DNA, 2439 bp, Zea Mays
tccttcctgatacattcgtgtctcccatcgccaggtagatccctttcctcacgccacgccgagagagaaaagatagagggagaggcaagagtcgcatcgcagacccagaccacgccgccgccacctccgccgccacttccgccggtgatcgagtcgcgtcggcgctaccttcaagctagaagacaataagcatcggcagacatgttcggctccaccaaccgctcacagacagcagcaccaacttttggacaaccacaatttgctaatcaagctggaggaaccagaataaaaccttattctcaaacaccagatgttgacagtgctactagtggtactcagcctgctgcaaaacttgattccatatcagcaatgcctgagtacaaagagaagagtcatgaagaattgaggtgggaagactaccagcgtggagacaagggtggaccgaacacttctggaactcaaacattggcacctagctttccatcaccaatacaacataacacttttgcttcgacaagtaatccgttctcaacgaacccattttcaacaaacaacccgtttgctcctaagcccactacaactactagttcaccattcaacacctcatttaacaatgcatcagttgcaagttcgagtctattcacatcatcccctggtaccacaatgtttgggcaaccaggtgtttctacacttccagctccagcaagtaattcaccatcattatttggaaatatcaatcctgctcctgctacatcgtcaatatttgccacgtcagtgacgaataatccaagtccattcggcactggcacatcattggctaacactcaatcagccccactattttcctcagcatttgctcaaccgacatcaagtacaccggctttctcctctgggagcctatttggctcaactaatcctggcagtctgtttaccagcagcggtccttcacttttttcaacaccaacatttcaaccatctgcccctgctcagagttcgaacatgttctccttccaacccccaattcaaccagcttctaccggtggactcccttttttccccaacacaaatcaggccttgacgggacagccaacttctagcctgtccagtatggtcatgcagtctgctcttgtttcaaatccatttgggatgcttccagcaatgcctcagatgtccatcgggaatggtggatcttcaccttcagttcaatatggaatatcaagtttgccggttgcggagaagcctcttccaagtagatcattgtccatggcggttcctaggcatttgtcacagagaaggataaaactgctgccaagaaaatataatccaatatctgatggcaaggttccattctttgctgatgatgaagaatctccagcaacaccaaaggcagatgcttttttcatccctagagagaacccaaggaacctggtaattcgtccaattgagcagtggtcttcacggagagaaactggccggcaatatactgcaaagaatgttactgattcgaacaaatatgaagatgcttccattgaaagtgagcgtggtaagtctgccatgtcaccaagcagcaggccacctgcagtggaaaatgacaaacagcatgaggccagggccatggctcaacatgcgaatggaaatggtacttcagttgagaggctgttgcctaagcttccacgtgcagattacttcacagagcctagtatagaggagcttgcggccaaagaacgtgcggagccaggctactgcggtcgagtgagggacttcgttgtgggtcgacatgactacggcagcatcaaatttttcggggagacggacgtgaggtgcctcgatctggagtcaattgtggagtttaacgaccgggaggttattgtgtacaaggacgatagcaagaagccccctgtgggcgaggggctgaacaaggctgcagaggtgactctactgaacatcaagtgcgtaaacaagaagaccggggagccgtgccagggggcaagagtggagaggtacagggagatgctggtgaagaaggcggaggagcagggcgcagagtttgtgtccttcgacgctgtcaagggagagtggaagttcagggtgaagcacttcagcgcctacgggctttggtgaaatcctggggagttaagtagtttgtttgttctgatggaacaacgctttacgctcttgtcaattaccatgcttggatctgttgtgctgcttctgtacaatgttgctgctgttaaaatgcttgcaaattgcactgctctgctgctgaaaacaggagcagcagtagaaactaccgcaacaggagggcgtgctacctgctactgttatgtattattattattatactatattctaagtataataagacttagttttttaaatacatgaatattactttatgcacttagatatatgctatgtatggagagaaaataattatat

SEQ ID NO: 4147 - DNA, 3123 bp, Zea Mays
tccttcctgatacattcgtgtctcccatcgccaggtagatccctttcctcacgccacgccgagagagaaaagatagagggagaggcaagagtcgcatcgcagacccagaccacgccgccgccacctccgccgccacttccgccggtgatcgagtcgcgtcggcgctaccttcaagctagaagacaataagcatcggcagacatgttcggctccaccaacccatttgggcagtcgtccacaagcccatttggccagacctcgtttggaactccacagggatttggccagtcttccactgctgccaacaatccttttgccccaaaaccatttggcagcccgaccacagcttttggggcacagaccggaagctcgctatttggcacaacatccactggtgcctttggccagcagcaatccactcccacatttggcacaacatcctcatctcagtttgggagctctacaccagccttcggtgcatcccccactcctgcctttggtgccacatcctctggatctttgttcggacagaagccaagttttgggggttttggatcatcttctagccagtcaagtccttttggtaacacgttccagcaaacacaaccaacatttggcagcagcacttttggttcatcaactccgccggcgtttggtgccacggctcctgcatttggcacaactacaccagcctttggcaccacaactgcaccagccttcggtgccacgactagcccagcatttggttcaacttcaacatctttatttggtgcttctagcgccccaatgtttggttcttcagcctttggcacatctgctactggttttggaacttcagggactacagcatttggtgtgagtagtactactccgggttttggatcatcaagcacaccttcatttggcacatcagctagtgcgttcagttttggttcgtcaccatcttttggacaaacagcagtttcctctggtagcactccctttggaacaactccctcaccttttggtgcaccagctcctgcgtttggctcacagacagcagcaccaacttttggacaaccacaatttgctaatcaagctggaggaaccagaataaaaccttattctcaaacaccagatgttgacagtgctactagtggtactcagcctgctgcaaaacttgattccatatcagcaatgcctgagtacaaagagaagagtcatgaagaattgaggtgggaagactaccagcgtggagacaagggtggaccgaacacttctggaactcaaacattggcacctagctttccatcaccaatacaacataacacttttgcttcgacaagtaatccgttctcaacgaacccattttcaacaaacaacccgtttgctcctaagcccactacaactactagttcaccattcaacacctcatttaacaatgcatcagttgcaagttcgagtctattcacatcatcccctggtaccacaatgtttgggcaaccaggtgtttctacacttccagctccagcaaccccactattttcctcagcatttgctcaaccgacatcaagtacaccggctttctcctctgggagcctatttggctcaactaatcctggcagtctgtttaccagcagcggtccttcacttttttcaacaccaacatttcaaccatctgcccctgctcagagttcgaacatgttctccttccaacccccaattcaaccagcagcttctaccggtggactcccttttttccccaacacaaatcaggccttgacgggacagccaacttctagcctgtccagtatggtcatgcagtctgctcttgtttcaaatccatttgggatgcttccagcaatgcctcagatgtccatcgggaatggtggatcttcaccttcagttcaatatggaatatcaagtttgccggttgcggagaagcctcttccaagtagatcattgtccatggcggttcctaggcatttgtcacagagaaggataaaactgctgccaagaaaatataatccaatatctgatggcaaggttccattctttgctgatgatgaagaatctccagcaacaccaaaggcagatgcttttttcatccctagagagaacccaaggaacctggtaattcgtccaattgagcagtggtcttcacggagagaaactggccggcaatatactgcaaagaatgttactgattcgaacaaatatgaagatgcttccattgaaagtgagcgtggtaagtctgccatgtcaccaagcagcaggccacctgcagtggaaaatgacaaacagcatgaggccagggccatggctcaacatgcgaatggaaatggtacttcagttgagaggctgttgcctaagcttccacgtgcagattacttcacagagcctagtatagaggagcttgcggccaaagaacgtgcggagccaggctactgcggtcgagtgagggacttcgttgtgggtcgacatgactacggcagcatcaaatttttcggggagacggacgtgaggtgcctcgatctggagtcaattgtggagtttaacgaccgggaggttattgtgtacaaggacgatagcaagaagccccctgtgggcgaggggctgaacaaggctgcagaggtgactctactgaacatcaagtgcgtaaacaagaagaccggggagccgtgccagggggcaagagtggagaggtacagggagatgctggtgaagaaggcggaggagcagggcgcagagtttgtgtccttcgacgctgtcaagggagagtggaagttcagggtgaagcacttcagcgcctacgggctttggtgaaatcctggggagttaagtagtttgtttgttctgatggaacaacgctttacgctcttgtcaattaccatgcttggatctgttgtgctgcttctgtacaatgttgctgctgttaaaatgcttgcaaattgcactgctctgctgctgaaaacaggagcagcagtagaaactaccgcaacaggagggcgtgctacctgctactgttatgtattattattattatactatattctaagtataataagacttagttttttaaatacatgaatattactttatgcacttagatatatgctatgtatggagagaaaataattatat

SEQ ID NO: 4148 - DNA, 1220 bp, Zea Mays
cccccatgccccgtctccaaggaaagcgaaccattctgatcctgcaacccgtggcgccgccgccgccgcatcgcattgcccggacgccaaaacctagctcctgaactctcctcggctcctcgcccacctctcgctagccgttcccgctctgcagtctccgtggccggacgccgcggcgacatggcatcgacctgtttccgcgccgccgcccgcgtggcctccgccgccggccgctcggcggcggccacccgatcggctccctccgcggcccgtgccgccgccgccgcccaccgcgcctcgtccttctccaggatgccggtggagctcgggtgctgcgcgggattgtcgctgctgccgctgcacagcgcggtggcggcggccaggctgacgtcgcggctgagcacggcgtcgagctgccgtgctctctctcagggtatcctctgttgcacctatcccgggctttaacatcatgaaaacgatggtacgtgaaacatttgcccagtgtcttaagagatgggtctatccgttcgaaggtgataaatcgctggaagacttgctcatgtcatgctgttggactcaaatcatttctatagattagtcatctaaatgaacatctggagcactacacttcatcaccccttcgacaatcgtggctatcttagatttttttcccccaaggttttgagttcatgccttgtgagatatcatttgatgaaaatatgcaaggacggtttgccgacgtctgggctgtattcagccagtacaattctgcgttaaaaggtggttgatgatacctgaggattgtcattttgcgttaaaaggtggttgatgattatgttactatatgtattgcgtatgctttcttttgtttcaaatttttgaataaggtgacccgaacctgaacgtggctcgatctctagtgaacgctttgagcctccgggtttgctttggtatttttcttggttcagttttgcattggattgcttccttgtttatatattttgaaaaaaatacattgtggattcaaattttagccacatggctatatattcaaattccaatgggtaagctacatcacatcacatgcttacaactaggttgaggaaactattaaaatacgcaaggaaaactttgattgatttgtgtgacgaagcactcaaaacacaagtgatttattctagtttggaggtcaaagacctatttcatcggtgttcttcgat

SEQ ID NO: 4149 - DNA, 588 bp, Zea Mays
ctctacatttttcccaagttttggcaacttgtgattacatcaaggttactcagctggaacggaaaggagatgaactgtacggagacatcttgatctccagaggattaaagatgtgacttggtgatgttggaaacaattttgctgcggtggttcccggtgcacatctcgtgtttatattacagaatgcttacatattgcataggatgtcttgtagttaacacataatctatacatggtgatctggtgaaagaaagggagcgagatatgaggcagtagttttgtgttatgtggcaagcaaaattctaagctgttattttagaggtttcataatttaagtacgaacatgtgttatactattatgaaactaagttgtcctgaaagcacttactgaaagggagaaatttacatggtaccttgtcaacgatgaaacatacatcggaggacaacataaagatgcacactgtatcctgctcttcggctgcttcatgttacgatacctgtccatttgccctatctttcattttttatgggtggctttgtcctattctaaatgcaccttacttagcaatctgatattttttcgcctgg

SEQ ID NO: 4150 - DNA, 1408 bp, Zea Mays
aaaaaatgaaaaccatatagaacgtcgttcgcgaccccaccgtatccccctccctcgccccctcactgctctcgctttcgctcgccatccgccgtcccgctccgcacaccggccctgcccgatgccttcgcccgccgcggccgcggcggcgcctttccaccgcatcgcatgcgcgcgtcagcacctccctcaaacccgtctcttcttcctcccatcccgcgcgctgctcaaatccgaccgcctcaccgtcccggctccgctgcgcgtccacgcgctgaggctgcctccgacggtgccacgggcggcaagccacgatgccgccacgggcgtgagatcgcccacatctggcggccagatgctggtgttcgtcccgccgcacccgctcataaagcattgggtctccgtgctgcgcaacgaacagacaccctgcgtcatcttcaagagtgccatggcagagcttggtcggctgctcatatacgaagcatccagagattggttgcctacaatcacaggagagattgagacacctgtagctgtagctagcgtagaatttattgatccaagagagcctgttctgcatgtctaacaggttattccaatactgagagctggtcttgcactagctgaacttgcttcatcagttctgccagccaccaagacttaccacctcggctttcgtagggatgaagaaacgcttcaaccttcaatatacctgaacaacctgccagacaagattccagagggtactcgtgtgctagttgttgacccaatgctggccactggtgggacaatggttgctgctattgacttgttaatcgagtgcggagttactagcaagcagattaaagttatatctgctattgcatcacctcctgccctgcaaaagctcaataacaagttccctgggctccacgtgtacacaggaatgattgatccagaagtaaatgagaaaggttttatagttccaggactgggggatgctggcgacagaagctttgccacataatcagactgcccaatttgattgggtcagtgttcgacctgcgagaatctttgcttgagtttcacagaaacggagcgactgccagtagcagtgtttattgctgtagattactttcgtttgagattttgttccttttttcagtgttatcagctgcctaccattttgtagcacccattctgtatgattgtgtagaatacaaggctagttcaaatgtccccagatggtaaaatgctcgagagaacaaggttccgttcaaaatgacggattattgaagtttctgctctctaatattttgccagtcgatggaataaacatacgtcattgtgcttaatcttgtttatataggtcgtgttaggcgagtgtgctccctagcacctctctctgcttactatattgtctgtgaaa

SEQ ID NO: 4151 - DNA, 3501 bp, Zea Mays
cactgaactcaggcctcactgcctttggatggaagccgataagagagggggggggggggggggggggggggggctgggatgggaaaatcggaggagctttagtgctctcaaatgtatcatctaaccatgttttcgacttggaatgaggcgagggtcgtgtactcgtgtactacagagaggattggaccatttctattttctgtttgatcggggagggggacaaatgtgactcgtgatttgtctaatgatcagacactcgtctccttatatctccacagcattcatctttctctccatgttggattgttcgcggccgccggtcctgctcctgtcctctccacgtcgccaatcacttcaccctctcaagtctcatctcccttgccaccatggctacgcttctctccccccctgcccacgctgccgttgctcatctaatcctctcctcccagtcccaaaccatagcctcctgccaaagctgccatagttgaagttgcccacatgtgccactttggtcatcgtcgtctagttggatacattcgaggcgacgacacacatgtgatagagctcgaatagttacgactgggcattgggctcgccggaagccatggatatggttcttcccgtcgtcaccgaagaagcgtaaattacaggaccccaaacgaccccaaaacggtaacacaacgaccagttctattaggtagcttatcaattttctttccaccagtgcatgagtgcgggagcaaagtgcggtgcgctttacaactgcgtggcactaataaaacgcgcgcatacacggcttctcagtttcagactccagactgaaaaattcccccgctgtttgtgcctgagacgcagcgcgtgctcactagctagcgtgtcactgagcgccgggcccgtcctcgtctccgcttcccgtgcgccgcgggaacaaggttctggaagcttcggagatggggaggagtagacgccacgaaggaggaggaggaggagaacgacggggtgcgggtgctggaggggtggccgccgccgccttcgccgctctgctgctgggctgcgtcgtcatggccctcgtcggcggcgccgccgcgcagggcccccggctcccctccgactacaaaaccctcagcggcgccgctccgctcgtggtggccagaggcgggttctcaggagcgttcccggactccagcgagggcgcctactccttcggggcgtccgccagcgcgcctggcacggccatgtggtgcgacgtccagctgaccaaggacggcgtcgggctctgcctccgcgacgtcaacatgaagaactgcaccaccgtcgaccagacgtaccccgggaggaagcggacctacgtcatcgacggcgtccacaagaccggctggttcgtcccggacttcaccagcgccgagcttcttcagtccgtgtacctaacacaagcaatctggtctcgcactgagaggatggacggcatataccctatcgtcactgtccctgacgttcagtccatcgtcaacacgtctcctatctggctgaatgtccagcatcccatcttctacaaacaacgcgatctggacatgagcagctacatacactcgatccggaagctggtgcgcatggactacatctcgtcgcctgagatcggcttcctcagaaacatatccgcaagagtccgccgcagaaccaagctcgtgttcagctttctcgacaaaaaactcctggatcactccgtgaaccagacatacggttcgctggcgaggaacctgacgttcgtcaggtccgtcgcgtctggcatactggtcccgaaggactacatctggccggtgacggccgataactacctgctgccgtccacgtcgatcgtcaccgaagcgcacgaagcggggctggagatatacgcctctggttttgtgaacgataaggctgtcccctttaactacagctacgatcctctggcggagtacctgaacttcgtcggcgatggtggcttctcggttgatggcgtactgtcggactaccctattactgcatcagaggcaattggttgttttgctaacctgaattcaagtaagactgatcatgttacagggaaacccttagttatctcccacaatggcgctagtggagactacccggactgtacagacctggcctaccacagtgccgttgacgatggcgcagatgtcatcgactgtcctgttcaagtgacaagcgatggagtcctcatgtgcatgagttccattaacctgcttgacaccaccaataatgctgcgttcatagcaaagtcactagggatcgacatggttgactccgtaaccgccgccttaagtgccgccggcttcagtaaccagaccaccaaggaagttctgatccggtcaacagacagcgccgtcctcgtcaaactgaagcagcagaaaacgagatgcaagctcgtgtacaccctccccctaggcatcggggacgcttccaaaccctcgctgaaggacatcaaggcgttcgcggaagccgtagtcgtcgacaggacctccgtcttcgctctgagctacgatttcatcatgggacagaacaggatcgtgcgagacctgcaggcggcggggctggctgtgtacgcgcaggtgttccggaacgaagaacacctgtacagctctggggaaggatatgcccaagtacatgcggccagttgaggctggctcccttgcagatttcctccggtccttccaaacccagccgccgtctgtggcaccgatgccggcgctgaactcttcaagcgtggaggagccgcctcttccaactgctgcgccgagaaacgtgccgcctggtggtggcgccccagcggacgccgccgggactgctggcggcgctgctccttctgatgcgagttccggcggcgctcctccttctgacgcgcgtcacacggctaccggaagtagcggtatgctgcttgtggtgctggtttccgcggctctgctgatctgattctgagcagacacatgagactgtatagtagacagagccgaagcaaatgcaaatctccgttggattcgatcaagctttgaccagcgatataccatacacttgtttttctcgggtatatatgtttgtatttggccgcatttttcacgtccacatgtgtaaaaaattgtcagtggaaacgttatatgtatcagccggaaattttatccggcgatgatcaaagttctgacaaggattaagcgatcaccacaaactcccaataatatggtgttatgtaactgtgaatgatttactctttattgttatatttatatctccacgctaaaaatctttactacttattaaggctgcaatagtagtctgccaccattccatgttctacaattctcatgtcttgttctgcctttctgattccctcctccccgcgcacagtccatttcccatgttatgccaccattttatatctatcattttcattctccctccccgcaaagctcattcccatttccattcccccgtacagtcgacgtctag

SEQ ID NO: 4152 - DNA, 1244 bp, Zea Mays
atgcagaaggatgtggatgatatggttcatatccacttccataaccatattgagttgttgttaccgtacctggagcagtcgaggcaggggtacctacccaagcgtagcttccacgtgaaaacatgctcgaaattcagacatcaggcgactatcctcgacccgtctcttctcaacttgcgtccctcctctcgtctcgtgtggttgatggtgctaccatcgcacctggtgcaatctcattatcaccacgcttccgctgatgattttctccagattgtgcaaaagacatttgtcaaagacgaagggcagtcgatggcgccaaatcaggtggctggagagatcctgtcgttcttcactcgcaataacttcaccgtctcagaccgcggggaggtcatcacattcgagggcacaatgataccaaacagaggccaggcggcgctgctaaccttctgcacctgcattagcctcgggagtgtcgggcttgttctatcaatcgctgtcccagaaggtggcaacaactggttctggctcatgaccctgagccccttggcgggagcgtactactggacgaaagcgtcaaggaaagaagagatcaaggtcaagatgatcctatccgatgacgggaacgtgtccgagatccttgtgcagggcgatgacgtccaggttgagcagatgaggaaggacctcaagttcagcgagaaggggatggtctatgtgaagggcatctttgagacatgactgggagtttcatactctatctgtgagtgaacaatcgagtggagacgagtctttgctgcaacggaaactgcgtaagcgtaacccaggagagaaagaagtaactggaagtctgaccactgcacattggagttccaattggacaccagccgatcactcaaggggtctgcggcgagcggacgacgagttcgcggttggcggacggacgctgcaccgtcacaggcaacacaactaagatgggatcggcagtggtggacttccctaggggcgagctgcggcaacgacctccttagggcgtgagcgacgacgtgtttttatgctaccctgtatacatatttatgccaacgtcaatagatgtttacgacatatatttcagtcaatggttacccttacatctattgtctgtttatgatatttctattcacattttatgcaaacgtttatagatttgtatgtattatctcgttacctagcccattgtgtatatggggtttctaacatttacattagct

SEQ ID NO: 4153 - DNA, 1394 bp, Zea Mays
gcggcccttatccccagcccaaaatggacgccaccaccgccgtggctgcgaggcgcctcctcctcctcccgctccgcgcccagccgccagcaccgcggggcgcagcgccggccacggcgaacccctggtgtcgatccgttccgcggagacgacgagtccgtgccgccccggcgcgcgcgtcgctggaccgcgccgcggtcctcctcgacaccgcggccgcggtggccaacggcgggacaggttactcgcaggcgagctactacacgtctctgggactcttcgttctctccgttccggggctgtggtccctcatcaagcgctccgtcaagtccaagattgtgcaaaagacatttgtcaaagacgaagggcagtcgatggcgccaaatcaggtggctggagagatcctgtcgttcttcactcgcaataacttcaccgtctcagaccgcggggaggtcatcacattcgagggcacaatgataccaaacagaggccaggcggcgctgctaaccttctgcacctgcattagcctcgggagtgtcgggcttgttctatcaatcgctgtcccagaaggtggcaacaactggttctggctcatgaccctgagccccttggcgggagcgtactactggacgaaagcgtcaaggaaagaagagatcaaggtcaagatgatcctatccgatgacgggaacgtgtccgagatccttgtgcagggcgatgacgtccaggttgagcagatgaggaaggacctcaagttcagcgagaaggggatggtctatgtgaagggcatctttgagacatgactgggagtttcatactctatctgtgagtgaacaatcgagtggagacgagtctttgctgcaacggaaactgcgtaagcgtaacccaggtgaggaaatgcaaattggacgggcaaatctgtaccttggcttaaaggaaaaaaagaagtgatcttcatacgggatttgattattgagagaaagaagtaactggaagtctgaccactgcacattggagttccaattggacaccagccgatcactcaaggggtctgcggcgagcggacgacgagttcgcggttggcggacggacgctgcaccgtcacaggcaacacaactaagatgggatcggcagtggtggacttccctaggggcgagctgcggcaacgacctccttagggcgtgagcgacgacgtgtttttatgctaccctgtatacatatttatgccaacgtcaatagatgtttacgacatatatttcagtcaatggttacccttacatctattgtctgtttatgatatttctattcacattttatgcaaacgtttatagatttgtatgtattatctcgttacctagcccattgtgtatatggggtttctaacatttacattagct

SEQ ID NO: 4154 - DNA, 2169 bp, Zea Mays
gtccaatactgctatagtagcttctccaagttatgacactgttaggaagatggttcaacttctctcgaaatgaagcttctgtcttcctatgtatagacaagttgttcagttaggaggtctagattctcttaaaatggtgctatctacgagttaggaggtctaggagcacactgaatgttttagaggttgatgaaatcgttgttttcctaaaaaagcattttttctgctttgtttgaaattgtttgggttttcctccccaactttcataattacctatttctattgtatgtttgatcatttggacttctactccatccacaattttggtttattcagtgaggaactatgtttttaaccactctatagtttgtatagacatgcaacattcatctcagggtcaagaaagaagctcaacttggcatgcttcctgtttaaagcaaggcaagaaacatccccgccagatctctgtcgccaaagcagggctggtgaagaagagctactgacaatggaaagcaacgattagagtaacttgatgagtgaggactattcattcagttgcttcgatcaataagtgaactaatggatgcatgtttcttttgataagtcacatatggaaagtgaagaacccaaatgatttcttcacaggaagcttggaccaatcttcaactcatggggcgcttcatcctcggcctcctacgcatgcacttctcctgcttctcctgctggtcatcgcccaagtgtgtcagatgtgccgtaacagatgactccaaaatggattgcatgctcttcaaatagctacagataactatcttcacataaaatggagagtacaatgtttataaaagaaggaatatggataaggatccagattctcctatagcatatgaagaggcaaaggaaatggcaagccaaagctgcacaatttctgatgatcactcgttgttactgttatccattatctcctcagaggcattgcttttaaattcaacagcagacatggcaggtacgtgtccactttcttctcaaggaattgcactagaggttggactttgtgggtcaagagaaatttaatgcctattgttaatacaacctttagctatttttccatgatgatggagttggacaagtaccatattgagtataagtgttagcctattatatctttgtacaaccatggcaaacgaataatttcttataacaccatgaagataatgtttaacgaagtgtgtttgcgtgcgtgtgtaatttcttcttttgttttgctgctaagtttgatagttcaaaacatgattcttgtaaagtttggttttagtctaacaaatacactcaagtcctgacatgtaaactgtaaagttggactgttgcttggtggatctgtattgaactttattttttttaaaatgttttatggcttgtatagtttgtattcacttctcacctaagctacaatttgtttttccagcctttcaagatttggcacattgacataatgacatgggttggtcacggattggatgtcaattttgctccctgtaccttgtagattatcggttatgtcaattttcgaaatttctatcgtgatggataacatttgaataaaacatagttaaataaacatgactactgtttcagtctttcgaaattctgatgctatagtgtcagtatactatgtcattttagggaaaatatatgtcatgtttattttgataaaattatatgatttctcactcaattcttgtcggtggcttcaggatttgttattttgtatatcgatctgtgtcatttgacaaagtactttgacttggtataatatgagtgttacttcgaccaaaagagcttggtaaagtgtgagaaactccgcaaacttcttctgcagacgatgactagcaacagttatgacgagggtcaagatagccgccatacatgatacattgagtacaacatcaagataaacactccctccccacacacaacttttgccttccgttcactctgtatgttgtgtttattacggttgcatatgttgtgtttattatggcatcaacacgttccattagaaaatataactattgtttgtcaagtacaaaatcataatcacatcagcttgtaataatattgcatcactgttttgtaccaaattgtaagttgttgtagcaacgcacgggcacc

SEQ ID NO: 4155 - DNA, 2253 bp, Zea Mays
caaattttagatattgatggtggtcagagttaaaaaacagtttgccttaagacaaaccaagatgaacttgtatttacaatcgaaggaaatattgcacattgcctagacatttaatttattagataaattcttttgttagttgttcaactttgtacgtcttataagtcacaggaacaatgtttatctagaacttcggtctcaaattatacagtagtgttcagccatacctgccatgtcacaagaaagagagataaaaagtatttaatagtagacctaatgatgctcatttgtaattgtagatattcgtatatcctttttctgcaaccttgtgaaacatgtgatggtttgacttggaacaaactttgggtctgatatagtaaaatgcaatgtatgtggagggaagtagtagaacaagacagaacaagtgccaaataaggttatatagtagaatacaatgtgtggagggaaatagtagaacaacacaaaacaagtgccaaataaggttacaaggtttatagtagcgattgcttagctgctacaacgacactcatagattagcctggcatttgcaatgtcgctcttgtatttgccataacctcacttaaggtcacacattgcctctgggaccttgacctccgctactgttgtcgcctggccgcgtcgacttcaccaatgccggggtgtccaacctcatcagcttcaccgtcgtcgactgctcccacacaaccgagctgtgggtcctggtaccggtcgcgccccgcctctgctccttctgcttcagcgagtggcagactatcgatacactcgatttcaattgttttttacgctatttactgtattgcaatgggacaatggatgattaggatttgttttttaagactggcccatgatttatcgtcgtatactatttctttaatagattgttcgctacatctactgatctacatgttcacatgtttcaacttctgtcagcatccgtagttactatatgaatgctcattctgtgtcaccttttaagtttacaaatgctcttttccaggtcacatatggaaagtgaagaacccaaatgatttcttcacaggaagcttggaccaatcttcaactcatggggcgcttcatcctcggcctcctacgcatgcacttctcctgcttctcctgctggtcatcgcccaagtgtgtcagatgtgccgtaacagatgactccaaaatggattgcatgctcttcaaatagctacagataactatcttcacataaaatggagagtacaatgtttataaaagaaggaatatggataaggatccagattctcctatagcatatgaagaggcaaaggaaatggcaagccaaagctgcacaatttctgatgatcactcgttgttactgttatccattatctcctcagaggcattgcttttaaattcaacagcagacatggcaggtgcaggtcctatcctatccattatctacccctgcatgtgtgccagctattctactctatgtttcaatagtttggaaataattcagagctaaggttttctgatacagcctttcaagatttggcacattgacataatgacatgggttggtcacggattggatgtcaattttgctccctgtaccttgtagattatcggttatgtcaattttcgaaatttctatcgtgatggataacatttgaataaaacatagttaaataaacatgactactgtttcagtctttcgaaattctgatgctatagtgtcagtatactatgtcattttagggaaaatatatgtcatgtttattttgataaaattatatgatttctcactcaattcttgtcggtggcttcaggatttgttattttgtatatcgatctgtgtcatttgacaaagtactttgacttggtataatatgagtgttacttcgaccaaaagagcttggtaaagtgtgagaaactccgcaaacttcttctgcagacgatgactagcaacagttatgacgagggtcaagatagccgccatacatgatacattgagtacaacatcaagataaacactccctccccacacacaacttttgccttccgttcactctgtatgttgtgtttattacggttgcatatgttgtgtttattatggcatcaacacgttccattagaaaatataactattgtttgtcaagtacaaaatcataatcacatcagcttgtaataatattgcatcactgttttgtaccaaattgtaagttgttgtagcaacgcacgggcacc

SEQ ID NO: 4156 - DNA, 2601 bp, Zea Mays
atgtccaatactgctatagtagcttctccaagttatgacactgttaggaagatggttcaacttctctcgaaatgaagcttctgtcttcctatgtatagacaagttgttcagttaggaggtctagattctcttaaaatggtgctatctacgagttaggaggtctaggagcacactgaatgttttagaggttgatgaaatcgttgttttcctaaaaaagcattttttctgctttgtttgaaattgtttgggttttcctccccaactttcataattacctatttctattgtatgtttgatcatttggacttctactccatccacaattttggtttattcagtgaggaactatgtttttaaccactctatagtttgtatagacatgcaacattcatctcagggtcaagaaagaagctcaacttggcatgcttcctgtttaaagcaaggcaagaaacatccccgccagatctctgtcgccaaagcagggctggtgaagaagttgtgtttccctcccggattgtcactactttcatatttgttcatttatgtttgttccaatttatgttggttttttacagttacagaatatgtttgttccagttgagttccagtttgaaaactggaacaaccactagcagatgcaaagttcacaaagtagcttgtcaaataatgtgcatgaactggaacaagcaacttgtgcacgaatgagcattactggaacaagtagcttgtgcatgaacgagtaatactgtagatgattggacatgtatgtctattttagatttttaatatttaatgttatatattcagctcataccatacatgaatttgcatttctgtactatactcacttaatgtcctacctgttttgttagcttcaactatccgctttaaactgacaaaaccagaccaaacatatgcaaatctcatatacctgtgaaagcaacaactgatttgccagattggttaattaaacgtaacaataaatagccccgattaaatggcttataaatatacttggatctgttcatttttcacatatcagctattaatgaagccttcactgggttcattttgtactactccattacttatttacagttacaagtattctaagaaacttaatatttcatcatcaaagttgtattcagacagtttcatttacattgctctgattttttgtactaggagctactgacaatggaaagcaacgattagagtaacttgatgagtgaggactattcattcagttgcttcgatcaataagtgaactaatggatgcatgtttcttttgataagtcacatatggaaagtgaagaacccaaatgatttcttcacaggaagcttggaccaatcttcaactcatggggcgcttcatcctcggcctcctacgcatgcacttctcctgcttctcctgctggtcatcgcccaaggatgaattgctgctcttgaccatagggattggagcagcatgtagtttatactttatcctggttttctctctcgagatgttgcatggtgtcagtgtgtcagatgtgccgtaacagatgactccaaaatggattgcatgctcttcaaatagctacagataactatcttcacataaaatggagagtacaatgtttataaaagaaggaatatggataaggatccagattctcctatagcatatgaagaggcaaaggaaatggcaagccaaagctgcacaatttctgatgatcactcgttgttactgttatccattatctcctcagaggcattgcttttaaattcaacagcagacatggcaggtgcaggtcctatcctatccattatctacccctgcatgtgtgccagctattctactctatgtttcaatagtttggaaataattcagagctaaggttttctgatacagcctttcaagatttggcacattgacataatgacatgggttggtcacggattggatgtcaattttgctccctgtaccttgtagattatcggttatgtcaattttcgaaatttctatcgtgatggataacatttgaataaaacatagttaaataaacatgactactgtttcagtctttcgaaattctgatgctatagtgtcagtatactatgtcattttagggaaaatatatgtcatgtttattttgataaaattatatgatttctcactcaattcttgtcggtggcttcaggatttgttattttgtatatcgatctgtgtcatttgacaaagtactttgacttggtataatatgagtgttacttcgaccaaaagagcttggtaaagtgtgagaaactccgcaaacttcttctgcagacgatgactagcaacagttatgacgagggtcaagatagccgccatacatgatacattgagtacaacatcaagataaacactccctccccacacacaacttttgccttccgttcactctgtatgttgtgtttattacggttgcatatgttgtgtttattatggcatcaacacgttccattagaaaatataactattgtttgtcaagtacaaaatcataatcacatcagcttgtaataatattgcatcactgttttgtaccaaattgtaagttgttgtagcaacgcacgggcacc

SEQ ID NO: 4157 - DNA, 2889 bp, Zea Mays
gtccaatactgctatagtagcttctccaagttatgacactgttaggaagatggttcaacttctctcgaaatgaagcttctgtcttcctatgtatagacaagttgttcagttaggaggtctagattctcttaaaatggtgctatctacgagttaggaggtctaggagcacactgaatgttttagaggttgatgaaatcgttgttttcctaaaaaagcattttttctgctttgtttgaaattgtttgggttttcctccccaactttcataattacctatttctattgtatgtttgatcatttggacttctactccatccacaattttggtttattcagtgaggaactatgtttttaaccactctatagtttgtatagacatgcaacattcatctcagggtcaagaaagaagctcaacttggcatgcttcctgtttaaagcaaggcaagaaacatccccgccagatctctgtcgccaaagcagggctggtgaagaagttgtgtttccctcccggattgtcactactttcatatttgttcatttatgtttgttccaatttatgttggttttttacagttacagaatatgtttgttccagttgagttccagtttgaaaactggaacaaccactagcagatgcaaagttcacaaagtagcttgtcaaataatgtgcatgaactggaacaagcaacttgtgcacgaatgagcattactggaacaagtagcttgtgcatgaacgagtaatactgtagatgattggacatgagctactgacaatggaaagcaacgattagagtaacttgatgagtgaggactattcattcagttgcttcgatcaataagtgaactaatggatgcatgtttcttttgataagtcacatatggaaagtgaagaacccaaatgatttcttcacaggaaggtgcttacatcttgcttccatgcctcggtagtttcggtcactattagttttgctatgcctttcctacataaataattttgctacctcaaaatgcttctaaatatgatgatttatgctggagactgctaaccttcacacatctaataagatgaagcaacaagctagaaaatgtggaatttgtcatatgtccggatgcaaaacgggtaacttcatgctttccacaatgtgtgtcgacatgatgcttgtagagatgcttggaccaatcttcaactcatggggcgcttcatcctcggcctcctacgcatgcacttctcctgcttctcctgctggtcatcgcccaaggatgaattgctgctcttgaccatagggattggagcagcatgtagtttatactttatcctggttttctctctcgagatgttgcatggtgtcagtgtgtcagatgtgccgtaacagatgactccaaaatggattgcatgctcttcaaatagctacagataactatcttcacataaaatggagagtacaatgtttataaaagaaggaatatggataaggatccagattctcctatagcatatgaagaggcaaaggaaatggcaagccaaagctgcacaatttctgatgatcactcgttgttactgttatccattatctcctcagaggcattgcttttaaattcaacagcagacatggcaggtgcaggtcctatcctatccattatctacccctgcatgtgtgccagctattctactctatgtttcaatagtttggaaataattcagagctaaggttttctgatacaggtacgtgtccactttcttctcaaggaattgcactagaggttggactttgtgggtcaagagaaatttaatgcctattgttaatacaacctttagctatttttccatgatgatggagttggacaagtaccatattgagtataagtgttagcctattatatctttgtacaaccatggcaaacgaataatttcttataacaccatgaagataatgtttaacgaagtgtgtttgcgtgcgtgtgtaatttcttcttttgttttgctgctaagtttgatagttcaaaacatgattcttgtaaagtttggttttagtctaacaaatacactcaagtcctgacatgtaaactgtaaagttggactgttgcttggtggatctgtattgaactttattttttttaaaatgttttatggcttgtatagtttgtattcacttctcacctaagctacaatttgtttttccagcctttcaagatttggcacattgacataatgacatgggttggtcacggattggatgtcaattttgctccctgtaccttgtagattatcggttatgtcaattttcgaaatttctatcgtgatggataacatttgaataaaacatagttaaataaacatgactactgtttcagtctttcgaaattctgatgctatagtgtcagtatactatgtcattttagggaaaatatatgtcatgtttattttgataaaattatatgatttctcactcaattcttgtcggtggcttcaggatttgttattttgtatatcgatctgtgtcatttgacaaagtactttgacttggtataatatgagtgttacttcgaccaaaagagcttggtaaagtgtgagaaactccgcaaacttcttctgcagacgatgactagcaacagttatgacgagggtcaagatagccgccatacatgatacattgagtacaacatcaagataaacactccctccccacacacaacttttgccttccgttcactctgtatgttgtgtttattacggttgcatatgttgtgtttattatggcatcaacacgttccattagaaaatataactattgtttgtcaagtacaaaatcataatcacatcagcttgtaataatattgcatcactgttttgtaccaaattgtaagttgttgtagcaacgcacgggcacc

SEQ ID NO: 4158 - DNA, 2976 bp, Zea Mays
gtccaatactgctatagtagcttctccaagttatgacactgttaggaagatggttcaacttctctcgaaatgaagcttctgtcttcctatgtatagacaagttgttcagttaggaggtctagattctcttaaaatggtgctatctacgagttaggaggtctaggagcacactgaatgttttagaggttgatgaaatcgttgttttcctaaaaaagcattttttctgctttgtttgaaattgtttgggttttcctccccaactttcataattacctatttctattgtatgtttgatcatttggacttctactccatccacaattttggtttattcagtgaggaactatgtttttaaccactctatagtttgtatagacatgcaacattcatctcagggtcaagaaagaagctcaacttggcatgcttcctgtttaaagcaaggcaagaaacatccccgccagatctctgtcgccaaagcagggctggtgaagaagttgtgtttccctcccggattgtcactactttcatatttgttcatttatgtttgttccaatttatgttggttttttacagttacagaatatgtttgttccagttgagttccagtttgaaaactggaacaaccactagcagatgcaaagttcacaaagtagcttgtcaaataatgtgcatgaactggaacaagcaacttgtgcacgaatgagcattactggaacaagtagcttgtgcatgaacgagtaatactgtagatgattggacatgtatgtctattttagatttttaatatttaatgttatatattcagctcataccatacatgaatttgcatttctgtactatactcacttaatgtcctacctgttttgttagcttcaactatccgctttaaactgacaaaaccagaccaaacatatgcaaatctcatatacctgtgaaagcaacaactgatttgccagattggttaattaaacgtaacaataaatagccccgattaaatggcttataaatatacttggatctgttcatttttcacatatcagctattaatgaagccttcactgggttcattttgtactactccattacttatttacagttacaagtattctaagaaacttaatatttcatcatcaaagttgtattcagacagtttcatttacattgctctgattttttgtactaggagctactgacaatggaaagcaacgattagagtaacttgatgagtgaggactattcattcagttgcttcgatcaataagtgaactaatggatgcatgtttcttttgataagtcacatatggaaagtgaagaacccaaatgatttcttcacaggaagatgaagcaacaagctagaaaatgtggaatttgtcatatgtccggatgcaaaacgggtaacttcatgctttccacaatgtgtgtcgacatgatgcttgtagagatgcttggaccaatcttcaactcatggggcgcttcatcctcggcctcctacgcatgcacttctcctgcttctcctgctggtcatcgcccaaggtgcacttttcctccctgttctgttcacgtgcccatgtgtcattcttgtttttcactgtttaggatcgtgagggtgttattgcaataatagctgatggagaaatgagaatgattttcaaatgatgacaggattggcagaatgagagcgacaaaggaatgagctaaatcttttgaaatatgaagcaatatgatttctttccagtgttatatttttttatttcctatgcatttcttaaaagtgctattacatgttcacctactaatacccttgtttttcttgcatctcaaggatgaattgctgctcttgaccatagggattggagcagcatgtagtttatactttatcctggttttctctctcgagtgtgtcagatgtgccgtaacagatgactccaaaatggattgcatgctcttcaaatagctacagataactatcttcacataaaatggagagtacaatgtttataaaagaaggaatatggataaggatccagattctcctatagcatatgaagaggcaaaggaaatggcaagccaaagctgcacaatttctgatgatcactcgttgttactgttatccattatctcctcagaggcattgcttttaaattcaacagcagacatggcaggtgcaggtcctatcctatccattatctacccctgcatgtgtgccagctattctactctatgtttcaatagtttggaaataattcagagctaaggttttctgatacagcctttcaagatttggcacattgacataatgacatgggttggtcacggattggatgtcaattttgctccctgtaccttgtagattatcggttatgtcaattttcgaaatttctatcgtgatggataacatttgaataaaacatagttaaataaacatgactactgtttcagtctttcgaaattctgatgctatagtgtcagtatactatgtcattttagggaaaatatatgtcatgtttattttgataaaattatatgatttctcactcaattcttgtcggtggcttcaggatttgttattttgtatatcgatctgtgtcatttgacaaagtactttgacttggtataatatgagtgttacttcgaccaaaagagcttggtaaagtgtgagaaactccgcaaacttcttctgcagacgatgactagcaacagttatgacgagggtcaagatagccgccatacatgatacattgagtacaacatcaagataaacactccctccccacacacaacttttgccttccgttcactctgtatgttgtgtttattacggttgcatatgttgtgtttattatggcatcaacacgttccattagaaaatataactattgtttgtcaagtacaaaatcataatcacatcagcttgtaataatattgcatcactgttttgtaccaaattgtaagttgttgtagcaacgcacgggcacc

SEQ ID NO: 4159 - DNA, 3437 bp, Zea Mays
gtccaatactgctatagtagcttctccaagttatgacactgttaggaagatggttcaacttctctcgaaatgaagcttctgtcttcctatgtatagacaagttgttcagttaggaggtctagattctcttaaaatggtgctatctacgagttaggaggtctaggagcacactgaatgttttagaggttgatgaaatcgttgttttcctaaaaaagcattttttctgctttgtttgaaattgtttgggttttcctccccaactttcataattacctatttctattgtatgtttgatcatttggacttctactccatccacaattttggtttattcagtgaggaactatgtttttaaccactctatagtttgtatagacatgcaacattcatctcagggtcaagaaagaagctcaacttggcatgcttcctgtttaaagcaaggcaagaaacatccccgccagatctctgtcgccaaagcagggctggtgaagaagttgtgtttccctcccggattgtcactactttcatatttgttcatttatgtttgttccaatttatgttggttttttacagttacagaatatgtttgttccagttgagttccagtttgaaaactggaacaaccactagcagatgcaaagttcacaaagtagcttgtcaaataatgtgcatgaactggaacaagcaacttgtgcacgaatgagcattactggaacaagtagcttgtgcatgaacgagtaatactgtagatgattggacatgtatgtctattttagatttttaatatttaatgttatatattcagctcataccatacatgaatttgcatttctgtactatactcacttaatgtcctacctgttttgttagcttcaactatccgctttaaactgacaaaaccagaccaaacatatgcaaatctcatatacctgtgaaagcaacaactgatttgccagattggttaattaaacgtaacaataaatagccccgattaaatggcttataaatatacttggatctgttcatttttcacatatcagctattaatgaagccttcactgggttcattttgtactactccattacttatttacagttacaagtattctaagaaacttaatatttcatcatcaaagttgtattcagacagtttcatttacattgctctgattttttgtactaggagctactgacaatggaaagcaacgattagagtaacttgatgagtgaggactattcattcagttgcttcgatcaataagtgaactaatggatgcatgtttcttttgataagtgagctaactactttagtcacaaagttcgtgttgatttctaaacatggtatgatggttttgtcatcctattcgattgagtttgggaaaaagcctgcacattctgaaaacaaacagactgcacattgtgtggctgataaggttgagtgggtaaataagatcaaagctattatttagacatactgaaaatatagtgaaggaagcgtaagcaatttttctgctatatttatgcattgtcacacattgcctctgggaccttgacctccgctactgttgtcgcctggccgcgtcgacttcaccaatgccggggtgtccaacctcatcagcttcaccgtcgtcgactgctcccacacaaccgagctgtgggtcctggtcacatatggaaagtgaagaacccaaatgatttcttcacaggaagactgctaaccttcacacatctaataagatgaagcaacaagctagaaaatgtggaatttgtcatatgtccggatgcaaaacgggtaacttcatgctttccacaatgtgtgtcgacatgatgcttgtagagatgcttggaccaatcttcaactcatggggcgcttcatcctcggcctcctacgcatgcacttctcctgcttctcctgctggtcatcgcccaaggatgaattgctgctcttgaccatagggattggagcagcatgtagtttatactttatcctggttttctctctcgagtgtgtcagatgtgccgtaacagatgactccaaaatggattgcatgctcttcaaatagctacagataactatcttcacataaaatggagagtacaatgtttataaaagaaggaatatggataaggatccagattctcctatagcatatgaagaggcaaaggaaatggcaagccaaagctgcacaatttctgatgatcactcgttgttactgttatccattatctcctcagaggcattgcttttaaattcaacagcagacatggcaggtacgtgtccactttcttctcaaggaattgcactagaggttggactttgtgggtcaagagaaatttaatgcctattgttaatacaacctttagctatttttccatgatgatggagttggacaagtaccatattgagtataagtgttagcctattatatctttgtacaaccatggcaaacgaataatttcttataacaccatgaagataatgtttaacgaagtgtgtttgcgtgcgtgtgtaatttcttcttttgttttgctgctaagtttgatagttcaaaacatgattcttgtaaagtttggttttagtctaacaaatacactcaagtcctgacatgtaaactgtaaagttggactgttgcttggtggatctgtattgaactttattttttttaaaatgttttatggcttgtatagtttgtattcacttctcacctaagctacaatttgtttttccagcctttcaagatttggcacattgacataatgacatgggttggtcacggattggatgtcaattttgctccctgtaccttgtagattatcggttatgtcaattttcgaaatttctatcgtgatggataacatttgaataaaacatagttaaataaacatgactactgtttcagtctttcgaaattctgatgctatagtgtcagtatactatgtcattttagggaaaatatatgtcatgtttattttgataaaattatatgatttctcactcaattcttgtcggtggcttcaggatttgttattttgtatatcgatctgtgtcatttgacaaagtactttgacttggtataatatgagtgttacttcgaccaaaagagcttggtaaagtgtgagaaactccgcaaacttcttctgcagacgatgactagcaacagttatgacgagggtcaagatagccgccatacatgatacattgagtacaacatcaagataaacactccctccccacacacaacttttgccttccgttcactctgtatgttgtgtttattacggttgcatatgttgtgtttattatggcatcaacacgttccattagaaaatataactattgtttgtcaagtacaaaatcataatcacatcagcttgtaataatattgcatcactgttttgtaccaaattgtaagttgttgtagcaacgcacgggcacc

SEQ ID NO: 4160 - DNA, 3682 bp, Zea Mays
gtccaatactgctatagtagcttctccaagttatgacactgttaggaagatggttcaacttctctcgaaatgaagcttctgtcttcctatgtatagacaagttgttcagttaggaggtctagattctcttaaaatggtgctatctacgagttaggaggtctaggagcacactgaatgttttagaggttgatgaaatcgttgttttcctaaaaaagcattttttctgctttgtttgaaattgtttgggttttcctccccaactttcataattacctatttctattgtatgtttgatcatttggacttctactccatccacaattttggtttattcagtgaggaactatgtttttaaccactctatagtttgtatagacatgcaacattcatctcagggtcaagaaagaagctcaacttggcatgcttcctgtttaaagcaaggcaagaaacatccccgccagatctctgtcgccaaagcagggctggtgaagaagttgtgtttccctcccggattgtcactactttcatatttgttcatttatgtttgttccaatttatgttggttttttacagttacagaatatgtttgttccagttgagttccagtttgaaaactggaacaaccactagcagatgcaaagttcacaaagtagcttgtcaaataatgtgcatgaactggaacaagcaacttgtgcacgaatgagcattactggaacaagtagcttgtgcatgaacgagtaatactgtagatgattggacatgtatgtctattttagatttttaatatttaatgttatatattcagctcataccatacatgaatttgcatttctgtactatactcacttaatgtcctacctgttttgttagcttcaactatccgctttaaactgacaaaaccagaccaaacatatgcaaatctcatatacctgtgaaagcaacaactgatttgccagattggttaattaaacgtaacaataaatagccccgattaaatggcttataaatatacttggatctgttcatttttcacatatcagctattaatgaagccttcactgggttcattttgtactactccattacttatttacagttacaagtattctaagaaacttaatatttcatcatcaaagttgtattcagacagtttcatttacattgctctgattttttgtactaggagctactgacaatggaaagcaacgattagagtaacttgatgagtgaggactattcattcagttgcttcgatcaataagtgaactaatggatgcatgtttcttttgataagtgagctaactactttagtcacaaagttcgtgttgatttctaaacatggtatgatggttttgtcatcctattcgattgagtttgggaaaaagcctgcacattctgaaaacaaacagactgcacattgtgtggctgataaggttgagtgggtaaataagatcaaagctattatttagacatactgaaaatatagtgaaggaagcgtaagcaatttttctgctatatttatgcattgtatccttgtaaaattatcaatattgttctgacttgtggggaaaggtatgagagtattcatttttttgcctcttttctgtttgcattccttcttcagtataatgtttgttagaataaccaggtgaatttacaaatttcatatccatatactttcttcgatgacaaatataaatctacctaggtttgtcataactcataggtcaatcattctaacttcaattgacattttttataaaaagtatcataaggaaaataatatattatcataaaagtgacgtccatctatatcaaattttagatattgatggtggtcagagttaaaaaacagtttgccttaagacaaaccaagatgaacttgtatttacaatcgaaggaaatattgcacattgcctagacatttaatttattagataaattcttttgttagttgttcaactttgtacgtcttataagtcacaggaacaatgtttatctagaacttcggtctcaaattatacagtagtgttcagccatacctgccatgtcacaagaaagagagataaaaagtatttaatagtagacctaatgatgctcatttgtaattgtagatattcgtatatcctttttctgcaaccttgtgaaacatgtgatggtttgacttggaacaaactttgggtctgatatagtaaaatgcaatgtatgtggagggaagtagtagaacaagacagaacaagtgccaaataaggttatatagtagaatacaatgtgtggagggaaatagtagaacaacacaaaacaagtgccaaataaggttacaaggtttatagtagcgattgcttagctgctacaacgacactcatagattagcctggcatttgcaatgtcgctcttgtatttgccataacctcacttaaggtcacacattgcctctgggaccttgacctccgctactgttgtcgcctggccgcgtcgacttcaccaatgccggggtgtccaacctcatcagcttcaccgtcgtcgactgctcccacacaaccgagctgtgggtcctggtcacatatggaaagtgaagaacccaaatgatttcttcacaggaagcttggaccaatcttcaactcatggggcgcttcatcctcggcctcctacgcatgcacttctcctgcttctcctgctggtcatcgcccaagatgttgcatggtgtcagtgtgtcagatgtgccgtaacagatgactccaaaatggattgcatgctcttcaaatagctacagataactatcttcacataaaatggagagtacaatgtttataaaagaaggaatatggataaggatccagattctcctatagcatatgaagaggcaaaggaaatggcaagccaaagctgcacaatttctgatgatcactcgttgttactgttatccattatctcctcagaggcattgcttttaaattcaacagcagacatggcagcctttcaagatttggcacattgacataatgacatgggttggtcacggattggatgtcaattttgctccctgtaccttgtagattatcggttatgtcaattttcgaaatttctatcgtgatggataacatttgaataaaacatagttaaataaacatgactactgtttcagtctttcgaaattctgatgctatagtgtcagtatactatgtcattttagggaaaatatatgtcatgtttattttgataaaattatatgatttctcactcaattcttgtcggtggcttcaggatttgttattttgtatatcgatctgtgtcatttgacaaagtactttgacttggtataatatgagtgttacttcgaccaaaagagcttggtaaagtgtgagaaactccgcaaacttcttctgcagacgatgactagcaacagttatgacgagggtcaagatagccgccatacatgatacattgagtacaacatcaagataaacactccctccccacacacaacttttgccttccgttcactctgtatgttgtgtttattacggttgcatatgttgtgtttattatggcatcaacacgttccattagaaaatataactattgtttgtcaagtacaaaatcataatcacatcagcttgtaataatattgcatcactgttttgtaccaaattgtaagttgttgtagcaacgcacgggcacc

SEQ ID NO: 4161 - DNA, 4413 bp, Zea Mays
gtccaatactgctatagtagcttctccaagttatgacactgttaggaagatggttcaacttctctcgaaatgaagcttctgtcttcctatgtatagacaagttgttcagttaggaggtctagattctcttaaaatggtgctatctacgagttaggaggtctaggagcacactgaatgttttagaggttgatgaaatcgttgttttcctaaaaaagcattttttctgctttgtttgaaattgtttgggttttcctccccaactttcataattacctatttctattgtatgtttgatcatttggacttctactccatccacaattttggtttattcagtgaggaactatgtttttaaccactctatagtttgtatagacatgcaacattcatctcagggtcaagaaagaagctcaacttggcatgcttcctgtttaaagcaaggcaagaaacatccccgccagatctctgtcgccaaagcagggctggtgaagaagttgtgtttccctcccggattgtcactactttcatatttgttcatttatgtttgttccaatttatgttggttttttacagttacagaatatgtttgttccagttgagttccagtttgaaaactggaacaaccactagcagatgcaaagttcacaaagtagcttgtcaaataatgtgcatgaactggaacaagcaacttgtgcacgaatgagcattactggaacaagtagcttgtgcatgaacgagtaatactgtagatgattggacatgtatgtctattttagatttttaatatttaatgttatatattcagctcataccatacatgaatttgcatttctgtactatactcacttaatgtcctacctgttttgttagcttcaactatccgctttaaactgacaaaaccagaccaaacatatgcaaatctcatatacctgtgaaagcaacaactgatttgccagattggttaattaaacgtaacaataaatagccccgattaaatggcttataaatatacttggatctgttcatttttcacatatcagctattaatgaagccttcactgggttcattttgtactactccattacttatttacagttacaagtattctaagaaacttaatatttcatcatcaaagttgtattcagacagtttcatttacattgctctgattttttgtactaggagctactgacaatggaaagcaacgattagagtaacttgatgagtgaggactattcattcagttgcttcgatcaataagtgaactaatggatgcatgtttcttttgataagtgagctaactactttagtcacaaagttcgtgttgatttctaaacatggtatgatggttttgtcatcctattcgattgagtttgggaaaaagcctgcacattctgaaaacaaacagactgcacattgtgtggctgataaggttgagtgggtaaataagatcaaagctattatttagacatactgaaaatatagtgaaggaagcgtaagcaatttttctgctatatttatgcattgtatccttgtaaaattatcaatattgttctgacttgtggggaaaggtatgagagtattcatttttttgcctcttttctgtttgcattccttcttcagtataatgtttgttagaataaccaggtgaatttacaaatttcatatccatatactttcttcgatgacaaatataaatctacctaggtttgtcataactcataggtcaatcattctaacttcaattgacattttttataaaaagtatcataaggaaaataatatattatcataaaagtgacgtccatctatatcaaattttagatattgatggtggtcagagttaaaaaacagtttgccttaagacaaaccaagatgaacttgtatttacaatcgaaggaaatattgcacattgcctagacatttaatttattagataaattcttttgttagttgttcaactttgtacgtcttataagtcacaggaacaatgtttatctagaacttcggtctcaaattatacagtagtgttcagccatacctgccatgtcacaagaaagagagataaaaagtatttaatagtagacctaatgatgctcatttgtaattgtagatattcgtatatcctttttctgcaaccttgtgaaacatgtgatggtttgacttggaacaaactttgggtctgatatagtaaaatgcaatgtatgtggagggaagtagtagaacaagacagaacaagtgccaaataaggttatatagtagaatacaatgtgtggagggaaatagtagaacaacacaaaacaagtgccaaataaggttacaaggtttatagtagcgattgcttagctgctacaacgacactcatagattagcctggcatttgcaatgtcgctcttgtatttgccataacctcacttaaggtcacacattgcctctgggaccttgacctccgctactgttgtcgcctggccgcgtcgacttcaccaatgccggggtgtccaacctcatcagcttcaccgtcgtcgactgctcccacacaaccgagctgtgggtcctggtaccggtcgcgccccgcctctgctccttctgcttcagcgagtggcagactatcgatacactcgatttcaattgttttttacgctatttactgtattgcaatgggacaatggatgattaggatttgttttttaagactggcccatgatttatcgtcgtatactatttctttaatagattgttcgctacatctactgatctacatgttcacatgtttcaacttctgtcagcatccgtagttactatatgaatgctcattctgtgtcaccttttaagtttacaaatgctcttttccaggtcacatatggaaagtgaagaacccaaatgatttcttcacaggaaggtgcttacatcttgcttccatgcctcggtagtttcggtcactattagttttgctatgcctttcctacataaataattttgctacctcaaaatgcttctaaatatgatgatttatgctggagactgctaaccttcacacatctaataagatgaagcaacaagctagaaaatgtggaatttgtcatatgtccggatgcaaaacgggtaacttcatgctttccacaatgtgtgtcgacatgatgcttgtagagatgcttggaccaatcttcaactcatggggcgcttcatcctcggcctcctacgcatgcacttctcctgcttctcctgctggtcatcgcccaaggtgcacttttcctccctgttctgttcacgtgcccatgtgtcattcttgtttttcactgtttaggatcgtgagggtgttattgcaataatagctgatggagaaatgagaatgattttcaaatgatgacaggattggcagaatgagagcgacaaaggaatgagctaaatcttttgaaatatgaagcaatatgatttctttccagtgttatatttttttatttcctatgcatttcttaaaagtgctattacatgttcacctactaatacccttgtttttcttgcatctcaaggatgaattgctgctcttgaccatagggattggagcagcatgtagtttatactttatcctggttttctctctcgagatgttgcatggtgtcagtgtgtcagatgtgccgtaacagatgactccaaaatggattgcatgctcttcaaatagctacagataactatcttcacataaaatggagagtacaatgtttataaaagaaggaatatggataaggatccagattctcctatagcatatgaagaggcaaaggaaatggcaagccaaagctgcacaatttctgatgatcactcgttgttactgttatccattatctcctcagaggcattgcttttaaattcaacagcagacatggcaggtgcaggtcctatcctatccattatctacccctgcatgtgtgccagctattctactctatgtttcaatagtttggaaataattcagagctaaggttttctgatacaggatttgttattttgtatatcgatctgtgtcatttgacaaagtactttgacttggtataatatgagtgttacttcgaccaaaagagcttggtaaagtgtgagaaactccgcaaacttcttctgcagacgatgactagcaacagttatgacgagggtcaagatagccgccatacatgatacattgagtacaacatcaagataaacactccctccccacacacaacttttgccttccgttcactctgtatgttgtgtttattacggttgcatatgttgtgtttattatggcatcaacacgttccattagaaaatataactattgtttgtcaagtacaaaatcataatcacatcagcttgtaataatattgcatcactgttttgtaccaaattgtaagttgttgtagcaacgcacgggcacc

SEQ ID NO: 4162 - DNA, 1055 bp, Zea Mays
caaatatagtgtgacgcagtctatggagccttggctgatcagcatactatctttccatgccattctgctactggttaccatcatctcgaggaggaatatcaatttccagctcatcttgtcagctctaacattttctggtgtattccttgctgagagattaaatacgttcctggcgcaaaactggaagagcttctctacccaaaactattttgatccccagggccttttcatttcggtcatctggtctggccctctcctcctgataacgatccttattctggtgaacactctcgtgacgctctgcacgctaatggtaaggtggaaaagggcagagctcaggcatcgcgctcggcaagctcgtgacaagcaggactgatctgaaacctgcgtctatgtatcattcggtggcaagtagaaagtcgtgttcttgctacggttggtctaaccaagaatcacatccctggaaacggtgcccatttcattaggtagcagaatataacgttaagatggtcagattttgctcttgtggacccttttggtgcccggatagccatttactacgctgcaatattatcacgtcacgcgatttctttgggcgaggacactaggcctgtgataatgatgtgtccatttgttcgatgctgaacctctgaacctcggaaccggttgatagttgttgttttcctagctgtgtcgggtcgggtgcagcatgctctgattgttgattacctcaagaataattcgttggactgctgaattttagccatctttacagatgttccgatctgaaactgtcgctcgaatttcactgcatctggtgtcggtgtgcaagctattcctgatgtttgtgggcacttgaaaatgttctctggttgtactatggactgaatgatgcatggcatccgttgtcagcttcgtgtgtgaaagggggatgctttcttgttttgccagagttgcaagagaggtacacattcgcaatccgtgtgtttggttgcccgtgtcgcctggtgcatggcccatgggatgcagaaataaaacaaactcattgtttggtt

SEQ ID NO: 4163 - DNA, 3072 bp, Zea Mays
caacatcaaacacctaacaaaaggcagaggcaggcttgcccgggtggcggtggcggctgaaagcctgcaaccaaacaggccccctcgattagcgaaaaaaagcccagcgaaaactaaaaccctcgcatctttcctttcctccccaactgcggccgcctccacccgctccaccgccgatggccgagcctgagcctctgccgcaggtgtcgtctgaacctaccactccgccgcaggaaggcagcggaaggactaagacaaagaacaagaagaatcgttccaagaagcaaccgaagcgagccggcgctgacaccgacgggttatcctcaggcgccagcaccatggttgaggaccctttcttcgtcctcgccggcggaaaggaaggagggtttctggatttggaggagatcgatgaggcagacttcggcatcttcggaggcgtcttggatgacgtaggacagagcgtcgaggaagctgggaaggatcatgggaagaagaagaagaaaacaaagaagcggaagcgtgggggtgatggcgagggcttcagtggcgacgctgcgttggtagttgagaatgaccaggtggatgtcgagaaagtggagaaaaaggtcgaggatggggagaaaggggataagaaggggaagagaaagatgaacatgaagaagaggaaggtgaaggataatgagatgaacagggagagtgatgaggatgttgctagtgacaaagcagaagacatgcaagatgacactgagaatatggaacaaaatgaggacgatgagctgattttgggcgaagatgatgtctctgcatggagggagcttaggctgcaccctctgcttctcaaggcgatgcgcagacttggattcaaagagccaacacctatacaaaagtcttgctttcctgctgcagctcatcgaggcaaggatgttatcggtgctgcagagacaggttccggaaagacacttgcttttggcctcccagttttgcaacgtctccttgaagagcgagaaaaggccacaagattgcagcaggaagatgaaaaaatggaggaacgttcttgtggaagccctcttcgtgctcttattctgacacccactagggagctcgccaaacaggtatgcgatcatctaaaagatgtggccaagttcttaggaatccatgttgttccaattgttggtggtctatcaatggaaaaacaagagagacttttgaaaaaaaagcctgaaattgttgttggaactcctggaagattgtgggaacacatgtcgatgaacaatcaacacctagttgagctgcactcattgtcattcttcatcttggatgaggctgatagaatgatcgaacgaggccatttccgtgaattacaatctatcattgagatgcttccactgaccaatggttctgatgaacaagctgcaagaacaatgccaaactgtgagactgtaccaattttgcaaataaagaagcggcaaacctttgtgttctcagccacacttgcactctcatctaattttcggaagaagttgaagcgtggcctatctacttcgaaggcatcgacgcctgatgatgtcagctctattgaagcattgtcaaaacaagctggaatgaaatctaatgctgaaatagttgatttgacaaaggcttcaatcttgcctgagaagcttgaagaatcttttattgagtgcagtgaagaggataaggatgcctatctgtattatatattgagtgttcatggtcaaggtcgcacaataatattttgtacatcaatcgccgcattacgtcacatttcttccatactgcgcattcttggaattaatgtattgacaaaccatgctcaaatgcaacaaagagctcgcatgaaggtctatatccacagaagtggaaggacagcacgcaagtcattggctggctgcagcattgcgttaatctctcctactgacaagtccaggttttattctctttgcaaatctttgtcaaaggagaatctccagcagtttcctgtagatcatacttacatgtctggagtgatgaacagactctcacttgctcggcagattgacaagattgcccgtaaaacttcacaggaaaatgctaacaaatcctggcttcaaaggaatgctgaatctatgggattgattttggatactagtgacagtgaagaagaccatgtgcagggacacaagaaacgaaaggctacttctgcacatctccaaaagcttcaacaggagttgagtgatctcttgcaatgcccattgcagcctaagactttctctcgccgctatttggctggggctggtgtctcacccttacttcagaagcaactagaagagttggccaagagaaatgcaagcaacaatagcagcaagagtaagaataaaggatctgggtttgttgttattggtcaggatcgtgtcgagcccttgcaagcacttcaaaattctgggcaagaggtctgtgtgaacatagacaaagaaagggaaaagcgaagagtcgctgagaactggaggcggaagaagcatgaagaaaagaaacgtacacaagagcagaagcgaaaggataagagaaaagctaaagagatggcttgatgacacatgagatagctaggggccttcaaggggtttacggaagctctttaagctcgcgtcaatcctttcagaaaggaaaggaatgcattcatcaatgttttgctgtaatacaatgcgtgcgctaagttagcgcttgcctttaacagattggaggtggtagtttgattttgttttgcggctgaagaaaataaacttagaatgcacgagcactggctctggatgagaaaagaaattaagcagatagctcacgtataacctcattggatctgtaatatgtacgcctatcagatttaaggtacaaattaattttattagggatgggaatcgactgacctggcctatctttggacttggacctggcccattgccttaaggccaattttaggagtgatggagattatgatcttgctggctatcatgggtttggcctagatatttttctgctataatgcatggacatgaatcctatcaatatttctataaagtattg

SEQ ID NO: 4164 - DNA, 3098 bp, Zea Mays
ctcgattagcgaaaaaaagcccagcgaaaactaaaaccctcgcatctttcctttcctccccaactgcggccgcctccacccgctccaccgccgatggccgagcctgagcctctgccgcaggtgtcgtctgaacctaccactccgccgcaggaaggcagcggaaggactaagacaaagaacaagaagaatcgttccaagaagcaaccgaagcgagccggcgctgacaccgacgggttatcctcaggcgccagcaccatggttgaggaccctttcttcgtcctcgccggcggaaaggaaggagggtttctggatttggaggagatcgatgaggcagacttcggcatcttcggaggcgtcttggatgacgtaggacagagcgtcgaggaagctgggaaggatcatgggaagaagaagaagaaaacaaagaagcggaagcgtgggggtgatggcgagggcttcagtggcgacgctgcgttggtagttgagaatgaccaggtggatgtcgagaaagtggagaaaaaggtcgaggatggggagaaaggggataagaaggggaagagaaagatgaacatgaagaagaggaaggtgaaggataatgagatgaacagggagagtgatgaggatgttgctagtgacaaagcagaagacatgcaagatgacactgagaatatggaacaaaatgaggacgatgagctgattttgggcgaagatgatgtctctgcatggagggagcttaggctgcaccctctgcttctcaaggcgatgcgcagacttggattcaaagagccaacacctatacaaaagtcttgctttcctgctgcagctcatcgaggcaaggatgttatcggtgctgcagagacaggttccggaaagacacttgcttttggcctcccagttttgcaacgtctccttgaagagcgagaaaaggccacaagattgcagcaggaagatgaaaaaatggaggaacgttcttgtggaagccctcttcgtgctcttattctgacacccactagggagctcgccaaacaggtatgcgatcatctaaaagatgtggccaagttcttaggaatccatgttgttccaattgttggtggtctatcaatggaaaaacaagagagacttttgaaaaaaaagcctgaaattgttgttggaactcctggaagattgtgggaacacatgtcgatgaacaatcaacacctagttgagctgcactcattgtcattcttcatcttggatgaggctgatagaatgatcgaacgaggccatttccgtgaattacaatctatcattgagatgcttccactgaccaatggttctgatgaacaagctgcaagaacaatgccaaactgtgagactgtaccaattttgcaaataaagaagcggcaaacctttgtgttctcagccacacttgcactctcatctaattttcggaagaagttgaagcgtggcctatctacttcgaaggcatcgacgcctgatgatgtcagctctattgaagcattgtcaaaacaagctggaatgaaatctaatgctgaaatagttgatttgacaaaggcttcaatcttgcctgagaagcttgaagaatcttttattgagtgcagtgaagaggataaggatgcctatctgtattatatattgagtgttcatggtcaaggtcgcacaataatattttgtacatcaatcgccgcattacgtcacatttcttccatactgcgcattcttggaattaatgtattgacaaaccatgctcaaatgcaacaaagagctcgcatgaaggctgtggatcgcttccgtgaaagtgaaaattccattttggtcgcaactgatggttttgcaaggggtatggattttgatgatgtgcgaacagttatccattatcagttgccacattcaactgataagtggaaggacagcacgcaagtcattggctggctgcagcattgcgttaatctctcctactgacaagtccaggttttattctctttgcaaatctttgtcaaaggagaatctccagcagtttcctgtagatcatacttacatgtctggagtgatgaacagactctcacttgctcggcagattgacaagattgcccgtaaaacttcacaggaaaatgctaacaaatcctggcttcaaaggaatgctgaatctatgggattgattttggatactagtgacagtgaagaagaccatgtgcagggacacaagaaacgaaaggctacttctgcacatctccaaaagcttcaacaggagttgagtgatctcttgcaatgcccattgcagcctaagactttctctcgccgctatttggctggggctggtgtctcacccttacttcagaagcaactagaagagttggccaagagaaatgcaagcaacaatagcagcaagagtaagaataaaggatctgggtttgttgttattggtcaggatcgtgtcgagcccttgcaagcacttcaaaattctgggcaagaggtctgtgtgaacatagacaaagaaagggaaaagcgaagagtcgctgagaactggaggcggaagaagcatgaagaaaagaaacgtacacaagagcagaagcgaaaggataagagaaaagctaaagagatggcttgatgacacatgagatagctaggggccttcaaggggtttacggaagctctttaagctcgcgtcaatcctttcagaaaggaaaggaatgcattcatcaatgttttgctgtaatacaatgcgtgcgctaagttagcgcttgcctttaacagattggaggtggtagtttgattttgttttgcggctgaagaaaataaacttagaatgcacgagcactggctctggatgagaaaagaaattaagcagatagctcacgtataacctcattggatctgtaatatgtacgcctatcagatttaaggtacaaattaattttattagggatgggaatcgactgacctggcctatctttggacttggacctggcccattgccttaaggccaattttaggagtgatggagattatgatcttgctggctatcatgggtttggcctagatatttttctgctataatgcatggacatgaatcctatcaatatttctataaagtattg

SEQ ID NO: 4165 - DNA, 3101 bp, Zea Mays
caggccccctcgattagcgaaaaaaagcccagcgaaaactaaaaccctcgcatctttcctttcctccccaactgcggccgcctccacccgctccaccgccgatggccgagcctgagcctctgccgcaggtgtcgtctgaacctaccactccgccgcaggaaggcagcggaaggactaagacaaagaacaagaagaatcgttccaagaagcaaccgaagcgagccggcgctgacaccgacgggttatcctcaggcgccagcaccatggttgaggaccctttcttcgtcctcgccggcggaaaggaaggagggtttctggatttggaggagatcgatgaggcagacttcggcatcttcggaggcgtcttggatgacgtaggacagagcgtcgaggaagctgggaaggatcatgggaagaagaagaagaaaacaaagaagcggaagcgtgggggtgatggcgagggcttcagtggcgacgctgcgttggtagttgagaatgaccaggtggatgtcgagaaagtggagaaaaaggtcgaggatggggagaaaggggataagaaggggaagagaaagatgaacatgaagaagaggaaggtgaaggataatgagatgaacagggagagtgatgaggatgttgctagtgacaaagcagaagacatgcaagatgacactgagaatatggaacaaaatgaggacgatgagctgattttgggcgaagatgatgtctctgcatggagggagcttaggctgcaccctctgcttctcaaggcgatgcgcagacttggattcaaagagccaacacctatacaaaagtcttgctttcctgctgcagctcatcgaggcaagagacaggttccggaaagacacttgcttttggcctcccagttttgcaacgtctccttgaagagcgagaaaaggccacaagattgcagcaggaagatgaaaaaatggaggaacgttcttgtggaagccctcttcgtgctcttattctgacacccactagggagctcgccaaacaggtatgcgatcatctaaaagatgtggccaagttcttaggaatccatgttgttccaattgttggtggtctatcaatggaaaaacaagagagacttttgaaaaaaaagcctgaaattgttgttggaactcctggaagattgtgggaacacatgtcgatgaacaatcaacacctagttgagctgcactcattgtcattcttcatcttggatgaggctgatagaatgatcgaacgaggccatttccgtgaattacaatctatcattgagatgcttccactgaccaatggttctgatgaacaagctgcaagaacaatgccaaactgtgagactgtaccaattttgcaaataaagaagcggcaaacctttgtgttctcagccacacttgcactctcatctaattttcggaagaagttgaagcgtggcctatctacttcgaaggcatcgacgcctgatgatgtcagctctattgaagcattgtcaaaacaagctggaatgaaatctaatgctgaaatagttgatttgacaaaggcttcaatcttgcctgagaagcttgaagaatcttttattgagtgcagtgaagaggataaggatgcctatctgtattatatattgagtgttcatggtcaaggtcgcacaataatattttgtacatcaatcgccgcattacgtcacatttcttccatactgcgcattcttggaattaatgtattgacaaaccatgctcaaatgcaacaaagagctcgcatgaaggctgtggatcgcttccgtgaaagtgaaaattccattttggtcgcaactgatggttttgcaaggggtatggattttgatgatgtgcgaacagttatccattatcagttgccacattcaactgatgtctatatccacagaagtggaaggacagcacgcaagtcattggctggctgcagcattgcgttaatctctcctactgacaagtccaggttttattctctttgcaaatctttgtcaaaggagaatctccagcagtttcctgtagatcatacttacatgtctggagtgatgaacagactctcacttgctcggcagattgacaagattgcccgtaaaacttcacaggaaaatgctaacaaatcctggcttcaaaggaatgctgaatctatgggattgattttggatactagtgacagtgaagaagaccatgtgcagggacacaagaaacgaaaggctacttctgcacatctccaaaagcttcaacaggagttgagtgatctcttgcaatgcccattgcagcctaagactttctctcgccgctatttggctggggctggtgtctcacccttacttcagaagcaactagaagagttggccaagagaaatgcaagcaacaatagcagcaagagtaagaataaaggatctgggtttgttgttattggtcaggatcgtgtcgagcccttgcaagcacttcaaaattctgggcaagaggtctgtgtgaacatagacaaagaaagggaaaagcgaagagtcgctgagaactggaggcggaagaagcatgaagaaaagaaacgtacacaagagcagaagcgaaaggataagagaaaagctaaagagatggcttgatgacacatgagatagctaggggccttcaaggggtttacggaagctctttaagctcgcgtcaatcctttcagaaaggaaaggaatgcattcatcaatgttttgctgtaatacaatgcgtgcgctaagttagcgcttgcctttaacagattggaggtggtagtttgattttgttttgcggctgaagaaaataaacttagaatgcacgagcactggctctggatgagaaaagaaattaagcagatagctcacgtataacctcattggatctgtaatatgtacgcctatcagatttaaggtacaaattaattttattagggatgggaatcgactgacctggcctatctttggacttggacctggcccattgccttaaggccaattttaggagtgatggagattatgatcttgctggctatcatgggtttggcctagatatttttctgctataatgcatggacatgaatcctatcaatatttctataaagtattg

SEQ ID NO: 4166 - DNA, 3111 bp, Zea Mays
ggcggctgaaagcctgcaaccaaacaggccccctcgattagcgaaaaaaagcccagcgaaaactaaaaccctcgcatctttcctttcctccccaactgcggccgcctccacccgctccaccgccgatggccgagcctgagcctctgccgcaggtgtcgtctgaacctaccactccgccgcaggaaggcagcggaaggactaagacaaagaacaagaagaatcgttccaagaagcaaccgaagcgagccggcgctgacaccgacgggttatcctcaggcgccagcaccatggttgaggaccctttcttcgtcctcgccggcggaaaggaaggagggtttctggatttggaggagatcgatgaggcagacttcggcatcttcggaggcgtcttggatgacgtaggacagagcgtcgaggaagctgggaaggatcatgggaagaagaagaagaaaacaaagaagcggaagcgtgggggtgatggcgagggcttcagtggcgacgctgcgttggtagttgagaatgaccaggtggatgtcgagaaagtggagaaaaaggtcgaggatggggagaaaggggataagaaggggaagagaaagatgaacatgaagaagaggaaggtgaaggataatgagatgaacagggagagtgatgaggatgttgctagtgacaaagcagaagacatgcaagatgacactgagaatatggaacaaaatgaggacgatgagctgattttgggcgaagatgatgtctctgcatggagggagcttaggctgcaccctctgcttctcaaggcgatgcgcagacttggattcaaagagccaacacctatacaaaagtcttgctttcctgctgcagctcatcgaggcaaggatgttatcggtgctgcagagacaggttccggaaagacacttgcttttggcctcccagttttgcaacgtctccttgaagagcgagaaaaggccacaagattgcagcaggaagatgaaaaaatggaggaacgttcttgtggaagccctcttcgtgctcttattctgacacccactagggagctcgccaaacaggtatgcgatcatctaaaagatgtggccaagttcttaggaatccatgttgttccaattgttggtggtctatcaatggaaaaacaagagagacttttgaaaaaaaagcctgaaattgttgttggaactcctggaagattgtgggaacacatgtcgatgaacaatcaacacctagttgagctgcactcattgtcattcttcatcttggatgaggctgatagaatgatcgaacgaggccatttccgtgaattacaatctatcattgagatgcttccactgaccaatggttctgatgaacaagctgcaagaacaatgccaaactgtgagactgtaccaattttgcaaataaagaagcggcaaacctttgtgttctcagccacacttgcactctcatctaattttcggaagaagttgaagcgtggcctatctacttcgaaggcatcgacgcctgatgatgtcagctctattgaagcattgtcaaaacaagctggaatgaaatctaatgctgaaatagttgatttgacaaaggcttcaatcttgcctgagaagcttgaagaatcttttattgagtgcagtgaagaggataaggatgcctatctgtattatatattgagtgttcatggtcaaggtcgcacaataatattttgtacatcaatcgccgcattacgtcacatttcttccatactgcgcattcttggaattaatgtattgacaaaccatgctcaaatgcaacaaagagctcgcatgaaggctgtggatcgcttccgtgaaagtgaaaattccattttggtcgcaactgatggttttgcaaggggtatggattttgatgatgtgcgaacagttatccattatcagttgccacattcaactgatgtctatatccacagaagtggaaggacagcacgcaagtcattggctggctgcagcattgcgttaatctctcctactgacaagtccaggttttattctctttgcaaatctttgtcaaaggagaatctccagcagtttcctgtagatcatacttacatgtctggagtgatgaacagactctcacttgctcggcagattgacaagattgcccgtaaaacttcacaggaaaatgctaacaaatcctggcttcaaaggaatgctgaatctatgggattgattttggatactagtgacagtgaagaagaccatgtgcagggacacaagaaacgaaaggctacttctgcacatctccaaaagcttcaacagcctaagactttctctcgccgctatttggctggggctggtgtctcacccttacttcagaagcaactagaagagttggccaagagaaatgcaagcaacaatagcagcaagagtaagaataaaggatctgggtttgttgttattggtcaggatcgtgtcgagcccttgcaagcacttcaaaattctgggcaagaggtctgtgtgaacatagacaaagaaagggaaaagcgaagagtcgctgagaactggaggcggaagaagcatgaagaaaagaaacgtacacaagagcagaagcgaaaggataagagaaaagctaaagagatggcttgatgacacatgagatagctaggggccttcaaggggtttacggaagctctttaagctcgcgtcaatcctttcagaaaggaaaggaatgcattcatcaatgttttgctgtaatacaatgcgtgcgctaagttagcgcttgcctttaacagattggaggtggtagtttgattttgttttgcggctgaagaaaataaacttagaatgcacgagcactggctctggatgagaaaagaaattaagcagatagctcacgtataacctcattggatctgtaatatgtacgcctatcagatttaaggtacaaattaattttattagggatgggaatcgactgacctggcctatctttggacttggacctggcccattgccttaaggccaattttaggagtgatggagattatgatcttgctggctatcatgggtttggcctagatatttttctgctataatgcatggacatgaatcctatcaatatttctataaagtattg

SEQ ID NO: 4167 - DNA, 3166 bp, Zea Mays
gcagaggcaggcttgcccgggtggcggtggcggctgaaagcctgcaaccaaacaggccccctcgattagcgaaaaaaagcccagcgaaaactaaaaccctcgcatctttcctttcctccccaactgcggccgcctccacccgctccaccgccgatggccgagcctgagcctctgccgcaggtgtcgtctgaacctaccactccgccgcaggaaggcagcggaaggactaagacaaagaacaagaagaatcgttccaagaagcaaccgaagcgagccggcgctgacaccgacgggttatcctcaggcgccagcaccatggttgaggaccctttcttcgtcctcgccggcggaaaggaaggagggtttctggatttggaggagatcgatgaggcagacttcggcatcttcggaggcgtcttggatgacgtaggacagagcgtcgaggaagctgggaaggatcatgggaagaagaagaagaaaacaaagaagcggaagcgtgggggtgatggcgagggcttcagtggcgacgctgcgttggtagttgagaatgaccaggtggatgtcgagaaagtggagaaaaaggtcgaggatggggagaaaggggataagaaggggaagagaaagatgaacatgaagaagaggaaggtgaaggataatgagatgaacagggagagtgatgaggatgttgctagtgacaaagcagaagacatgcaagatgacactgagaatatggaacaaaatgaggacgatgagctgattttgggcgaagatgatgtctctgcatggagggagcttaggctgcaccctctgcttctcaaggcgatgcgcagacttggattcaaagagccaacacctatacaaaagtcttgctttcctgctgcagctcatcgaggcaaggatgttatcggtgctgcagagacaggttccggaaagacacttgcttttggcctcccagttttgcaacgtctccttgaagagcgagaaaaggccacaagattgcagcaggaagatgaaaaaatggaggaacgttcttgtggaagccctcttcgtgctcttattctgacacccactagggagctcgccaaacaggtatgcgatcatctaaaagatgtggccaagttcttaggaatccatgttgttccaattgttggtggtctatcaatggaaaaacaagagagacttttgaaaaaaaagcctgaaattgttgttggaactcctggaagattgtgggaacacatgtcgatgaacaatcaacacctagttgagctgcactcattgtcattcttcatcttggatgaggctgatagaatgatcgaacgaggccatttccgtgaattacaatctatcattgagatgcttccactgaccaatggttctgatgaacaagctgcaagaacaatgccaaactgtgagactgtaccaattttgcaaataaagaagcggcaaacctttgtgttctcagccacacttgcactctcatctaattttcggaagaagttgaagcgtggcctatctacttcgaaggcatcgacgcctgatgatgtcagctctattgaagcattgtcaaaacaagctggaatgaaatctaatgctgaaatagttgatttgacaaaggcttcaatcttgcctgagaagcttgaagaatcttttattgatgaagaggataaggatgcctatctgtattatatattgagtgttcatggtcaaggtcgcacaataatattttgtacatcaatcgccgcattacgtcacatttcttccatactgcgcattcttggaattaatgtattgacaaaccatgctcaaatgcaacaaagagctcgcatgaaggctgtggatcgcttccgtgaaagtgaaaattccattttggtcgcaactgatggttttgcaaggggtatggattttgatgatgtgcgaacagttatccattatcagttgccacattcaactgatgtctatatccacagaagtggaaggacagcacgcaagtcattggctggctgcagcattgcgttaatctctcctactgacaagtccaggttttattctctttgcaaatctttgtcaaaggagaatctccagcagtttcctgtagatcatacttacatgtctggagtgatgaacagactctcacttgctcggcagattgacaagattgcccgtaaaacttcacaggaaaatgctaacaaatcctggcttcaaaggaatgctgaatctatgggattgattttggatactagtgacagtgaagaagaccatgtgcagggacacaagaaacgaaaggctacttctgcacatctccaaaagcttcaacaggagttgagtgatctcttgcaatgcccattgcagcctaagactttctctcgccgctatttggctggggctggtgtctcacccttacttcagaagcaactagaagagttggccaagagaaatgcaagcaacaatagcagcaagagtaagaataaaggatctgggtttgttgttattggtcaggatcgtgtcgagcccttgcaagcacttcaaaattctgggcaagaggtctgtgtgaacatagacaaagaaagggaaaagcgaagagtcgctgagaactggaggcggaagaagcatgaagaaaagaaacgtacacaagagcagaagcgaaaggataagagaaaagctaaagagatggcttgatgacacatgagatagctaggggccttcaaggggtttacggaagctctttaagctcgcgtcaatcctttcagaaaggaaaggaatgcattcatcaatgttttgctgtaatacaatgcgtgcgctaagttagcgcttgcctttaacagattggaggtggtagtttgattttgttttgcggctgaagaaaataaacttagaatgcacgagcactggctctggatgagaaaagaaattaagcagatagctcacgtataacctcattggatctgtaatatgtacgcctatcagatttaaggtacaaattaattttattagggatgggaatcgactgacctggcctatctttggacttggacctggcccattgccttaaggccaattttaggagtgatggagattatgatcttgctggctatcatgggtttggcctagatatttttctgctataatgcatggacatgaatcctatcaatatttctataaagtattg

SEQ ID NO: 4168 - DNA, 1603 bp, Zea Mays
gattaattgaagacctcacgaatggatcttactaaggatctttgatgttcaagaagggtaggcttggtgcagtggataacttgaagctgatggatgatttggctgttctgagaccaacaatattcgcaagtgttccccggttatataacaaaatttatgctgcaattacaaatgctgtgaaggagtctggggggttgagagaaaggttgtatcatactgcatacaatgccaagcgacatgcaatgataaatggtagaaacccatcacctatgtgggacaagttggtatttaacaaaattaaagctagacttggtggacgaatgaggcttatgacttcaggtgcttctccattgtcaccagatgtcatggaatttttaagaatatgcttcggtgaagttcttgaagggtatggaatgacagagacatcttgtgtcatcagtacaatgaatattggtgacagatcaattggacatgttggatctccaaatccttcttgtgaggttaaacttgtggacgtcccagaaatgaattatacttcggaggatcaaccgtatcctcgtggagagatttgtgttaggggacctataatattctgtggttactataaagatgaagtccaaacaagagaggtcattgatgaggatggttggttacatactggagacataggtttgtggctgcctggagggcgtctaaaaattatagataggaaaaagaacattttcaagttagctcaaggagaatacatagctccagagaagattgagaatgtctatgctaagtgcaagttcattgctcaatgctttatatatggtgatagtttcaactcttccctagttgccattgtagcagtcgaaccggatgtgttgaaggcttgggctgcatcagaaggaatccagtacgaggacttgagacagctctgtgctgatcctagagcaacagctgctgtcctggctgatatggattccattgcgaaggaagcacagctgagaggtttcgagtttgctaaagcggttactcttgttgctgagccgttcacattggataatggccttctcaccccaacattcaaggtcaagaggccgcaagccaaagcatactttgcaaaagagatctcagacatgtatgcacggttgctagagacagagttagctaggtcgaagttgtaacttgtgcggtatcaggagaagggccatcaatacagccgtacaggagattggattctgcatttttttattccacctcacgaaataagtagtaaaatctttttactgatacgggaaataacggatcatgccatgctccggagtcgatagtttttttcaccagacggggcagtgcttggcgcatgctgaatatatggttctagttataaagaaatgtttttacagagtgtatattgggtctgaacagctgccctggaaggtagttcacagaaaatatattggtattacaaatgcaatactaaaaaaattgtgtcttccgattgtattgtcagtcttttatcaacactagtggaagtgtacgcgctcggtacacgataaaaatattacatacaaaatgtttataaatacctatataatattaaatttattgatatgtt

SEQ ID NO: 4169 - DNA, 2739 bp, Zea Mays
tcggttcccacgccaacaacgcatatccgccacctcggggggtccctccctcctcggcctcgcgcgcgccttcccacacatcctcctcccccccacgccacgaaacgccaaagggagggagcccgagcctagcaggagcagcgcaaggaaacaatggcgcgggaggagcaggagcagtccgcattgggcgccgcccacgtccaccaccaccagcctccggccggcggatgcggcctctccgccaaccccaccgccgccgcagccgagtacgcccacgaacagggctacagtgtcgttctgcctgagaagctgcacactggaaagtggaatgtgtacagatctgcacattctcctctaagattaataaataaattccctgataacccggagattggaacgctgcatgataattttgtatatgcagttgaaactttccgagattgtagatatttgggtacaagaatccgcccagacgggacagttggagactacaagtggatgacgtatggagaagctagcacgagcagaactgcaataggttctggtcttatttatcatggaatatctgaacatttgcaacagcagcaacaactaagcctgttagtccaaagcaagttggggtagactagagggtgcacgaattggtctatattttataaacagaccggagtggatcatacttgaccatgcttgtgcggcatactcatatgtatctgtgccgctttatgatactctcggcccagatgcagttcagtttatagtgaaccacgcaacggtagaagttatattctgtgtgccccaaactctaagcgctattttaagctttattactcaaatgccgtgtgttcgtcttattgtggtggttggtggagatgattcaaatatgccatctgcaccagcaactactgaatgcaaaattatgacgtacaacaggctacacaatgagggaaagatgagtcctcaaacttttcgtccaccaaaacctgaagatatagccactatctgctacaccagtggcactactggcacaccaaagggagctgtactttctcatgagaacttaattgcaaatgtagcagggtcaagtttaggcattaagttttacccctctgatgtgtacatctcgtatctacctttggctcacatctatgagagagctaaccaggttgcattgcttcactatggtgttgccattggattctaccaaggggataacttgaagctgatggatgatttggctgttctgagaccaacaatattcgcaagtgttccccggttatataacaaaatttatgctgcaattacaaatgctgtgaaggagtctggggggttgagagaaaggttgtatcatactgcatacaatgccaagcgacatgcaatgataaatggtagaaacccatcacctatgtgggacaagttggtatttaacaaaattaaagctagacttggtggacgaatgaggcttatgacttcaggtgcttctccattgtcaccagatgtcatggaatttttaagaatatgcttcggtgaagttcttgaagggtatggaatgacagagacatcttgtgtcatcagtacaatgaatattggtgacagatcaattggacatgttggatctccaaatccttcttgtgaggttaaacttgtggacgtcccagaaatgaattatacttcggaggatcaaccgtatcctcgtggagagatttgtgttaggggacctataatattctgtggttactataaagatgaagtccaaacaagagaggtcattgatgaggatggttggttacatactggagacataggtttgtggctgcctggagggcgtctaaaaattatagataggaaaaagaacattttcaagttagctcaaggagaatacatagctccagagaagattgagaatgtctatgctaagtgcaagttcattgctcaatgctttatatatggtgatagtttcaactcttccctagttgccattgtagcagtcgaaccggatgtgttgaaggcttgggctgcatcagaaggaatccagtacgaggacttgagacagctctgtgctgatcctagagcaacagctgctgtcctggctgatatggattccattgcgaaggaagcacagctgagaggtttcgagtttgctaaagcggttactcttgttgctgagccgttcacattggataatggccttctcaccccaacattcaaggtcaagaggccgcaagccaaagcatactttgcaaaagagatctcagacatgtatgcacggttgctagagacagagttagctaggtcgaagttgtaacttgtgcggtatcaggagaagggccatcaatacagccgtacaggagattggattctgcatttttttattccacctcacgaaataagtagtaaaatctttttactgatacgggaaataacggatcatgccatgctccggagtcgatagtttttttcaccagacggggcagtgcttggcgcatgctgaatatatggttctagttataaagaaatgtttttacagagtgtatattgggtctgaacagctgccctggaaggtagttcacagaaaatatattggtattacaaatgcaatactaaaaaaattgtgtcttccgattgtattgtcagtcttttatcaacactagtggaagtgtacgcgctcggtacacgataaaaatattacatacaaaatgtttataaatacctatataatattaaatttattgatatgtt

SEQ ID NO: 4170 - DNA, 2750 bp, Zea Mays
tccgtccccgaccgacgcgacggcgacgcaccatatcgctatccctaccctctcggttcccacgccaacaacgcatatccgccacctcggggggtccctccctcctcggcctcgcgcgcgccttcccacacatcctcctcccccccacgccacgaaacgccaaagggagggagcccgagcctagcaggagcagcgcaaggaaacaatggcgcgggaggagcaggagcagtccgcattgggcgccgcccacgtccaccaccaccagcctccggccggcggatgcggcctctccgccaaccccaccgccgccgcagccgagtacgcccacgaacagggctacagtgtcgttctgcctgagaagctgcacactggaaagtggaatgtgtacagatctgcacattctcctctaagattaataaataaattccctgataacccggagattggaacgctgcatgataattttgtatatgcagttgaaactttccgagattgtagatatttgggtacaagaatccgcccagacgggacagttggagactacaagtggatgacgtatggagaagctagcacgagcagaactgcaataggttctggtcttatttatcatggaatatctgaaggtgcacgaattggtctatattttataaacagaccggagtggatcatacttgaccatgcttgtgcggcatactcatatgtatctgtgccgctttatgatactctcggcccagatgcagttcagtttatagtgaaccacgcaacggtagaagttatattctgtgtgccccaaactctaagcgctattttaagctttattactcaaatgccgtgtgttcgtcttattgtggtggttggtggagatgattcaaatatgccatctgcaccagcaactactgaatgcaaaattatgacgtacaacaggctacacaatgagggaaagatgagtcctcaaacttttcgtccaccaaaacctgaagatatagccactatctgctacaccagtggcactactggcacaccaaagggagctgtactttctcatgagaacttaattgcaaatgtagcagggtcaagtttaggcattaagttttacccctctgatgtctatttgtatcactcctcaggtacatctcgtatctacctttggctcacatctatgagagagctaaccaggttgcattgcttcactatggtgttgccattggattctaccaaggggataacttgaagctgatggatgatttggctgttctgagaccaacaatattcgcaagtgttccccggttatataacaaaatttatgctgcaattacaaatgctgtgaaggagtctggggggttgagagaaaggttgtatcatactgcatacaatgccaagcgacatgcaatgataaatggtagaaacccatcacctatgtgggacaagttggtatttaacaaaattaaagctagacttggtggacgaatgaggcttatgacttcaggtgcttctccattgtcaccagatgtcatggaatttttaagaatatgcttcggtgaagttcttgaagggtatggaatgacagagacatcttgtgtcatcagtacaatgaatattggtgacagatcaattggacatgttggatctccaaatccttcttgtgaggttaaacttgtggacgtcccagaaatgaattatacttcggaggatcaaccgtatcctcgtggagagatttgtgttaggggacctataatattctgtggttactataaagatgaagtccaaacaagagaggtcattgatgaggatggttggttacatactggagacataggtttgtggctgcctggagggcgtctaaaaattatagataggaaaaagaacattttcaagttagctcaaggagaatacatagctccagagaagattgagaatgtctatgctaagtgcaagttcattgctcaatgctttatatatggtgatagtttcaactcttccctagttgccattgtagcagtcgaaccggatgtgttgaaggcttgggctgcatcagaaggaatccagtacgaggacttgagacagctctgtgctgatcctagagcaacagctgctgtcctggctgatatggattccattgcgaaggaagcacagctgagaggtttcgagtttgctaaagcggttactcttgttgctgagccgttcacattggataatggccttctcaccccaacattcaaggtcaagaggccgcaagccaaagcatactttgcaaaagagatctcagacatgtatgcacggttgctagagacagagttagctaggtcgaagttgtaacttgtgcggtatcaggagaagggccatcaatacagccgtacaggagattggattctgcatttttttattccacctcacgaaataagtagtaaaatctttttactgatacgggaaataacggatcatgccatgctccggagtcgatagtttttttcaccagacggggcagtgcttggcgcatgctgaatatatggttctagttataaagaaatgtttttacagagtgtatattgggtctgaacagctgccctggaaggtagttcacagaaaatatattggtattacaaatgcaatactaaaaaaattgtgtcttccgattgtattgtcagtcttttatcaacactagtggaagtgtacgcgctcggtacacgataaaaatattacatacaaaatgtttataaatacctatataatattaaatttattgatatgtt

SEQ ID NO: 4171 - DNA, 3679 bp, Zea Mays
ctcgggacttctttcgctgctctctctctctccgagcacagctgggggtggtgttcacggtaggcagcagcgcactgcgcacgggcgcagtggtgaggcgcctaagggagagtggcagtagtgacgcctggcgccggtgcaggagtgcaagggagacggtggcggcagcggctcgtgtcgacggccggagcccggaggcagcggggcggcggaggcgtcagtgtacgcgggcggggcggaggaggcactgaagcagctcgcggcggcgggcttgagccagcgttgcggcactctcgggccggtggcttcgggagttgggaggcactggcctgtgcaagaagggcttccgagaagaaacgaatccacagggattcaaagttcaaacggggtccaaaccttcccgacttccagtacagtcttcctcagacgaggccgcaagacaggaggagacaacgccgaggcagccagctagggcgcggtcaaccgcagtaagccaataagcaatgcagtagtgggcgcagctccggaggagtggaatgacggcgccaccgaatgctagcatgggaccgctcagtttgggtggctgcggggctctcctctccactcctcagcctaattcgtggcattgccgcgggttctcgattcctgagaggagcgtctttatgttgccactgcgccggggtttgtcaaggaagaggggctgggttcttgattcaagaagtaacggtgctgtggctcgtgatgaggtcggtgccgggtcgtcagagcttcggcacatcgagaaggagctgacgttcagcccgactttcactgactatgttaaaatcatggagtcggtgaagttggacaggagcaagaatttacatggcgccgatggccagagtttgaggagaaggttcgcgggtgatggccgacaaaggaataggaggtctggtgatgcaaggaataaatcatttgaaaggaatcaggggcctcagagggacttggcgaaggatgagaatcagaaggatgttacaggctttgtggataaaagagcaactggtcatgtaaaaagtagcaatcgcaggcaaggggaggttgaagactatgcacagagaagaataattcgtggtggtacaagaggaaatggagacaatgggcagttctcatcacctgtgaaggctaaagatactaggggtagtatgtctgttcataggttggtgacgaacaaacagactcagtcagttgcagggaacgatttacaagggcgagcaacttatactccatctcggacttctgcccttccaaatagcagtattccatcaaagaatgctaaggttcaaatgagaaaatacgactatactatgacaagtagcagaatagacttaaaatatcctagagagacatttcccaatactgaggtcaacgctgacagtaatgttcaaagaaatcagcaaagagtggagaccttagggagaaactttgtagtacgtaggtttggggagattggcaccgactctaagaagtctaccgtaagcaaaatttatgggagtacacaggcaatgcctgagcatgatagccattcaagtgataatttggagagtgatgaacgtaggacagttcaattgcatagaggagcaaatgttaaaatggggaaatttgttagtagggatgctgaaactacagattttgatgatagagctgctttcaaaacttttgaggtatttactgatgtcaggaataggccacggatccttcgaatggaaatggaagagagaatccagaagttagctagtcggctcaatgctacagatgtaaatactccagagtggaaattctccaaaatgattcatgatgcaaaaattaaattctctgatcattctatcctaaggattgttcaaatgttgggtcgatatggaaattggaaatgtgttttgcaagtggttgaatggctccagtcacatgaaaggttcaaatcctacaagagcaggtatatttacacaacagttctcgatgttctagggaaggcaaagagaccattcgaggcgttgaatgtattttataccatgcagaaccaattgtcatcttatcctgacatggcagcttatcattgtattgctgttactcttgggcaagctggtcttataaaagaattatttgatgtgattgattgcatgtgttctcctcctaggaagaagttcaaattgagccctcttcagaattgggatcctcgcttggaaccagaccttattgtatacaatgcagttttgaatgcttgtgtgcaacaaaagcaatgggaaggggcattttgggtactgcaacagttgaaagagaagaacatttgtccaacaaattcaacatatggtcttgttatggaggtaatgcttgtctgtggaaagtacaatttggtttatgagttcttcaataaggtggataaatcatcaatacctggtgctctgaactataaagttcttgtaaatgcactttggagagaaggaaagattgatgaagcagtgatggctgtgaaggatatggaaagtcgtggaattgttggttctgctagtctgtattatgacctagctcgatgcctttgcagtggtggacggtgcaaagaagcacttctccaggttgaaaagatatgcaaggttgccaacaaaccgctggttgttacctacacaggactcattcagacttgcatagacaatggtggcatggaagatgctaaatacatattcaaccacatgtgcaactactgttcacctaattctgttacttgcaacatcatgatgaagtcatatattaaacatggaatgcttgaagacgcgaaagacctgctccatgatattctgaattgcaggataaggagtaaagcggattctaatcaagtggcaaccgctgacaagtttactttcaatactttcatggaggcctgtgctgcagcaaaaaggtggaatgacttcgagtatgcgtttcgtgagatgttattgaatgggtaccatttcgatgagcgaagacaccttcggatggtacttgacgcttttaggcatgggaaggaacagctgttggatgatctatggcactacctgtgccgtcacagccgtgtcccgccctcccctgtcataatggaaagattctgcctaaaactgatgcagggagatacactggcggcgatctcctgcgtcagcagcttccatgagggcaagatatgcaacgtctcctccatgtcatggctcaatctgctgagccgcaatgcagataggctgaaggaggagcatgttaccaagttagctcatgaactcaacagcctcattagcttgaggagttcctctgatagcattagtcttagcctgtaccaaaaaattattagtagctgtacggcattcctctctggagccacagttgtagaaaaggcaccttctggccaataggtggtgttacagaaattataataaccacagttagtaaattctagtactccaaatcataattaccacgactgatggagtgtattgcattcaacgtttggttatcggtacaaagttagaaatggaaaattttcacgtaaggaattagttctttttttagtataatacaaaggctgatttgggagcataagcgataaagcttgctttgtttgattaattttatactggttactttcaaattcacaagtcataataccatgagcatcatttattga

SEQ ID NO: 4172 - DNA, 1122 bp, Zea Mays
gactgagcaactctaacaaatagtgtaaatcaaccccaaaagcattagcaggagagaaaaaatgtgttttgtcccctccaacaggcccccttcttctcctcaatctcttcgtgtcccgcatccggtggcgttggtcatgcaaatatgcgcgccctgtgatttcccctatcgctgcagtgcccgctcccgtggctgctttcccgcgctttttgcctcgcgcgccgtagtggtggtgtgtggaacttggaaggcgcgagcgcgcaagcctctgtgggctgccgcagaggtttctgcgtccgaggagcaagacgctcgatctgaagtgcacgaggtggcgacagagtcttctgtggtgctggacgaggtggggggacatcgatccgcagtggaggcacgcggttgtaacttctgcgctgttagccggggcagggggctccatccgcgatgaatgtgcgcgcccgtggcttctgcggtggtggccgaggcagggggaagctcgatccgcggtgaaggcgcgcgtccgtggcttctgcgctggtggccaaggcgggggaagatgccgatcgcacgtgctggttcttcaattccgccgtcgccttgcaccggaggtcggattccccaaaggcatatggtcggcgacggatccatcacctgcgatggtggagaagctttgcgaccaagaaaccaaggtggaggaccatcgctccctttgttgccaggcccttccggggttgtccaagatccatttgcatcgtccacgtttggaagcagcgatggcttctctacatcctttgactgagctgctcatggttgcacaggcatgttcgttgtgcaaaactctggacaggttgcaaaactctggacaggatgcaaaatcactatttgctgtcacggctaccagtttgcatttgtgacttcggttcctgtaatggtgggcgagagaaagtaggtgtcagtaactgtgtggtaattattagtatgaacttatctcagtaatttgtgtggtaattgttagtatgaatgtatatcagtttggttccaattgctacttgtcttagcacatgttctctgtcaaattgttatttgtctcattaattgttctgtcaaattattacttgtcaa

SEQ ID NO: 4173 - DNA, 1165 bp, Zea Mays
gactgagcaactctaacaaatagtgtaaatcaaccccaaaagcattagcaggagagaaaaaatgtgttttgtcccctccaacaggcccccttcttctcctcaatctcttcgtgtcccgcatccggtggcgttggtcatgcaaatatgcgcgccctgtgatttcccctatcgctgcagtgcccgctcccgtggctgctttcccgcgctttttgcctcgcgcgccgtagtggtggtgtgtggaacttggaaggcgcgagcgcgcaagcctctgtgggctgccgcagaggtttctgcgtccgaggagcaagacgctcgatctgaagtgcacgaggtggcgacagagtcttctgtggtgctggacgaggtggggggacatcgatccgcagtggaggcacgcggttgtaacttctgcgctgttagccggggcagggggctccatccgcgatgaatgtgcgcgcccgtggcttctgcggtggtggccgaggcagggggaagctcgatccgcggtgaaggcgcgcgtccgtggcttctgcgctggtggccaaggcgggggaagatgccgatcgcacgtgctggttcttcaattccgccgtcgccttgcaccggaggtcggattccccaaaggcatatggtcggcgacggatccatcacctgcgatggtggagaagctttgcgaccaagaaaccaaggtggaggaccatcgctccctttgttgccaggcccttccggggttgtccaagatccatttgcatcgtccacgtttggaagcagcgatggcttctctacatcctttgactgagctgctcatggattgagttaagacgacagagtggtagtacaatgcaagacatggttgcacaggcatgttcgttgtgcaaaactctggacaggttgcaaaactctggacaggatgcaaaatcactatttgctgtcacggctaccagtttgcatttgtgacttcggttcctgtaatggtgggcgagagaaagtaggtgtcagtaactgtgtggtaattattagtatgaacttatctcagtaatttgtgtggtaattgttagtatgaatgtatatcagtttggttccaattgctacttgtcttagcacatgttctctgtcaaattgttatttgtctcattaattgttctgtcaaattattacttgtcaa

SEQ ID NO: 4174 - DNA, 2483 bp, Zea Mays
ccgcctcggcaagcgccccctccctagcggcaatctccctcggcaagcgccctctcccccgcagcaatcttgccgcgccctcgctccacgacaatcttggcaatgtccctcgctccgcgccaatctcgctcgctccgcggcgcccccatgctcgccctcccccacggcccccacggcaatctgcctcccccataagggcaccatcccgagcccgccccagccgccattctcgcttcggggcgccgcgtccgcgtcgattcagtttccctcgagtttcagaaaccccgcccgccaatagccctcgcgtctgtagatctcgcgtcctcgatggaaagttcgcctccacgccattcatggcgccttcctcggtccccttccccatgaccatatcacgccattgtggaatcatggtatttgtcatcttcgtggaagttgaataaccgcatataatttctaggagcacccgggccactgccagtccgccatgcccaagccaccggccggcttcgtgctgaatgaatggggcaggtgcatcgccgctgcattcaagtgcatcttcatcatcgtgcggagttggcctgccgccggccaccaataccatcgcctcggtccacccaccagttgcaacgctggtcctgtgctctcaccatttgatagggagttcagtacaaagaagatatcaattatgaagagacttcttcatgaattcatgaggaaacaagctcttcacctgcaggtgtacaccgaggaaatcagagtgcagagctctggtctttatctgccacggatacgaagccgagtgcagcatatccatcggaggtaaaccttcagtttcatttttcatgttcttttcattagtgaaaaccatgaactcatggcatcgatgtatgctcacaaacttccataaaaaacacagacacaacctttgttttagtacaccgtggatacattgtccatggaaacaaccatgatggccacagtaaatcttcaggctcgacaggctacctgtcgagctttgatgacacgttagagactgctctgaccatttcaagagtgtatctggtgagaacgaagctgtggattctagtggctatgtacgcaaaccatagccctacatgggacctccatttatttgctaacatgtccattgcatttccatataaatgagagaacatgctaaagaaaagattcctctacgggttctccatgggaggaactgtggtggtgcagctccatatgaatgatcctttctactgggacagtgtcgtgttgcttgctccaatgtgcagggtctggtgttaactgtattgaatggcctaagtctcctgcctatatttcccctgtgtctgtggactgttgtctttctatttctttctataggattgctctaagtgctctcatcaaaatatatggttgctttttgtttcacctggcatcggacttcgataacatgcgtcctcacctgatcattgttggcgcactgaagatgatcaacatcattgcgcctagctggagagtcatccctgcaacaaacatgatcgacaaaatccgcaaagaccctcagctcaagaaaaagatctgtttcaatccgtacatgtacagaggaaacctcgcactgcaaataggctgcaaactcctttccgtcagcctagacatcaagaagagcctgcacgaggtgagatcttcgccatctgttaggccaccacatgcaacattggtagcatgaacgttcccgttggatcgtcgaccatgggacttctacagtaacatcggcacggacgacgtcgtcactgatcgttccgggagcaagctgctgcacaacctgaagaagatttgtctttttaagatgaaggttctgaagaagtaatgacatgtttctttgaggtttccataatttcatctcaatccacttcccacacacaatcgggaaccttcaacatgagcccttgaccctcgacatgagtgttaaacacttcgacagatagctgtttatgtgcttttgttccttccacagcgtgatccaggtcgaggagatttctaaggtcttggaaatcagcggcgagcgcagcctcatcgataacttcgtcttctcctaccacgtgctaatgtgacacttttgcaacaatatcaatgccggacaacatgcatgctccttgggaggaattaaggggaagatgaagaactaaaaaaattaccagaatctaatttacgcacgccaagtcagaccaccgtgaaaaactctatctccacgtgaccaatcttctccatttttcagtttgcaagatactttttatattgattaaagttcaataccaataacactaatgtgagctcactgtggtgttcatctttttgcataaattttatgaaaagaaaacagaactctttctattttgccttctctgctatagtaaagatgtaccatttcatgtttattcgtcctctttttggttccttacggtcaattaaggattatacttttg

SEQ ID NO: 4175 - DNA, 2160 bp, Zea Mays
cgatctcccgcgcttattctgcgcgccaccctgctgcttctgcacgcacgttacgtaatcccattcccaggcgcagccctctccctgcaagtcctaccgctccgcggccgcaggtgcggggtggttgacggccgcttacccgcaccggcgccatgcgcgcgcgctaggtggtcgaggtcaagccaaacgctgcccaccgcctctgcctcccataacccatataaccctcgtccacgtcctttgctcgactcgcaaaaacttgcttccttcgacggccgcatcagtcctccacgtacgtcccggcacgtcgatcacggcaaaagctagccagcgcacaggacctgcggaggagctcggttttcgatcagggtcaataatcaccacgccgacgctgatgacgccggcgtcccaggcggcaccgccgcgcgcgcggcggtccgtggtggcggagctggagggcgcgctgcttcggagcgcggacacgctcccgtacttcatgctcgtggcgttcgaggcgtccgggctgccgcgcttcgcgctgctgctggcgctgtgcccgctgctgcggctgctggagctggcgggccgtggcggcctggcgctgcgcgccgccgcgttcgtggccaccgcgggggtgacacgcgccgagctggaggccgtgtcccgcgccgtgctgcccaagttcatggccgacgacgtcgaccccgcggcctgggcggccttcgggagctgcgaggggaggcgcgtcgtcgtcacgcggatgccccgcgtcatggtcgagcgcttcgccaaggagcacctcggcgcgcacgccgtggtcggctctgacctcgagtacagccggctcaggcgctccacggggctcctcaaaggcgcctgccatgaggccgtcgccagccgtgcccgcgcgctgttcgccggcgacgacctgccggacctcgcgatcgccggctcagagatggcgcgctccttcacattctgcgagatcagcccgccgttcactggagaccacgggatgaacgccgccccaccgttccggccggtcatcttccacgacggtcgcctcgtgtgccggcccacgccattcatgtccctcgtcatcctcctctggctgcctctcggcgtgctggtcgccttcgtccgcatcgccgtcggcctcatggttcccatctggagcatcccctacatcgcgccggtcttcggcggcgccgtgatcattcacggccgcgcgccgcccccagtcaggcccagcgacgccgcggacgtcggctcgccgccctcgggggtcctcttcgtctgcacgcaccgcacgctcatggaccccgtggtgctggccaccgtgctcgggcgccgcgtggccgccgtgacatactccatctcccgcctctccgagatcctctccccgatcccgacggtgcgcctgacgcgagaccgggaagtggacgcggcacgcatgcgcgccgagctggccagtggcgacgtggccgtgtgccccgagggcaccacgtgccgggagcccttcctgctccgcttctccaagctcttcgcggagctcagcgacaggatcgtgcccgtggcgatgaactaccgcgtggggctcttccacccgacgacggcgcgcgggtggaaagccatggaccccatcttcttcttcatgaacccgcggcccgtgtacgaggtgacgttcctgaaccagctccccgcagaggcgacgtgcgcggcggggaagagccccgttgatgtagccaactacgttcagcggatactcgctgccacgctcgggttcgagtgcaccaccctcacaaggaaggacaagtacacggtgctcgccggcaacgacggcgtcctgaacgccaagccggcggcggccgggaagccggcttggcagagccgcgtgaaggaagtcctcgggttcctgctccactaacaattacaccttgcccagatctggactctggcacaaatacttcgctcaccgatttgtttgagtttatactttgttacatttatacatgtacgtaaaaataaaacatgtagtagtaaaatacagcagtgatcagcctttctttacataataagtactgtatattgtattgttctttattttacaattgttttggtgaatttttactgggtccaatcaaagatgaaagttgttcc

SEQ ID NO: 4176 - DNA, 1369 bp, Zea Mays
gcgatcctcaatctggtgtcccacggccgtccgatctcacattcactaccacctgtcccgtcctcccgtcccagtcaacaccaccgtcagttcagctgagcctgagcatggcgtcgccggcggccgtgctcgtcagcaatggcggtatctccccacacgctccaccttccgccgccgccttcctcgtctccactccgggcgcctacaccaccgcccccggaaccctcctctggtggacacgtcacctccgccgcctcgccgaatccgccacgctcctcgcccgttcccgccccaacctgctcggcctccccctcccccgatcgcgcgccctcgacctcgatttactatccatccattctctcgtgaacccctccgtgcgggtcgccatccgcgagatgcgcacaaggctgcccatgaccaaggacgaggatttggcgctcacggccctggtcaggggagccgatcccatttctggcggtggcggggctggcctcgacgtcttcgtccacgtggggacgtattccccgccgatctttggagaatcgggggccaggcttgccgcggccggcaggggaagggacgccgctgccgccaagtacgcgtcctgggccaggatccggaagagtttggaaaagatgaggcctcctggggtcactgagctcttgctgactaatgacggggatcacattcttgaaggcgctgttacaaacttctttgttgtctgccaacagggtgtgccatgatattggaatcccagtacgagaggtctctccatcgtggtccatgaatgaattctggaaggaagcctttgttacaagtagcttaaggtttatccagcatgtagagtcagttcaagtgcctttattttgggaggacatacaatctaaaacctggagtgatgtaccttgggcggtgaagaagtttcagggtgttggatgcattaccacacagattcagagggaattactgaagagagcaagaagtgataagtacggcgttaacggtctcctttgagttatgatcattgttgttgattcatttgaagggacttcttttccaggcacttaattatttcatttctgctgggacgacactgttaagactgggtttcttgtgtgtataattcagacattttttgtctgctcagtgctgtgtcggccttctacaagctgcaggtagatagccactgggcagtagcgaagcaattccatgcttgtttattactgtaattatgaggatggatcagatttagctaactgtcggagtccttttttttacttgtacctgcaattaattgatctgatctgtttgccgggtaggtgttcgtgaatatgaatggctgaatgaatttgggttccttaaattaaat

SEQ ID NO: 4177 - DNA, 1094 bp, Zea Mays
cattgatgaagattttaggcatagaatcaaagcaaggtggatgaaatggcgccaaacatctggtgtactatgtgacaagaggtaccacaaaagctaaaggttgcaattatgagaagtttgcgacatccgaacattgttcttcttatgggtgctgtcactcagccacctaacctttcaattgtgactgaatacctatcaagaggtagcttatacagacttttacacaggcatgctgcaagggaaaatctggaggagcgccgccgcttgagtatggctttcgacgtggcaaaagggatgaactatcttcataagcgtaatcctccaatagtccaccgggatcttaagtcaccaaacctgttggttgacaaaaagtacactgtgaaagtctgtgactttggtctctccagattgaaggcaaacacatttctgtcttccaagactgcagcagggactcctgagtggatggcaccagaagttctacgagacgagccctcaaatgagaagtctgatgtttacagcttcggtgtaatcttatgggagcttatgacattgcagcagccatggagtaatttaaatccagctcaggtcgttgcagcggttggtttcaagggacaaaggcttgagatcccaagcagcgttgatccgaaagtggcggcagtaatcgagtcctgctgggtcagggagccctggagacgaccctcttttgccagtatcatggaatccctgaaacttctcatcaagacattaccacccaatcagctcctcgaagaaaattagttaccacccaagcaacttgcaaattatgtcacctctagagttttctcgatttgtttagatccgatatgcgccaggcctctcaaaccattcgtcttcggcgccacgtattccctgatgagaaatattcaaaactacacctgtcacaaaaggggaaaaactatggttggacaataagattcatgaaaaaaatatgtgatccaaattaagtgtacatctcttttatcaaggaaccaaatgtaagttggtcaaatatatacatataagtactaatatttatggaatatatacttttacaataaaattattaaagatataaa

SEQ ID NO: 4178 - DNA, 2206 bp, Zea Mays
aataacccagaaataaaaatcgccgtggaggcgagtcgccgccggcaccgcccggcacggccttcttctccggcgaaggcggagctcgttacggggattccacatccgttaatcggtcccaccggatccctcgccgcctcccacgggccgggccgcgccgtggcgcgcgcgcaggccgagatgcggaagaggatggagagcgacgacgatctgatcgaggaggcaaaactgcgcaccgtctggtgggcgctctgcatcttcgccgtctcctacttcctcacgcgtcaatggctgcttgtcctactccgacaaggtctcggatggtttctacttcatccaggggatggatcccttcatatggacgctctgcaacgatttgcacgacggaggccgcgtccccactattgagtccctcaaggctgtcaatcccaccgattctgccatcgaggtggtcatcgtagataaagtggcggactatgacctgaggcagctgataagcatggccattgacgtttctctgaaccgtaccgactccaaggagatcgccactcgactcgctgccgttgtgtccacgaagatggggggatcggtagcagctaccgaggaacacgagttgggtccccggtggagagactctgttgggttcctgaagattagctcagggtctgttgtacttcccatcggaaagttatcagttggcttttgttgccaccgagcattactgttcaagaccctggcggattccatcaatctgccctgtcgcattgtgaagggatgcaagtactgcaaagctggtgctgccacttcttgcttggtgcgctttggtcatgacaggaacggttatcgacttagatgaggttatgggatcaaatctaggtctaaactcatcacatgcaacaaacagtgattgtcaagctacctttactcatcttaaggctggtactcgacgcagtagtcaagatgggagttttataatgcagaggagttcccaagaggatactcaatctggactaagtgatccctttagcgatatgtcccttgagatagaagacttgattatcccatggagtgagcttgttctgaaagagaaaattggtgcaggttcttttggtactgtgcaccgtgcggattggaatggttcggatgtcgcagtaaaaattctaatggagcaggacttccatccagagcgtctcaaagaatttttgagagaggttgcaattatgagaagtttgcgacatccgaacattgttcttcttatgggtgctgtcactcagccacctaacctttcaattgtgactgaatacctatcaagaggtagcttatacagacttttacacaggcatgctgcaagggaaaatctggaggagcgccgccgcttgagtatggctttcgacgtggcaaaagggatgaactatcttcataagcgtaatcctccaatagtccaccgggatcttaagtcaccaaacctgttggttgacaaaaagtacactgtgaaagtctgtgactttggtctctccagattgaaggcaaacacatttctgtcttccaagactgcagcagggactcctgagtggatggcaccagaagttctacgagacgagccctcaaatgagaagtctgatgtttacagcttcggtgtaatcttatgggagcttatgacattgcagcagccatggagtaatttaaatccagctcaggtcgttgcagcggttggtttcaagggacaaaggcttgagatcccaagcagcgttgatccgaaagtggcggcagtaatcgagtcctgctgggtcagggagccctggagacgaccctcttttgccagtatcatggaatccctgaaacttctcatcaagacattaccacccaatcagctcctcgaagaaaattagttaccacccaagcaacttgcaaattatgtcacctctagagttttctcgatttgtttagatccgatatgcgccaggcctctcaaaccattcgtcttcggcgccacgtattccctgatgagaaatattcaaaactacacctgtcacaaaaggggaaaaactatggttggacaataagattcatgaaaaaaatatgtgatccaaattaagtgtacatctcttttatcaaggaaccaaatgtaagttggtcaaatatatacatataagtactaatatttatggaatatatacttttacaataaaattattaaagatataaa

SEQ ID NO: 4179 - DNA, 2401 bp, Zea Mays
aataacccagaaataaaaatcgccgtggaggcgagtcgccgccggcaccgcccggcacggccttcttctccggcgaaggcggagctcgttacggggattccacatccgttaatcggtcccaccggatccctcgccgcctcccacgggccgggccgcgccgtggcgcgcgcgcaggccgagatgcggaagaggatggagagcgacgacgatctgatcgaggaggcaaaactgcgcaccgtctggtgggcgctctgcatcttcgccgtctcctacttcctcacgcgtcaatggctgcttgtcctactccgacaaggtctcggatggtttctacttcatccaggggatggatcccttcatatggacgctctgcaacgatttgcacgacggaggccgcgtccccactattgagtccctcaaggctgtcaatcccaccgattctgccatcgaggtggtcatcgtagataaagtggcggactatgacctgaggcagctgataagcatggccattgacgtttctctgaaccgtaccgactccaaggagatcgccactcgactcgctgccgttgtgtccacgaagatgggctaccgaggaacacgagttgggtccccggtggagagactctgttgggttcctgaagattagctcagggtctgttgtacttcccatcggaaagttatcagttggcttttgttgccaccgagcattactgttcaagaccctggcggattccatcaatctgccctgtcgcattgtgaagggatgcaagtactgcaaagctggtgctgccacttcttgcttggtgcgctttggtcatgacagggaatgtctaattgatttaattgggaacccgggattcttatctgaacctgactccctcttgaatggactatcatccatctctgtttcttcaccattgcgcccaccaaaacatgactcagctgataattctgataatttcaagttgtttgccaagaaatatttccttgattgtcagtcgttaaatctcatgttcagtgatccagcagctggaacggttatcgacttagatgaggttatgggatcaaatctaggtctaaactcatcacatgcaacaaacagtgattgtcaagctacctttactcatcttaaggctggtactcgacgcagtagtcaagatgggagttttataatgcagaggagttcccaagaggatactcaatctggactaagtgatccctttagcgatatgtcccttgagatagaagacttgattatcccatggagtgagcttgttctgaaagagaaaattggtgcaggttcttttggtactgtgcaccgtgcggattggaatggttcggatgtcgcagtaaaaattctaatggagcaggacttccatccagagcgtctcaaagaatttttgagagaggttgcaattatgagaagtttgcgacatccgaacattgttcttcttatgggtgctgtcactcagccacctaacctttcaattgtgactgaatacctatcaagaggtagcttatacagacttttacacaggcatgctgcaagggaaaatctggaggagcgccgccgcttgagtatggctttcgacgtggcaaaagggatgaactatcttcataagcgtaatcctccaatagtccaccgggatcttaagtcaccaaacctgttggttgacaaaaagtacactgtgaaagtctgtgactttggtctctccagattgaaggcaaacacatttctgtcttccaagactgcagcagggactcctgagtggatggcaccagaagttctacgagacgagccctcaaatgagaagtctgatgtttacagcttcggtgtaatcttatgggagcttatgacattgcagcagccatggagtaatttaaatccagctcaggtcgttgcagcggttggtttcaagggacaaaggcttgagatcccaagcagcgttgatccgaaagtggcggcagtaatcgagtcctgctgggtcagggagccctggagacgaccctcttttgccagtatcatggaatccctgaaacttctcatcaagacattaccacccaatcagctcctcgaagaaaattagttaccacccaagcaacttgcaaattatgtcacctctagagttttctcgatttgtttagatccgatatgcgccaggcctctcaaaccattcgtcttcggcgccacgtattccctgatgagaaatattcaaaactacacctgtcacaaaaggggaaaaactatggttggacaataagattcatgaaaaaaatatgtgatccaaattaagtgtacatctcttttatcaaggaaccaaatgtaagttggtcaaatatatacatataagtactaatatttatggaatatatacttttacaataaaattattaaagatataaa

SEQ ID NO: 4180 - DNA, 2439 bp, Zea Mays
aataacccagaaataaaaatcgccgtggaggcgagtcgccgccggcaccgcccggcacggccttcttctccggcgaaggcggagctcgttacggggattccacatccgttaatcggtcccaccggatccctcgccgcctcccacgggccgggccgcgccgtggcgcgcgcgcaggccgagatgcggaagaggatggagagcgacgacgatctgatcgaggaggcaaaactgcgcaccgtctggtcaatggctgcttgtcctactccgacaaggtctcggatggtttctacttcatccaggggatggatcccttcatatggacgctctgcaacgatttgcacgacggaggccgcgtccccactattgagtccctcaaggctgtcaatcccaccgattctgccatcgaggtggtcatcgtagataaagtggcggactatgacctgaggcagctgataagcatggccattgacgtttctctgaaccgtaccgactccaaggagatcgccactcgactcgctgccgttgtgtccacgaagatggggtgagtaatgcaactgcatttctcatttgtgtgctcgctatcttacgtgaacgtttccgtcgaaggggatcggtagcagctaccgaggaacacgagttgggtccccggtggagagactctgttgggttcctgaagattagctcagggtctgttgtacttcccatcggaaagttatcagttggcttttgttgccaccgagcattactgttcaagaccctggcggattccatcaatctgccctgtcgcattgtgaagggatgcaagtactgcaaagctggtgctgccacttcttgcttggtgcgctttggtcatgacagggaatgtctaattgatttaattgggaacccgggattcttatctgaacctgactccctcttgaatggactatcatccatctctgtttcttcaccattgcgcccaccaaaacatgactcagctgataattctgataatttcaagttgtttgccaagaaatatttccttgattgtcagtcgttaaatctcatgttcagtgatccagcagctggaacggttatcgacttagatgaggttatgggatcaaatctaggtctaaactcatcacatgcaacaaacagtgattgtcaagctacctttactcatcttaaggctggtactcgacgcagtagtcaagatgggagttttataatgcagaggagttcccaagaggatactcaatctggactaagtgatccctttagcgatatgtcccttgagatagaagacttgattatcccatggagtgagcttgttctgaaagagaaaattggtgcaggttcttttggtactgtgcaccgtgcggattggaatggttcggatgtcgcagtaaaaattctaatggagcaggacttccatccagagcgtctcaaagaatttttgagagaggttgcaattatgagaagtttgcgacatccgaacattgttcttcttatgggtgctgtcactcagccacctaacctttcaattgtgactgaatacctatcaagaggtagcttatacagacttttacacaggcatgctgcaagggaaaatctggaggagcgccgccgcttgagtatggctttcgacgtggcaaaagggatgaactatcttcataagcgtaatcctccaatagtccaccgggatcttaagtcaccaaacctgttggttgacaaaaagtacactgtgaaagtctgtgactttggtctctccagattgaaggcaaacacatttctgtcttccaagactgcagcagggactcctgagtggatggcaccagaagttctacgagacgagccctcaaatgagaagtctgatgtttacagcttcggtgtaatcttatgggagcttatgacattgcagcagccatggagtaatttaaatccagctcaggtcgttgcagcggttggtttcaagggacaaaggcttgagatcccaagcagcgttgatccgaaagtggcggcagtaatcgagtcctgctgggtcagggagccctggagacgaccctcttttgccagtatcatggaatccctgaaacttctcatcaagacattaccacccaatcagctcctcgaagaaaattagttaccacccaagcaacttgcaaattatgtcacctctagagttttctcgatttgtttagatccgatatgcgccaggcctctcaaaccattcgtcttcggcgccacgtattccctgatgagaaatattcaaaactacacctgtcacaaaaggggaaaaactatggttggacaataagattcatgaaaaaaatatgtgatccaaattaagtgtacatctcttttatcaaggaaccaaatgtaagttggtcaaatatatacatataagtactaatatttatggaatatatacttttacaataaaattattaaagatataaa

SEQ ID NO: 4181 - DNA, 3052 bp, Zea Mays
gtgccgtgtgccgtgcgcgctgcacccggcactggcagacacccgctcttcgacgcgactccccagtccccactgggccaccagtcctccgtccatcactccatccacgagtcagcgtccgcgtccgcgtcggcgtgtccctctccttcagatgcgaggcctccaagggcgaactagtagttgcttggagacttgcagtgaaaagggcacgcagaaaagcgagcgtctggccgcccgcacgccaggagcgatcgacagatcggctgatgcggagttagcacttagcagtcgcccgccgcgacctcaacctgcaccggcgccgcacgccaagggcggagacgccagatgatgaaggatgcgaagtggcctcacgcggtgtcgagcgccggtggaaggcgaggcccccctgcctcatcatccaacgcgggggcgtcgtacaccctcctcgcgtcctccccgcccagcagcgtcagaaacgacggctgctcgccgcactaccctcccgcccctgcgtccgacgacgacgggctctcctcgttcgacgcgtccgtcgctgccgcgaagctgccgttccagcagctgcacaggaacaggccccaactcggcgtcgcggactggctgccgctgcagcgccaatctagcggtagcagcgtcgggggcgacgacggcgaggtatcctccaccgtttccttcaccatcgccaacgccgcggaatataggtacaagggcgacgcggaccgcgcaccgagcagcagcagcaagagctgggcgcagcaggcggaggaggcctacaacctccagctcgccctcgcgctccgcctctgctccgaggcctccgccgctgcggaccccaacttcctcgactcctccatcgctgccgccgaccacctccagcccattgcatcgcctcaatccctctcccaccgcttctgggtcaatggctgcttgtcctactccgacaaggtctcggatggtttctacttcatccaggggatggatcccttcatatggacgctctgcaacgatttgcacgacggaggccgcgtccccactattgagtccctcaaggctgtcaatcccaccgattctgccatcgaggtggtcatcgtagataaagtggcggactatgacctgaggcagctgataagcatggccattgacgtttctctgaaccgtaccgactccaaggagatcgccactcgactcgctgccgttgtgtccacgaagatggggggatcggtagcagctaccgaggaacacgagttgggtccccggtggagagactctgttgggttcctgaagattagctcagggtctgttgtacttcccatcggaaagttatcagttggcttttgttgccaccgagcattactgttcaagaccctggcggattccatcaatctgccctgtcgcattgtgaagggatgcaagtactgcaaagctggtgctgccacttcttgcttggtgcgctttggtcatgacagggaatgtctaattgatttaattgggaacccgggattcttatctgaacctgactccctcttgaatggactatcatccatctctgtttcttcaccattgcgcccaccaaaacatgactcagctgataattctgataatttcaagttgtttgccaagaaatatttccttgattgtcagtcgttaaatctcatgttcagtgatccagcagctggaacggttatcgacttagatgaggttatgggatcaaatctaggtctaaactcatcacatgcaacaaacagtgattgtcaagctacctttactcatcttaaggctggtactcgacgcagtagtcaagatgggagttttataatgcagaggagttcccaagaggatactcaatctggactaagtgatccctttagcgatatgtcccttgagatagaagacttgattatcccatggagtgagcttgttctgaaagagaaaattggtgcaggttcttttggtactgtgcaccgtgcggattggaatggttcggatgtcgcagtaaaaattctaatggagcaggacttccatccagagcgtctcaaagaatttttgagagaggttgcaattatgagaagtttgcgacatccgaacattgttcttcttatgggtgctgtcactcagccacctaacctttcaattgtgactgaatacctatcaagaggtagcttatacagacttttacacaggcatgctgcaagggaaaatctggaggagcgccgccgcttgagtatggctttcgacgtggcaaaagggatgaactatcttcataagcgtaatcctccaatagtccaccgggatcttaagtcaccaaacctgttggttgacaaaaagtctgtgactttggtctctccagattgaaggcaaacacatttctgtcttccaagactgcagcagggactcctgagtggatggcaccagaagttctacgagacgagccctcaaatgagaagtctgatgtttacagcttcggtgtaatcttatgggagcttatgacattgcagcagccatggagtaatttaaatccagctcaggtcgttgcagcggttggtttcaagggacaaaggcttgagatcccaagcagcgttgatccgaaagtggcggcagtaatcgagtcctgctgggtcagggagccctggagacgaccctcttttgccagtatcatggaatccctgaaacttctcatcaagacattaccacccaatcagctcctcgaagaaaattagttaccacccaagcaacttgcaaattatgtcacctctagagttttctcgatttgtttagatccgatatgcgccaggcctctcaaaccattcgtcttcggcgccacgtattccctgatgagaaatattcaaaactacacctgtcacaaaaggggaaaaactatggttggacaataagattcatgaaaaaaatatgtgatccaaattaagtgtacatctcttttatcaaggaaccaaatgtaagttggtcaaatatatacatataagtactaatatttatggaatatatacttttacaataaaattattaaagatataaa

SEQ ID NO: 4182 - DNA, 2262 bp, Zea Mays
cctccgcctcccggcgcccgcatcgcctctcgcctgcgctgcgctttccttcccccaagatattttccggccgctctaccctgtagctgtagcgcgtgcgcgcaccgccttgccctgcggtccgcagccacgagactgccctgccccgccgccaagtggccagaatcccgccgcggggcccgccgcgatcgcccaccaaaaccaccctcgggctcgggtatactacacagatacatggccggccatctctgagccggtctcccggcagcagcagtccctcgggttgtccacgcggagcgccagccgatggccggccacagtatgtcggttcacccgaagcctataaattcctcgccgccccgcctctcgccgccccgcctctcgccgcccatttccctccgccgcctcctaatcctcaacacccgcgcccccaaccgcgcccgtcgtatgccaccatgcaccgcgcccgccccaccgcgcacgctaatgaccccgatgctccgtacgccgccgccgtcgcgatgctgctggagcccaaactcgaggacgaggagttgccgctgcagcagctggcgtccccgggccccttcgtgtccctggaccagctgatgccggcggtggccgtgccggccgaaccgcgcccgctggaggcgctgctgcaaggcccgcagctgccgcccttcctgtccaagacgtacgacctggtgaacgagccggcgctggacggggtcatctcctggggcgctgccgggaacagcttcgtcgtgtgggacccctccaccttcgcgcgcgacgtgctgccgcacaacttcaagcacaacaatttctccagcttcgtcaggcagctcaacacctatggtttccgcaaggttcatgctgacagatgggagtttgctcacgaagatttcctgcgagatagcaagcatctattgaagaggattgtcaggcgcaggtcctccccaacaaaacaaagcagcgttcagcctggctcttcttctggagagtccagcttggaccctgagctccacacgctgaggagagagaagaacgcgctgcttgaagaagtagcaaggttgaaacaggaacaccgccagacaattgagcaaatgagcacgctgaatcacaggctggaatctgcagaggaccggcagaggcagatggtctctttcctggccaagctccttcagaacccgagtttcgtgaggaagctgaagctgcacagggagaagaaggagatcgactccaccagggtgaaaagaaagtttctcaaacatgttcctcatggcagcgtagagtcaggtgaatccagctcacagcacgccggagagaatggttcgtatttcgctgtgagttcccccatggctacaactacaagcgtgcatgacgacatcacggagcttcagaactttcttttggaagatgatgacctcaacttcggcatggattcagaaaacaccgggcttgaaggcaccgaggcaacagatgatattggagaactgattcaggggttcgacacacaagaggaacttgacctcggcagtggagctgagctacaggagatgcctccagcttctggccctcttgctcgagatcccacaatcggcaggttcaagggaaagaatgtgctgtgtccaggactggacgctacctcctccgaaggcgactgcctcagtccattgcctgacaacatggggctgctttcaggcaccatgctagggacggcaggcagcatgatggccgctgacgatgagcaaatatggggcgttgatgcttcggcagccctgcaaagctcttgcagtggcactagccaacaagctttcggtagccatgctagtgatccctatctgatggacatcgccaacaggcctgagagattctgggagcttgatttccaggcactggatgaggctgatctgcagctggacaagtgtgctatcgatgaccctgctcttcagcagcagccaagcatgaagaagctgtagacgaatttccgttgtcagacagacagtatggtggtgcttcatccactgaagtgctacaattaacttatggagattgctatagttacttcggtattttggagcgaggctgatgaactcgcctactatggcacttagtagtagcagcagcagtagtatgtttttgtttcccatttattcacccccggtgtttttgaatggaaacttgtatcctagtgatttcttcagagcagctgttaactgctctggccgattcttttttttttttttaattataaaacta

SEQ ID NO: 4183 - DNA, 2554 bp, Zea Mays
cctccgcctcccggcgcccgcatcgcctctcgcctgcgctgcgctttccttcccccaagatattttccggccgctctaccctgtagctgtagcgcgtgcgcgcaccgccttgccctgcggtccgcagccacgagactgccctgccccgccgccaagtggccagaatcccgccgcggggcccgccgcgatcgcccaccaaaaccaccctcgggctcgggtatactacacagatacatggccggccatctctgagccggtctcccggcagcagcagtccctcgggttgtccacgcggagcgccagccgatggccggccacagtatgtcggttcacccgaagcctataaattcctcgccgccccgcctctcgccgccccgcctctcgccgcccatttccctccgccgcctcctaatcctcaacacccgcgcccccaaccgcgcccgtcgtatgccaccatgcaccgcgcccgccccaccgcgcacgctaatgaccccgatgctccgtacgccgccgccgtcgcgatgctgctggagcccaaactcgaggacgaggagttgccgctgcagcagctggcgtccccgggccccttcgtgtccctggaccagctgatgccggcggtggccgtgccggccgaaccgcgcccgctggaggcgctgctgcaaggcccgcagctgccgcccttcctgtccaagacgtacgacctggtgaacgagccggcgctggacggggtcatctcctggggcgctgccgggaacagcttcgtcgtgtgggacccctccaccttcgcgcgcgacgtgctgccgcacaacttcaagcacaacaatttctccagcttcgtcaggcagctcaacacctatagtgcctatggagatattgctgcggatttgtttctcttttggttgttaattggtgttgtatcgtgtgagtcatgtataaaactgccctgtaaatggagtgtgtactctgttcttgctttcttccttgagctgaaccgcgtcatgtaacacgcatcaaaactggccgcaccaaattataaattggattaggattgaggcaatcctgaggagtagatcctgtgatgggcaaaggctaatccgtttcacgggacgcgacgctatgcaagggtttccgcaaggttcatgctgacagatgggagtttgctcacgaagatttcctgcgagatagcaagcatctattgaagaggattgtcaggcgcaggtcctccccaacaaaacaaagcagcgttcagcctggctcttcttctggagagtccagcttggaccctgagctccacacgctgaggagagagaagaacgcgctgcttgaagaagtagcaaggttgaaacaggaacaccgccagacaattgagcaaatgagcacgctgaatcacaggctggaatctgcagaggaccggcagaggcagatggtctctttcctggccaagctccttcagaacccgagtttcgtgaggaagctgaagctgcacagggagaagaaggagatcgactccaccagggtgaaaagaaagtttctcaaacatgttcctcatggcagcgtagagtcaggtgaatccagctcacagcacgccggagagaatgaaaacaccgggcttgaaggcaccgaggcaacagatgatattggagaactgattcaggggttcgacacacaagaggaacttgacctcggcagtggagctgagctacaggagatgcctccagcttctggccctcttgctcgagatcccacaatcggcaggttcaagggaaagaatgtgctgtgtccaggactggacgctacctcctccgaaggcgactgcctcagtccattgcctgacaacatggggctgctttcaggcaccatgctagggacggcaggcagcatgatggccgctgacgatgagcaaatatggggcgttgatgcttcggcagccctgcaaagctcttgcagtggcactagccaacaagctttcggtagccatgctagtgatccctatctgatggacatcgccaacaggcctgagagattctgggagcttgatttccaggcactggatgaggctgatctgcagctggacaagtgtgctatcgatgaccctgctcttcagcagcagccaagcatgaagaagctgtagacgaatttccgttgtcagacagacagtatggtggtgcttcatccactgaagtgctacaattaacttatggagattgctatagttacttcggtattttggagcgaggctgatgaactcgcctactatggcacttagtagtagcagcagcagtagtatgtttttgtttcccatttattcacccccggtgtttttgaatggaaacttgtatcctagtgatttcttcagagcagctgttaactgctctggccgattctttttttttttgtttccatttatgtttttgttctgattcttttacttgctagttgctacttgcgaatgtcttgcaatgagtaatgggatttaaaaaaaaatccgttctcagagaaccaagcgatgtactgatgtgctgctgaatgccaagaagtggctgaattctgttta

SEQ ID NO: 4184 - DNA, 1899 bp, Zea Mays
ggggggggggggggggggtcgccgcctgaaccatttggattccctcacctggaattcgaaaaacggcgactactcccctagagcagatccatctagactctagagtacatccgagggggaagcgagcagatcgatggcgatggctgagaaggtgaaggagaagatgctgatgctccgcagcagcgacaaccaggagttcgaggtgaaggagtcggtggcgatgcaatcgatgaccctcaagaaaatggtcgaggacggctgcgccgacaaaggcatcccgctccccaacgtcacctcccacatcctcgtcaaggtcatcgagtattgcaacaagcacgccgagccgaccgggccgggcgacgcggccggcaccaccaacaggtccgccgaggatgagctcaacatcttcgacgcagacttcgtcaatgtagagcactccaccctcttggacctcatcctggctgcaaactacctggacatcaaggggctcctgaacctggcccgccaaaccattacagacttgatcaatgggaagatgcctgaggaggtctgcaagaccaacatcaagaacgacttgaccatcccttccacgtcggccttggccaccacaatgccctcctccgagcgaaagcagatggaggccaggtttatcgcctatatgcaagaaactgctgaggagaggatgactgggtttgctgttcgtggtgaaaaatacagaaagcatggtgaacgtccgccacaaccaccattggagatagttaaatacccagctcttttggaaagagcttggggatgggattcgatactgccgtactgtcctgtgaattcttggcccctatacaagacttacctccaagaatattatgagcgcaattctcgtgaagtattggctcatcaagtggaagctaatgctgcctctggtcccaatctcaacggggctgatgagaatgatctggcaactctgttcaacttgtgtatcagtagggaggttcaacttttgaatctgctgaagcgccgtgatcaaaaacacaatgttgatgagatcagcctgaatgaaaagctcaccaactgtgcccgtcagataacttttgtggaatatgctggttttcctttccccagtgttgccttaaagtcaacatttgctccaggattcgaaaggtggccttcagatttatgacctacaaaggacctggatgttttgctgctgctgccaccatgatggccaccacaaaggaggccaagttgatgagtggactgctgaggaacagatgtagggaaaataatggtccattttcaaggagtgtctttatcaggaaatggaccattgcagctatgttcagaatatgtgaggaatgttctcctgtggaagagtctacagggggctacactgctactaaattgatacttgatggatctgatgacaagaatccttgtgataaggaactagttaataaggacaacctgctgcagaggaacaagataaatcaaaaataccaaggactgttcaaaggaaaaacaactaaatgccgacaccctgtacaaaagcaagaaccaggagatggagcaacgcccgcatcacccagtccggccaatcccatctcaactgtggtgcaaaaactttggtaagaaggaatactgaaggaccttccaaactagcatgaagtgcgggcaccttgcttttcttttgccttctttttgtgaaaacgtgtgcttagcgacaatgctggctaagtgttagaagcatctctggaatgcttcgtgtagtatcttttgactctcttttcttttgtcgtctcaatcatgttacatgagaaatgcctgatggactcaaataatgaaccggtgattcaaaaaccaaaagcctctgatgaatctatttgagggtttggatcttgatca

SEQ ID NO: 4185 - DNA, 3802 bp, Zea Mays
catatttcgcaatccccttctcgtccccttcgcgaagaagcatcatcctccatacatcccctcgtccgcggtctcacatggcagtggcatgagctgcttctccccgaaaaaaacgtttaaataaaaaacaaaacataattataaaccaacacgcctgccaccgaccgatcagacgaccccttccaagaggaaatccaccaccgcggccggggcctcccaggagatctcgccggaggccgcggcagcggcggcggtggggggcgatggcgctcaacatgaagaccctgacgcaggcgctggcgaaggcgtcggctgtgatagagaagacggtgtccacgacggtgcaagaggtgacgggcccgcgcccgttgcaggactacgagctgctggatcaggccgggtccggcgggccggggctcgcgtggcggatctacacggcgcgaccgcgggatggcgccccctcggcgccctaccccgtcgtctccgtctgggtgctggacaagcgcgccctcgctgaggcgcgggcgcgggcggggatgtcgaaggcggccgaggacgcgttcctcgacctcgtccgcgccgacgcggcgcggctcgtgcgcctgcgccacccgggcgtgctgcacgtcgtgcaggcgctcgacgagaccaaggccgccatggccatggccactgagcccgtcttcgcctccgtagctaacgcgctcgggtgccttgacaatgttggcaaggtgcccaaggaggtcaagggcatggaaatggggctacttgagattaaacatgggctgctacaagttgcagagacgttggattttcttcataacaatgctcatcttgcccatcgagctatatcgcctgagacggtatttataacttctaacgggtcttggaagcttggtgggtttggttttgctctttcggttgatcaagcagcagttggtttgagtttgacttcatcacaactatttcattattcggactatgatgtcgaggatacagctttacctcttcaaccatcgttgaactatactgcaccagaattggtccaaagtagagattctaaagttggctctgcttgtgatatgtttagctttggatgtttggcttacaatctggttgctcgtagaccacttctggactgccataacaatgttaaaatgtacatgaatgccttgacatatttaacaagtgaagccttttctaatattccttctgatttggtattggatttgcaaaggatgctatcgatggatgcactatcacgtcctagtgctatggcctttacaggttcttctttcttccgggatgatacgaggttgcgcgctcttcgtttccttgaccatttgcttgtatgtatttattattcccctggataagttaaaaggagagagataatatgcagaagacagagtttttgaaggcattatcagatatgtggaaggattttgattcccgagttcttcgatataaagaaaaataacagacgtatatttatttgatccattggttattccaaagctgactctctttgcaaccaggtgcttcctcctctttgtgctgagttacgcaacatggttatgcagccaatgattttgcctatggttctaactatagcagaatctcaggataaaggggattttgaactcgcaacactgcctgcgcttgttccagtgtttgcttcagcgtcaggtgaaactctacttttgcttgtgaagcatgcagatctcatcattaacaaggccactcaggaacatttgatatcacatgttcttccaatgctggtccgggcttatgatgacaatgatccccggttacaggaagaagttctgcgtcgaacagtaccactgtctcgtcaacttgacaccaagctagtcaataaagctgtgcttcctcgtgtacatggattagctctaaagacaacagttgctgcggtgcgtgtgaatgcgttgcgctgtttaggagatcttgtgccatccttggacaaagaaggaataatgggtatcttggagactgttcggcgttgcacagctgttgaccatactgcgccaactcttatgtgcacacttggtgttgctaatgcaatctataaacaatgcggtgttgagtttgctgcggaatatgtgattcctctcatcttcccattgctcacagcacatcaactgaatgtacaacaatttgccaagtatatgctatttgtcaaggacattacaagcaagattgaagagaagcgtggtgtgactgttacagataatgggaacacagaggtaaaatcatcaccttcattggcaaacgggatccattctgaacctatgtcaggacaaataccagttgcaaagagcagccctgcatgggatgaagactggggtcctactaagaaatccggtgttccatctctttcagttgattctagtgcacaaacaaagcaaccctcagtagacccttttgacttcggtactcaaacaaagcaatccacaacactcccctttgatttgagcacccaggcaaagcagccaccatcagtttctcatgttacagcagctacaatcccacctgcgcaaccacaaccatcactacaatctcttgcggctagttcaggacctaaaatttctggctcatgtgtccctgtcgacattgagtggcctcctcgaagaagctcgtcatccaacttcaatgcacccttgtctattagcaaggataatggttctggaaggctgtctagcgatggagttgatgatattgatccttttgctgattggcccccaatacctagcaatgttaatagcatttcagcaaccgagcattggccaagcataaatcaaaatatttcgggatttagctcaggcaacatagtttttggtggcagcgggaattctgtagggcaaacgaaaagcaaccaaatgagctggtcaaacacgtctaatctaatgggcacaaactcaactggcagctatttgaatcagggcagtgcagctctaggtttcggaaatccaaatggaggattgagcacaggtctctccaatccaagtagttccagtacaggcctgagcatgatgctaccaaaatctgattctggatcattgtcgacgtcggtcaacaatgccgcacatgggctactaagacttgcccctcctccatccacatcggttggaagagggcgcggtagaaatcaaggacagtccgcactctcccgagcatcaaggcctcatgccaactcggcatcaggacaacaacctatcctggatttactctagtaagagatggtcgcctctgttcttcgcgttcggattgtcaatgtgtacatcctcaaacctttgtaaggactgggggttcaactgcagtggtgctgtgagccgtgcatgcgatggacaactctcctatcgagcattttcatcaattcgctacacggccctacatccctgtgcctgtgtgtgtaccactagcttgcattgcattgcatgcagagtgtactattgatgggtgatgcattggatggggcatgcacagcaggaatatttgcagttgatgagcggcaggaatcagtggctcagggaaaattgaatggcgatctggccttcactccacatgagtacgtacctatacgtacgcatgtatcatcagacggagtcaggaggatgcgggtagtgtccctgtgttgtctaccattttgtctcaccaatgtggtcccaaagtacatgatgtttttttacttttacacactttaaaccgaccgtaatatttaattcttctgtaaatacttattttattttatcattaaatatattttttaattacttaactattt

SEQ ID NO: 4186 - DNA, 898 bp, Zea Mays
agcacgggtcacctcgccgggatcccacctcgccagtgccgcctcgccgctctcccacatcgtgtcctccgccccttcgcacggacgcacacgcacctcacctctcacaattccacacctcacctctccgcttcgcttcttgtcgctgcggcgcgcggccatggtctccctccgcttccctaccgctgccatcccccgcctcccgccatcccaggcccccaacggcgtcgccatcgctgccacggtcgccgctgcagccgcggccgcagctgcagtagcggccagcttgaccctcacgggcaagtccactggccggccagtcccgcaccctgcccctctctgggcctccctctccctggccgacgcggcggcccccagctccgtcgaaccccggaccggcgcgacattccccaccgaggccgccgttgggcgccgcctactcggcataggcctccggaagaccagcgtcctcgggctcaagtccatcgacgtctacgcattcggcgtgtatgcggatgacaacgatttgaaacagcagctgaaggagaagtactcgaagttctcggtctcggaactgaagggaaacggtgagctgatcaacgatgcgctagagcgtgacataccgatgacggtcaggctgcagattgtttatgggaggctgagtattcgctcggttcgcagcgcatttgagaagagtgtgggaagtaggcttcagaagttcggtggacaagacaccaaagagttgcttcagagctttgttgcggttttcaaggatgaatacaaattaccaaaggggtctgtgattgagctttcgagagaatctaaccatgtccttaaaatttgcattgctcatatgttaaatcagatagtctgactcactgcagggaaataatgttgt

SEQ ID NO: 4187 - DNA, 4598 bp, Zea Mays
cacccattgcttcgcgttcgcggcatctactgctgctcctctgctcggccccgcgtcgccgtcgggagatctctccggccgccgagatcgattccacgcgccgctctcgcctgcctccgctcactgtccccgctgccgcaggattcgcccgccctgccggtgcgccggtggttctctacggcgtcttccggttcgggtgccgccatgctccgtggcgacgggggagggacgccgtgattccttgcctggccgccggtcgccgcacgtgaggctgagatctcggggagctcgccgtctcgcggcgccgccaccaccatgccgtctctgcagctgctgcagctgacggaccgcggccgggggcttctcgcttccaggaggaggacgctcgcctttgtctccggcgcggtgcttgccggtggagctctggcgtacgcccgctcgagccagagccgccggcggaggaggcgcccggaggcgagtcgcagcggcggagccggtgcattggccgccaatggggatggtttcagccagaacggtgccggcggtggattggctgcagcggaccagaggaggagtggcctcaaatctctgcatttcctcgcttctatcctactcaagaagatggggcccagtggcacgcgctaccttctatgcttggtattaacatcggtgctgcgtacagccgtagggcatagattagcaagagttcaagggtttttgtttaaagcagcatttcttcggcgcatcccaacatttacacgcttgatcatagaaaatcttacgctatgtttcctccaatcaacattatatcagacctcaaaatacttaacaggctctttaagtttgcgtttcaagaaaattctaacagatatcgcccatgctgattactttgagaatatggtttactacaagatctcacatgtggatcatcggatatcaaatccggagcaaaggattgctagtgatatcccaaagttctcttctgaactaggtgaacttgtacaagatgatctggctgcagttgcagaagggttaatatacacgtggcgtctctgttcttatgccagtccaaaatacgtgttctggattatggcatatgttctagttgctggtggggtaataaagaacttttctcctgcttttgggaagctgaaatctacagaacagcaactagaaggagactatcgtcaacttcactcgcggttaagaacacatgctgagagtgtggcattttatggcggtgagaacagagaagcatctcatattatgcagcggtttgaggctcttgttgagcacctgaatcttgtgcgtcatgaaaactggtggttcggcatgattcaagatttctttctgaagtattttggtgctactgtggcagttgtccttattatagaacctttcttctctggcaaccttagacctgattcatctacacttggaagggctgaaatgttgagcaatcttcgatatcacacaagcgtgatcatatcactgtttcagtctcttggaatcctttctatcagcacaagacgtttaaatattctaagtggctatgcagaccggattcgtgagttattggatgtttcacgtgagctgtctggggttcgtgatagatcactggatcacagttctcctggaaattatgtcagtgaagcaaaccatatagaattttcagatgttaaggtagtcacacctgcaggtaatgttttggttgacgatttgactcttcgggtagaaactggttctaatcttttgatcactggtcccaatggtagcggaaaaagctccctttttcgggtccttgggggtctatggccactggtatctggccacattgttaaacctggtgttggttcagatctaaataaggagatcttctatgtcccgcaaagaccatacacagctgttggaacactacgtgaacagctaatctatcctcttacggcagatcaggggattgaaccacttacatatgatggaatggtggaccttctaaagaatgttgacctggaatatttgcttgaacgctatcctcttgataaggaagttaactggggtgatgagctgtccctcggtgaacagcaaagattgggaatggccaggttattctaccataagccaaagtttgccatccttgatgagtgcactagtgctgtgacaaccgacatggaagaacgtttttgcaaaaaagttcgagctatgggtacatcctgcataacaatatctcatcgaccagctttagttgcatttcatgatattgttttatccttggacggtgaaggaggttggaatgttcagcatagaagggatgattcgtccttttccaccgaagaatctgatttttcatcatcagaaactgatcgtaaatctgacgcactgactgttcaaagggcttttatgagcagggcaaagagcaatgcttcattggggtccaaggatcatccatattgtacagaggttatagcaacttcccctgaggtggaaatagaacatccagcacggacacctcgaattccacatttacgatgtcacccaagacctttgcctctcagagtagctgcaatgctaaaaatactggttcctagactatttgataaacaaggcgggcagttgcttgctgtcgctgtacttgttttctctcggacatggatctctgatcgtattgcttcgttgaatgggacaactgtgaagtttgtcttggaacaggacaaagatgcctttattcgcttgattggtgtcagtattctacaaagtggtgcaaattcttttgtggcaccatctctcaggacccttactgcgaaacttgcccttggatggcgaattcgcatgaccaatcatatgcttcgatattatttgaaaaggaatgcattctacaaggtattcaacatgtcaggtaaaagcattgatgcagaccaaagattaacacttgatgtagacaagttgaccactgaccttgctggcctagttactggaatggtaaaaccgctagttgacattctttggtttacatggagaatgaagcttttatctggacgaagaggagttgctatactgtatgcttacatgctactgggtttgggctttcttagagctatatcccctgacttcggtcatctctcaggccaagaacaagaacttgaaggaacattcaggttcatgcactcgagactgcggacacatgctgaatcaattgctttctttggtggtggttcaagagaaaaagcgatggttgaggctaaattcgtcaagttaattaaccactcaaagattcttttgaggaaacagtggctttatggtattgttgatgattttgtaacaaagcaacttccacacaatgtaacgtggggtctgagtctgttgtatgctttggagcacaagggagatagagctttaacctcaactcaagatactgtggtgtctcccaatgccatcagtgcagcctcaaaagaaacgatttcgtttcatgaagtggacattgtaacaccatcacagaagctattggctagaaaactctcgtgcgatgtggtacaagggaaaagccttcttctgaccggtcccaatggtagtggaaagagttctatttttagagtgctcagggatctctggcccaccttctctgggagagttaccaagccctcagaagggatgtttcacgttcctcagcgcccatataccagcctaggtactctgcgggatcagatcatataccctctctcaagggaggaagcgaagataaaagttctttcgctacatagatctggtaacaattctagtgcctccatgctgctggatgatcacctgaagacaattctagagaatgttcggctggtgtatcttctagaaagggaagggtgggattctacaccaaactgggaagatgttctgtcgttaggggaacaacagaggcttggaatggctcgtttgtttttccatcatcctaagtttggtatcctggacgagtgcaccaatgctacgagtgttgatgtcgaagagcatctgtacagacttgcaactagcatgggcataactgtgatcacttcctctcaaaggcctgctttgatacccttccatgccttggagctgaagctcattgacggcgaagggaactgggagctatgtgcgatccagcagtgagtgatggtgcccattaggagttgatgccattaaatgcaccatcagctgcatgtacaaaagcaagcagctagcacattgccattgtttgtgtatggacaacgtagacagtggcagcgttgctatgttggaagatgctatattcttgtcatagtctgcctcaggttgagcagcaaagcattgtgatgatgtatgattgtgagccatgcatggtagctgaatcctgatattagcttttagatagtggacatgattgtgagccatgcatggtagctgaatagcagagcagaagggttgtgtgttagaagctgtacctattgattcattacattatattgattctgcgtagcagatgtatattacaggcaagcaaaatataaataaatacgatgtggaattgtggatgctgctgccatgcagacatcagaaaattgaatcaggtgtggatgggaaattgtgcaagggta

SEQ ID NO: 4188 - DNA, 2386 bp, Zea Mays
attccaaagccaaagattgcatcagttctgctgctatttcctcctatcattctttctgatgttgaaaatgatattaagcctaggattcgtgaatgggagaaggctggcattgaacaagactatgttagtaggatgttgttgaagtatccatggattctttcaacgagtgtgatagagaactacagtcaaatgctgttgtttttcaaccaaaaaaggatttccagtacagtcctcgctattgctgtgaaaagttggcctcatattcttggctcctcttcaaaaagaatgaattcagttttggagctgtttcatgttctgggcatcagtaaaaaaatggtggttccagtcattacatcaagtccacagttattactgagaaaacctgatcagtttatgcaggatgaactacttattggagatgggtttgtctaagaaagatctgtgctcaatgatctttagattttccccacttctaggttacagtattgaacttgttatgaaaccaaagcttgagtttctgctaagaaccatgaagaagccacttaaagcagttgtagaatacccaaggtacttcagttattcactcgaggggaagatcaaaccgcggttctgggtattgcagagtagaaacatagactgcactctgacagagatgttagcaaagaacgatgaactctttgctgaagagtacttgggacttggaggattgctcgagaaacctctacaatcaagcataggcagttaatttctggacttataagattgaaccatgcagtgcactatgccgaagctgtacagctttatgcttggattggtgaggctgtttttcagatgggaggtcacttttttttgaaaacggaggtgagttgtgtttctttgtattcaaatgccgcagctctgataaccactcttttctggaccaataaatggctgcttggttcctctataggagatgtgtcgctggctgttcttgctatggtacccgcaaaaataattaaaacaaggactgtggctgacgcactctcaaacaacagttgggtttcagatattaaaggaggactgtccatgattggtctgttcgaaattttcagctatgggacaccacacatggagtttctttaaccactgacaatgatcgccatatctggagattctctggttggggtgaattctcgtcgaaatcggcctacagagtcttcttccatggtttggtctcctttgatccttggaagcgtatttggaaaacttggactccacctaattgcaagattttcttttggatacctgtccgaaatcgctgttggactgcggaccgattggctcggagaggactggcacacctagtccattgaattctttgcgaccaggaagaggagaatattaatcacaatttgttttcctatgttttcttgagggaattctggtttagagttttctcctggctggtgtatgttgaccgtgtgccggggtcccaggagcaatcgcttgcagattggtggtgaaaggcttgcaaacatctcccaaaagaaaaaaagggaagggcatgaattcgatgattatgttgggagcttggatcctatggaagcatcgcaatgcctgcgtcttcgaaggtttgcagctgagtatgtggaatgttctgcatgctctcgaagatgaacagcatctctggtgtctcgccggagtgcaaggactgcagagtttaggcctgggctccctgagcggttaggtggcatttcctggtctggtctcaccatttctatttgctgtaagagttttgttcttgtaagcacagcccctcacggctcgggctcggtccggaatgaggggtaaaacttgtacgggaggccacttttctggtgcttagtattaaaaaggtttaagaagaaattgcaaagatgcggtttcaaactaggaaacggagtgaaggatgccccacacctttgagtggatgcgcgcaggaaccaatgcaagctgtagtaaggccttgaagtataaggcaacccaagtctgccatcatctctttctcgttgaactgaagcctgtccatgcctccatggcccagtccagcatcatcgccaatcagagctgagggcagccgcagagccagcggtagctagtcggctagtccattgactggccggtgcaggggtcacggactcacggttctgcatttcatattttcgtttaggtgtcgtttggatccgtttattttggaggaattagaatctatttaatagagtaggctatttagcttggaatttgacattccaccactttacaatgttaaaaaataagttatctcaaatttatagaatggaattgactttatgtatcttcaaactacgtttctactctacaatttataacatgtttttttggctcgctc

SEQ ID NO: 4189 - DNA, 1609 bp, Zea Mays
ccccacaataccgaaccgaaatacccagccaacagccacaacccacgcgccacgcgcccacgcccactggccaccgccccacccccacccgtgcccgtcccgtgctagcttagctctcggctctcgccatggacgctgcggagaggaggctggctcgcgtcgctgcccacctcgttccgtccttcccggtcccacacgccaccgggcctcccctcgcgccttctcccgcggcagcgtcctcgtcgtcgtcctcgccggcgggggacagctacaggcgcgtgcacggcgacgtgccgtcggagccaccggagtggcgcaccgccacagacgagtcagggaaggagttcgtcgacatcatctacgagaaggccgtcggagagggcatcgccaagatcaccattaaccggcctgacagaaggaacgccttccgtccgctgaccgtgaaggaactaatgcgcgcgttcaacgatgccagagatgatagttcgattggagtcatcattcttacagggaagggaaccaaggcgttctgcagcggcggtgaccaggcgttaagagattctgatggatatgtggacttcgatagctttggccgcctcaatgtcttagatctccaggtgcagattcgccgtcttccaaagcctgtcattgctatggttgctggttatgctgttggtggtggacatgttttgcacatggtgtgtgatataacaattgcagcagagaacgcgatatttgggcagacagggcccaaggttggaagctttgatgctggttatggatcttcgataatgtcccggttggtgagttatcatactatcaatctagtgaggtagtagaaaatgtcgcattattcctcacacactttgaaaagaaacaccttcaatactcaaaagtttttattcttaataacacattcttaaaagttgacttgtacgctattccatttcatattatcgacatgctcgtgatacataaacagcatgctgttgttgctccaattatatatttctcatggacaggttggacccaagagagcccgtgaaatgtggtttctgtcacggttctacacagctgacgaagctgacaaaatgggactcgtgaacaccgtagtaccgcttgctgaactggagcaggaaactgtcaaatggtgccgtcagatcttaagaaacagccccatggctattcgcgtgctgaaatctgcactcaacgcggcagatgatggccatgcaggccttcaggagcttggcgggaatgccacgctaatattctacggcacggaggaggcaaaggaagggaagaacgcgtacatggagagacgacgcccagatttctccaagttcccacgcaaaccttgagtttcagctctttgctgaactggccaattattttactgatccccccaccccacccaacttggatcattatgcttactctacattgaggagacggacgataatcattttcactccaatcaattttcatatatacacgataaatgtattttgcatgaaaattcagatcaatgaaaagtaaatcttgatgtatttgattcacctttgccttcactggccgggcaggagggagatccttaataattatatatgcg

SEQ ID NO: 4190 - DNA, 1666 bp, Zea Mays
agccaacagccacaacccacgcgccacgcgcccacgcccactggccaccgccccacccccacccgtgcccgtcccgtgctagcttagctctcggctctcgccatggacgctgcggagaggaggctggctcgcgtcgctgcccacctcgttccgtccttcccggtcccacacgccaccgggcctcccctcgcgccttctcccgcggcagcgtcctcgtcgtcgtcctcgccggcgggggacagctacaggcgcgtgcacggcgacgtgccgtcggagccaccggagtggcgcaccgccacagacgagtcagggaaggagttcgtcgacatcatctacgagaaggccgtcggagagggcatcgccaagatcaccattaaccggcctgacagaaggaacgccttccgtccgctgaccgtgaaggaactaatgcgcgcgttcaacgatgccagagatgatagttcgattggagtcatcattcttacagggaagggaaccaaggcgttctgcagcggcggtgaccaggcgttaagagattctgatggatatgtggacttcgatagctttggccgcctcaatgtcttagatctccaggtcagatgtgtttctatctccgatctgtttattctctccactttcagatggtttctttagtgaggtttgaactgacttacattgttcagaacatgatggtgacgtataattttgactagaattcctgtctactgatatttttttaatattttctgatataccacttagtaaatttgcaggagcagattttccttgccgttggcacttctagtctgtgtaaaaaaactaaaaatgattaacctttaaggcattagtggttatctttgtactgagaacatcggacggaccattttttccttcaggtgcagattcgccgtcttccaaagcctgtcattgctatggttgctggttatgctgttggtggtggacatgttttgcacatggtgtgtgatataacaattgcagcagagaacgcgatatttgggcagacagggcccaaggttggaagctttgatgctggttatggatcttcgataatgtcccggttggttggacccaagagagcccgtgaaatgtggtttctgtcacggttctacacagctgacgaagctgacaaaatgggactcgtgaacaccgtagtaccgcttgctgaactggagcaggaaactgtcaaatggtgccgtcagatcttaagaaacagccccatggctattcgcgtgctgaaatctgcactcaacgcggcagatgatggccatgcaggccttcaggagcttggcgggaatgccacgctaatattctacggcacggaggaggcaaaggaagggaagaacgcgtacatggagagacgacgcccagatttctccaagttcccacgcaaaccttgagtttcagctctttgctgaactggccaattattttactgatccccccaccccacccaacttggatcattatgcttactctacattgaggagacggacgataatcattttcactccaatcaattttcatatatacacgataaatgtattttgcatgaaaattcagatcaatgaaaagtaaatcttgatgtatttgattcacctttgccttcactggccgggcaggagggagatccttaataattatatatgcg

SEQ ID NO: 4191 - DNA, 1895 bp, Zea Mays
aaccaatcaacccactccacagagttactagcactgcaaaacttgtgacattgtgctctctgttttcgaaacaagagggtgaaactctttgaaaaggatcctgcaaggcaagtagcgacatatgttgaggccgtgaaaactgtagacccgatgaaggcagtcgggaagccccatactctgtgggtggcatttgcaaagatgtacgagaaacacaatcgtctagatagtgctgaagatatcttcaaacgggctactcaagtgaattataaggcagttgaccacttagccagtatctggtgtgagtgggcagagatggagctacgccacaacaattttgacaaggctattgagctgatgagctgctgctgagggggatgagcctgtccaaatgaaagtgcacaaatctttgaaactgtggagcttttatgttgatctggaggagagccttggaaccttagactctacacgtgtagtttatgagagaatactggatttacgaattgccactccacagataattctcaattatgcatatcttcttgaggagcacaagtatttcgaagatgcatttaaagtgtatgaaaggggcgtgaaaatattcaagtatccccatgttaaggccatttgggtaacctaccttacaaagtttgtacatagatacaagagaagcaagttagaacgagcaagagaacttttccatgaagctgtccaacaggctcctccagaggaaaagaagcccctatatttacaatgggcaaaactggaagaggactatggtcttgcaaaacgtgctatgaatgtatatgatgaatctgtaagagctgttcctggcagtgaaaaaatggccatgtatgaaatctatatagcacgtgctgccgaactctttggtgttccaaggacaagacaaatatacgagcaagcaattgaatctggcctcccagacaaagatgttctgacaatgtgcatgaagttcgctgaactagagagaagccttggtgaaattgatcgtttcgcgtgccatctatgtgcatgcatccaactatgctgatccaaataatcctgacttttggaagaagtggaatgactttgagattcagcacggtaacgaagacacattcagggagatgcttcgtatcaaacggacagtggctgctagccgtagtcagacacatttcatactaccggagtacttgatgcagaaggatcataggttaaacctggacgaagccgttgacactctgaaacgtgctggcgtccctgaggacgagatggcagccttggaaaggcaactggctcctggaccatccactgcaccagcagcaacaccaactgccccagcctctgctaacaggacgatgaattttgtcagtgctggagtagaggcgcaggcagacagcagcaggcaacaggctggtaacaacgaggacattgagctgcccgacgagagtgacgacgaggaacccgatgtccaaattgcggagaagagtgttcctgctgcggtatttggtgagctcggcaagagagctgccgagaagaacgaggaaagctcaggtgcccaaggaaatgagcagctgggcgccctcgagaggataaagagacgacgccaatagtaagccgttgctaagattgtgcagccgtggtatcagcacgagctttatttaacgatgttgtacttgttacgtgtaaacaatttctttgtacaaacattgaagggagttgatcggcgtggccatttctgtgtagtcttgggtttgtttcttctccctcgaaagaacatgacaccaaaacatcatttctttggttcgtttctagattttattcgtccaaagcattagacgtgaagaaagccatcaatatcatgaaaggacaggcaacgtccgaaatcatgaaaggac

SEQ ID NO: 4192 - DNA, 4092 bp, Zea Mays
acaggccccaagccttcagaattgtttggacgttacacttggaggattgaaaacttctcgaaggagaagaaaagagaaatgaaaagtgagccatttgaagctggtggttacaaatggtatattcttgtatatcctcaaggatgtgatgtctctaatcatctttcattattcctttgcgttgctaatcatgacaaacttctcccaggatggagtcattttgcacagttcactatagctgtagccaatatagatcctaaaaagatgaagtactcagatactttgcataggttctggaagaaggagcatgattggggatggaaaaaatttatggagctatcaaagattcaggatggttttcttgttgatgatgttcttgaaatcatagctcaagttcaggttatcagggagaaagtggatagaccttttcgttgccttgatcgtccttaccggagagaattgatccgcatctatatgacaaatgtggaacaaatataccgacgttttattgaggagcgaagaagtaaattaagcaagctcattgaggacaaaataaaatggtccagttttcgtgctttctggtcagcaattgacccaaacaccaggcatcgcatgtccagggaaaagactgacaccatattgaaaatgttagtgaagcaattctttgtagagaaagaagttacttccacattagtgatggactccttgtatacgagtctgaaggcacttgaataccagatgaagggcaggaaaggcaaaacaaaattagcagatttggaagaactacctgcgcctatggtccatgttgacatggacatgtttattttggctgatgatgtcatagctttgcttgagagagctgccttagaacccttgccttgtcaacctttagcccccaaggatgataaaacttcccaaccccgcatgaaggatggaagttctggtgaggtttacaatgtttctatggagcgtgaggaaagacgtctaactgagcttggtcagaagatactagagacatttgtgctatctcatatatttagttgcgtaccaagaagctgttgcattgaaaaggcaagaggagcttattcgtgaggaggaggaggaggctgggcttcttgaacatcagatgaaggggaagcgtggtggtggtgtaaatgaaaaggacaagcgtgccaagaaaaagcagaccaagcaaaagaagaaccgtaaggctaaagacaaggaaagagatgagaaatgcgaggttaaaattctggaaaggcttcgtgatgaaactgccattgataatagtgatggcttaccatctcaggtggaagtgatagcaaagattgatgccttggaagaaggttcttcagatgggtcagacatgtcaaatagagggaaaaatcagcgtaacaagggcttaagcattattagctttgccgaggaaggtgatggtcttccctccacctctaatgtcactggtggtttaggccgcaatagttctggctgctgcacagctccaaaactggatcaggatactgttctacttaccttgagagatagacttcgtaagttggggcagcgtctgcatgagaaaaacattgaggggcagaaacttctcaaaaaacattttgaagctagggacgcaaaagcgaaggaagaaccttctgactcatctaattctttggataagccacctgatgttccagagatcccggtgcattcatcagaagataccgttgatcttaaagtgaatggaacaccaaagaaggatgcatctgtggtcaaccctgttctggaggattctgtttcaggcataccagtcactgcaaacaatgaacctgtgccttctcccaccacaacaaaaatggacccagtttcaaacaaagttaatggatcaagtttgaaaatgaaagtcaccatggcatctccttgctccaaatcacatccagctgatatggataaagatgcctctcttccttctaaatcaccacgaaccaatagagctgctccagttcctcctaagctgccttcagctgataaagcaacgctagttccctcaaagctaccttcggttgataaagctactccagttcctcaaaaatctccgttggtaaacaaagtagctcaggcccgtcccaaatctccagcagttgacaaagcaactccacatcgtcccaaatctccagcagttgacaaagcaactccagttcgttctcaatctccagcagttgacaaagccactctagttcgccctcaatctccagcagttgacaaagcaactccagttcgtcctcaatccgcagcagttgacaaagcaactccagttcgcccaaaatctccagccattgataaagcaactccaattgctcccaaatctccaccagttgataaagcctctccagctctgccaaaatcattatcaggtgctaaagatgcgctttttccttctaggtcgctgcagattgataagtttactccagccgccccaaggttatcacaagatgataaggctgctctgccttcttcagaacagtcacatatatctccagctactagttctgaagctcaaggggcaactactaggaaggtcacaactaccacctcactttcagaggctgctgcagcatggaggccttcaagtgctcctgtgttacccacaccaagatcaaccgggccagctgcttcacatattcaaacttccacattgctttcccgctcgatgagtgaagcagctgggagaaggccagtaaatgatccttcattttctgccccatcttatactccacagacctaccggaatgcaataattggtaagtctggtctgtctatgacctccgcaagccttgcgtatcagccgtcttctctggatcaagacactgctccttcacggcctctatcagcatatgcatcaagtacagtcatgatgcctcctgcaggaagatctgatcagtcatcagctaggcatggattcaagtctgggcctggtaagttagaagcacatgacggctggcagcagtggaaaggtgacagtaatgttgatatgcatctctggagggaccacgctccttaccaacaaatgaccaacagtcaagcatatgagcagtctcggagggacgatacttatcagcaagcatgcagcagaggaacagaaaagttcagcaggcatgcaggactgcaagctaggcagcagttccaaaccgagacacccgccagtcatgtatggcatcaaccgcaggggccagtggcagaagaatttccacaccttgacatcataaacgacttgcttgaggaggaccagatcaacggcagtataccggagtcgtttcgtcaagactacaacgtgtttggcctgccgttttcaccgagaggaaacttgtcagacatggaaatggcttctgttagaagtcccgctcggttcaattcacccaagtacgatggtggattgtcgggggcttatgacatgaatgctgtcaatgggttgagggaacggcagtttccctcgttggatatctactctaatggcctgtctgacgtgagtgcttctaagccttggctgaatggctctgccagtccatcggtgagccttggggtcaacacaaatggataccacccccaggtgggtgagtacctgggaggtggggtgaacggggtctccttgtggcgccgccatgccaacggccgctggtaatgcgaggtgcctgtatacaatcatacagtcggaataatgttttgttgtaacagatggtttcgggcctgagctgatgcgccatgtaattaaaagtttttaagttttaaaagggaaagaaagagatacaccctgtaaagtctgcgcctttattaggataatttgagtgcttttctggttgaagttgaactctgacctaactttgttaaatttcaaagctaaatttggcggtggcctgtgggagagagaagaacggtatgaaggttagcctgtccgacgagtgctgacggagcaacctacctaatcgcctacactttgtgcttctgctaaacatgttagtaccctgtccaaaaaatatgtacttactagtttgcaaaagaatgacgttttggaagatctgagtcgactgagtgaaggatcgaaat

SEQ ID NO: 4193 - DNA, 2761 bp, Zea Mays
ccgctgctcaataaagctgtcgccgcatcctgcatccccctcgccaccttgtcgtccggaggacctagcatccagatccgtcgcccgagctgctatacccgccggttgtcaccatctatttattcattgttagaaacttgggtttagtgctcaggagatttccacatttgcttgatactgggttcttccacattgatccacatctaggcaatatgatcagaacacctgacggagattatgttgcagaactgtatcaactccctctaattttatgttatattatatttggtaggaatttctactgggtctgaaacttgtaacatacagttttctgaagatctacgaaagatagtggatacttatcagatgagtgcttgcactgcctttcaagtcatccgactaatcgcgattagtcgggctggtcggtttagggtggccgattagggaagccgacccgatcagaacacctggtcgccctggtgttgatgaatttcagttggatgaagatctttaggtcactggtagtgtggtagtaagtgtttctttgctgttttgaacacctgcattactttagggtcattgggagctactgttttaagttggatgaacaaatgtcttttcttaaatgagtattgcagaatcaatgttttcaagtcggacgacttgctggtcgttctggctgaccgactagggcgattagtcggacgacttgggtgattaatcgtgattggtccaaaccgacttggacgattaatcgcgactaatcacgattaatcggacgacttgaaaacattgcataattcatgtcatgtttaccctttatatatagttatctactatgttatatactctatacaaatatggtcttatataccatatatactctatacatatgtcctagatgaacaagacgactagtagacgaccagggtcgaccagaggtcgattagttgacctagtcgtcgactaatcaagattagtcgcctagtcggacccctaggtcgatcagttggtcgctcgactagaaaacatagtgcattgcaaaagttactaatgcttccatccttttggaagctttgatgttgtcattttttattgaaagtggtgaagttggaagaataaatattgttgagggtgttggggtatgttacttttattttatgtatgttgtcagttagctgatcgaagggcgggcctggtgcagcggtagagcctaccgtctgtaaccggaaggtcccaggttcgagccctaatgcatattatatggataaggcttggtgcttaaagatacccttgcacagacctcgcacagtgcgggaagcctgcggcattgagtacaccttttttttgtcagttacctgatcatttgtttcaccctccccacccaagtacacaatgttgtattcatgtgagtggacaggttctaattttaagagcaatttctcgatggccattattcagattggtccactcagatgctggccaggtggattgtgggcctgtttggttcgctacctaacttgccacactttgcctaacttttctgcctaaggttagttcttcaattcgaacaactaaccttaggcaaagtgtggcgcagttagccacgaaccaaacaggccctgtgtctatcaaggtcaataggtgatattgacgtcgaggaatttatagttcctgtcccatatgtgaagcaagtaaatgtgcataacatatatgaactatttatataggtgcagtggtggaaaaggtttttcatgctaaaagattccccttgttatacaaatctgccatttttttgcttgtagcatctgcccgttttttccctgacaaacgtgtcatcaattaatttgtaaaaaaaatgatagattaagcggcgatcggcatgctctgccgtagcaccgactcgacacacgagacagcgtgtgagcagaagaccgaggtgagatttcgtacacactcatcccaaacggtctgaatcagaaggggaatcgctggcgcgtaggctatgaatactgtgagacaaaagagatttgatattttattgctagctgcagatcagagaacctgaagtatattgatttcataggtggttcttgctggatcatgtaaagctccatctcttataatagcttgaacttatacatatttggtacttgttttaaatttataatgcacaaattattgatattcgtatagatgagatgatatgatatgatccatgatgttcttctgctacttcagagctctctttgttctctgtgactgacagcaagagatgaaccaacgtgttttgttgcattgggagcagaggctggagataatcgtaggagttgccaaaggtgttgcttatctgcaaggactaagaaaggaagtgatacacagtgatctaaaaccatccgacatactcttggatgaaaactagagagctaaaattgcagattttggcaccacaaaagtgttcgtggatggccagacgaatccaacacttgtacaatagagggacacagggctctagagtacactgtttgagatccagtgtttcaaagtccagccaaaaatgttgaaattcagttgtttgatgaatttggacaatgatgatgatgatttagaatctgatccagagtttgatgaatgatgatgaagagatggtatacaatacaatcagggtaggggcaaaagtttagattgttcgaaagcaaaaaaaaataaaaaaataaaaagaagactggaccaatactagaggagctatgggacattttat

SEQ ID NO: 4194 - DNA, 1359 bp, Zea Mays
gttcgatttgttattcatcacagccttagcaagtctatggagacatactaccaggagagtggtcgggccggacgggatggattaccttcagaatgtattttgtattatcggcctggtgatgttccacggcagagttcaatggtgttctatgaaaactgtggcctgcaaaatctttatgacatcgtgcggtattgtcagtctaagaggagttgtcgtcatggtgcattctttcgccattttggagaggtccctcaggactgcaacggaatgtgcgacaattgtgcttccactattgagcagaaggatattgatgtcacctaccatacaaaaattatagtttcacttcttcacgatatgcaactttaatgatcaaagagctacactactacagctggtggataagttcaagtcaaagtggaaaggtttagttcttctacgctttggaggaaaaaatcatttcaaccgatcttacattacagctgataatgttcaagcaggtagtttcaatgaagctgttgatcttagaaaagaagaagttgagcagttgatagttaaccttatactcgacaatgttttgaaagaagaatttcagcacacagcatattcaaccaacgcttatgttaccttaggagcattgtggaagccagcactacaaggaaacagagtagtcaagcttgagattgctattgcttctaaagatagagatgttagatccaagggcgcaaaacgaggtcgcatgagtgatttggaagccaaactagatgaactgcgtagggatctgtcatccacgggtagcgatgccatatttccccatgcagttcttactgcgcaacaaatttcactactgagcagccagaagccaaccactccagctgagctagaaaaggttatagggaaggtgaagacaaggaagtacggcagcaagatcattgagctgatgaggtcacatgacaattcaggaagtggccgaggcaaggaggctggcgatgaacacagagctaagaagatcaaaacgaaggatgaggatgttgtttgtgttgagagtagcgaggaagaatagaatatgcccttcacatacttggctttttagtctatcatctcatggttaattattttgccaatcatttcctccgacgtcatctttctgtaatttagactttcacggattaatgcacagtcatatttcttacagagaaagcctcgagcatccttttgaccggttcatagtcttttgcttcggtagctttgtatcttgttgatgatcggattaatgtgcgaatacttgggattaatgtgcgaaaactttgtgccaagtgtttgaatgtactatacacatgctgaggaatatggtaatcggta

SEQ ID NO: 4195 - DNA, 2569 bp, Zea Mays
gcaagatgttcgatttgttattcatcacagccttagcaagtctatggagacatactaccaggagagtggtcgggccggacgggatggattaccttcagaatgtattttgtattatcggcctggtgatgttccacggcagagttcaatggtgttctatgaaaactgtggcctgcaaaatctttatgacatcgtgcggtattgtcagctcacacgatactgtactgatcagtgccactgaaggcagcacaaatgttttatggatcaagctacctttgggctattgtgctacattgaacagcaaacagtgtggcaatgtggcctttttcagctccatgaagctgcgagaaagaaagccatgggacagaatgctggcctcgcctggaaggtttccttgacgaagtagagaagtcctggagttaatcagtggagacggaatgtcctttgcagatccttgccgacaaacttagttggcttgctagagacttgcaagcttggagccaaagcaaagttgggcatgtcaagcggtagctgcaatacgcgaaggaaatcttacatcagttggaaaaggctcaagacatcagacccttggcagctcaagaagattggctacggcggcaacttaagcgccaagctttggggctggcctctctggaaaggaacatggctaggatgaggtcctgatcctgactgtgttggctgaaagaaggtgactctaatacggctttcttccagcagcatgcgaggtatcggaagcggaagaatttcatagccaaagttaaagtgggtgatcacattgccacagagcaagaaccaagaagagaagtagcatgcagtttgggaattctataatagtctgtttggatcggcggtccagtgagacttcactcatgacttatagtcctttcatcggccgatgatcgatcttttggcactcgatgaggtcatcgccaaggaggagatttgggccaacatcaaatccttgccgcctgataaggcgccgggccccgatggatataccgacacttttataaagtggcttggtctgtgattaagatggatttcatggcagcagggggatgtctctcgtctctaccttctcaactctgcttatgtcatcttgctggccatagggatgaaagtgtctaagaggagttgtcgtcatggtgcattctttcgccattttggagaggtccctcaggactgcaacggaatgtgcgacaattgtgcttccactattgagcagaaggatattgatgtcacctgtatgatttattttgcgtcagtttaaaaattacaacaaatgaccaacatttattcactttatttcagggggaaaatgttttttatttcatgatattctcacagtaattttttctacttcctgtttagaccatacaaaaattatagtttcacttcttcacgatatgcaactttaatgatcaaagagctacactactacagctggtggataagttcaagtcaaagtggaaaggtttaggtagtttcaatgaagctgttgatcttagaaaagaagaagttgagcagttgatagttaaccttatactcgacaatgttttgaaagaagaatttcagcacacagcatattcaaccaacgcttatgttaccttaggagcattgtggaagccagcactacaaggtaagtgtttcttctctcaatctttccacgtatatgttgtgttggggattactagataatatgcagtgacttagtagttcctattgctgacagttcaataagcagaatttatgcacctatctcaaccattttctgtaccatgctaatgctttagtttgcaattaattggattatggaatgtggtgatgagtatgttgcctactacacaggaaacagagtagtcaagcttgagattgctattgcttctaaagatagagatgttagatccaagggcgcaaaacgaggtcgcatgagtgatttggaagccaaactagatgaactgcgtagggatctgtcatccacgggtagcgatgccatatttccccatgcagttcttactgcgcaacaaatttcactactgagcagccagaagccaaccactccagctgagctagaaaaggttatagggaaggtgaagacaaggaagtacggcagcaagatcattgagctgatgaggtcacatgacaattcaggaagtggccgaggcaaggaggctggcgatgaacacagagctaagaagatcaaaacgaaggatgaggatgttgtttgtgttgagagtagcgaggaagaatagaatatgcccttcacatacttggctttttagtctatcatctcatggttaattattttgccaatcatttcctccgacgtcatctttctgtaatttagactttcacggattaatgcacagtcatatttcttacagagaaagcctcgagcatccttttgaccggttcatagtcttttgcttcggtagctttgtatcttgttgatgatcggattaatgtgcgaatacttgggattaatgtgcgaaaactttgtgccaagtgtttgaatgtactatacacatgctgaggaatatggtaatcggta

SEQ ID NO: 4196 - DNA, 3213 bp, Zea Mays
ctgcaactgcaagtctgcaaggcggagaagccggtcgttcgttcatccggtgcgctatcccaaatacagcggacaacttcgcacctttttcacccatcactcgcgaacgcaggtcgcactgtcgcagcatgcttcgcctctccatcgccgtcctcacctcacctctcctccccacgtccgtccccgccgtccgaccccatccgcgccgcctactccgcctccgtctgcgctccctcgccgcctcctcctcgctctcgccgtccgcccgcagcctccgcctcctcgagtggggcaaggtctgcgacgccgtcgcctccttcgccggcactgcccacggccgcgacgccacaacgaaacaactgtgggaggtggaggatgtgagctatgagcagagccagatgctgctccaggagacggaggcggccgtgttgctgcttgacaacgctggtggggcaatggatttctcggggttggatacagttgcgatagagtcagcaatacatagtgtctctgggggcgctgtgataaaaggcctggaagcaatggcagtcactagcctgatgatgtttgttgaatccttgcaagtaaacattaaagctgccatgaaactggatgaaggctcatgtagtcgattaacaacacttacagaaacaattttagatgctgtcattaacaagtcattagtgaaatccatacaagatattgttgatgatgatggctctgttaaagacactgcaagccctgagctgagacggtatcgagagcaagtacagcgtctagaaaacaggttatatcagcttatggacaagttgatgcgcaatgctgatgatgaagcttcattgtcggaagtatgcattgtaaatggaagatgctgcattagaacaaccatggataattcttcattttttgatggattattgctctccaggtcagatgctggaagcatgatagaaccaattgttgctgttccgttaaacgatgagttgcaggaatcaagagcattagtggctaaagctgaactggatgtcttatcaaaacttactgataagattcgtcttgatcttgatagcattcagaatttgcttcaggaaacaattaaactcgataagatcgcagctcgtgcaaaatacagtattgcatatgatggaacatttcctgacctgtatttgccgaactttgagaatgaaactgtcactagtgctacaggtggatctatcaaacaaatttcctcagctcaacttcctaagaaggcatggaaactgtatatgccaaatgcataccatccactactacttcagcggcatcaggaaaatatccatcgtgccaaaagggatgttgcaagtgccacagcggagatccggaggaggaggatatatgggcaagatattgcagaagaagatcaattggcatcagaccttgattccatgaaacttagggtttcccaactggagaaagaccagccagtaccagtagattttatgattgctgaagaaactactgtcttggtgataactggcccaaatacagggggtaaaacaatcagcttgaagacggttggcctggcatcattgatggctaagatagtggccaagcttgccgcagttgtgacagtcgtcgtctcgtgccggcttcttgttgccgacggcgccaccttgggtctatacattctagcttctgaaccagtaaaaattccatggttcaatgctgtttatgctgacattggagatgagcaatctctgacccaatcactctctacattttctggacatctgaagcagattggtgccattcgtgcagagtcaacttcagagtccttggtccttttggatgaggtaggcgctgggacaaacccacttgaaggagccgctctggggatgtctcttttggagtcttttgctgaagctggctcctttctgactctagcaacaactcatcatggagaactcaaaacactaaaatacagcaataactcatttgagaatgcatgcatggaatttgatgaagagaacctaaagcctacattcaagattctgtggggaataccaggtcgctcgaatgcaatcaatattactgaaaggctgggtttgcctttggatatagtagaaagttccaggcgtttacttggaacagctggtgcagagataaatgctttgataatggacatggaaagactcaaacaagaatatcaacaacatcttcaggaggcacaatatcttcttatgcagtccaaggagcttcataacaacttggaactggcacaaaagagcattgtagaccacacttctgctcagagaaaacgaaaggcgagagtaatttcagagtatgctgttatggcccgttctatcattcgtaagaagtttcagcagttccaagaatctgctatagctgaaagagtgaaagaagaagagaatgctgtgaatgatgccaaatctgacagagtgaaggatcctatgccggcaaatacatctgccattggaaacatacagaacatagataccagcttgggcatgacagccaacgatgatgaagatgaggttccagaagttggagattcagtgtacgttcctaagctcaagaatgaagctaccgtggtgaaaatagattcgtccaaaaatgaagtgcaagtccaagccggtatgatgaagctcaaactaaagctgaaagatgttaaggttcagaagcggaaagtatccagatagaacatctacactgtcctgcactagcagatattcagataaatatgcatatgctgtttcgtccaattcgtaccatttcattggcctcattttcagcaataataataatgtggtctttcaagtgaaaatatggatttattatctgcatgtacttctcattcttcactacttgcggtactcaaaaccttcagcagagttccagaacatcttcagattatcacttctttatagaaaatgagcttgtgatttatcacttgtctatataaattttagttcttcgaaggttcttaaaaagaagtagcatgccaatgaaatagttggcactagctggttatttgaaattgccaaattggccacattgtagagatgtttctgtgcggcgccggttttatatggcttcacgctatttccaggagccttctatcccatctatctcatttcttattttaaattttactatgttttttccctaaaccctaaattgtactatgtaaacactgcaatataatgaacggca

SEQ ID NO: 4197 - DNA, 1237 bp, Zea Mays
ggcgccgctactcagtgctcaccgaactccatctatctcttccccacgaacgcttgcggcggcggcggaattaggaggcgatggggcactccaacgtctggaactcgcaccccaagaactacgggcccggatcccgcgtctggcagtgcttccgcagcaatgccaaggacattggcttcatcaaggtatgcaatataagcttcaaactcctgtgtgaatgatgcttagcatcattaatgctttatgattttgtattggatatttagtctgaaaagttgctatcaaaaaacacgacaagaaaaaagtgaaagaccgataaatccattagttaatatttgtgaaatagctccatttagacactattctgcttttagttagcctccatcgtaaacatggaaaaggctccaagattctatgatgtaaagtgtctgatacttatctgttgttttatcatctttaattctttaatgaattagttactgccagcttttaggcgacatcttgcagtttagggcattcctatgtatttagactgtttctttggcactttgttccctttcttgcaagtgcagctgtggtattttgttgaaacatgccctacactttgctggtagtctttttttattcaaagaatgaattgtggttacatgtttttcatgttgacatgaaaacattaatgtatggctatggcacataaagtgcctacaattattttgctgcccatggcaatatttttgaaatttctccaatttggttgacttactattgctctttaaccaatgcaatgcctatatttttgttgcagtaccgctgaaatcaggtgggaatggaccatgtggtagaggcgaggctgtagttttatttccagtaatttagatgttttgttcagaagtctgctagtaaagactgctacgtttatgatgaagaacttagccatgttggtcatattgatcatgagttacctatgttgagcttaaactatcttgtgtccaaccatcgctgggtagtatgattactgtaatgtagggtggttaaggtcgcaaactaatacttatattgcatgtgtcgaagatccattccaattgtacttctagcgcactatttgtgaaatgttgctgggcctgtacggcattgacattaggtatcacaccaaaggattaatctgttccattgaacaatcctgccctgcattgttatccgatggatgctgaataggagtcggtcttctagacattcg

SEQ ID NO: 4198 - DNA, 2724 bp, Zea Mays
gcggctgcaatccggctgcggctgcggcttctacagtatttttctctctatggattgcagctgcagcagtccaaacagctgcaacagtgtcggcttgtagccagccgaacacgcccagtgttcccagccctaaaacacttgacactacgacactaccgtatcagtctggcaggtcctgtgcataatccaccatctcgctcacaggctcgccgcccccgccggcaatggagggcgttcacagcctcctggcccggcccaactccgcgccgttcgccttctcaccgctgcccctccgcaggagccacaggccgccaccgcctggcccctccacctgccgcgccgccagccgctgggccgaccgcctcttcgccgacttccacctcctccccgccgccgccgacccgccagccgcggcctcctcttcctcctcgtccccgttcgtcccgatcttccccgaagccgccgaccgcgccttgcccctcccggtcgacttctacaagattcttggtgcggagccacatttcctaggcgatggcattcggagggcgttcgagtcgcggatagctaagccacctcagtatgggtacagcacagaagctcttgttgggcgacggcaaatgctgcagattgcccatgatactctcacaaaccagagctcgcgcaccgagtacgaccgtgcgctttccgaggaccgtgatgcggcactcaccatggatgttgcctgggataaggttccaggtgtgctgtgtgtgcttcaggaggctggggaggcacaactggtgttagcaactggagagcacttgcttcaggaccgtccacctaagcggttcaagcaggatgtggtgctagcaatggcattggcttatgtggacatatcaagggatgctatggcagcaagccctccagatgtaatctgctgttgtgaggtgcttgagagggcactgaagctcctgcaggaggatggtgcaagcaatcttgcacctgaactgcttgcacagattgatgaaactttggaggagattacacctcgttgtgtattggagcttcttgctcttcctactgatgaaaaacataaaaataaacgccaagaaggtctgcaaggtgcaaaaaacatattgtggagtgttggcaggggtggtattgctactgttggaggaggattttctcgtgaggccttcatgaatgaggctttcttgcagatgacatcagctgagcagatggatttcttctctaaaacaccgaatagcataccacctgaatggtttgagatctatagtgtcgcacttgcccacattgctcaagcaattgcaagtaaaaggccacaattcatcatgatggcagatgaactcttcgaacaacttcagaagttcaatataggttctcaatatccttatgaaaacgagatggacctcgcattagaaagggcactctgctcgttacttgtgggggatatttgcaattgcagaatgtggcttggaattgataatgagtcctcgtcatatagggaccccaaaaatatcgagtttgtggtgaataactctagcatgaacgaagagaatgatcttcttccagggctgtgcaagctcttggagacatggcttgtctccgaggtattcccaaggagcagagatacccgagggacgcagttcagactgggagactattacgacgacccaaaagttctaagctacttagaaaggatggaaggcggtggtgcttcccatttagctgcagctgccgctatagcaaaacttggtgctcaagctactgctgcgcttggtactgtaaaatcaagtgctcttcaagctttcagtaaggttttcccattgacagaacagctagacatgtcaggcaaggatatcccaagtgatgatcttgataaatctcttgaaaaactcgcccaaggaagtgttgctggagacgctatccatgattccagaaatgacgccttgaagattatctctgctggggcgagtatgggtctgtggcggttgttgactccattgatggtccagcggcagatgaagagccactggaaatccctaggatggacgcgaagttggctgaagacattgttcgcaggtggcaaagcatcaagtccaaggctttggggccagaacacactgtcacggcattgcaagaggtcctcggcggcaacatgctgaaggtgtgggcggaccgagctgcagagatcgagcgccacggctggttctgggagtacgcgctctctggcgtgacgatcgacagcatcaccgtctccgtggacggccggcgggcagcggtggaggcgacgatcgaggaggtgggccggcttaccgacgtgaccgaccctaagaacgacgacgcgtacgacaccaagtacaccgcccggtacgagatgacctactccaggccagcagggtggaggatcaccgaaggcgcagtcctcaggtcgtaggtagaacggctgtgcttgtgcagctgcagcaggagtaggcgagtagcggtaagctcgattcccattcttttcttttcttttggcagcgtgtgtaaataaacagtgtgagcactggctcgttccagtactagaaagcttggttaggttgctgagtgatgagctcctgaggtcgaaatttgtcatgtagtttttattgatagataatttggtgttactattgctgggtcagatcctctgaaacgattgatcttaatgaaggcggcagtgcatcactgcttaccacatca

SEQ ID NO: 4199 - DNA, 1952 bp, Zea Mays
atgaccgtcgacgagctgaagctgcaggcgagggccagcggcggccacggcgccaaggaccagttccccgtcggcatgcgcgtgctcgccgtcgacgacgacccgacctgcctcaagatcctcgagaacctcttgctccgctgccagtaccatggtatgccacgctcctctcgctcccctctctctctctcttcccctggcaatgacaacgatgattcgggtaaaaagttgcaggtggtgagcgctgaaggtgacaatggcggtgttaatcgcaacaagagaatttcacgcaagggtagggatgataatggtgatgacggtgatgattctgatgacaacagtaatgagaatggagactcgtcgagccagaagaagccaagggttgtgtggtctgttgaattgcaccgaaagtttgtggctgctgtcaaccagcttggcattgacaaggctgttccaaagaaaatattggatcttatgaatgttgagaacatcacaagggagaacgttgcaagtcatctgcagaagtatcggctgtatctgaaaagactcagcgcagatgcaagcaggcaggctaacctaactgctgcatttggaggaagaaaccctgcttatgtgaacatgggactagacgccttcaggcagtacaatgcatatgggagataccggccagttccaaccactaaccattcacagccaaacaacctccttgcaaggatgaactctcctgcatttggtatgcatggtctgctgccttcgcagccacttcagattggacacaaccagaacaatctgagcacttccctagggaatgtcggggggatgaacaacggcaacctgatcaggggtgcgcatatgccactgcaggatactagcaaatgctttcctactggcccttctggtaattcgttcgcgaacatatcaaacagcacacaactggttacgacaaacaacttgccattacagtctcttgagccaagcaaccaacaacaccttggtcggctgcattcctctgcagaccctttcaactcatttgttggtgagcccccccagtttgcagatcttggaaggtgcaacaccacctggccaaccgcggtctcatcatccaatgttcaggagattggccagaaggacaggatcgtgaataggcccaagcttgagcctctctcaagctttacagaagcatccagtcagatccctttgctgggaagtgaaatgcagagccaccaagtagcatcactagccagcaacggtcttccgatgccgttcactcaggaagcggtgcccttcgcttatggaagcagcacgaactcgagagagatgctgaataacaaccttgcgcttagtaattcaggcgtcaactctacattgccgaaccttcgcatagacggttctgttgttccagggcagacactgggtggtagcaattcaggtggttgtgttgtcccccctctgcaagatggcaggattgatcaccaagctgtcagcagtcatctaaactacaacaacgaactcatggggacaggaccgcgcagacgatggcgtctccttcattgatggggactgggaactggtctagcaagtttcagttctctacatcaagtctgccttcgtgtgagattttccgcatttgtggttgtggaggggttcggcgcttgattggtccaaagttgtttatagtagcaagattgcatcacaaatgccctttgcatttggtttttcagtttagcgaccaggttccagtgtcacgtccgaatatcaactatgtggtatttgctaccttaactcgtatggctatgttttcaagtcaggtgttaactgtggctatcgtgatatatacagcatggttatgagccaaggaatgctgtcctgtttcctcttggaaatcgttttgctgttccctttgttgattgtcactggcaatctgttccagaaagatcccagcattcgtcatt

SEQ ID NO: 4200 - DNA, 1431 bp, Zea Mays
cacaaaactagggtttcccacccccagccggcgtcaccctcatgagccagccgccagccccaggcttctagcctctgtccaagccggcagcccgccacccgcgaggccgcgaccggcgaccgcccgcccctgacgtggtgactgcgtcctcctccgctctccgtgcgccaccctgaagcggtgaggcgaggacctccaggcaccgccctccctggttcggcggctccctcgaggccttcctccccaccggttcagcagctcccgatccgcacggccaaaggccgattcgcgctcctccagccttcctccgcgtccaacagcaagccaggaacagccctgtgaggagggggtgacgtgagagccgatagggacaaaaccgtggaggtggatcattgcaatagatgagatgttcatcatcatatagcatcgacaacatatatccgttcaataggtccttaagacagcttcaacaaagagatgtggtaggtaacagggttgctacagataccgaaaaaggggggataaggattccaaaacactcggaggaaacatgtatatggggccatgtccaatcaagaaatacgaacaaacgtggcatcacaaagaaattttctctagtaagcaatgaaaaacttcaacccaagaatggcgatgtcttggacaagagggttaaagcatggtgttgttccgaggcatgccgctcaattggtagagagcagaagccttgcaattgcaagcaaggcgaagaagggtggaaaggctgatgctggcaaaactcctgctctcagccaagagctcaagagtacaacagtgttcggggcaaacatcttcaaggagggttctgatccgaaaatccaaccagactctgagtatcctgactggctgtggcacttgctcgacaagcgtcctgtactaagtgagctgcggaggaaagatcccaagacactctcttatgaagacctgaagcgttttgtcaagttggacaaccgatccaggatcaagataaggaatgacctcaatgctaagaactgacctggagtcttggacgaaacaggacctgctctactgttctttttattattaatataatactagacgacatgaataatttttctggagtttttggcaaaacatagcgacttgggatgttaaaatgttaagatgtgcttggtttgttactcttttaggcagcttacgacactggcatgctttttgttcttccatcttgggaaagatgcagctttgtgcccagtacttagcaaattatcaagttccatggttctgcagcattatctgacgtcccagcatacgattcagtcacggtttatgtatcttccagttcatctgaatctttctggggtattgtaagtttggattttcattgcctgtgttaattgggttttactgcacgatcaactctctcattcttca

SEQ ID NO: 4201 - DNA, 812 bp, Zea Mays
agaatttctgcattctctgcactgatggccatattaaatgcagaggcaaccctgtccatgctttctcccccaaagccgaacacacttcctcgcgctcgcgctctcgagtcccgactcacctgcttctagccatggaggcgcctccatcttctcccttcctagtgttgctcctgctgttcttcccttcgagcggccttgccgcccccatggattttaaccatgaagtgcaagtccttatggtgatcaagagcctcctcaaggacccctatggcgcgctgagaaactgggacaggaactccgtcgatccctgtacctggtccttcatctcctgctcgccggagaatctcgtcactgcactggaagctccaagcaagaacctttccggccggctctccccgagcatagggaacctgacaaaacttgagaagcttcagctgcagaacaacaacataattgggccaatcccagcagagatcggcaagttagcaaagctcaggacgctggttctgtccagtaacaaattacatggcacagtcccaaattctttaggccgactcggaagactccagtacatagacttgtcgtacaataacttgagtggcccgataccaaaaacgtctgcaagaacgctcaacatagccgggaatcctctcatctgtgctgcagaacaggattgtgacagtaccaagctgaaaccgatgctggattcctatatcgctggtgaacagtaggagccccaagttgggagtcggttaccttgctaaggactgcagctattctattacatcagaattcaggattatcaatggaaa

SEQ ID NO: 4202 - DNA, 3010 bp, Zea Mays
gtgcaatcggacgtaaaccaacgaggcaagggtctcccgccccgcctctcccctggcgataccccgccgcctctcgcttgtccccgttcttgagcaatcatctgcctccctttgttcccgcacaatccctagttgggaggggggccatggggcggctgcggccagatggccagtaacgtgcaaagatgagcagtagattactatcggtctgctccatcgccggcgtccatggaggccttctacctccaccttctccgctcctgcgcggcgctaccgcacgtcgcggcagtgcacgcccaccttgcgcgcgcgcacccaaacgcctctctcttcctccgcaactgcctcctggcctcctactgccgcctcggggttggggccccactccacgccgcccgcctgctcgacgaaatgccccgccgcaacgccgtctcctacaacctcgtcatcgtcgcctattcccgcgcgggactcccggccctctccctggcgacgttcgcgcgcgcgcgggcgtgggccagggtggtcgaccggttcacgtacgccgcggcgctcgccgcgtgctctcgggcgctcgacgtgaggacggggaaggccgtgcacgccatggtcgtcctgggaggtctcggcaacgggttgttcctgtccaactcggtcgccagcatgtacgccaggtgcggcgagatgggcgaggccaggcgcgtgtttgatgcagccgaggagcgtgacgacgtctcgtggaacgcgctgctctccgggtacgtccgtgccggtgcacgtgaggagacgctggaggtgttctctctgatgtgccggcatggtctggggtggaactcgttcgcgcttgggagcatcatcaagtgctgtgcctcctcctcttcttatgctgctgctggtgatgtcggaggagggcgcatcgctgaggcggttcatgggtgcgtggtgaaggctggactggacgccgacctgttcctcgcgagcgcaatgatcgacatgattctgtcgtgaggaagcagccgacgtcgctagagaagctttgggcctgtattcagagctgcagagccgagggatgcagccttctgagttctcattctcaagtatcctgcgtgcatgtaacctggccggtgaatttggattcgggaaacagatacatggccaagtgctcaagcacagcttccaaggcgatgtctatatcgggagcgcactcattgacttgtactctggctctggttgcatggaggacggatacaggtgtttcagatccctgcctaagcaggacgtcgtcatctggacgtcagtgatttcagggtgcgttcagaacgagctttttgaggaggcactgaggctgttccaagaatcagtacgctgtggactgagacctgatgttttcgcgatgtcgagcgtgatgaacgcatgtgccagtttagctgttgcaaggaccggtgagcagatccagtgccttgctgtaaagtctggctttaaccgcttcaccgccatggggaattccttcatacacatgtgtgctaggtcaggggatgttgatgctgccacccggaggtttcaggagatggaatcgcgtgatgttgtctcttggtccgcggtgatatcaagccacgcgcaccatggctgtgcaagggatgctttatgcgttttcaatgaaatgctggatgcgaaggtggcaccgcctaacgagatcacttttctcagcatccttactgcatgtagtcatggaggattggttgatgagggactcaggtattatggaattatgaatgatgaatatggattgagcccaaccataaagcattgcacctgtgttgttgatcttcttggacgagccgggaggttagccgatgctgaggctttcataagggattcagcattccatgacgatgctgtggtctggcggtctttgctggcctcgtgtcgtatccacggagacatggagagaggccaacttgtggcggacaagataatggatctggagcccacttcctcagcatcctacgtaattctctacaacatgtatctggatgctggcgagctgtcctcggcttcaaagactcgagatctgatgaaagagcgaggcgtgaagaaagagcctggtcttagttggatcgagctgagctctggagttcactcttttgttgccggtgacaagtcccatccagagagcaaagcaatatacagaaaagtggcagagatggtttccaaggtggcgggcatctctagcagggagcaggatttggcgggttgccacagcgaaaaactagctgtggcatttggaatgatccatttgccgcaatcagctccgatccgagtgatgaagaacctgagagtttgccgtgactgccactcgaccatggagctgatatccaagagtgagaggagagagataatcttgcgagacgcgattcgcttccatcgcttcagagacggttcctgttcctgtggcggttactggtgatgatgaccaacccaaggctcaaaagcgcgacatagcccacctattgcttgacgcgagcacctgacatggcttccgttgggggcaagctaggtcactgccggtgcacatgacgctgcatgcatggcttaattaagttactcaacccccactgtagctggataccacaggctgatacacggtgttgtatatatagtctgtgtcgtcaagtgaaacgaccaggaacaaaccctacaacgtgtgatgccaagtgtctatggggacaatggtcttttcttttggacctaaatacaagcggtgtattctatgcgaccgaatcaagactgcggtatgaacatgttcaagatttcgagcttcaccaatacaagttcgtttaaaaagcaacaaagagaatattgtgctactagaagcatacgtcaaattttggtctttggactttatcgattggtggtttttcgggctacgcattggctccgcttctgggctcaactacaacttagacaggatgatcaagaactaataatcaaggcatgtcgtagattggag

SEQ ID NO: 4203 - DNA, 2359 bp, Zea Mays
tgacggcctgcctgccacggttcacggttgaaacggagcaacgcttgcgaacgcgccattccgctccacgctgccctgctctgctcccccagtcccccaccacaactggcgtcgccttccccggggaatgcgaccgcgcgccagagcatgccccgcccggagcccgcgctagggttccccgcccgcgcgtccaagccgccgccccagcgccgccgcaagaggcagccgccgacgaggcggaggcgaccggccggtgccgcaccggtggggccacgcggcgcggccgatccagatccggcgcactcctccgcgctgctgcccctcccaagcggcggcagtggcttcgcctcgcggggcacggttgcgccagacgaggaagaggggagagacggagcaagctccgcagaatcggaggaagtggcaaaagcaacaaatcattcgttctcccactcagtgagagagtgccagaagcagcgtcgactcaagtcagagaggtctgcactggcgcgcccgacggccttgcatgagctcaacagcgctggaggtgttgagctgctagtgctctcgccgagatgcttgattggtaacccgggaggaatgagcaagagctcgacgacatcatcccggagcagatcaggcacaggcacaggcacgttcccgagccctgggaccccgaactacaaccggcattgtgcaggcagcatgcagtactccaagggttggagttcagagcgcgtgccgctgggcactggtagcaatagacggtatgggggcagtggggttgtgcttccgtttaacaatgggaggaagctgccgtcgaaatgggaggacgcggagaagtggatcctaagtccggtttcctgtgatggtatgggaaggatgtctgcaccggctccgcatcatagacggcccaagtcgaagagcgggccccttggccacccagctggcattccaggggcttatgccgctgtctcaccgcttgttccttgctttgatggtgttctggcagaagctaattttgcagtgcattcacctttctctgctggggttctcataccagagcacgggcgcattggtgacttcagcagtggaagaggtagatgtggtgacgatggtagcagcagatcctactctgcagagaaggagccatatatattaagatctgcaagcatacatgcctggacagaaacgcttatggaggcatctgcttttgctaacatctccgaagaaaccgtacaaggtgcaaaagggaggaggcaaagatcactgcttgggaaaatctacagaaagcaaaagcagaggctgccattcgaaagctggagatgaaacttgaaaagaaaagatcatcgtcaatggacagaattctaggcaaactccgctctgctcagaagaaagcacatgacatgcgaagtgtagtttcttatagtgaagatcattgtggtgcgaggacaaccaagaagacatctttccttgtcaaaactggcaagcctttcagctgctgctttacctaccgtgcttgctagttgtggcacagctggtgccactggattcagcaatggatatagttctatgcgagctcttctcaggcaacagttatggatgtgaagtcagttggattttgactacatggcctaattgtcaatgagatatgcacaatctgatgaacaagatattattatggagcagcagacaaagaagtgtctatctttctcaagagctcttctcaggcaacagttatggatgtgaagtcagttggattttgactacatggcctaattgtcaatgcgatttgcacaatctgatgaacaagatattattatggagcagcagacaaagaaagtcatcgagctaaatccactcatgtagctaatggtgtggactactatctgctgctgtatagcctgcgacgatgactctgtacacccggtaaaaaagctcgtttcacgagcttcatgctagttagaatctggattgagctgatattcatcctgcttcatgtgtagctttcatggaaattgtgtatgtaacccaaatcatgggcgcattacagacctaacggaaaaaagtcagtgctgcgcctttagaatgcagcttgctctcttccttattttgaaacttgtttggttcagttctggaggcttgcggtccagcactgaaacttggcttgtttgtttattggttcgcagcgagtggaatttgtaactgagacgacaaaaaccctatttcccctcctttttggtgaacatgataaacgtctccaacttccgttagggcacgtacaaagcctcttgatcagttttttttatgcacaagagataattaagagacaacatggtacaatcataagtccttatatcat

SEQ ID NO: 4204 - DNA, 1490 bp, Zea Mays
ccaaaaaaaaagaaaaatgtactcggagtcaatagttgcccaaattgtttcgatcgcccatttcgacatcgtatcggattttttcaaaataatggggaaaatagcgaagggaaaaaaaaaccctccgtgtggccgtcccaaactcccaatgagatgaagagaacgcaccacacgaccgcgtgacagaggcacagagcaaaagccaaactggcagccagcacagcagagcgccactcgactcgactcatcctttcggttcccctcccccctccgcgttccacaaccctcgagaagcttccaccctcccctcctgcgacgccgccagagccgcggaaaccctacccaccccggccgctcacgcaccgggcgcccgccgccgccggtcgcgtacctgccgccgacaccgcccaaagcgattggatctagagatcgtcagtagccacgatggaggactgggattctgaagaattccagccagttgtgcctgttgtgaaagccgagccacttaaaaatcagtgggctgatgaagatgttgaagaagatgatgtaaaagaatcatgggaagaagaggaggaggaggagaaacctaagccagcgccagtggaaaaggtcgctgcaaaacctagcactaaggctcctgctaaaaagggaaaacagcaagcattgacaagtgctgaagaaccagatgagcctcctcttagtcccacttcacagaaaattcgccaacaaagacttgtggaagaagctgacttcaagtctaccaccgagctttttgcaaagaagggcagtgagcaaaagtcactagatacttttattccaaagtccgagagtgactttgcggaatacgcggagcttattgcaaacaaactacgcccctatgagaaaagctttcactacatggctctgcttaagaatgtcatgagactttccatgacatcgttgaaaggtgcggacgccaaagatatatcttcttccgtgacggcaattgctaacgagaagatcaaggctgagaaggaggctgcagcaggcaaaaagaaacaaggagcgaaaaagaagcaactccacatcgagaaaggagacgacgacttcatccccggccggggtggtggctacgatgaccccgatgagtacgacttcatgtgatctggctgggagggatagtaggtttctgttatgtatacctttggcgggcagagaatatatcactagagtttgcggcatactattgcatggaacatgcgttatctattcgagaatgatttttgactctgcaggataagaagagcacttgtgatctggatgcatggctgtatgaccgtgtgcattgtttttggagatcttgtgtgatccactgactactccgactggcatggttgtcttcctttttctgacgctcggacgagacacagcaagacactattggtgtgctagtttgctgcacggaggtgttgttaggttgcacactgttggtgtgctaatcttacttctgg

SEQ ID NO: 4205 - DNA, 1586 bp, Zea Mays
ccggctcgtcatctactcccctcgctaggcatctttgccgagggcgtacggctcgccatttccttttatcgcgcccaactgccctcccgccgtcacggcaaattccagctcccgcgaccgcgacattgcaccctcgccaccgcgaccagcccgtgcctccacattcatccgtcgccatgtacaaacctgtacggccccattcgttgaacaagtgaagaaactggattgtggaatgctcctctttctcagtgttcgccaggaaggatagatccggaggcgcatcgtacgggtggagatttggaccaatccactgtaggattgatgcaccggcgtttgcttcctcctacaagcttcgaaggcctaatgtcagcaaatctgtcccatgccaatcgaataaacagggatgaatcctacacaggatgcccagaacttgaagaagatgaagcgcaacagcaaaattggaaaagaaattgttgcggcgtaggtgttgctggacactgtgaacttgcactatcattttaacagcttgcatcaagaagggtggcccaaacccttcatccaacacaactttatcagctatactagagaaagcaagggaacttgatgtccctagagaaattttggagcgcaacatcaaaagggcatcagaaaagggacaagatacttacacagaaaaggtttatgaggtctatggttttggtggagtgggtatggtcgttgaagttctaactgacaaaattacaagatcagttgctgacattagaaacgtggtgaaagactgcggagcaaaattggctgatcctggatctgttacctttagattcagacaagctcgagtggtgaacataaaagttactgatgcagataaggaccaactgctcaccgttgcgttagatgctggtgctgatgacgtccttgaaccaaattttgatgatgatgactctgaagaagaagcagaaaggttctacaagatagttactacatcagaaaactacccagttttgctatcgaagcttcaagaagaaggattgaagtttgaaactgataatggctacgaacttgttcctctgaacccaattgaggtggacgacgaggccgtggaactaaacaaggaacttgtttcaaatttgctagagcttgatgacgttgatgccgtctatacagaccaaaaatgagtgaattcatgagctacagctctcaattcaagacgcgctcggccaatggactttgttcgagtatattcacttttcattgatgggaaaaaaatgttaggtctttttatgaagcctggttgagcaccatcggctctacccaaaaacttaacctagttatccagcatctttttgatactttggcatttcgcaagctcatgtctataccttggtttcttcccagcccatcgtgttgggatggtttgatacatgttcagaaagcagatgtgagaaaccatagtaaaataatacgttgatgctgatccatttttgggtcttgttaaattgcaatggaaatgctatgattttggtaagcattgaaatgaaaatgctttggctctctgaataaatgaatgtgctcttcgctcctataag

SEQ ID NO: 4206 - DNA, 2185 bp, Zea Mays
aaaaacgcatccaacaggctagctttctacctctcttctccatccggctcgtcatctactcccctcgctaggcatctttgccgagggcgtacggctcgccatttccttttatcgcgcccaactgccctcccgccgtcacggcaaattccagctcccgcgaccgcgacattgcaccctcgccaccgcgaccagcccgtgcctccacattcatccgtcgccatgtacaaacctgtacggccccattcgttgaacaagtgaagaaactggattgtggaatgctcctctttctcagtgttcgccaggaaggatagatccggaggcgcatcgtacgggtggagatttggaccaatccactgtaggattgatgcaccggcgtttgcttcctcctacaagcttcgaaggcctaatgtcagcaaatctgtcccatgccaatcgaataaacagggatgaatcctacacagattttggaaccggaaggcatatgtggaccagaacacttatgtgcagattgaagtggatttttgccagacaaatctctctgcttgcatgattgaagtgcatatgtggcccaatacacttatatgctcttattcctcactgccatctcatttctaaagttggaaagattgaactgaaccttgctctgaacttttttccttctttgttttcttattgttgcagggaggcaatcctttggatttcaaaatgtagttgatctaattcatgcatatgctgccaaagctgttactgaacaactagaccaaaatgagaaccttgtatcagtcaatgcagatgtctgcaatttctgggaaaaggatgttatgccgatgcttttctgtaggagttgcagatttttttttaaaaaaaaaacttcagccgaaacaggatgttatatcgaaacattgaattagcagtggatcgtgttcagaaagttgggttcattgtagggatcagcttccaggggttggttcgttgcaggatcaattgccaacctaccactgagtctaaatttagagtctgttggttacccacccttcaggaagttctatattttataaagccatctccaaaactctaaaattagctaggaattatagctatgctgttggagttgctctcagttccttacaccagttgtttctttaattcaggatgcccagaacttgaagaagatgaagcgcaacagcaaaattggaaaagaaattgttgcggcgtaggtgttgctggacactgtgaacttgcactatcattttaacagcttgcatcaagaagggtggcccaaacccttcatccaacacaactttatcagctatactagagaaagcaagggaacttgatgtccctagagaaattttggagcgcaacatcaaaagggcatcagaaaagggacaagatacttacacagaaaaggtttatgagattcagacaagctcgagtggtgaacataaaagttactgatgcagataaggaccaactgctcaccgttgcgttagatgctggtgctgatgacgtccttgaaccaaattttgatgatgatgactctgaagaagaagcagaaaggttctacaagatagttactacatcagaaaactacccagttttgctatcgaagcttcaagaagaaggattgaagtttgaaactgataatggctacgaacttgttcctctgaacccaattgaggtggacgacgaggccgtggaactaaacaaggaacttgtttcaaatttgctagagcttgatgacgttgatgccgtctatacagaccaaaaatgagtgaattcatgagctacagctctcaattcaagacgcgctcggccaatggactttgttcgagtatattcacttttcattgatgggaaaaaaatgttaggtctttttatgaagcctggttgagcaccatcggctctacccaaaaacttaacctagttatccagcatctttttgatactttggcatttcgcaagctcatgtctataccttggtttcttcccagcccatcgtgttgggatggtttgatacatgttcagaaagcagatgtgagaaaccatagtaaaataatacgttgatgctgatccatttttgggtcttgttaaattgcaatggaaatgctatgattttggtaagcattgaaatgaaaatgctttggctctctgaataaatgaatgtgctcttcgctcctataag

SEQ ID NO: 4207 - DNA, 2510 bp, Zea Mays
gctgtaatctatagagacaaaaacattgtagaaacagtagaagccggtacggattaaaaccaagcgaataagctcggtccattagcgtaattgagaatggaaaaactgaaaacagaaagtagctttagtttcttgtttataaaatgtagttagctttaacgtctcaatatgtatcctcagagcaactccaacagccttactaaattgaacaaaatcagtaaaaaaaagaaaagcctggttaaaaacgcatccaacaggctagctttctacctctcttctccatccggctcgtcatctactcccctcgctaggcatctttgccgagggcgtacggctcgccatttccttttatcgcgcccaactgccctcccgccgtcacggcaaattccagctcccgcgaccgcgacattgcaccctcgccaccgcgaccagcccgtgcctccacattcatccgtcgccatgtacaaacctgtacggccccattcgttgaacaagtgaagaaactggattgtggaatgctcctctttctcagtgttcgccaggaaggatagatccggaggcgcatcgtacgggtggagatttggaccaatccactgtaggattgatgcaccggcgtttgcttcctcctacaagcttcgaaggcctaatgtcagcaaatctgtcccatgccaatcgaataaacagggatgaatcctacacagattttggaaccggaaggcatatgtggaccagaacacttatgtgcagattgaagtggatttttgccagacaaatctctctgcttgcatgattgaagtgcatatgtggcccaatacacttatatgctcttattcctcactgccatctcatttctaaagttggaaagattgaactgaaccttgctctgaacttttttccttctttgttttcttattgttgcagggaggcaatcctttggatttcaaaatgtagttgatctaattcatgcatatgctgccaaagctgttactgaacaactagaccaaaatgagaaccttgtatcagtcaatgcagatgtctgcaatttctgggaaaaggatgttatgccgatgcttttctgtaggagttgcagatttttttttaaaaaaaaaacttcagccgaaacaggatgttatatcgaaacattgaattagcagtggatcgtgttcagaaagttgggttcattgtagggatcagcttccaggggttggttcgttgcaggatcaattgccaacctaccactgagtctaaatttagagtctgttggttacccacccttcaggaagttctatattttataaagccatctccaaaactctaaaattagctaggaattatagctatgctgttggagttgctctcagttccttacaccagttgtttctttaattcaggatgcccagaacttgaagaagatgaagcgcaacagcaaaattggaaaagaaattgttgcggccatcaagaagggtggcccaaacccttcatccaacacaactttatcagctatactagagaaagcaagggaacttgatgtccctagagaaattttggagcgcaacatcaaaagggcatcagaaaagggacaagatacttacacagaaaaggtttatgaggtctatggttttggtggagtgggtatggtcgttgaagttctaactgacaaaattacaagatcagttgctgacattagaaacgtggtgaaagactgcggagcaaaattggctgatcctggatctgttacctttagattcagacaagctcgagtggtgaacataaaagttactgatgcagataaggaccaactgctcaccgttgcgttagatgctggtgctgatgacgtccttgaaccaaattttgatgatgatgactctgaagaagaagcagaaaggttctacaagatagttactacatcagaaaactacccagttttgctatcgaagcttcaagaagaaggattgaagtttgaaactgataatggctacgaacttgttcctctgaacccaattgaggtggacgacgaggccgtggaactaaacaaggaacttgtttcaaatttgctagagcttgatgacgttgatgccgtctatacagaccaaaaatgagtgaattcatgagctacagctctcaattcaagacgcgctcggccaatggactttgttcgagtatattcacttttcattgatgggaaaaaaatgttaggtctttttatgaagcctggttgagcaccatcggctctacccaaaaacttaacctagttatccagcatctttttgatactttggcatttcgcaagctcatgtctataccttggtttcttcccagcccatcgtgttgggatggtttgatacatgttcagaaagcagatgtgagaaaccatagtaaaataatacgttgatgctgatccatttttgggtcttgttaaattgcaatggaaatgctatgattttggtaagcattgaaatgaaaatgctttggctctctgaataaatgaatgtgctcttcgctcctataag

SEQ ID NO: 4208 - DNA, 4819 bp, Zea Mays
ctcccgcatcaaggaccggtccttctcaactccgcgccggagcccctccgcctcgggggcgcgatggatctcctcatcgcgcagatcaccaccgaccttcgctcctcggacgcactccggcagtcattggcgctgctgcaggccctgcagcagtgcgccgcggggcgggatgtctccgcgctcgcccgcaccgctgccaccgagatcctgtcggcaccctcctccgcagtctgcaagcgcctggctctcgacctcctccgcgcgctcccgctgccgccagacctcctcgacccgctcctcctctcctccctccgctccgacctctcctttccggaccccgacgtcgcctcctcttccatcgcctcgtttccatccttgccctcccaccttctcccatcgctcctctcctctgcccatgctgaaatcgctaatgcgctctcctcgcccgctgagtcgctgcgcctcggcgctgtcacatctctgtcctcgttcctcccgcgcgatgacctcgtgctcatgtgctccacaaacccctccctcatggcacacgccaccacgtggtgggcccgcctggccgagcttgcgctggactctgcagacgctgtttccgccggtgcgtttgaggcccttgcacggttgttccaggagctagaggggcgccgcatgagccggctagctggtgacaagcttgttgatggagaaggtgtgcttgcagtgcgggcccagtgggcggctgatgccattgatttcatttggtcaaggcgcaatatgctgattgcgcgctccgtggtgatgcctgcggagagcttccgacttactgtgcaccctctagtgcatgcagcgaaaatggttgcttctggtgtagtaaacacgctgcagcggattgccaagccaggggacactacaattgctgatagtgtggagtctagtgcggagaaattggttggagtgtcagacattgtctcgcacttgctgccattccttagttcacttgacccaccactggtgtttgaggtggggatcaatatgctggcacttgcagatgtccctggtggcaagccagagtgggcttcagctgccattattgcaatcctgacactatgggaccggcaagagttctcatcgatgagggagacaattgtaagggctgttgtgaccaatcttcatttgctggatcttggaatgcaggtctctctgttcaaaagactgcttcagatggtgagaaatttgagagcagaatcagatcgtatgcatgctctggcatgtatttgtcggactgctctttgtgttgatctttttgcaaaggaaagtgttcgaagaggtcagaagcctgttccaggaacagacgtgatatcactctttgaggatgtgaggctgaaggaagatctaaatagtgtaaccagcaaaaacttgttcagagaagagctagtggcttccctggtcgaaagttgtttccagctatcccttccactaccagagttgaagaattctgggacagagagcagagttataggagctttagcctacggaactggttatggtgcccttaattggacagaacctgctttggatgtggtggaagtttgcaggccctgtgttctttgggattgtgatggtcgtacctatgcagttgattgctatctaaagttgtttgggaggctttgtcatatatacgacaccagaggtggtgtgaagacaattaaagctggtgcatctcaagatcagattctgaatgagatgcgacttagaaatttgcagctacagcttatcagggaccttcgcgaggttcacactccacgtatatcttcacgcttgatatgggcaatttctgaacactttgatcttgaaggtctggatccccttttagctgatgacccagaggatccactgaatattatcatatctaacatgcacaagatattattcaacattgattcgtctgctactacatcaaataggatacaagatgtgcaggctgtgctaatttgtgctcaacgtttgggagcaagaaatacaagagcaggacaacttctcactaaagaactggaagaatttagggcaagtacttcagccgattctgtcaccaagcatcaatcacgttatgtgttgcaagtaataaaatatgtaacaaaccatcccaataacaggtgggttgctgtaggtgatgctacaggggattatccatttagtcaccacaaacttacagttcaattttcagaggcatctgctgcccaagatagaaaattggaggtattagttcataaggccattcaggagctttggaggccgcatcccagtcaattaactctcctacaaacaaagggaatcagtgccttgcataaagagcttccaaaagcctgtactttgaccggcagcagtgatccgtgctatatcgaagcatatcatttggcagatccaactgatggcagaatcaccctacatctgaagattttaaatttgactgagctagaactcaacagggtggacattcgtgttggcctctctggagcactgtattatatggatggtttctctcggactgttcgccacctcggaaatcttgtttcccaggatcctgtccaaagtagtgtgactgttggagtttcacattttgagagatgctcgctctgggttcaagttttgtattacccgttttatggaagtggtggatctgcagactatgaaggaaactatgcagaagaagaggattcgcagatgatgaggcagaagcgctcacttcggcctgagcttggggaaccagttgttttgcggtgccaaccctacaagttccctctcgccgagcttctgctaccattagaatgctctccagttgagtatttccggctatggcctagcctaccagccatggtggagtgcactggcacgtacacatatgaaggcagtggtttcaaggccacggccgctcaacagtatgacagctctcccttccttggtggactgaagtcaatttcttctaagcccttccatcaagtctgctcacatttcatccgaacagtagctggattccagttatgttatgcagcaaagacatggtttggtgggtttgtgggcatgatgatatttggggcaagtgaagtcagccggaatgttgatttgggtgatgagaccaccacaatgatctgcaaattcgtcatgcgtgcgtctaatgaatccatcacgagagagattgaatctgatctccagggctggctggatgatatcaccgacggtgctgtggaatacatgcctgaggatgaggtgaagagcgcggccgctgagcggctgaagatctccatggagaggatctccctgctcaaggcagccaagccaaaggtcccacctgcgaagaccgagcaagaggaggaagaggagcgaaagcagagcgaggaactagatgggtttgggaaccccaagggcccctcgaccctctccaagctcactgcggaggaagccgagcaccgagctctccaggctgccgtgctgcaggagtggcaccagctgtgcaaggagaaagctatgaaagcacagtgaggtcgatttggaccgcgtggatcttcgaaaatctctcttaggcttcgtaaaattcacttcttaaatcatcatttagttttttatatcttttcatcttccaacatttttatatatgttttacactccagagagtcattcttatttttatccttgatagcgagaaatttaaaatagaagatgcatatattttgatggctacttatatgttgtttagaatctctagagctaatacttaaacagctaataaattattaactaagttgagtcatctaatgtactaattgttagctgagaggtagctaacaattagttacggtattaactgagtgtatttggaatccaataactaattttttgtaactaactgttagttctagaggttcccaatggtgctttgtaaaagctgttaaagaagttggagaagctatttaagggtaagtgtattatttaaatatctattcctgttaattaggaatgatagttttctggagttgcgcgcctgtatgattttgtattttttttttgtcttccatcttttttgcgtaactatcctgctgatttcactcactgtataccgtcgcagatattgtgtcgcgaacaaactttttgtaacagtagcatttttaagatctggcgtgaagatcaattatgcctcggctgatgctccagaggttaagaagaaaaggaagctccagtgttcgttggacatgcagccgatgtctacccaagctaagctagacatcagcgatgatgtggtggatgctggtttggtggatgatgtggaaggtggaggcatggtgaagacagtcaggtatgttggggaggaaatggaggaagatgatgatgatgatgagggagttcttgcattagtcggctatgccgccgatccagtcctgaccctagagggcgctccagcccccgagggtgctctagccctcgagggtgtcgtgcttggttctccttctgctgcttcaatggaagttcaggttgggtcgctaatgcctccgattgacgatgctgtggcaacaagttctaccctgcccatcagatctcgtccagacgatccaaccacttttggagaggccaccccgagtcaagttcctgaagatgctacaacaacttcgaccagcgttgggatcccaatgggtgttgcacttcgtctgggggatttggagcctttggcgcttgttcctacttcctttgtggcttctacggatgttgctacttctgggctatcttggcttcaccagctttggatcttccagtgtttctattgaatttgcaggta

SEQ ID NO: 4209 - DNA, 2494 bp, Zea Mays
cccacggcgaagttgcagtgcatatctaacagacgtgacagttactaatactacagctagtggccattggttctcgcgcggctagattcccgtcccagccgccagtcgctgaggctgcctgctctgtggttctccgtcgtcgattgccattttaacacctagtagttgttgttgacgatatgcttctctgtgcttccggttctgcatgatccaggcagcagccaggaacaacaagctaggccccctcacgcagaccgcacgaccgagcgcgcggcattgaccgacccatcgccgccgccgccgcctcgatcgaccatgacgcttgcgagcacggacaaggtggtgctgggatgcatcgcgttcagcatcttctgggtgctggccgtcttcccctcggtgccgttcatgccggtgggccgcaccgcgggctcgctcctgggcgccatgctcatggtgctcttccgcgtgatgaccccggaggaggcctacaaggccatcgacctcccgatcctgggcctgctcttcggcaccatggtggtcagcatcttcctggagcgcgccgacatgttcaagtacctcggcagcgcgctggcgtggcggagccggggcagcaaggacctgctgttccgcgtctgcctcgtgtccgccgtggccagcgcgctcttcaccaacgacacctgctgcgtggtgctcaccgagttcatcctcaagctggcgcggcagaacaacctgcccccgcagccgttcctgctggccctcgcctccagctccaacatcggctcctccgccacgcccatcggcaacccgcagaacctcgtcatcgccgtgcagagcggcatcaccttcggccagttcctcgtcggcgtcttcccggccatgatcgtcggcgtcgccgccaacacctgcatcctgctctgctacttctggatgtcgcgcgcctcgtccgtcaacgggggcggcgccgacgccgactgcgtcggcgagctcatccgccggagcgatagcctcagccgggccgacactacgctaggcatgagcatgaggagccggagctacaactcggagggcggcgacatccaggtcgccatcaggtccatgcgcgcgtccagcatgtcgcaggagatggtggaggtgtccaccgtctgcgacaggcgcgacgacggcggtgccgggcccagaaaggtcaccaggaccaccagccaccagcgcagcgtcatcatcgaggacgcgcccgaggctgacgccgccgacgacgacgacgatggccacaagggcaaggacggtgacagcgtcaccaacaaggagaagaggtggaaggtgctcgtgtggaagactgccgtgtatctcaccacccttgggatgctggccgcgctcctcatggggctcaacatgtcctggtccgccatcactgctgctcttgtccttctcgcgcttgatttcactgacgcacaggcgtgcctggagaaggtgtcatactctttgctgatcttcttctgcggcatgttcataacggtcgacggcttcaacaggaccggcatacccaatgcgctctgggagctggtcgaaccgcactcgagaatcgacagcgccaaaggcacggcgcttctcgcagtcgtgatcctagtcctttcaaatgtggcctcaaacgttccaactgttcttctgctgggcacaagggtggcagcgtcagcaggcacaatctccccagagtcagagaagaaagcctggctcatactagcatgggtgagcacggtggccggcaacctgaccctcttgggctcggcggcgaacctgatcgtctgcgagcaggcgcggcgggcacagttcttcgggtacaacctcaccttctggagccacctccgcttcggcttgccgtcgacgatcatcatcacggcgatcggcctgctcatcgtcgccagttactgaaccccacacaagctagggtctcggcctcgcacaaacggcggggtgtgtagccagatggcaggcagaacgctgcagaaaacagcatgcagcactgcctgacatcgaaggagatgttgtactgattggcctttgtttgtacgttgtaacagtttttatgtcgttcgtgtaagtctgtacgtttcgcgcaaccgatgccgcaaggcgccgggttgcccatctgctaaggcaaataatgcgcaagactagtagatggcatggagtatagaaggccggcaccactgttctaggaaggcaaaaacttgctctagctagttcaggtaggagagccggcgaaaatgtatggtgtgcttctcgatttggtaatgtcaagggacttgtccttatgtttggagcaaagaaacatggttgtacgattgtgccactagtacacagaagctctataataacggttctagagctatttgtggtgacgtttttcagtaccgtcagtgctaggggttagtggaaatcgatatttccaatggtggctattttggatctgcaagtgaaaatgctattttgactggca

SEQ ID NO: 4210 - DNA, 2818 bp, Zea Mays
cagcgccagcgcggcagagagtcgagaccttctagctaggccgctgccacgtcaaaactagctcctccagacaaccaatcagctagccgaagccggtcgattagcatgcagcagcgctagtagacgtcgtctccgggtctccactctccacacagaaacccatacaaaatccgcatccagaatcaccggagatacgagtccgcgcgtacgttgcagttgaattgtgaagagaggctgtgcgcagtgctgctgctgcttcttcttcttcgacgcatgcacgcacatggatggtgctgctgagtgctgacctccggccgtacgtgatcttcgatctccacacggcggcaagcgatcgagaggcgtggttcccgtggcgtcaaccgacacctagcagctgctagctcatctgcttgatctctagctgagactccgagcaaaatgtgtatgtcgcggaccagcaataaatacccgtgcctggaggagattacatcaattgatcagcgtggcaggcatcaaaaacagtcgaggccgctgcgaggcagcagccaggaacaacaagctaggccccctcacgcagaccgcacgaccgagcgcgcggcattgaccgacccatcgccgccgccgccgcctcgatcgaccatgacgcttgcgagcacggacaaggtggtgctgggatgcatcgcgttcagcatcttctgggtgctggccgtcttcccctcggtgccgttcatgccggtgggccgcaccgcgggctcgctcctgggcgccatgctcatggtgctcttccgcgtgatgaccccggaggaggcctacaaggccatcgacctcccgatcctgggcctgctcttcggcaccatggtggtcagcatcttcctggagcgcgccgacatgttcaagtacctcggcagcgcgctggcgtggcggagccggggcagcaaggacctgctgttccgcgtctgcctcgtgtccgccgtggccagcgcgctcttcaccaacgacacctgctgcgtggtgctcaccgagttcatcctcaagctggcgcggcagaacaacctgcccccgcagccgttcctgctggccctcgcctccagctccaacatcggctcctccgccacgcccatcggcaacccgcagaacctcgtcatcgccgtgcagagcggcatcaccttcggccagttcctcgtcggcgtcttcccggccatgatcgtcggcgtcgccgccaacacctgcatcctgctctgctacttctggatgtcgcgcgcctcgtccgtcaacgggggcggcgccgacgccgactgcgtcggcgagctcatccgccggagcgatagcctcagccgggccgacactacgctaggcatgagcatgaggagccggagctacaactcggagggcggcgacatccaggtcgccatcaggtccatgcgcgcgtccagcatgtcgcaggagatggtggaggtgtccaccgtctgcgacaggcgcgacgacggcggtgccgggcccagaaaggtcaccaggaccaccagccaccagcgcagcgtcatcatcgaggacgcgcccgaggctgacgccgccgacgacgacgacgatggccacaagggcaaggacggtgacagcgtcaccaacaaggagaagaggtggaaggtgctcgtgtggaagactgccgtgtatctcaccacccttgggatgctggccgcgctcctcatggggctcaacatgtcctggtccgccatcactgctgctcttgtccttctcgcgcttgatttcactgacgcacaggcgtgcctggagaaggtgtcatactctttgctgatcttcttctgcggcatgttcataacggtcgacggcttcaacaggaccggcatacccaatgcgctctgggagctggtcgaaccgcactcgagaatcgacagcgccaaaggcacggcgcttctcgcagtcgtgatcctagtcctttcaaatgtggcctcaaacgttccaactgttcttctgctgggcacaagggtggcagcgtcagcaggcacaatctccccagagtcagagaagaaagcctggctcatactagcatgggtgagcacggtggccggcaacctgaccctcttgggctcggcggcgaacctgatcgtctgcgagcaggcgcggcgggcacagttcttcgggtacaacctcaccttctggagccacctccgcttcggcttgccgtcgacgatcatcatcacggcgatcggcctgctcatcgtcgccagttactgaaccccacacaagctagggtctcggcctcgcacaaacggcggggtgtgtagccagatggcaggcagaacgctgcagaaaacagcatgcagcactgcctgacatcgaaggagatgttgtactgattggcctttgtttgtacgttgtaacagtttttatgtcgttcgtgtaagtctgtacgtttcgcgcaaccgatgccgcaaggcgccgggttgcccatctgctaaggcaaataatgcgcaagactagtagatggcatggagtatagaaggccggcaccactgttctaggaaggcaaaaacttgctctagctagttcaggtaggagagccggcgaaaatgtatggtgtgcttctcgatttggtaatgtcaagggacttgtccttatgtttggagcaaagaaacatggttgtacgattgtgccactagtacacagaagctctataataacggttctagagctatttgtggtgacgtttttcagtaccgtcagtgctaggggttagtggaaatcgatatttccaatggtggctattttggatctgcaagtgaaaatgctattttgactggca

SEQ ID NO: 4211 - DNA, 2248 bp, Zea Mays
cgacgtttttggtatgttttttgtcgccgtcaccccgtgccggggccggggccggggctgcctgggcaccggtcggtaggcagatcggggtgacggccgtgacgtgacgcgcgccgccccgccacctcaagtcggcgattgtaaattctgaaaaaaatgcttggcctcccacccgagcgggctccgctcggacctcggagcacccaccacatcactgtacttttttatatttctcctccacgattgcgttgcgtccccgccgctgctccctccgcgctccgctcttcctcccgtcctccgctgcacccctaccttgcctgcctgcctgccctccaagcgacgttccttgtgtccccgactccccgtcgccttcctcgggctgggtcccgactcccgagatatagttgcggcggggtttccttcttcgaaaaagttctgaactagaggagccgcgcggcgcgggcgggcagaaaaccggagaccctcgccggcgcaggtgttaattctgtaatcttgtcaacttcagttaatggttaatatgagggacattgagacatcaaacgacggacaattggacgagcccttagggcgagtgtccataatctcttatggttctgggcatatgctcaatgacatcacatcaagttgttggtttacctatttgctggtgttcttgacggatgtgggactcagtccaggcgatgctgctattgtcatgctttctggacaattggcggatggcttcacaacaatctttgttggggaattggtctatggtaaactgcatgtcatcaaatccaactagccgggtttcacttgtaagctgtcgtaatgccttcacgatggttgcaaatcttagcctgtatggcattgctttgttgatatttactatattgcagtcagtgaacgtaatgtttcagtatcgttggattgcttatgtgtccatttccattggatcttgctttgttgtcatcttcttggttggaaccaaagagccaggatcaattcggcactgtgtagataagagtctttccagaatttcatggacctactggttcaagaaagtattgtactaccaagttgctctagtctatactctgactagactggtgactaatgtttcacaggcatttcttgctttctatgtaatcaatgatttagaaatgagtcaatcctccaaagcattggtacctgctattatctacatctgcagtttgatagtatctgtaatattacaggagactagatggtcaagttggcgtcttaagctttacttttcagctggagcagtgctttggatattgtcaggtcttggaattgtttttctaccgagcagaatgcacaacctcatgtatgctatttcaatcataataggagctgcgaatgcacttatgacagtgacaagtattagcatggaaggtgttttagtaggagaagatctaaatggttgtgcttttgtgtatggctcattaagttttgttgacaaagtttcatgtggagtagttctgtatattcttgagtcctatcaaggaagtacagagatcagatcaaatttaggaacagcatttggctattcaattacaagacttggcttgggcttagttccagctgtctgttcgctgctttcatcaatagtggcttataccatggacctccctgaccctgatactcggcggagacctttggtggagccccttctagtataacttcactggtgacctgttacagtttcatcctgaacatttacattaattgctcgatagaatgacactgctgctggagcctgaagatactactgacattataggcaaaggagcaatcgggtacctctggtcaattctctttgacttcatatgtatagtctgaataaattgtggtggaaaacatgtactcagaaacgttgagtagggattagaatttataagtagcataggggcaagaagattagtattgatcatactgcgcttacgagccattctgcaatccaatgtaaatataacttaagcttcattgttcagtacaacgcattgcctgtacggtactacctccattctcaaatatttactacctccattctcaaattagtaaaatgcaatagagaagcatgtagatactttcagttttcaagcaactaatgcaaaaccagagaaacattaccagctctaggcaataaaaaccatggatttaggtgatcattgtaaatttaatgctgatgctttattagatctgacccaaaaagtacaaatga

SEQ ID NO: 4212 - DNA, 2368 bp, Zea Mays
ccctacttcttcctggcaaaaaaaaaaaaatcacaatatctgttgagtttcataatctggaaaacaagaaggcatgaaatatattttttcggtccataagaacttgtcagtcaaactatttctctggttgatggccctgtgagattattttaattcttttccaagatcttatttattctcgtctttttctagatatatccatgggtcttatatactttgtgatcttcagggtgcacctgagactatccaagagagattagttgatttacctgctgcatatgtggagacatataagaaatacacacggcaaggttctcgggtcttggctcttgcatacaaattgcttcctgagatgcctgttagcgaagctagaagtttggaaagggatcaagtagagagcgacctaacgtttgctggctttgcggtcttcaactgccctataaggggtgactctggtgctgttttacaagaactcggacaatcttcccatgacttggtcatgatcaccggagaccaagcgttgactgcctgtcatgttgctagccaagtacatatatcttccaaacctgttttgatcttgacacggataaagactggcggttttgagtgggtttcgccagatgaaactgatagagctccatatagtgctgtggaggttgcagtgttatcagaatctcatgacctttgtattaatggggactgttttgaaatgctacaaagtactgaggctgttctccaggttatcccttatgtgaaggttttttcacgtgttgctccagaacaaaaagaacttgtactaactacattcaaaagtgttgggagggtgacactgatgtgtggagatggaaccaatgatgttggtgcactgaagcaggcacatgttggcattgctcttttgaatgctgaaccagttcagaaagtcaactcaaaatccaaagctgaaaataaatctgggaaattgaaaaaacagaagcctggtaatgaagcatcatcacgagtgactccggcaaccaatagttctgctaaagcatcgagcagccgccccttgactgctgctgagagacagcaagaaaagttgcagaaattgttggatgaaatgaatgatgaaagtgatggccgctcagcaccaattgttaagcttggtgatgcttctatggcttcacctttcacagcaaagcatgcctctgttgcccctactcttgacatcatccgtcaggggagaagcaccctagtcactacacttcaaatgttcaagattcttgggctcaattgccttgcaacggcttatgttctcagtgtcatgtacctggatggtgtcaaactgggcgatgttcaggctacaattagtggtgtctttactgcagccttcttcctcttcatctcccatgcccggccactccaaacgctgtctgcagagcggccgcaccctaacatattctgtgcatacgttctgctctccattcttggccagttcgccatgcacatactcttccttatcacagctgtcaatgaagcatccaagcatatgccagaggaatgcatcgaacccgactcagacttccatccaaaccttgtgaatacagtctcgtacatggtgaacatgatgatccaggtggcaacctttgctgtaaactacatgggccacccatttaatcagagcatatcggagaacaagcccttcaagtacgcattgtatggagcggttgctttcttcacagtgatcacatcagatatgttcagggatttgaatgactacatgaagcttgagcctttgccggagggaatgcgtggcaagttgatgttgtgggctattctaatgttttgtggttgctacggatgggagtggctcctccgatgggtgttcccagggaagatgccggcgtgggagaagcgtcagaaacaggcagttgcaaacttggagaaaaagcgcgactagaatccttttttattatttgcactttattctttaccttttgctgctgcccattggttacttggcagtacatactgatcatgttttgtcatagttgcattctaatctgtagcctaggggaattttttggagtgtaggccctaaatgataggaggatacacagggtcggcactttgcatactggtcagcaggattattaaaactttcagttacaatatgaaatcttatatttagatggcaatgatatcggatgatgtacaatgcaaaatacagaagctatcttaggctttcattcttttgctgttatgatcttagtggccctttggaggtacattgtaatgtcgatcattgaaaactcgagtttctgggttgtttcgaagaagatctgtttcagtgtatcattagttgatttggtgaaagctctgcttgataact

SEQ ID NO: 4213 - DNA, 1214 bp, Zea Mays
aagaaagcggaaagcaaaggaaaaggagatgcatggtgtgggagaaaagaccaatctaggagtatatatcttcctccctgctagtgctaggccacctccctcccaacaacaagccaacaagctagcctcgcctcgcccccgctctctccgcctcagcccctcccttccctcaactcctgctagctctctctctctcacacacacactagctggagtagcaagctagctaggctcctcgcttccaagcgagaattgcggcggccctcctcgatttccatactcgttcccccaaccgaaccacaggcacacacctacgacgcggccacaccctcctccgccgatcccttctatatacgacgacgacgacgacgagaagatagacaccaagcagccggctttctcgtcatacagaccgagagaatggagctgttccctgcgcacccagacttgcagctgcagatcagccctcctcccccagccaccaagccaatggagctagggttttggaagagggctctagtcgacaccaccacctcgcctgcgactgcaacagccgtggcggcagccacgacggccaccacggccacctcccacgccttcgcctcctcggcgccgacatccgccgtgggataccaccacgcggcggtcggcgcgcaccaccatcaggtgccggtgccggtgccggcgggctcccactcccactcccacctgggcctcccgctcttgcaccacacccatcccatcctcccggcggcggagtctggcggcgtcctccgccggccggacctgggctccacgaggcccatccggggcatccccgtgtacagcacctcgcagcagccgctcccgttcctgcagagccacccgcattattgctgcgacgcgatcgccggcgcgggccacccgaggtcccccaaggccgcgctccgcctcgcgggggcgccggccaagcggggcgcgcgcgccccccggatgcggtggaccacgtcgctgcacgcgcgcttcgtccacgccgtcgagctgctcgggggccacgagagagctacacccaagtcggttcttgagctaatggacgtgaaggatctgacgttggcccatgtcaagtcgcacttgcagctaatcgcagctagcgacgagcctcgctctctactactagcttcgttcactatctcctgcctgtatgacaatgactatgactacgagcatgttttgca

SEQ ID NO: 4214 - DNA, 562 bp, Zea Mays
tcttttagtcgtttaatccaacatgaataggtatggaaagtctccatttgattatgagcttgatgagtcttctggtgaaagcttgcacagtgttattaaaaatgtacagattaaatggcctgaagaagcgggatctacataccctgattccctccgccagtttataacttggatgctgcagccacatcccgcagttcgtcctcatattgatgatatcataattcatgttgataaacttgtcatgaagtactctaattaaccgctacaccaagccgcttctccaccagaaaaaagaatcattattatgtaagtctacacgattcattagcaaaatgtgatatgtatgttccttgatagctattactgtattaaacgagaaaaggacattctgctgtagtcttcaaccattcgtggactcgccattgttcatgagtatgttatctatagatgttttttttgtatgcccgacagtgttaccgggttaataaatgatacagtacctcttttatagttataatggtgccctcattgtgttgttcatggtgctatacgatcctgcata

SEQ ID NO: 4215 - DNA, 2174 bp, Zea Mays
cgtacgtgcgccggagtaaaggcagctccctgacaaactcgtccgtcctcggtggccgccggctgggcgagttggaaggaggaaatcccgaacgcttgccataaatacgccaatcccgcaggcattgattgcgcgacggacacgctagcccgttaattccgtgccgcccttcgcctctttcaaattccacgccccctccattttcattccaaaccagcacgagcgcggggcgagcagtggctctggaaacgactagaatcaacggagatcagaggcgacactgctcttcccgatgcacgcgtgcttccatggcggcggtggcggcaacagcaggatcaccaagtccgtcggcttcatcgtcaagagcatgaaggccctgtccctcctaaaagtgaagacggcgggcgacggccatccgcacgcgccgcgtcgtcggcggcggcggcatcggaggcgctcccccgaggcagacgagctgcaggacaaggacgtcgcggcggcatcgtcgtccgcgtcctcgtccgccaagatcgcgccggcgcagccgcacgaagccgccgacggtgaccttcggagagaccgcctcccccaggacgaggagctgcggcggcaaggaggagctaaacacgggcactgcgacaagtgctgctcgccgttggaagacgacgacgaggaggccgccgcgggtacggcggacgcggcaggcgacggggagtgggcggcggagccggagcccggcgtgctgatgacgctgtggccgcgcggcgacggctccaactacctccgcaggatccggttcagcgaggagtacttcggcgacgcgtgggcggcgcagacctggtgggcggacaactgcgaccgcatcgtcgagctctacagcgtcgtcgtccagcccgaacacccctcgcaggacggcgacgacgatgacgacgacgacgatccggctgcgcccgtaactccgtgccagtccgaggacgacgagcaccaacggcaggcagctagtggcttggtgtgacaaggcagcaccagtaccttcatgaaccatcacgatcaatggcgcatctcggttcaaatgcttgcatgatcgttggttcctgtcctgtactgtccccatcttttcggtgatggggtgccgtttcttcgcagctgtacacatggtgaattggtgataaatacggcggcagtgtaccaacaagttttcctgtagaaaattaaacttccacatccgtgcgcacaaatttcatagaatctagtttcgctgcacttcgccgccgcattttaatttatacccaaagtatctaccttcacctcacaaatatgtgtgtctaccactttctgggtctggagatagtatggtacacacacttctatttgacatggtgttagagtgttaaagcaaccataagagacataagagactagacaaatcattttgtaaaggtaaatttggttattatcagaaaaaaacatctccaaccgactttgtaatagctcttcaaatttagtagctctctatctcttcaccttcacctttactttctaatctacttcacttgctgctattcagtttgttggtttacagagtctcggttagattagtctactttttttttttgtaaaatctaatttagagagtagctaaatcagtaagtgtcgctaaactttttggctaatgtcttagagctgctcttacatttgtaatcgagaggtgcatcgtgtgtggtttccaggatggggctggggacctggactactcggcgtcgtgctcggcgtcggcgtcgggaggctccacctccaacttctccgggccgtccagcggcagcggcagcgggtctgccaacaaggtggactctccgattctcggcctcgtcaccgaggccgacagcatcacaagaacagcccggccgcagcacagccatacggcaacgggacaataacagtgtgacactcacgaatatacttgctcgcccgtcttacaccattgtttgacagtttttacaatgcttaactttttaggtgagtggttgtttgctgggaatgtacagtatttggctcaaaattcaaaatgtttcagaagctcaatccaatgaaacaggccttgtttttttagtttccagttggttgggtctatatttcatactcctgtttaaaagtcaaacgcttgatgtgacccg

SEQ ID NO: 4216 - DNA, 1819 bp, Zea Mays
ccactgcgtcagtgacccaccaagatcgcggaaaccctagcttctcaccataactcagcctcacctagcctccacactccttcccccgccgcctccttccgagacctccttaccgccggcttcccttccctccggacctccaccgcgtgcgcgtgaaggatagcggccgcggcgatggggaaggcgtccaagggctcacggaaggggaagaaggcgtggcgcgccaacatcggcaccgacgacattgacgattttttcgagaagcagacgcgcgatgcccacgcgggcaccgccgccatcccttctcttccttcggactcgctcttctttgtcgacaagcccgccacctccgcatctacttccgccgccggcgcctcggacacaaccaccaaagccaatcccatcttctgtgccgggcaagaaggataagaagataaagaagaagaaattgcaggagacacagggagagaaaagtgttcctatggaaaatgattctgtagttaagaactttgacatctgggctgtggatggtaaaggtgattccaaggccaaaaagagatctactatatcagttattcctgctgttgaagttgagcctgcaggatgttcatttaatcccccattcgaagcgcatcaagattctcttgctcaagctgtagcagatgaaaaacgcaaagagtacatgaaagagctggggccaacacctgtaccactcatagttcctggtgaagctatagccgaagaagataaattttttcttgatgctggtgaaggagatgaagatgaagatgctgcagaaaatggagatcaggatgctgatacttccattggacaaaggaagaacacaacaaaaagagttacaagagtagaaatgaacagaagagctcgccggaaggagaggttaagagcagaagcgaaagcaaagaaaatggaaaatattttgaaagaaattgacaggtaggtgtttatgttcttggatcatcgaggttactgtaaatgtgcttaggaaaaccggagttctgtacttttgcagcttgccaaatataatggatgagatagctaaagaggacaaggaaaaggagaagaggcacaaacgtcgaactgtggttaaagaggagagacgtaaatcaggcccacctcgtctgggcagacacaaatttgagccagctcctgttcaagttctattgacagaagagattagtggctcacttagaaagctaaaggggtgttgtaatcttgcaagggatcgctacaagagcattgagaaacgtggaatacttgcaccaagcaagagaataagcaaacgtcggtagagaaggcaagttccaatctgagggatgatatggtgaagctggattgaagaggatttactagatttgagaagaccctttggatgttcactgtcggaatgttcccctctttcagtgtcttgcgaaagtacctaacgattggttctgtcgttgtgggctcgttgttgacgctagtttcataggatctgggatgcactcatatacctgggctggtcttgatgcatgatggcgtatcgcttggtatgtatgttatccacacatgcgtattccaatccaaccccaataaaaattcggcaaaaaaaaaaacaaacgaataggaaagtcgcgtcgattcctagctattgtgtttatccctgtaatataatacatacgggaagtttattggaaaactcactatcattcaaataaacgtgaatgcagattcctaaactctatagcgtgcagaccctttaatcttcttcacaaatccagctagattatccaagaatctaatttcacacaaaaaaaaa

SEQ ID NO: 4217 - DNA, 2881 bp, Zea Mays
aaactgctggaatatacttacaccgggaagaaggcgaaggccgtcgcgctctcggcggcggcggcggcggcggcagcggcgatgcttgcgttcgagcagcaggtgttggcggatctggtggaagatccgaacggaggtctggtggtgctctcctcgggtctccctctcgcttccctagccgctaccctcctcctccatctccaccagacccccggcaacgcggctggaggaggatgtctcctcgtcctctccgccaccgataccctcaaggcccggatccggcgccgcctccaagacaagctgcaggttcacgacgtgccccctgacctcgccgcgcagcagcgcgccaccctttacgcctctggcgctgctctcttcctctctccccgcgccctcgccgccgacctcctcacctcccgcctcctcccctcccgcgtccaagccctactcctcctctccgcccaccgctccaccgatacctcctccgatgccttcatctgccgcctcctccgtcaacgcaatcttctccccgtttacgccttctccgattgcccccatgccatggtcgccggtttctccaaggccgagcgtaccatgaagagcctctacgtccgccgtctccacctctggccccgcttccacgttctcgccgcagccgacctggaacgcgccccgcctgacgtcgtagacgtgcgcgttcccatgacgccgcccatgaggggtatccaggctgctgtcctcgctaccatggacgcttgtctcaaggaacttaggcgcaccaacaaggtggatgttgaggacctcaccgtcgacaagggcctcttcaagtccttcgatgagatcgtccggaggcagctcgaccccatctggcacactcttgggaagaagacaaagcagcttgtggctgacctcaggacgctacgcaagctgcttgattacctcgtcaggtatgacgccgttacatacttgaagtaccttgacacattgagagtatcagaaggtgtcagatcagtttggatacttgctgactcaagccataggatatttgagcttgcaaaaaggcgcgtttaccaggcagtgagaacagatggtgttaatgttagcatagataataagggcacaccaacaaagaagaggaaagtggcacataattctaccaagaaaggaaaagtaactggtagctgctcttggccccttcatttgcaggaattgttgcaagagatagcagaacaacggatgaagagcagtgccgggaatgtgcatgatgaggacaaaaatgatgaaagtggcatagttttggtatcatgtaaagatgaacgcacatgcttgcagctgcaggaatgcatattaaaaggcccctgtcaggttatgcgagaagagtgggagaagtatctgattggaaaagctgagctgcatggattgaataaggacaagagaaaatctgagcaaccaaaaggtgttggtgtcctggatggtgaagttcaaatgggatctagtgagagtgtgtgtccagttagcattagcaaactcgaaactaatgccttacttgccgctgcctctgaattaagaaatatatcaaatgaagcagatgtcaagagtagctcaaatagcagctgcagcaaggctgggggagcaaaggggaaaccaaagaaaaccacttcaaagagacaaggcagcaatcgaaaaaataaaagtaaggagggaaatgacaatagccaaggtactggtctggattctgaaggtcaatcaggaaaagcagatgtacaggctgagattgttgcttctaagatgtccgcatatgatgcttccatgtcagcctctacttctaatgttaaatttaaccattcatctgctttcggaaacttggcaaacgccaagccactacctcctgtgcagtttcatgctctagacagtgaccaccaggttcttgatgtatggaagccatctgtcattattgtttatcatccagatattacctttgtaagagaaattgaagtatacaaggcagaaaactcatcaaggaagttaaaagtttacttccttttttatgaagattccactgaggtgcaaaaatatgagtccagcattcgacgggaaaatgaagcatttgaatctttgatcagacagaagtccctgatgatgatacctgttgatcaggatggccgttgcattggaccaactgttgcaaatgaaccagagcctcctttatgtcagaactcaattacaagaaaggcaggtggtaaaaaggcgcccgagaaggagatgcaggttattgtagacatgagagagttcatgagcagccttccgaatgtattacatcaaaaaggttgagacaatggcacgttactacaagatcccggttctcctcatcgagttctcacaagataagagcttttcctttcagtctgcaaatgagattggtgatgatgtctctccgaccaacattatctcgaagctttctctgctagtgctgcattttcctcggcttcgcataatctggtcacgcagcttgcatgctacagcagaaatatttatgtcactgaaaacaaaccaggatgaacctgatgagaaaaaagcaacaagagttggcgtgccatccgaggatggtatcgtggaggatgatgtgaggtctgaaaattacaacacatcagccattgagttcttaagaaggcttcctggggtgacggattctaactaccgagcaatcatggatggatgcaatagcttggccgagctggccctgcttccagtggaaaggttggcggagctaatgggtggtcagaaagctgcgcggacgctcaaggagtttctcgatgccaagtgcccaaccatgttgtagccagagtgacgctctagcaggagtcaagggtctctcctattt

SEQ ID NO: 4218 - DNA, 4962 bp, Zea Mays
aaactgctggaatatacttacaccgggaagaaggcgaaggccgtcgcgctctcggcggcggcggcggcggcggcagcggcgatgcttgcgttcgagcagcaggtgttggcggatctggtggaagatccgaacggaggaattgttgcaagagatagcagaacaacggatgaagagcagtgccgggaatgtgcatgatgaggacaaaaatgatgaaagtggcatagttttggtatcatgtaaagatgaacgcacatgcttgcagctgcaggaatgcatattaaaaggcccctgtcaggttatgcgagaagagtgggagaagtatctgattggaaaagctgagctgcatggattgaataaggacaagagaaaatctgagcaaccaaaaggtgttggtgtcctggatggtgaagttcaaatgggatctagtgagagtgtgtgtccagttagcattagcaaactcgaaactaatgccttacttgccgctgcctctgaattaagaaatatatcaaatgaagcagatgtcaagagtagctcaaatagcagctgcagcaaggctgggggagcaaaggggaaaccaaagaaaaccacttcaaagagacaaggcagcaatcgaaaaaataaaagtaaggagggaaatgacaatagccaaggtactggtctggattctgaaggtcaatcaggaaaagcagatgtacaggctgagattgttgcttctaagatgtccgcatatgatgcttccatgtcagcctctacttctaatgttaaatttaaccattcatctgctttcggaaacttggcaaacgccaagccactacctcctgtgcagtttcatgctctagacagtgaccaccaggttcttgatgtatggaagccatctgtcattattgtttatcatccagatattacctttgtaagagaaattgaagtatacaaggcagaaaactcatcaaggaagttaaaagtttacttccttttttatgaagattccactgaggtgcaaaaatatgagtccagcattcgacgggaaaatgaagcatttgaatctttgatcagacagaagtccctgatgatgatacctgttgatcaggatggccgttgcattggaccaactgttgcaaatgaaccagagcctcctttatgtcagaactcaattacaagaaaggcaggtggtaaaaaggcgcccgagaaggagatgcaggttattgtagacatgagagagttcatgagcagccttccgaatgtattacatcaaaaaggttgagacaatggcacgttactacaagatcccggttctcctcatcgagttctcacaagataagagcttttcctttcagtctgcaaatgagattggtgatgatgtctctccgaccaacattatctcgaagctttctctgctagtgctgcattttcctcggcttcgcataatctggtcacgcagcttgcatgctacagcagaaatatttatgtcactgaaaacaaaccaggatgaacctgatgagaaaaaagcaacaagagttggcgtgccatccgaggatggtatcgtggaggatgatgtgaggtctgaaaattacaacacatcagccattgagttcttaagaaggcttcctggggtgacggattctaactaccgagcaatcatggatggatgcaatagcttggccgagctggccctgcttccagtggaaagcaaacatgcagaaaatgagcagcagattatgggctgggcaggctctaacccagcccaggaactccccctctcccccacgttcttctttgttgttgttgggcaagtagtgcggctgtttgagtctacgctacagaatgactatctaaatcacacctcctgtggagcctttcatgctcagatggaatcttgggaaagaattttgtactggatggcagttttgtgggagcgtgggttcagtcatgagaatcctcaagtgagatgcctggttatgcaatcctttttggatattgcatgggaacgctacaaggattgcactcagataattccaaggggttttgtgcttggtcctctgatacgtggtttgaatgatgtggttcatcataaggattttgttatgaatagacagcttgttaacttgaagtctagtgcagtttgtgaacaggttataaaagttgcaacatcactgataaatgccactgaaattccacttaacccgcttctgcatttcattgccacaattcctcgagagttctctgattatattggaccattgagagtagtagttcaaaaatggtttgttcagaaggaagaatgttctcctggtgacactttgttgagtaagctgattgatttctctgccaccttcgtaagtcaaaaacggaatgaaggttcgaatgtttttgatgacgaggatgtggatgcatgggaagctgaagcaaggtgggctagaacccttcttgtaacctcggaggaggaacatttgaaacgaatcttcaggtttttggaggcatatggctacaagctctctgagcaatgtcccagtggagatttcatacccataaaaaattttatcattgttttaagcttcattgaggaacttgaggaaaaaaaaatcccacgtggtcagtcaaaggttagtattaaacgagaggtccagattggtcttgtgcttgagttcatatgctggctgttgagaagctgcatgcttgcaacaccacaccacataaatttggagggcctgcggacgccccgatgcatatcactcacatgcattcttgctcctgctaggaggatcggaaccagcatgtctgaacgatgcatcttctccttctccactctggcttcgccggcggcagatggaaacaacagccggcgaggaggccgccaccgtggcgattccatcgtcacccgctcttcggcggcggccaacacgctgccgctgctccgcaatgacgacttcgacctccgggagggcctgacggacgtacgaaatgttctccgtcaacgtcagaagagtggctgcagcagcagggacatgatggtcaccgtcgacaacctcaagcgcctctgcatcgaccactacttccaggaagagatcgagcgcgccatgggtgcctgctgcatgggtctcatccacagcgacgatctcttcgacgcgacgcttgccttcaggctcctcagagaggccggccatggcgtttcagcaggtcatcgatccaacacactaattattaaacacaaatccatccatgcatgatgatgtctacggtcgatcgacgacgactgaacatgcatggctgcacggcactgcacataccagcagatgatgttttacggaggttcactgacgacgacgacagcggcggcgagttcaggctcgatctcagcaaggacatcagagggctgctgagcctgcacgacatgtctcacctggacatgggaggggaggagttgctctgcaaggcaagagtgttctcgcgccaccacctcgcttctgccgtcaggtacctggagccaagccttggcgagtacgtgagacagtcgcttgaccacccctaccacctgagcctcacgcagtacaaggctcggcaccacctcgcctacctccagagcctgcccgtcagagacaccgcgctcgagagactagtggctgcagagttccagctcaacagatcgctgcatcagaaagaaatgcaggccattaaaagatggtggatggagctaggattggttcaagaaatacctgtggtgagggaccaggtgctgaaatggtacatgtggtccatgacagcgctccaaggacgttccttctccagacaccgggttcagatcaccaagatcatcgcgctcgtctatgtcgtcgacgacatatttgaccttgttgccacactagatgagctctccctctttgcagaggcagtcaaaatgtggaacagcacggctgcagagtcactccctagctacatgagatcatgctacaaggctctttacaccgtcacaaatgagatagcggatacggccgaaaaggagcatggattgaaccatgttaatcatcttagaaaagcatgggcagcgttgtttgatggatttatggtcgaggcaagatggctagcaactgataaggttcctactgcagaggattacctgacgaatggtgttgtcacatcaggagtgccgctcacatttgtacacatattcatcatgctagggtgtgacgatgatcaaagtacccaagctctcgttgaccacatgccctctgtcatctcttgcccagccaagatcctccggctttgggatgacatgggcagtgcagaggatgaagctcaggaaggattcgatggttcctatagggatttctacctcatggagaaccctagatgcagccgtagcgatgcggaagcacatatgcgtagcttgatcgcaagggagtgggaggagctcaatagggagtgcttatgcaagaggaccttctcctctagcttcacacacgtctgcttgaacgccgcgcgaatgatcagtgtcatgtactcatacaacaaggaacaaaggcttcttgtccttgaggactatgcaaggatgttgatactttgaagctttgctccatggacatacatgtgagacaacgtgcagggatggatcttgccatcactactgccgaggacaaggttagaggtaggtgtggcatccatcttgaatctatggtggaaaagacacatctgcctttgatctgcaacggtccaaggtcgccaccacaatgatccatatctaccaatgtaataataatgtacgatagcactatattttttgaaaaaaatgtaatattgaaatatgcaacacaagtaagagctgtgtataagtccccacaaatatgacacatggaaaggttaccatgcatgatgtctcacagctaccacatcagtccaatatagagacaaaggtgtgggtgctaatttagacactataagggttagtttggaagcaaaggaatataaaac

SEQ ID NO: 4219 - DNA, 5209 bp, Zea Mays
aaactgctggaatatacttacaccgggaagaaggcgaaggccgtcgcgctctcggcggcggcggcggcggcggcagcggcgatgcttgcgttcgagcagcaggtgttggcggatctggtggaagatccgaacggaggtctggtggtgctctcctcgggtctccctctcgcttccctagccgctaccctcctcctccatctccaccagacccccggcaacgcggctggaggaggatgtctcctcgtcctctccgccaccgataccctcaaggcccggatccggcgccgcctccaagacaagctgcaggttcacgacgtgccccctgacctcgccgcgcagcagcgcgccaccctttacgcctctggcgctgctctcttcctctctccccgcgccctcgccgccgacctcctcacctcccgcctcctcccctcccgcgtccaagccctactcctcctctccgcccaccgctccaccgatacctcctccgatgccttcatctgccgcctcctccgtcaacgcaatcttctccccgtttacgccttctccgattgcccccatgccatggtcgccggtttctccaaggccgagcgtaccatgaagagcctctacgtccgccgtctccacctctggccccgcttccacgttctcgccgcagccgacctggaacgcgccccgcctgacgtcgtagacgtgcgcgttcccatgacgccgcccatgaggggtatccaggctgctgtcctcgctaccatggacgcttgtctcaaggaacttaggcgcaccaacaaggtggatgttgaggacctcaccgtcgacaagggcctcttcaagtccttcgatgagatcgtccggaggcagctcgaccccatctggcacactcttgggaagaagacaaagcagcttgtggctgacctcaggacgctacgcaagctgcttgattacctcgtcaggtatgacgccgttacatacttgaagtaccttgacacattgagagtatcagaaggtgtcagatcagtttggatacttgctgactcaagccataggatatttgagcttgcaaaaaggcgcgtttaccaggcagtgagaacagatggtgttaatgttagcatagataataagggcacaccaacaaagaagaggaaagtggcacataattctaccaagaaaggaaaagtaactgaaaatgaagattccactgtaggtcccaacactcagaaggctaatactgatgtgggcattgtattggaagaggttttggaggaggcaccgaaatggaaagtgttatgggaattgttgcaagagatagcagaacaacggatgaagagcagtgccgggaatgtgcatgatgaggacaaaaatgatgaaagtggcatagttttggtatcatgtaaagatgaacgcacatgcttgcagctgcaggaatgcatattaaaaggcccctgtcaggatggccgttgcattggaccaactgttgcaaatgaaccagagcctcctttatgtcagaactcaattacaagaaaggcaggtggtaaaaaggcgcccgagaaggagatgcaggttattgtagacatgagagagttcatgagcagccttccgaatgtattacatcaaaaaggttgagacaatggcacgttactacaagatcccggttctcctcatcgagttctcacaagataagagcttttcctttcagtctgcaaatgagattggtgatgatgtctctccgaccaacattatctcgaagctttctctgctagtgctgcattttcctcggcttcgcataatctggtcacgcagcttgcatgctacagcagaaatatttatgtcactgaaaacaaaccaggatgaacctgatgagaaaaaagcaacaagagttggcgtgccatccgaggatggtatcgtggaggatgatgtgaggtctgaaaattacaacacatcagccattgagttcttaagaaggcttcctggggtgacggattctaactaccgagcaatcatggatggatgcaatagcttggccgagctggccctgcttccagtggaaagcaaacatgcagaaaatgagcagcagattatgggctgggcaggctctaacccagcccaggaactccccctctcccccacgttcttctttgttgttgttgggcaagtagtgcggctgtttgagtctacgctacagaatgactatctaaatcacacctcctgtggagcctttcatgctcagatggaatcttgggaaagaattttgtactggatggcagttttgtgggagcgtgggttcagtcatgagaatcctcaagtgagatgcctggttatgcaatcctttttggatattgcatgggaacgctacaaggattgcactcagataattccaaggggttttgtgcttggtcctctgatacgtggtttgaatgatgtggttcatcataaggattttgttatgaatagacagcttgttaacttgaagtctagtgcagtttgtgaacaggttataaaagttgcaacatcactgataaatgccactgaaattccacttaacccgcttctgcatttcattgccacaattcctcgagagttctctgattatattggaccattgagagtagtagttcaaaaatggtttgttcagaaggaagaatgttctcctggtgacactttgttgagtaagctgattgatttctctgccaccttcgtaagtcaaaaacggaatgaaggttcgaatgtttttgatgacgaggatgtggatgcatgggaagctgaagcaaggtgggctagaacccttcttgtaacctcggaggaggaacatttgaaacgaatcttcaggtttttggaggcatatggctacaagctctctgagcaatgtcccagtggagatttcatacccataaaaaattttatcattgttttaagcttcattgaggaacttgaggaaaaaaaaatcccacgtggtcagtcaaaggttagtattaaacgagaggtccagattggtcttgtgcttgagttcatatgctggctgttgagaagctgcatgcttgcaacaccacaccacataaatttggagggcctgcggacgccccgatgcatatcactcacatgcattcttgctcctgctaggaggatcggaaccagcatgtctgaacgatgcatcttctccttctccactctggcttcgccggcggcagatggaaacaacagccggcgaggaggccgccaccgtggcgattccatcgtcacccgctcttcggcggcggccaacacgctgccgctgctccgcaatgacgacttcgacctccgggagggcctgacggacgtacgaaatgttctccgtcaacgtcagaagagtggctgcagcagcagggacatgatggtcaccgtcgacaacctcaagcgcctctgcatcgaccactacttccaggaagagatcgagcgcgccatgggtgcctgctgcatgggtctcatccacagcgacgatctcttcgacgcgacgcttgccttcaggctcctcagagaggccggccatggcgtttcagcagatgatgttttacggaggttcactgacgacgacgacagcggcggcgagttcaggctcgatctcagcaaggacatcagagggctgctgagcctgcacgacatgtctcacctggacatgggaggggaggagttgctctgcaaggcaagagtgttctcgcgccaccacctcgcttctgccgtcaggtacctggagccaagccttggcgagtacgtgagacagtcgcttgaccacccctaccacctgagcctcacgcagtacaaggctcggcaccacctcgcctacctccagagcctgcccgtcagagacaccgcgctcgagagactagtggctgcagagttccagctcaacagatcgctgcatcagaaagaaatgcaggccattaaaagatggtggatggagctaggattggttcaagaaatacctgtggtgagggaccaggtgctgaaatggtacatgtggtccatgacagcgctccaaggacgttccttctccagacaccgggttcagatcaccaagatcatcgcgctcgtctatgtcgtcgacgacatatttgaccttgttgccacactagatgagctctccctctttgcagaggcagtcaaaatgtggaacagcacggctgcagagtcactccctagctacatgagatcatgctacaaggctctttacaccgtcacaaatgagatagcggatacggccgaaaaggagcatggattgaaccatgttaatcatcttagaaaagcagtatgattgggcagcgttgtttgatggatttatggtcgaggcaagatggctagcaactgataaggttcctactgcagaggattacctgacgaatggtgttgtcacatcaggagtgccgctcacatttgtacacatattcatcatgctagggtgtgacgatgatcaaagtacccaagctctcgttgaccacatgccctctgtcatctcttgcccagccaagatcctccggctttgggatgacatgggcagtgcagaggatgaagctcaggaaggattcgatggttcctatagggatttctacctcatggagaaccctagatgcagccgtagcgatgcggaagcacatatgcgtagcttgatcgcaagggagtgggaggagctcaatagggagtgcttatgcaagaggaccttctcctctagcttcacacacgtctgcttgaacgccgcgcgaatgatcagtgtcatgtactcatacaacaaggaacaaaggcttcttgtccttgaggactatgcaaggatgttgatactttgaagctttgctccatggacatacatgtgagacaacgtgcagggatggatcttgccatcactactgccgaggacaaggttagaggtaggtgtggcatccatcttgaatctatggtggaaaagacacatctgcctttgatctgcaacggtccaaggtcgccaccacaatgatccatatctaccaatgtaataataatgtacgatagcactatattttttgaaaaaaatgtaatattgaaatatgcaacacaagtaagagctgtgtataagtccccacaaatatgacacatggaaaggttaccatgcatgatgtctcacagctaccacatcagtccaatatagagacaaaggtgtgggtgctaatttagacactataagggttagtttggaagcaaaggaatataaaac

SEQ ID NO: 4220 - DNA, 3073 bp, Zea Mays
caagcgcgcacggcacgaacacggatccttccactgccactgccactgccactgccacgcgggacccaaccagccagcgaacgcctcctaggccacgtccgcgcggccgaacaaccactccggcacgcatccaccggcacgcggggccacattgacgggcacgcacgcgcaggccaggcaggcagaggccacaggcggtggccttgtggcgcggcgcaggagcaggccttgccgcgccggcgctgccttgctcgcgaagacgccagttcccaactatttgcggagccgagagccggaggcggaggcgttaagcgtaaggcagcgagcataaagcgccctggcgcccgcccgcccgccgcagccgcaccaaagcctagccaccctcctctgccctcgagtccacgtctcgtctcctcgctccactcgccagtcgccacccaagccggagcgaacccgctgcccgaatagagtaatccgaggagccagccaaatggtggtggccgcgtgagtgtagggtccgggggatatagagagagagagactaggggccggccgcgatgcgggcgtgggagatgcacccgctctgctgcctcgccggtgagtggccggcctcgggcggcgggctcgcgcccggcgaccgctccccgccggcggaggacgcgggggcggcgccggcggtggcgggggtcctgtacaagtggaccaacatcggcaaggggtggcgcccgcgctggttcgcgatccgcggcggcgtgctcgcctactccaagatccggcgccgcgtcgcggcggagccgcgtcccgaggccgcgggcggcgtccggctgatcggggtggcgcgcggcgccgcgggcgccgctgagcgccccatcggattcgtgcctctcaagatatcatcatttagtgaaagtaaatcagatgataaacggttttatataattactccgaccaaaacacttcaactgaggactggttgtgctaatgaccgggcgacttggattgaagcgcttgtcactgcaagaagcgaatattcttttaatggggatttatcaggtgatcagaatgatgcatcattttccacagaaaagctcagaaatcgcttgaatgctgaaggcgttggcgaggccgttattaaagactgtgagcagattattcattcagaattttcgcagtaccaaacacagatgaagcaacgttgtgaagagtatttaagctttattggcactcttccacaggatgttgaggtagttaattcagtagattcaactgtccctgagaagccacggctagagctgttcaagcatgactgctccagctctggaaaataatatagcaacacagaatcttctgatgatgttggcaagcaagagattagtgaactatcagacggagatgaatttcatttctatgacacaaggcaaagtttcagtgaatttgcttctagtcctgctgacccgagaaagggatgtttaaacaacggaaatgaagatcataaatctgttgaatcattgacggttgacaaggctgagaaatatatgctatcacattcaaaaaggcgcttacagttgcctgaaccaatagaaaaggagaaaggagttagcctttggtcaatgatcaaagacaatgttggaaaggatctaacaagagtttgtcttcctgtttactttaatgagcctttatcttctctccagaagtgctttgaagagttggagtattcttatttgttggatcgtgcatatgaatgtggtttaagggggaatggtctgatgagaattctttatgttgctgcatttgcggtctctggatatgcatccacagattcccggccttgcaaacctttcaatccattgcttggggaaacctatgaagctgattaccctgaaaaggggatccgttttttctctgaaaaggtcagtcatcatcctatggtcatggcatgtcactgtgaggggaaaggttggaaattttggggagacagcaatctgaagagcaaattctggggacaatccattcaattggatcctaatggtgtgctaactttagagtttgatgatggagaaattttccaatggagcaaggttacaacaacaattaacaaccttatccttggtcgagtatattgccatcaccatggcacaatgaacataagtgggaatagacgatattcatgcaagctgacttttaaggagcagtctttccttgatcggaatcctcgccaggagtcgtcaaggatgctggtggaagcaaggttgcaacattgacggggaagtgggatgaaagtgtgcattgtgtcatcaacaatgatgcctctaaggtgaactctcatggtccacatcagagttctggttccactttgctatgggagaaaaatgagcctccagtcaatcctacccgctacaacttgtccgcatttgcaataacactaaatgagttaacaccagagctcgaggagaagctgccaccgacggattcaaggctgagaccagatcaacggcacctggagaatggggagtacgagaaggccaatgctgaaaaactgcgcctcgagacacagcaacggatggcaaggaagatgcaggagagtggctggaaaccaagatggttccaaagggacagcgaggatggaacgtaccgctacgtcggaggttactgggaggcaagggagcagagaacatgggtcggctgcaatgacatatttggtaacttgtctagcagccagaagctcccaccatccgctctctacacgagctgaagtatataggggtgggtaaggccggaagggcatgttcagtagttgttgacatcgcattaaccagagggtttttctctcgtttctgttgtgttaagctgtgagctaacatgtttttcttgtcaattgtcacattgaagccaaggacatccaagcataacccaaccttttgtcgatactaggatacttatgagagatcttgtggacattattgcgaaaagaattgtcgatgatactattttcttctttgcattccgcaaggacgtgtctgcatttggcccttatgttgtcgtgcttttgtgtgtttatctcgcattggtgatg

SEQ ID NO: 4221 - DNA, 1875 bp, Zea Mays
aaaccccccccccccccaagtggcctcggccttcctcacacagtccgatccagcccaaccgaacccaaaagtctagcatatgggaacctgagccctcaaaccccgccccttggcctcccctaccgtccacgccgaacacccgccgttctcaaaactgggctcctccccttttgtgattggacttaagtgggattcatatatcaggagtttggattcttctctttcctctgctgatttgccgagtatcaatccgggtccccatttgttggtggttgaagctcgatttctccatggcgcttcgtgcagcttcatgaatccaggttctcaagtgtatttgatcatgattctataaacaaccatcttatattactaatctgtatgagtttttttacatgttggtggttcaagctgaaaaaattaacttaggacaaagctagattgtcttttacatttgtgattggaaggagtaaccgttttcagtatccagtggcagttataaacagttgttgcgcttgtgcagcttcaaatattttgggatgttgccatgttaaggtattagctttttgttgtttcagtatactggcttcctaaaggatcaatgtcggctatctctgatcagaagaaacgcaccttggaagcccttcagcaacagtatactgctgcaaaagctaagaaattgcaagatgaacaggttaagagtcagaagaagagcaattttaatacccctaagcctaaatgtgatgcaccaaggggaagcaaaggtccagaaatcactcctcgacgaacatatgcccaaccttctcataaaggtgtagcattttctagttctaattgtcaacaaaagccttccacgtcctcaggtgaagaaatcaatcctgtgtatgctgaactttcttgtgcttttcatgacactttgtccaaaggtgttgtctcggatttggatggcacagaggttgttcacaatgttatatatgacataattcagaaaggtggagatgctgggaaaattacaaagggtgccaaaaagttgaaactggaaaaagggatccttttggataattatgttcagaggggttctagattagtggattcccaagcaagatctttgttgattcattcaaagcgatcaaaaaggcacatgtctctaaaacaacataagaaatgtggttcatttgatttagatggtacattccacaagtacgacctctataagccaatgcatgagatgtggaaggactatatcagagagcttatggatctgagcccgaaaaagaaatttactgagaaccttctttcagcagatcttcatggggcccttctaatagtggcagaatgcaaagctgcttcatataaaggtgtaaacggcatcatgattcgggatactgcagagacgtttggaattatatccgaggacaaccgcttccgagttgtaccaaaagctggttcagtgttcgtacttcaagcagatcgctggaagttcacactgattggcgacaagctctcgcccagggagaagttgaaggaggatcagcgtcaacaacgtgcacaatcgctaatcagatagtttccaatgtgccagctgttctctcaaaatttttgctccacgaaatacttgcttttgtttagctgttttaccctttttagtttgcctctaacattgaaggtagataatgggtgtctgtttttgcaactattgattttattttacacagcaagatgtaactgcaacggccacgccgtcattgtttaactgtcattcatgctctccatgataaatatatagagttaataggaatgggaatgaggttgacctactaatttgtcactacagaatctgccttcagcggtccactaaaactttagtattgtacatat

SEQ ID NO: 4222 - DNA, 1886 bp, Zea Mays
caacaagtcctaaccctagccccggtagccgccaccgccaggctctacgactacggcccggccgtccaccgctcggccgtccaccggtccaccgctctacgcgacggctccatcgctcggctgctccaggctccagcgccctccaggctccagcagatcccggaagcaccgaccacggtccacggcgagtcggcgagcagacagcacaggcgcacaacagtgacggcgagcagacagcacaggcgcacagcctccgcgcatccgcggtccgcgtccggccgtgcagccgcgcagatttgccgagtatcaatccgggtccccatttgttggtggttgaagctcgatttctccatggcgcttcgtgcagcttcatgaatccaggttctcaagtgtatttgatcatgattctataaacaaccatcttatattactaatctgtatgagtttttttacatgttggtggttcaagctgaaaaaattaacttaggacaaagctagattgtcttttacatttgtgattggaaggagtaaccgttttcagtatccagtggcagttataaacagttgttgcgcttgtgcagcttcaaatattttgggatgttgccatgttaaggtattagctttttgttgtttcagtatactggcttcctaaaggatcaatgtcggctatctctgatcagaagaaacgcaccttggaagcccttcagcaacagtatactgctgcaaaagctaagaaattgcaagatgaacaggttaagagtcagaagaagagcaattttaatacccctaagcctaaatgtgatgcaccaaggggaagcaaaggtccagaaatcactcctcgacgaacatatgcccaaccttctcataaaggtgtagcattttctagttctaattgtcaacaaaagccttccacgtcctcagaaaggtggagatgctgggaaaattacaaagggtgccaaaaagttgaaactggaaaaagggatccttttggataattatgttcagaggggttctagattagtggattcccaagcaagatctttgttgattcattcaaagcgatcaaaaaggcacatgtctctaaaacaacataagaaatgtggttcatttgatttagatggtacattccacaagtacgacctctataagccaatgcatgagatgtggaaggactatatcagagagcttatggatctgagcccgaaaaagaaatttactgagaaccttctttcagcagatcttcatggggcccttctaataggtgatccatatgctggcttactttattcaactttcttttaatccaatcatgcttatatgtctttgaggtatccagtggcagaatgcaaagctgcttcatataaaggtgtaaacggcatcatgattcgggatactgcagagacgtttggaattatatccgaggacaaccgcttccgagttgtaccaaaagctggttcagtgttcgtacttcaagcagatcgctggaagttcacactgattggcgacaagctctcgcccagggagaagttgaaggaggatcagcgtcaacaacgtgcacaatcgctaatcagatagtttccaatgtgccagctgttctctcaaaatttttgctccacgaaatacttgcttttgtttagctgttttaccctttttagtttgcctctaacattgaaggtagataatgggtgtctgtttttgcaactattgattttattttacacagcaagatgtaactgcaacggccacgccgtcattgtttaactgtcattcatgctctccatgataaatatatagagttaataggaatgggaatgaggttgacctactaatttgtcactacagaatctgccttcagcggtccactaaaactttagtattgtacatat

SEQ ID NO: 4223 - DNA, 2139 bp, Zea Mays
cggccgtccaccgctctaggactacgacaacaagtcctaaccctagccccggtagccgccaccgccaggctctacgactacggcccggccgtccaccgctcggccgtccaccggtccaccgctctacgcgacggctccatcgctcggctgctccaggctccagcgccctccaggctccagcagatcccggaagcaccgaccacggtccacggcgagtcggcgagcagacagcacaggcgcacaacagtgacggcgagcagacagcacaggcgcacagcctccgcgcatccgcggtccgcgtccggccgtgcagccgcgcagtggacgggcgggcgggtaatggatacccgttggataacggatacccggcgggtacgggtacggatacagatccgtacccacgagcgtaaatgagtatgtgtatggatttggttttatctcgtgggtatgaatacgcgaaccatatatccgcgttctacccgcccgattgccacccctagctgtgcgttctccctcccgtgtccggcggccggatgttgtgtgcgtctctggtatccctcccgtgtccggtggctggcccttgttgagcgagcgccgagcagctaccggcgcctctgcctcccgcctctcgcccggtcacccgtcgtcgactcgccgtcaggcagcgtcgctccgccgcaccagtctccatcaaaacaggacagcacagcgccggcctccctcaacacttcaacaactaacacttgagcaagatttgccgagtatcaatccgggtccccatttgttggtggttgaagctcgatttctccatggcgcttcgtgcagcttcatgaatccagtatactggcttcctaaaggatcaatgtcggctatctctgatcagaagaaacgcaccttggaagcccttcagcaacagtatactgctgcaaaagctaagaaattgcaagatgaacaggttaagagtcagaagaagagcaattttaatacccctaagcctaaatgtgatgcaccaaggggaagcaaaggtccagaaatcactcctcgacgaacatatgcccaaccttctcataaaggtgtagcattttctagttctaattgtcaacaaaagccttccacgtcctcaggtgaagaaatcaatcctgtgtatgctgaactttcttgtgcttttcatgacactttgtccaaaggtgttgtctcggatttggatggcacagaggttgttcacaatgttatatatgacataattcagaaaggtggagatgctgggaaaattacaaagggtgccaaaaagttgaaactggaaaaagggatccttttggataattatgttcagaggggttctagattagtggattcccaagcaagatctttgttgattcattcaaagcgatcaaaaaggcacatgtctctaaaacaacataagaaatgtggttcatttgatttagatggtacattccacaagtacgacctctataagccaatgcatgagatgtggaaggactatatcagagagcttatggatctgagcccgaaaaagaaatttactgagaaccttctttcagcagatcttcatggggcccttctaatagtggcagaatgcaaagctgcttcatataaaggtgtaaacggcatcatgattcgggatactgcagagacgtttggaattatatccgaggacaaccgcttccgagttgtaccaaaagctggttcagtgttcgtacttcaagcagatcgctggaagttcacactgattggcgacaagctctcgcccagggagaagttgaaggaggatcagcgtcaacaacgtgcacaatcgctaatcagatagtttccaatgtgccagctgttctctcaaaatttttgctccacgaaatacttgcttttgtttagctgttttaccctttttagtttgcctctaacattgaaggtagataatgggtgtctgtttttgcaactattgattttattttacacagcaagatgtaactgcaacggccacgccgtcattgtttaactgtcattcatgctctccatgataaatatatagagttaataggaatgggaatgaggttgacctactaatttgtcactacagaatctgccttcagcggtccactaaaactttagtattgtacatat

SEQ ID NO: 4224 - DNA, 2258 bp, Zea Mays
acgactacggtacggccgtccaccgctctaggactacgacaacaagtcctaaccctagccccggtagccgccaccgccaggctctacgactacggcccggccgtccaccgctcggccgtccaccggtccaccgctctacgcgacggctccatcgctcggctgctccaggctccagcgccctccaggctccagcagatcccggaagcaccgaccacggtccacggcgagtcggcgagcagacagcacaggcgcacaacagtgacggcgagcagacagcacaggcgcacagcctccgcgcatccgcggtccgcgtccggccgtgcagccgcgcaggttagtccgttagtgcttttgcccttgcatcatttgtttgaatgttgaaattattgtttgaatgttgaaattatttctggtacaatggtattggaatgttgctgaaattttagtggacgggcgggcgggtaatggatacccgttggataacggatacccggcgggtacgggtacggatacagatccgtacccacgagcgtaaatgagtatgtgtatggatttggttttatctcgtgggtatgaatacgcgaaccatatatccgcgttctacccgcccgattgccacccctagctgtgcgttctccctcccgtgtccggcggccggatgttgtgtgcgtctctggtatccctcccgtgtccggtggctggcccttgttgagcgagcgccgagcagctaccggcgcctctgcctcccgcctctcgcccggtcacccgtcgtcgactcgccgtcaggcagcgtcgctccgccgcaccagtctccatcaaaacaggacagcacagcgccggcctccctcaacacttcaacaactaacacttgagcaagatttgccgagtatcaatccgggtccccatttgttggtggttgaagctcgatttctccatggcgcttcgtgcagcttcatgaatccagtatactggcttcctaaaggatcaatgtcggctatctctgatcagaagaaacgcaccttggaagcccttcagcaacagtatactgctgcaaaagctaagaaattgcaagatgaacaggttaagagtcagaagaagagcaattttaatacccctaagcctaaatgtgatgcaccaaggggaagcaaaggtccagaaatcactcctcgacgaacatatgcccaaccttctcataaaggtgtagcattttctagttctaattgtcaacaaaagccttccacgtcctcaggtgaagaaatcaatcctgtgtatgctgaactttcttgtgcttttcatgacactttgtccaaaggtgttgtctcggatttggatggcacagaggttgttcacaatgttatatatgacataattcagaaaggtggagatgctgggaaaattacaaagggtgccaaaaagttgaaactggaaaaagggatccttttggataattatgttcagaggggttctagattagtggattcccaagcaagatctttgttgattcattcaaagcgatcaaaaaggcacatgtctctaaaacaacataagaaatgtggttcatttgatttagatggtacattccacaagtacgacctctataagccaatgcatgagatgtggaaggactatatcagagagcttatggatctgagcccgaaaaagaaatttactgagaaccttctttcagcagatcttcatggggcccttctaatagaatgcaaagctgcttcatataaaggtgtaaacggcatcatgattcgggatactgcagagacgtttggaattatatccgaggacaaccgcttccgagttgtaccaaaagctggttcagtgttcgtacttcaagcagatcgctggaagttcacactgattggcgacaagctctcgcccagggagaagttgaaggaggatcagcgtcaacaacgtgcacaatcgctaatcagatagtttccaatgtgccagctgttctctcaaaatttttgctccacgaaatacttgcttttgtttagctgttttaccctttttagtttgcctctaacattgaaggtagataatgggtgtctgtttttgcaactattgattttattttacacagcaagatgtaactgcaacggccacgccgtcattgtttaactgtcattcatgctctccatgataaatatatagagttaataggaatgggaatgaggttgacctactaatttgtcactacagaatctgccttcagcggtccactaaaactttagtattgtacatat

SEQ ID NO: 4225 - DNA, 1876 bp, Zea Mays
tcaacctctccttcccgaagcaaccccaccgttccacccccttttctgccttcctttccccgtgcaacaaacgcaaacgcgacctaacgaatcgaatcaaattcgccgtccacctcgtcggcgtcggcgcaccggcctcgagcccagccccccgtccgagtccgatcagccaccagagatgcagcacgggagcggcgactacgcctcctccgccccctccggccactactaccagcaccagtacgcggcccccggctcgaacccctatccaatcgccacggacgccacggcgccgggggcagtgtcggggggctacgcccccgcgccgtcctactctctcggcggcggctaccctgaccagccgccctccgccccggtctactcgcaggcaccctctgccccggcctacgcttacagcgccggcggtggctcggagccgtacggggcgcgcggcacggcccctgcgcggtcgggatccgcgctgtttgatgactatgggcggtctatcagtgccccatctgatgactatgggcggtcgatcagtgccccatctggatgggaggagcagcagccgtggggcagtggcggcggtggcggaggtagtgggagctatggggtgatcgcaaaggcccttccaaaggcggaaacgcgtgaggatgcgagtggtggtgcacagaagtttcgggttaagctgctgccagagggtgctgggaactctactgacgtgctttgccagattggtctagatggaattcgcatgcttgatccgagtacaagcaggaccctgaggatttatccactcgattcactgacaagatgggaggttttggatgcaactatatttgcattctgggcgaagacatcagtggatattgaaccaaagagaattaggctgaagtcaagcagttatacttcaaatactatgcttgacactgtaacagcagcaacagtgcagtttaaggagataggtgcagatgcaagaagcagaggagcaatagaaactggcaaacccttggtacaatcaaatgagaaaaagaaaggttttgattggatgtttacaaaacctgttgatgaagtgaaagaccattgggtcccagatgaggttgccaagaaatgccactcgtgcgctgttgattttagccctttcaatcgcaggccagggaaggattgctctgacggctgaggataatgctccacttgtccgagtttgtgatagatgcatggctgaggtcactcaaaggcttagcattgctaaggatgttgccaacagatctgcaactgttcaaagtcatgaagatcttgcaagaaaactgaaggaggaaatggagaaaaaccgcaagtcatcagcatctggtggtggtgcgcctggtaccagaatgagggaagtcgcgtgccctacctgcacagtccatcttcaggttcaggttcccacatctggctcagagacagtggagtgtggagtgtgccagcatgccttccttgtcagcgccaattgatacaccggggagaagatgcatatgctaaagaaattattctgttgacgattattcctttttttattatgctgtatacataataggtgtgtgttctgtcaggccgtacatgtttccttgattgtgttggtgatcacggttaggatatgttacttttttccctgtacatgggtggattccaattcgggagtattgcggtgctgggtgtatgcacagaatattataccattagattatacttggtagagattgaagactatgctcacgcacgcgtgtcacgtccgcattatgcatgcttgaagttttatcatgcttcttctttagtagtacctttgtgccccttcaaagccaaaaaggggctctcttttgaagcaaatttcgta

SEQ ID NO: 4226 - DNA, 1931 bp, Zea Mays
gccccctccctgcatcacaaccttttttccgttcagtctgtttccccactctctccccaaagccaaacaccggaccacccctcccccctccattcctccctctccctacacctccgctccctctcgccgctttcccccacccaatccgaccgctgggccgcctcctctccgccggggccggcgattccccggagattccgcgcgattcggctcagattctgggctcctcttgtggtttctcggcgaatcggcgggatcgggactcccggctggagaatcttccgtctctttcgctaactgtttggatcattttacgtggagattgcatgccatcaccttccttgaagtgaaaaatatatgggctgatcttggcatttcatgggaggttttgaagatgatgaaccaccctcaaaacgcgcaagagcatcctcagtagaatctgcaagtttaccagactgtttcttgttttcaaaatctgccaatcctttgggaagtacaatggctagacctttgccttcccaagggaaagaagctatggttggttccaagggtgttattaagaaggaggaatttgttaggataatcagcaaaactctgtatagtcttggatatgagaaaagtggagcagttctggaagaggaatcagggattactttacataaccctatggtgaatcttttcagagagcaggtgattgatgggaattgggataatgcggttgttaccttgaataagattggccttcaagatgtaaacatcatgaaatctgcggcatttttgatattggagcagaaattctttgaacttctaagaaatgacaatgtcatgggcgctatgaagactttacgacgtgagatcacaccccttggtgtgaatagaaaaagagtgcatgaactgtcgacttgtatgatttcttgttctccacagcagttgttccttgggttttcaaaacttggcattgattcttctagttcaaggtttaagcttctagaggaattgcaaaaggtgctccctccaactgttatggtgccagagaggaggttagaaaatttagttgagcaagcacttactgtacaaagagatgcttgctacttccataattctgttgatgggttgtcactttacattgatcatcattgcgggaaagatcagctaccatctcgcacgttacaggttttgcatgcacatcatgatgaagtgtggtttgtccaattttcaaacaatgggaagtatttagcctcagcgtcaaatgataaatctgcaattatatgggaggttaatgaagatggagagctattactgaggcatacattgagtggtcatcaaaagtcagtgatgatggttgcatggagttcagatgattgccagctcctcacatgtgggcaggaggaagccatcagacgctgggatgttaaatctggcaaatgtcttcatgtttatgaacatcctggcattggtttgagatcatgtgcttggtttcgagatggaaagcaaatattgtctggtctagctgatcaaaccttttgcatttgggatttagatggtaaggaagtagattgctggaaagggcagagatcggcaacaacatctgattttgctgtagcaaaagatggaaatcttataataagcttgagtagggacaatgcaattcttctatttgatagggagacaaaacatgagagaataattgaagagggtagtacaattacttcattttctctatcagaagatggtgatttcctgcttgtaaatcttgtaagtgaagagattcatttgtggaacataagaaatgatcctgttcgagtcaaccgatacaatggccataagcacagccggtttgtgataaggtcttgttttggcggatctgagcaggcgttcattgctagtgggagtgaagattcacagtaaagtaataatgtgcaacacttcat

SEQ ID NO: 4227 - DNA, 3410 bp, Zea Mays
tcagctattcattgaatagatctctccattgatccatccatttctatgtccatcaaactagccctaacagtccaagcatctctcacaaaaaaaagtctccggttcgacctcctgcctctgctgctcgcatggccagcctcgtgcaccaggcgtccatgccggcgatggcgccgccgccgccgccgtgcgacgacgagttagtcccgcagggcttcagctgcttcggccgctcgctgtcgcgggcgtcgtcgtcgagccgcctggagtacagggcgctgcagggcgaggagaagcgtaacgccgcgcaggacgcgcggtcggcgcgcgccaagctgcgctggaaggcggtggcgcacgagctcatggccaagggcggcggcggcggcggcggcggcgcgcggcggaggaagcagcagctgggggccttcagctacgactcccggagctacgcgctcaacttcgaccagggcgccgacgagtagcagcagcgtgctgagctcgctagctgctgcgggcggcgggcctgctcctgcttgcggccggctgaccctacgcgcggtgcggatcggagcccgaaacagcgggggttgcacgtgcgtgcggtgcgacccgaaggagcagccacgagtgaccgcccagcgagggaacaatggcgatctaatctactacccaaggaagaagcatgggttttactgtgtaaagatctactgctccgtagtagaaatcaagtccggtcattattgctcttttcttttcttttctttttttcattcagatggcacgaccatgtttgggcgattcgtcatggaatgttcgcctcctcagagcagtttcatcaaatgttcaaatgtgagccaggttgcttcaaggacaaaatgaacttgtttctatgaacaacacataaatattgaaatattaattaatcagacggaaattgagattaactaacgaggtcttcaaatatgcctagctgttacagcaccttggaaaatgagcatgcaacttgcgccttgaaaaaactaaccattcacatagccagtgacatccttcttaccagtcgaacatgtcagctttgccttaattattagtggttttttttctcagttttgcccttttgttctatagcactggaggggtaaaactgagaaaaaaaacacgactaaaggtaaaactgagcacacaaccaaaatcgagggcagcaccataaaaaacccaaaatttggcatcgatcttgatcaatgttaattgggtttaaatctagaattctgctcagtacaagcaaatcatctaaatggagagactcttgagctttggccacgagctttacgacatcagcaacaaaccaaacaaaaggacacttcgtgagagaacacgtcggtggctcggtgccagcatcgacggagccccaccagacaccgcagtaccgcaccgcactgcccatggacgcacacgcacgcctcccggcgcgcccaccccgcccgcgtgcgcgtgcgcgtgcccctgtccgcctcccgtttgccgcctccaccgcaacgcggcgcgcggggtggtggtgccctcgcgatcctcgtgtcgatcccagcggcaggggtgcctgtgcctttgcttctcctggccgttgcccgcgcctcgcggtcgcgcacctgaaccggagccccgcgtcaaatctagggttgcatccgcgccgccccctcctcccgagactcccagcggctggaaccagaacgagggtgacaggcgacgaaagctgcgagggacgccccctcgtcgaatgcactggcgaccgttccgtcgaggagcagccggagcacgcaggagttgagggaaaagctttgaaaatgtcatccaccgtgccgaagtcatcaaatatcttctggcatgattgtccagttggcaagactgatcgccagaagctactcaagcagaaaggttgtgttgtctggattacaggccttagtggttcaggtaaaagtaccttggcatgtacattaggccgtgagctccacacaagagggaagcttgcatatgtccttgacggtgataacttaagacatggtctgaacaaggatcttggcttcaaagctgaagaccgtgctgaaaatataaggagagttggtgaagtagcaaagttatttgcagatgcgggccttgtatgtattgcaagtttgatatctccatataggagagaccgtgaatcttgccgtgcattgttgtctgatagtagcttcattgaagttttcttgaacatgtccttggaattatgtgaagcaagagatccaaagggcctctataagcttgctcgtgcaggaaaaataaagggttttacaggaatagatgacccttatgaagcaccactgaattgtgagattgagatcaaagaggtagatggtgtatgccctccgcctgctgagatggcagggcaagttgttacttaccttgaggagaaaggcttcctgcacgagtaggctgaatccaagcaacatctggggaagatttcagtaagactagcgcagaataagtcaaaggcgctggcagttacggtatagcagttgcatagattggcctcaatgccttagtattttctttccgtacttcctctgccacaggctccatgcaatttcattcagatgagcctggatggttcctaatttctttgacctctagagtagattacttgtaatgcaactctgataaccacttggggcagtatcgatgtggcaatcgcaatcctcacggcagtcaccctcgcccgcacacataaaattcccgcgcccaggtgacaccgcgcgcggcaacgcgacacaacccgacgaagccaaaccgagcaagcaaattaaagcaagcatccgaccaacccgtgcgcgcggcgcgaggaagctcagccaacgtgatggtgttcagcgcctcgttcatggcggcggcggcgcgcgtgccggcggaactgtgccagcggcccccgcgcccggggcagcggcgggtgagcgcggacgacgtcctgcgcgctctgtacctgcccccggcgcggcccccggcgcgggagctcgggcgcctggggacttcctcttcggctttttctgcctgccgctgccggagtacggccgcggcggagggtgggtggcactggcacgggtgcccgacgcggtgctatacacctaccggaggtctctgtcggtcacctcgtcgtcctcatccttctcctcgtcgatgtcctcgtcggaggacgactgattgctgacaaggaacagtaaatacacgttgaggaatgcgccttgcttgtactgtattttttttcgtttgtgcaggagaatcgattagatgtgacttgtacgcccaattcctttgtgacctctgtatatgtccaattattgagtaaatttcagtggcggtcatcgaactcgtcacgagttctc

SEQ ID NO: 4228 - DNA, 2097 bp, Zea Mays
gccggagttgctgcgtggtcgcaccggagggtttatcaacgaagggctgatggatgctaccactgttgattccaaatggatctctcccgccactgaagatgggtccatggacaggcgaggaaacccagctgtcaagacaaccaccggaagatggagatctgccatcctgctgctagctaactatgggctcgcgacgtgcgccttcttcggcgtcggcgtgaacctcgtggtgttcctgcgccgggtgctccaccagggcaacgccgaggcggccaacagcatcagcaagtggactgggaccgtctacatcttctcgctcatcggcgccttcctcagcgactcctactggggccgatacgtcacgtgcgccgtcttccagatcatctacgtgatggggctggtggtcctgtcgctcgcgtcatggctcttgctggtgaagccgtccggctgcggcggcgtcaaggcgcactgcgacgggccgtcggcgcccggcgtcgcgctgttctacctgtccacctacatgatcgcgttcggcaacggagggtaccagccttccatcgcgacgttcgggtcggaccagttcgacgagacggaccccgaggaggcgcgctccaaggtggccttcttcagctacttctacctggcgctcaacgtcggctccctgctctccaacacggtgctggtgtactacgaggactcggggcggtgggtcatggggttctgggtctcggcggccgccgcggcgctggcgctcgtgctcttcctgctcggcacgcccggctaccgccacttcaagccgagcggcaacccgctcacccgcgtcgcgcaggtgttcgtcgccgcgctgcgcaagtggcgcgccgaggtcccgcgtggcgagctcctccacgaggtggtggaagcaggagaggaccctaaggtctcgggcatccgcaagatccttcacagcgacgggctcaggttcctcgacaaggcggcgacgatcacggaggaggaggaggaggagggtccgtggcggctctgcacggtgacgcaggtggaggaggtgaagtgcatcctgaggatgctgcccatctggctgtgcacgatcgtgtactcggtggtgttcacccagatggcgtcgctgttcgtggagcagggcgccaccatggacaccaacatcgggtcgttccacttccccgccgcgagcatgtcgctgttcgacgtcctcagcgtgctggcgttcatcgccatctaccggcgggtgctggtgcccgtcatggcgcggctgtcaggcaacccgcagggcctgaccgagctgcagcgcatgggcgtcgggctcgtgatcggcatggcggcgatggtggtggcgggcgtggtggaggtggagcggctgaagcgcgtggcggccccggaccagccgagctccctgagcgtgctgtggcaggtgccgcagtacgcgctgatcggggcgtcggaggtgttcatgtacgtggggcagctggagttcttcaacgggcaggcgcccgacggcgtcaagagcttcggcagcgcgctgtgcatggcgtccatctcgctggggaactacgtgagcatcatgctggtgagcgtagtcacgagcctcaccgccggtgagaagcgtccggggtggatccctgggaaccttaactcaggacacctcgacaggttctacttcctcctcgccgctctctcgctcgtggacctcgccgtctacgtcgcctgtgccatgtggtacaagggcatcaagcttgacggcggcgacggcgataacaggagaaaggtctctgcgcacgtctagctagccactgcatactggacctcgggccttcagttttcaggttcagagacgtgccgggctggcccctggccgtatgcccgtatagtcttatagagagaggagagagagagagaggaaataaaatgtcaaagaatatgtaaccatccgctcggcgttggatggcccatgttgttatgtatctttggtcagatgatccaagtaacctcatgtgaagtactaatgcaataattatatatggatagtacactatctgtgccttaggacggcacgtaattatatttaatgatgagtgattttag

SEQ ID NO: 4229 - DNA, 2090 bp, Zea Mays
gctgtccgttgtcctctccctgccccaagggtcctggcgcggcaagatcaaagcctcccaacagccaacaagtcgatcgcaaatcgcaagaacaagagaagaaccaatccgacaacgtctccattctccctcacatctccttgctcgcccagcagctggcactccccgtctcccctcgcatccgcatcgaatcgaggcatatcgccctatatatcccattccgctcggttggattcagcttcccctccctctcccccatcgataaaaccgatgcgtcgcccggcctcgcgtaccctaccggcgacgggacgaggggaaggttacaggcacggcgcgtgaagggtcctgcccagtcctgcccggtccgccgcgatgccgtggtttgagatgtggctgcctcctgtgcctggcgagggggctgtggcggcggcgggggggctgttcctcgacggcgccgatgcggcggcgcacggcgcgctcctcgcggccatgcctggttgctccttgtcgttcgtgctccggcaccagcgttgccgggggtcgccgccggggttcctgtcgctgacgatgtcggtaaaggggggcaggggctttgtgccggccccggtggggttgctcgctggtgcggaggagaagagcggggcggaggagtcggacgcgctggtcgcggggaagagggccgtggaagcggaggcggaggcggaggcggagggagtgattctgctgcaggagaaggagaaaaagaagaagaagctggacgattgtgctggagctggcgcgatgaacatgaccaaacacctatgggccggagccgttgctgccatgatatcgagaacagccgttgctccacttgagaggctaaagttggagtatatagttcgtggtgagcagaggaatctatttgagcttatgcatgctattgcaacaacacaaggattgaaaggcttttggaaaggaaactttgtgaatatcctccgcactgctccattcaaggcagtcaacttctatgcatatgacagttacagaaagcaactggtcaaatgggctggtaatgaagaagctacgaactttgagagatttattgctggtgcttttgctggtgttacagcaacaattatgtgcatacctatggatacaatcaggacaaagatggtagctcctggcggtgaagctttaggtggggtcattggtgttgcccgccacatgatccaaactgaaggattcttctcgctgtacaagggattggtgccttctcttatcagcatggcaccctctggtgctgtattctatggagtgtatgacatactgaagatggcttatctgcattcccctgaaggaaagaaaagagtatcgatgatgaagcaacagaaacaagaggcaaatgcattggatcaacttgaattgggtactgtgaggaccttactctatggggctattgctggttgctgtgctgaagcagctacatacccgtttgaagtggtccgtaggcagctacagatgcaagtaaaagcaacaagaatgaatgcatttgcaacatgccttaagattgttgatcaaggtggggtaccagcactgtatgccggtctgatccccagcatgttacaggttctaccatcagcatcgatcagctattttgtttatgagttgatgaagatagtcctgaaagtggagtgaatacaaattaattggtgagcctacgaaccacgttcaaatggtgatcacataccttgataaaattgccgaaaaaaaaacttgtttgacgaaagctcctgatgctgagggtagcttcaggttggtaccgtaaaacattgttcagctgaggcttttcacactagttgaccaaattgtacacgaggatatattcaagacctaattcagtggcttagtagaagattgttctctgcaactctgccccagcgaaataatctcggccttgcccaatttctgttgacaatttttttcatactttgtcgttgatgtatttgacacattgacagcagtccagagcgacatttgggacattctatctgtgaccctgtctaatgcggttatacctatacttcgatcggctttccagcggccgcatgtag

SEQ ID NO: 4230 - DNA, 1283 bp, Zea Mays
tttcacttcaccccacggcccggaaccaacccttctgtcgtaccctctggatcgaagcctggacgacgcgaccgtgcggcggcgactcgacgcaaccagcacggcggcggcgcacagccccgacgacgactctccccactgccttctctccgggacatgagggaagatactccatctatgtgcacgcatcacgtgaaaagcctgttcatactagttctttgtttgctggtcgggatattcacagtgatgcgatagtatggggattgatttcaatggttgatgctgagaagagactattagcaaatgcactggaagatgttgataatcaagtttttgtcttgctttctgacagctgtgttccgctgcattcatttgattatgtgtataactacctgatgggaacgaatgttagcttcattgattggatccaggtccacatggcagtggaaggtaccctattgagatgtatcctgaaatagacgagagtgattttagaaagggtgcccagtggtttgcagttacgaggagacatgctttaatgattctggctgacagcctgtactacaagaagttcaagctatactgcaagccagcagaagggcgcaactgtattgcagatgagcattatttgccaacgctgttcaatatggtagatcctggtggcatctccaattggtctgttacacatgtggattggtccgagggaaaatggcatccaaggtcatatagtgctgacgatgtcacttatgatctcttgaagaatattacaacaactgatgagaacttccatgtgacaagtgatgacaagaaacttgtgatgcagaagccgtgtttgtggaatggatcgaagagaccgtgctatcttttcgccaggaagtttaatcctgaagcactcgataacctactgaagctgtttacaagttatacatctgtttgagcctatgagtcctacctgattctttgccttgggctttctaatcccacatttttttctgtttatatgtaaattgggaagcccgtatttattgggatctgggcctaaagatatcggtacaactgcaacagctgtgatggcttggagtacagtcctgggtaaatggccacaacaatgtttatagaatgacactgccctgagtgtaatttgtcgtgttcaatgtatgtctccatagtcttccagccaactcctaactcattagttctctattcttggagaacagttttttttttgtcagaatgttatatgatccattctttgtagacacagagattacaacagatgtacc

SEQ ID NO: 4231 - DNA, 1286 bp, Zea Mays
tttcacttcaccccacggcccggaaccaacccttctgtcgtaccctctggatcgaagcctggacgacgcgaccgtgcggcggcgactcgacgcaaccagcacggcggcggcgcacagccccgacgacgactctccccactgccttctctccgggacatgagggaagatactccatctatgtgcacgcatcacgtgaaaagcctgttcatactagttctttgtttgctggtcgggatattcacagtgatgcgtatggggattgatttcaatggttgatgctgagaagagactattagcaaatgcactggaagatgttgataatcaagtttttgtcttgctttctgacagctgtgttccgctgcattcatttgattatgtgtataactacctgatgggaacgaatgttagcttcattgattgtttcaaggatccaggtccacatggcagtggaaggtaccctattgagatgtatcctgaaatagacgagagtgattttagaaagggtgcccagtggtttgcagttacgaggagacatgctttaatgattctggctgacagcctgtactacaagaagttcaagctatactgcaagccagcagaagggcgcaactgtattgcagatgagcattatttgccaacgctgttcaatatggtagatcctggtggcatctccaattggtctgttacacatgtggattggtccgagggaaaatggcatccaaggtcatatagtgctgacgatgtcacttatgatctcttgaagaatattacaacaactgatgagaacttccatgtgacaagtgatgacaagaaacttgtgatgcagaagccgtgtttgtggaatggatcgaagagaccgtgctatcttttcgccaggaagtttaatcctgaagcactcgataacctactgaagctgtttacaagttatacatctgtttgagcctatgagtcctacctgattctttgccttgggctttctaatcccacatttttttctgtttatatgtaaattgggaagcccgtatttattgggatctgggcctaaagatatcggtacaactgcaacagctgtgatggcttggagtacagtcctgggtaaatggccacaacaatgtttatagaatgacactgccctgagtgtaatttgtcgtgttcaatgtatgtctccatagtcttccagccaactcctaactcattagttctctattcttggagaacagttttttttttgtcagaatgttatatgatccattctttgtagacacagagattacaacagatgtacc

SEQ ID NO: 4232 - DNA, 2332 bp, Zea Mays
cgcctcaactccacctccgcctccaaatccgatcgatctccgaggcctccagatccccggcggccggaagacggcgagctcaaggcggtggacacccctcgcagcgctcgtctcctctcgctctcccaatccccttaccagttctacaatgagtatctcattgcgggatcgtattagaaagaggagggaagaagaagaagaagatgacatgatgatatttattgggaagcaaagtattggaaaaaactgcatttagttgatgatccactagaagtttaagctatgtcccactcgagtctttatacagtggtgatgtctcttgttatgctatgttcactgcatgatttttgtttttggcatgtctacaactggttcagctgttcagctgctcattgtggttgcagtcaaccataagattgttgtcttagcacctttgatatgtcttagcaaaaactcccagttcactctttgatatgtctagattgaaccagttcactctttaatatgtcttagcattgaacttgttttagattcaacaaatattcttgtcacggtgccagcaatatattaaatctacattgtgtaatatattgtcaaacaaggcttgggttgctagctttaactgcatggaatggaattagtccaggctgaaacgaacgaactttagtggccaccaggtttcatttcagagccggatctataacagaccaggttccagtgaaccacccggatccactctatatggaccagaaataaatacatgtctgttttcaaaccaaagcaaacgaacgcggccttaaagttcttcaggccctggtgtagcagctgaactacctagtttgatggtgaagaaagagctctaggtgatctaaagatggtgatgagataaaagcaccaaaaagtgtacagtgggatagcaaggatatgactgtcatgatgcctcagcgccaccgggctacggccaagaagcccatgtggataatcgtgctcttgtctatggtttgcatcatgttgattggggcttacgtcttcccaccacggcgcttctctaagtgctacctctctgcttcaagtgtatttattagggatatcctttcaatgcccatgcctatgtcaaaaaatccaaagatcgcccttatgttcttgacaccaggttcattgccctttgagaaattgtgggagacgttcttacagggacatgagggaagatactccatctatgtgcacgcatcacgtgaaaagcctgttcatactagttctttgtttgctggtcgggatattcacagtgatgcgatagtatggggattgatttcaatggttgatgctgagaagagactattagcaaatgcactggaagatgttgataatcaagtttttgtcttgctttctgacagctgtgttccgctgcattcatttgattatgtgtataactacctgatgggaacgaatgttagcttcattgattgtttcaaggatccaggtccacatggcagtggaaggtaccctattgagatgtatcctgaaatagacgagagtgattttagaaagggtgcccagtggtttgcagttacgaggagacatgctttaatgattctggctgacagcctgtactacaagaagttcaagctatactgcaagccagcagaagggcgcaactgtattgcagatgagcattatttgccaacgctgttcaatatggtagatcctggtggcatctccaattggtctgttacacatgtggattggtccgagggaaaatggcatccaaggtcatatagtgctgacgatgtcacttatgatctcttgaagaatattacaacaactgatgagaacttccatgtgacaagtgatgacaagaaacttgtgatgcagaagccgtgtttgtggaatggatcgaagagaccgtgctatcttttcgccaggaagtttaatcctgaagcactcgataacctactgaagctgtttacaagttatacatctgtttgagcctatgagtcctacctgattctttgccttgggctttctaatcccacatttttttctgtttatatgtaaattgggaagcccgtatttattgggatctgggcctaaagatatcggtacaactgcaacagctgtgatggcttggagtacagtcctgggtaaatggccacaacaatgtttatagaatgacactgccctgagtgtaatttgtcgtgttcaatgtatgtctccatagtcttccagccaactcctaactcattagttctctattcttggagaacagttttttttttgtcagaatgttatatgatccattctttgtagacacagagattacaacagatgtacc

SEQ ID NO: 4233 - DNA, 1211 bp, Zea Mays
atcacaggccgacactccactcgatcaaaatcccttcgtcgtcaccgtccccaccgaaaccgcagtaccgtacccgtgccgacgcgagcacgatggccgccgcggcctcctacttcaccgggccgaccatcttgccgtctcagcgagccaccgcggcgcctgacaattccgccgtcgccaccccttctctggctaagtcgcgtgacccccgctgctccggatgctctcccaccaccgtgcgccacatcgcccgctccttcgccgccgctgatgcgaccagtggtggcgaccctgtcatctctattgacggcgtcgacgccaccaatgtttggcttctggggagggcggtgagcgtgatgaacatggaggctggcgtgtcattcacgctcgatgacggcaccgggcagatcgcgctcatgcggtggatcactgacgatattgatgctaaggaagtgtctttcgtccagaatggtttatacctcaaggttcaagttactctcgtagggtttcaagctaagcagcatggttttgctcactctattaggcctgttactaatttcaatgaattggcgctgcacttcattgaatgtatgtatgtgcatttggaaaatgtccggccaaagatgaaggatcaattccctcgtgctgttcaagcaaatgtgtctgctcacgagatgcaagctcaagtcgctcacacagttcaaacaaatgtgcctgcttatatgcccttctctggtggagtaagagagcatcacgttgattttgctcctgaagtaaaccaagggcgattcccttcatcacttcaaacaaacgcatctactcatgcacccttttctggtggagttggagaacagcaagttcactttactcaacccaaccaatttactggtggacaacagcacgatctgcaaagtatggttttggaggttatgcaacaaccagatatacttgcacttgaaaatggagtacatgttgatgaagtggcaaggagacttggaatgccaagagcacaaattatggccattgcccagcgcctggtcgatttggcctgcctctattccactattgatgattatcatttcaagtctcttttaaatggttgatcaatgttatcatcttcaagactagtataatggcatctgggattattggcagtttttaggtggtgggacccgccctcccccctatcaggacaaactagcagaactcca

SEQ ID NO: 4234 - DNA, 2032 bp, Zea Mays
ctcaaggcagccttcctcgtcacttccgcagcgacacaatccaagggcccgtccggcagtggcacaccaacccgccgccccgccacgggcgcgcgcgcgaacactgggccccacctggcagcaattcgcccccggcccccatacaaatatccggcgcgtcgcggcgtcggcgtcggcgtcgtttaccagtcttctcacccggtcgccggtcttgagcgaccgcctcgctacttcctcctaccggcgcaggcacacggtttccgcgccagcaaggggtgcccaccgcaaagatccgatcgatcagatcaaaagggaattcctgaaaaggagagaggagcacccttcctcgccatttccgtccaagtgttttcccgaggagtcgtgcgtgcctgctggcgctggggcggctggacgggagcattgctggccgcggcggagcccggcgctcgagtcccttctctcctctcctctcctctcctctgcggggggcagccttttatttgacaacggtataaagaaatcaagtacaaatgaagaggcacatctctgcccagtatttgatgactgaagataggtagcagtatggtagctgctacaattgcgggaatgtttcttgtgtgttttgagtccctctgcacctgttttggcacaaaaaggaaagatgaaagcgaagaccatgttcttgcagaacattccaattccttgagttcttatcaaatgaggtcggtttctgatagaatttctgcaagctcgcttcgagcacctgcaagtccatctagattttcattgtcttcgccaccaagcagaaatgaacctttaaacatcagtcttgaacatgtggttaaactgacacataacttcgctccgaccttgatgattggtgaaggttactttggaaaggtctacagagcgacactgcgagatgggcgtgtagtagctattaaaagggcaaagaaggaaaattttgtttctttacgtactgaattcagcaacgaagtcgcattactaaaaagtattgaacataagaacttggtccgattgcttggttatattgacaaacccaatgaacgaattctcataacagagtatgtaccaaatggcaatcttagggagcatttggatggtcaacatggcctagttttgggatttaatcagcggcttgaaatagctatagatgttgcccatgggttgacttatctgcatctctatgcagagaagcccataatacatagggatgtgaagtcatcaaacattctactgacagaaggcttcatggccaaagtggctgacttcggatttgcaagaactggtcctactgagccaggccagtcacagattgagactgatgtgagaggaacagcaggaaatcctttcaggacgtcgtcctattgaggcaaggaggggtccaacagaaaggattacagtgagatgggccttctataagtacaacagaggaaatgttagggacatactggatccaatgttaacagaagcagtgaacgagaatatactgaatagaatctttgatctggcgttccagtgtgtcgctcctacccgcgaagacagaccatccatgaaagaagttgtggagaggctgtggaagataagaagggatcatacaaaaatacaaaggatagcagaattgactctctgaatccttgaaccagctgatcccggttgccgtttttgcttgagggaacatggatcagttcctagtgaagaccaaaggtcaccacataaaaataatgcaaattttgtggttgtgaacaactggaactttgtacagggttgcaaaattgttgttgtattatgttgtattgtacatggctctatgttcaagagatcaaggtgccgaacaatggcctgtgatcgatgatttccctgtgtagccactagcccgtttatcaacataagctgttcagtgatctgtaaggcacaatgtagcttctgtgtaacacctgcattgttggatgaggcttttaaaacagttagatatgaataaaatctttggctagtttcttctgtaaaacaa

SEQ ID NO: 4235 - DNA, 3662 bp, Zea Mays
ctcaaggcagccttcctcgtcacttccgcagcgacacaatccaagggcccgtccggcagtggcacaccaacccgccgccccgccacgggcgcgcgcgcgaacactgggccccacctggcagcaattcgcccccggcccccatacaaatatccggcgcgtcgcggcgtcggcgtcggcgtcgtttaccagtcttctcacccggtcgccggtcttgagcgaccgcctcgctacttcctcctaccggcgcaggcacacggtttccgcgccagcaaggggtgcccaccgcaaagatccgatcgatcagatcaaaagggaattcctgaaaaggagagaggagcacccttcctcgccatttccgtccaagtgttttcccgaggagtcgtgcgtgcctgctggcgctggggcggctggacgggagcattgctggccgcggcggagcccggcgctcgagtcccttctctcctctcctctcctctcctctgcggtgagtactcgcctaacattcctggaactccaagacccggttcccagctgcgcgttccggcgattggtagcggttcggatatttggtgcgtggtcggattgctgcctgtctggtctgtttttttcgggtgattgcagagtagcatagataagctttatggcatgatcgctgagcggaactccagcggcagtcctgaaaacagtcccgcaaagattcattgctaagctgttttttttagcaatcttctgtgggataggattggcacggttttgatggcgagcttgacctgtgaagactaaaacagtgaagctacagtgttgccactgacctttttgaaatgcctaaagttgtagttttcctctaattgggaacagacaccctgcctgttatgccatttgaggcatgttggatcctcatgtgcttccttcaaccttgttctggtgctgtggtgcatgatcaaactacctgctcctctcttctttttccagtttgatctttcgctttccgtcctgtttgcctgcctatgtttcaaacactctgtactaatcagtacagagtacagacgtacaaaatctacagaaatactagttttttgcccccattttttagtcatatatgaatctgtacagcacctccagttgtattataataaatgcatgatcattttgtacttgccaggcaaagtacaagggaaaactgtgtctgcgttcacaagcaaactcttcttctttacactaaaaaaactcaccttttggtttacatagagagtacatgaacatcccttgttcttaccaaatgactgtattgtggattatttgatgatagaacatagaagtatgtcaattgtcagttcatgttgtactacgagtatctaattttgtttctctttcaaagctgctaaactgaggctttattgtttttttttctgttttgactgaacctatgagaaggggggcagccttttatttgacaacggtataaagaaatcaagtacaaatgaagaggcacatctctgcccagtatttgatgactgaagataggtagcagtatggtagctgctacaattgcgggaatgtttcttgtgtgttttgagtccctctgcacctgttttggcacaaaaaggaaagatgaaagcgaagaccatgttcttgcagaacattccaattccttgagttcttatcaaatgaggtcggtttctgatagaatttctgcaagctcgcttcgagcacctgcaagtccatctagattttcattgtcttcgccaccaagcagaaatgaacctttaaacatcagtcttgaacatgtggttaaactgacacataacttcgctccgaccttgatgattggtgaaggttactttggaaaggtctacagagcgacactgcgagatgggcgtgtagtagctattaaaagggcaaagaaggaaaattttgtttctttacgtactgaattcagcaacgaagtcgcattactaaaaagtattgaacataagaacttggtccgattgcttggttatattgacaaacccaatgaacgaattctcataacagagtatgtaccaaatggcaatcttagggagcatttggatggtaaggtgtaaaccagattgctagttttttgtattccttccaaaatgattggtctgatattttggaatcatctttcaggtcaacatggcctagttttgggatttaatcagcggcttgaaatagctatagatgttgcccatgggttgacttatctgcatctctatgcaggtacactttgcgtacttagttcagcatcaggcaatttagtctttttaaatccaaatcatgttcatgcacttgtgctgcttcaaaactgcagtaaggaagtgaaccagtatgcttaggcactctttttaagataaaaagaattccttttgcatctaaagcttgttataggatgggacgatagaggtccagttccttatgattcagtctgaaatggaactaaatctgaatctgtagagcaaaccacccaatcaagtataagtagttgtgaccaaaactgtatttaatcaaacattttttttccatgatgcaattccacatgtgaactagccccatggatatgtaacaatgtaactctcgtagtgaaaaataagtttccataacacatttatgttcttcagcttttaagtgatgaagtggtatgcacccagataacaagaagactttattttgtcattgttacaaaaaaactgcatacatttttttccaattcatagtttgatgctattcctattttgcctttagagaagcccataatacatagggatgtgaagtcatcaaacattctactgacagaaggcttcatggccaaagtggctgacttcggatttgcaagaactggtcctactgagccaggccagtcacagattgagactgatgtgagaggaacagcagggtatttagatccagagtatctgagatcaaaccatcttacgatcaagagcgatgtgttctcttatggtgttttgcttctagaaatcctttcaggacgtcgtcctattgaggcaaggaggggtccaacagaaaggattacagtgagatgggccttctataagtacaacagaggaaatgttagggacatactggatccaatgttaacagaagcagtgaacgagaatatactgaatagaatctttgatctggcgttccagtgtgtcgctcctacccgcgaagacagaccatccatgaaagaagttgtggagaggctgtggaagataagaagggatcatacaaaaatacaaaggatagcagaattgactctctgaatccttgaaccagctgatcccggttgccgtttttgcttgagggaacatggatcagttcctagtgaagaccaaaggtcaccacataaaaataatgcaaattttgtggttgtgaacaactggaactttgtacagggttgcaaaattgttgttgtattatgttgtattgtacatggctctatgttcaagagatcaaggtgccgaacaatggcctgtgatcgatgatttccctgtgtagccactagcccgtttatcaacataagctgttcagtgatctgtaaggcacaatgtagcttctgtgtaacacctgcattgttggatgaggcttttaaaacagttagatatgaataaaatctttggctagtttcttctgtaaaacaa

SEQ ID NO: 4236 - DNA, 2902 bp, Zea Mays
ggagagcttgaggagtagccgagtagggttggagaggcgtaggggcgcgtgtgggcgctcgagctgttgttgctgggcctcgccggctccgttttcttccacctccgcgcgcagcggcagcgcggcagccagcgggggtgggcgtcaagtcaaggcagcgccgtcgtttcatgtccgcggtcaggtttggtgtctaatgcaggtgtggtactggagtactggactactggtcctgtagagcagttcgggggcgagggagatggactggccctggcccctggtcgctgtgccgctccgaactggggcgagggcgagggcgaggtgttcgtgggtaagggtcgcgggcgatgtgcggctgggaggcgggctaccgaggcgtaagaaataaagcagtagtagacgagagagccgcgatttataaagcgggtttgtgtggctcgctgctcgcctccgctccactcctctcacctggtgactgctcctcccacctcgctgtttcttctacgggatcaggttgctgcttgctgcggttcagatccttatccccttctgctttagatgggcctcgcggagcagtgcatggaggtggaggaggtgcgggactcggcgaatcggaggtgatcccggtcatggggtagagtggagtggagggggttgagcgtgtggtatggagccgtcccgtggcggtgttggcggcggcgggcggcggtggggggaggcggagggtgatgcggcggaggaagggagacgaggggaggacgggggcgaggtgagcctgcgggagtggctggaccggccgggccgagcggtggaggcggcagagtgcgtgcacgtgttcaggcaggtggcggaggcggtggcagtcgcgcacgcgcagggggtggccgtgggcagcgcgcggccgtcgtgcttcgtcgtgtcgccgcccttcgcgcgcgtcgccttcatcgagtccgcctccggctccgacgcctcgggctcgtgctcgggctctgacgcctccgaggacgccgacggcgacccggacccggacccggacccggacgcctcgcctccgctgcggcgacgcgacagcgccgtccccggcgaggagcgcgcggggaggtcgttcccgctcaagagcgtgctggccatggagctcagctggtacaccagccctgaggatgcggacgacagcgccgctaccttcgcctctgacgtctacagactgggtgtgctcttgttcgagctgttctatacgttcgaaacgatggaggacaagatgcgggcaatggcgaatctgcggcaccgggtgttgccaccgcagttgctgttcaaatggcccaaggaagcatccttctgccagttgctaatgcaccctgtgccagaaaccagaccgaagatgagttatatgaagagccatattgcatctagtgattttgagggtatagtacaggtttgggatgttactaggagtcaagtttttgttgggatgagggagcatgagcgacgcgtgtggtcggtggacttctcaattgtggacccaacaaaattggtcagtgggagtgatgatggatctgtgaaactgtgggatatgaatcaggcaattttattcttgcacctactgtatgtcaggcttttaactaacgataacatggttatcgaacttgctgggagtattggcactattagaacaagagcaaatgtgtgttctgtacaatttcaacctgatactgctcgctccattgccatcggctctgcagaccacaaaatttactgctatgatctacgtaacatacgagctccttattgtacactagttggccacacaaagactgtaagctatgttaagtatctggatgcatcaacaatactatccgcatctactgacaactcattgaagctttgggacttatcgatgaatccaggaaggataattgacagtccagttcaaacatttacagggcatacaaatacaaagaacttcgttggtctttccatatctgatggttacattgctactggctctgaaacaaatgaggtttttgtctaccacaaagaatttcccatgccagtgttggcttataagttcagcgtgacggaccctatatcgggacaggagattgatgatcagtcacagttcatttcatgcgtctgctggagagggcagtcttcaactctactttctgcaaattccagcggcaacattaagatcttagaaatggactgaggagtttgcatctgtttgagtctcagctataaatagaccgacttcttaggccgtgctcaacaaatcatgcatatagccgtggtagatgtcactgtctagggagttgagtttaaaatgagagattggatgagtaatgctgctagagatagcttaccaagttgtgcgcgtgcgtggcttcaaaatttgtggcgattaaatccagagttgccaacggtgcagcttaatccgagttgcagagttgggaaaggtagtagctgtagcagatttagcgtggttttataggattacagattagcgtggtagcaaaagtagcataaataggaaacagaattggggcgtgggatagtaccacggggaaaggttttgtacatcattggtttgaggtatacttgtacaggcaatcaatccagtttctacctaccagtaccagcatcagacttgctcttgtcatagtgttacttgaaaggtgaaaggtataaatcgctgtacatctgttgaatcagacatcagcatttgcatcattatctcccttttttattttccatataatattgatgaatgtgttaggtcgcagacatcataagacttgttggcattcgtctgcagacgtgaggcgaggagctgtgcataagttaaaagaatcttcagtatttgtctaatgctccgtttgtattgtcgatattggagcacaaa

SEQ ID NO: 4237 - DNA, 3678 bp, Zea Mays
ggagagcttgaggagtagccgagtagggttggagaggcgtaggggcgcgtgtgggcgctcgagctgttgttgctgggcctcgccggctccgttttcttccacctccgcgcgcagcggcagcgcggcagccagcgggggtgggcgtcaagtcaaggcagcgccgtcgtttcatgtccgcggtcaggtttggtgtctaatgcaggtgtggtactggagtactggactactggtcctgtagagcagttcgggggcgagggagatggactggccctggcccctggtcgctgtgccgctccgaactggggcgagggcgagggcgaggtgttcgtgggtaagggtcgcgggcgatgtgcggctgggaggcgggctaccgaggcgtaagaaataaagcagtagtagacgagagagccgcgatttataaagcgggtttgtgtggctcgctgctcgcctccgctccactcctctcacctggtgactgctcctcccacctcgctgtttcttctacgggatcaggttgctgcttgctgcggttcagatccttatccccttctgctttagatgggcctcgcggagcagtgcatggaggtggaggaggtgcgggactcggcgaatcggaggtgatcccggtcatggggtagagtggagtggagggggttgagcgtgtggtatggagccgtcccgtggcggtgttggcggcggcgggcggcggtggggggaggcggagggtgatgcggcggaggaagggagacgaggggaggacgggggcgaggtgagcctgcgggagtggctggaccggccgggccgagcggtggaggcggcagagtgcgtgcacgtgttcaggcaggtggcggaggcggtggcagtcgcgcacgcgcagggggtggccgtgggcagcgcgcggccgtcgtgcttcgtcgtgtcgccgcccttcgcgcgcgtcgccttcatcgagtccgcctccggctccgacgcctcgggctcgtgctcgggctctgacgcctccgaggacgccgacggcgacccggacccggacccggacccggacgcctcgcctccgctgcggcgacgcgacagcgccgtccccggcgaggagcgcgcggggaggtcgttcccgctcaagagcgtgctggccatggagctcagctggtacaccagccctgaggatgcggacgacagcgccgctaccttcgcctctgacgtctacagactgggtgtgctcttgttcgagctgttctatacgttcgaaacgatggaggacaagatgcgggcaatggcgaatctgcggcaccgggtgttgccaccgcagttgctgttcaaatggcccaaggaagcatccttctgccagttgctaatgcaccctgtgccagaaaccagaccgaagatgagagtgagttccttaatcagtcaaggaatagcctggaagagcatgaagcggcacttaggttacgcgaagagatagaagaacaagaattattgctggattttcttcagcagttgcagaaaagaaagcaagatatagccgacagtttgcagggcactattgctttcctctcttctgacatcaatgaggtaccccaccagcaatctacaattggccactgtgagaacttcttatccgatggggataaagaggtgtgctctggaactgttgaagagcagagtgattgtggatccaggaagcgttttagacctgagctgcaaggtgttgatatggaggaaaataatcgtagtgttgaagaatgttccagaacagtaccatcctctgagttaatccaggaaagtgttctgtctaaaagctccaggttgatgaagaacttcaaaaaacttgaaacagcctattttctaacaaggtccaagttgatgaagcaagttggcagccaaataagtagctgtgatcgagttgttaagaacactactggttcagctgttgggactgagggaagttcactagatgatttttctttggaaaggcaatatggtacaaggcaaagaggttgggtaaactcttttcttgaaggattgtgcaagtatttgtcattcagtgtaaataagaagataaaagtgtttgagtataatatgattgtaaatgaacaccgtgatattcactatcctgtagtagagatgtctaatagatcaaagttgagttgtatttgctggaacagttatatgaagagccatattgcatctagtgattttgagggtatagtacaggtttgggatgttactaggagtcaagtttttgttgggatgagggagcatgagcgacgcgtgtggtcggtggacttctcaattgtggacccaacaaaattggtcagtgggagtgatgatggatctgtgaaactgtgggatatgaatcaggcaattttattcttgcacctactgtatgtcaggcttttaactaacgataacatggttatcgaacttgctgggagtattggcactattagaacaagagcaaatgtgtgttctgtacaatttcaacctgatactgctcgctccattgccatcggctctgcagaccacaaaatttactgctatgatctacgtaacatacgagctccttattgtacactagttggccacacaaagactgtaagctatgttaagtatctggatgcatcaacaatactatccgcatctactgacaactcattgaagctttgggacttatcgatgaatccaggaaggataattgacagtccagttcaaacatttacagggcatacaaatacaaagaacttcgttggtctttccatatctgatggttacattgctactggctctgaaacaaatgaggtttttgtctaccacaaagaatttcccatgccagtgttggcttataagttcagcgtgacggaccctatatcgggacaggagattgatgatcagtcacagttcatttcatgcgtctgctggagagggcagtcttcaactctactttctgcaaattccagcggcaacattaagatcttagaaatggactgaggagtttgcatctgtttgagtctcagctataaatagaccgacttcttaggccgtgctcaacaaatcatgcatatagccgtggtagatgtcactgtctagggagttgagtttaaaatgagagattggatgagtaatgctgctagagatagcttaccaagttgtgcgcgtgcgtggcttcaaaatttgtggcgattaaatccagagttgccaacggtgcagcttaatccgagttgcagagttgggaaaggtagtagctgtagcagatttagcgtggttttataggattacagattagcgtggtagcaaaagtagcataaataggaaacagaattggggcgtgggatagtaccacggggaaaggttttgtacatcattggtttgaggtatacttgtacaggcaatcaatccagtttctacctaccagtaccagcatcagacttgctcttgtcatagtgttacttgaaaggtgaaaggtataaatcgctgtacatctgttgaatcagacatcagcatttgcatcattatctcccttttttattttccatataatattgatgaatgtgttaggtcgcagacatcataagacttgttggcattcgtctgcagacgtgaggcgaggagctgtgcataagttaaaagaatcttcagtatttgtctaatgctccgtttgtattgtcgatattggagcacaaa

SEQ ID NO: 4238 - DNA, 2199 bp, Zea Mays
ctctcagtaggggccggaataaaaatctcctcgccttcctctcctacgccgcctgacctctgctgtccgcctcaacggtccaaccctccggttcgacgtaggcgccggcggcgaaatgaaggtctccgtgaagacgctcaagggatccagcttccatatcgaagtggatcctaccgacaaggttgccgacgtgaaaaaggttatagagagtatacaagagcaggcttcctatcctgctgaccaacaagtgcttatacaccaggggaaggtgctcaaggacgacacaacattggaggaaaaccaagtagttgaaaataattttcttgttataatgctcagacaggtaggctacttgtttattattctggttgacacatgggcacatgacaaatcacgggtgtatgacttggtatgataataaaattattactgagatatgaataactgataacattaactgaataactgtcatagtgcattggattatttgaaagaatttgtgcttcaatttctatggctagcttattagcagtattttatatatggatgcaaaggctgctgtgaatttggaatgtctacgatagcatcagaaatgttctatatatcttatcaattgtaacctttcacagaacaagggatcatcaagtgcagcaccagctaaggtaaccgcgaatcaggcaccctctactcagacagtgcctgctactccacctcaaacgtcagcagccccagatgcaccggcacctattgtacctgtcagtgcaccggctgcaactgctacagcctcagcagctcctgctgttgctgtctccactgaggcggatagttatggtcaggctacctcaaacctagttgctggcagcaacttggaaggaacaattaaatccattcttgaaatgggtggcgggacatgggatagagacactgtactacgtgctctgcgggctgcgtacaacaatccagagcgtgctgttgagtacttatattctgggattcctgaacaaatggaggttcctgcaccgcctccgagttcccaaccagtcgaccctgttcaggcggtacaaccagctcaagctggaccaaatgctaaccctctcgacctctttccccaagaaatcttgatgttttgcgtaataactcacagttccaaaacctacttggtttggttcaggctaaccctcaaattttgcagccattgcttcaagaattgaggaaacaaaatccccgggttatgcagctaatccaggaaaaccaagcagagtttatgcggttgattagtgagccactagagggagacgaagagaatgaaatgatgctggatcagatggcagatgcaactgagaccattgcagtcactccagaggagaatgaagctatacttcgtcttgaagggatgggctttgaccgggcactcgtcctggaagtgttcttcgcctgcaacaagaacgagcagctggccgccaactacctcttggatcacatgcacgagttcgacaacgatgacgggctcggagggcctccattgtgatgcgatgcgaaggctgtggacagaaaataggaaaacgttttgggatttgtctcgtctgtccgctccgctccccctacatttctttgctgtttagtacataattctagatttacagaaaagacaaagtttactcttttctggatcatatgttttgtgctacttattgctgttctggccgcattgggccagcatgcagttattcacgggttcaacctgacaagcgctggctgcagcagcgaggtgtttgtaggtttcgcggtgattcgtctacccaaatctggaaccgtactgatactgaagaccgtactgatactgaaggcattatccggcgtaaactgttaattcaaacattattacacgaatgcataaggctgagcacggcttttgggcttgaactcgttagactgccaccaaatagcaaatcatgcatatggtcgcatgaatcaacggtttgtactgtatactttttacacagtggacttttggactattcgtacagtaaagtttaaaattcgcactatagattgtacttttcatgtagtggaaattttggactatttatacagtacattttgaaatgggaatgagtaagctggagtatagccttatacggcctgtttggtttgtgacattaaagcgatctacgactaatgctgtttggttaatgtcgg

SEQ ID NO: 4239 - DNA, 1289 bp, Zea Mays
gactgcggaagtggaaggtcaggatcgctttttgaataacctattgggggaggggcgaaggcgtaaaaggactcggccttctgctttgaccgcggcccgattagaaacggacgaccgagaccgcctgggcggatccgagttcggacggcccatcagagcatcagacgaccaccttcctgcccccattcgttttcgcatcggcgtatctcccggcggccggcaaaggcgctctcgacctccctgcggtgccggtacgacagtcgacaggatggcaatggccacatcagcatcgtaccctccacctcctccattttaccgattgtacaaaaattttgagcaagatccctcatctgcaccagaacctccaccaccaattgacgaaccattcaaagccttgggtgttgattacacaggagatgttgtgattccaagcttggagagtcataatgtccgtcagctttatccaaagggtcccaatattggtgtgttgattcttgaaaaatagatatgtttatctgcgtatgcatacatgctcaattctttgtgattgataaacgttaaaactgtttagacactagctgaaagttttatatgccaaataagttgttgtactgttacttttgaggactcaataaattatttaatttaatgagctgactctttggaaaatttgttaaattttagacttcaagaaggagcttaggaccctcaacagagagcttcaattgcatattttggagctggcagatatattagttgagagaccatctcaatatgctcgtagggtagaagatattacgctcatattcaagaacttacatcatcttctcaattccttacgacctcatcaggcaagggccacattgattcacatgcttgagagccaaattcggcaccgcaaggaagcaattgaagatataaagcagaggagggaggaagcgcaaaaggtgcttggggaatcactgcttatcttggatggaagtcaaactaactaggctgacgccgtcaaggtagttggttcaagaccgattcttctatgagttagtgtgttagtagaatagaagacaagatgtgtctggattgttgtggtatcatctgttgtggcttgtggtatttccagctttgataactgaattttcttacttctatggtctatgttagcaaagttggattactttcttacttccattggtactcaactgcatcatgggttactttcttgtggaagtgtatattgtgagattgatgcctcgtggccagcttaattgaaaggttgttatatgctaata

SEQ ID NO: 4240 - DNA, 3200 bp, Zea Mays
tcctgtcgtgtttccttccaattccattctagcagttggccagaaggcaccacctttcccttcgcccgcaggcttttccgatccgcaaccagaccaaactccacaacatttcctcaagctgttccttcaagaaacctggatcaatccaaccttcaatcgcacagtccgtgggatctcccttgagttgcgatggaagaggggaccacggaacctggatcattctcccgctcttcctccttcgttggattcgaggagtgggtggcattggtgaggaaacgcaatgggaaggcctcttcgtgcgggcgtctgggtctccgttcaacagccagttcagaagtactagaacttgcagatcctgatagcaatgtcattaatcctgacccttgtgaccaagtgccagaaggaatcctttgggagaggcttgggagggtttccatgatggatattgagtcaagtgacttcagttggacctctctcacctcactgcaccatacaaaacatacggctacaagtactgatccatctgaggatgacattagcagaagttttgaggtgacagtaaattctgggggcattgtttttattgcattattcaaagctattgaaaatgttgatcttccgtccaaggaaacagctgcagtaattaaaatagcaccttcaaggatggccacacagtctgaacgctttgggtacgaactcgctaaatggcttggagtgagaactcctcaaggtagagtcattcatagctcctcagatgaatggcaacaagtcaaggatgcagttgaaaatgctcgaaatgcatcgatagcttctggtgatgaacttgaggagatgatttgcgccgaggttttagaagcccttgaattgagtcgttgcctatttctgatgaattatgtacatggctccgctctgctagagaatgtaatgcccttcgagtcacggcaagctgctgaaaaaactgctgaagcattaggtagggtcttaatcttggacctcgtattgaggaatgaggatagactgcgatgccgtccccttggctggcgtggaaattatgcaaatctacttgttgccaacagggaagcttatgccaaccttgactcactagatgatgtttatgattctgctatcattcgatacaagccagagatcattagaagccctcagaaacagaagcagagaagagctgtttcaattagtggcagtattggctcagatgtctctgacctcacattggaggactcttatgcttctagtggacatgtgttttctagctttaatattgtagccattgattcaggtgtaccacgcaggccaccagccagtaagcgggcaaaagatcaggagagctaccccaaactagtggagttaacattgaacaacttcgactattcttccaaacttctgtttgaggtgtccttcggaaaacttggcaccccaggacatgaagaatttgatgtaccatcagactacagttataattctcctctctctgagagtgatatggtagcaacagtgcattcattccgaggaggttttcgtagtgctctgagagaccttcagcgattccacatttttctcatcacactgtatcagaagctggatggtctattaaaaattttcttcaaccttatgtataaatgttccaatgaatatgctagggaggatgctggtacttcggattcaccattgtgttcagtggaaccacaaggagattcaaatgatactgatgttccaaggcatctgcgtaagccttcccgaaccttatcccgtgagagtctagaccaatcatctccttgtcgggatagctttatcaccagacatttcaaaggaaatggtgattcctcccgtggtcttcggttgacaatgaagctgcgagattttaacaagtatgccaaggttcgacttgagcacattctcgagaggatatctttgatctctgatgctgcaagtactgagcgtccatcacagatcacagattatctgtatattggtggtgctcttgctgctcggtcaacacacacacttaaacaccttggcatcacccatatattgtgcttgtgtgcaaatgaaattggacagtcagaatcgcagaagcctgacctttttgagtataggaatttctcgataaacgatgatgacaatgcagacattggtgatctctttcaagatggttctgatttcatcagttatgtggatcacttgcgtggcaaagtacttgtgcattgctttgagggaaaaagtcgaagtgcgactgttgttcttgcctacctgatgctgaggaagtaagactgcacagtaattactatatcatcactatcatgcttctctgttaaaaccaataactcaccacgactaaaacaatctattaacagatttactatttttcatgtgatcttaaggtctatcaacccagaattgacatctgtaaggataggaagattggaattgcatctttccttattttttattgttctggacgcagtcatcatctcgtaatttcccctttttctcttaagaaactgtactctcctggaagcatggaacatgctgaagaaggtgcaccgacgcgcgcatcccaatgatgggtttgctaagatcttgctggatcttgacaagaaactgcacgggaaaatctccatggaatggcaacacaagaggcctgcaatgaaagtgtgtcctatctgtggcaagaatgctggtctcagcagcagttcactcaagctccacttgcagaaggcacacaagaagatatcctctgggagcgtagacagtgcaatgactctggagatacaaaaagcattagaggcaatcaaagctggctggggcggcagtgacagcccagtgcataaatcacaatcacacatagaaggattttgacgtttaatcttacgttcctacggtcctattaatatatcaacaaggctggtagtcggcgaccgctttaagagtgaagcctcagctctagacttcatgacacttgtaagtagcacatttttggaacatttggtttttattctatagttcatgagcttggattgacaagaaccatccatagagggaatgtagtttctgttataaaattgtgcgattcttttttcatgaaacttgtacgagatgagcattcagattctttggctatcaaattttgaatctgttgtcctgtataatcagtttgttcaaatggacaagctcttctttta

SEQ ID NO: 4241 - DNA, 1023 bp, Zea Mays
acacgtatattacaacagctgtgctgctaggcacccactccccagtcaaggcatatccattccatggatctcgcgtccctgctcctctcccagctgctgctgcttccggtggtaacggttgtctccggcgagaccgccgcgcacccgggctacgcgcacgctgaggaggcatgcagcggtatgctagaggcagaggcggagaaagcaacggtgctggtgcctgcgccggagcggcgcgaagagttcgacggcgggcggatcgtggacatcagccactactaccgcgaggacatgccggagtgggagtcatcagagggctccggcgagttcctgcagctggcgcggtccatgcgcaacggctccgacatcgctaacttctcggagctccggctcactgcgcactccggcacccacgtcgacgcgccgggacacgtcttcgagcactactacgacaccggcttcgacgtcgacaccctcgacctcgctgtcctcaacggaccagcgctgttggttgacgttcccagagataagaacatcacagctgatgttatggcatccctaaacattcctaaaggtgttcgacgtgtactctttcggaccctaaatacagacagaaagcttatgtggaagaaagaatttgatacaagttatgttggcttcatgaaggatggtgcacaatggttggttgataatacagacatcaaactagttggagttgactacttgtcagtgggcgcatttgatgaatgcattccagctcatctagtatttcttgaaaaaagggagcacgtcgatcttgcatgaggatttatacaggttcgggccgcttgaatgtgtaacatcctacttcctgttgaggctgtatactgaaattgttctaggttatatgaattacaaatgagttgcgatggtgctcagaggtcgtggatgatggctagtgtgtgatgggatgagctgtttttgtagagatacccctcggccttatatagatgaccagagggttatccatttacaagtcgtgat

SEQ ID NO: 4242 - DNA, 2277 bp, Zea Mays
aatttccgggatcctcgactcgtttcccttcccactactctgatcctctctatcagcgccgcctgcctccaagtccctgaatccacgggcgactcgcttgctccccctgttttcctcggccgccggagcgcgtcgcctccgagcagcagcagcactccggcagtccctggttgttcctggtggttcttgcctcctcgtctgggtgggtgggtggtggaatagcgtcgtcttcgctggaacccacctgcctgctcttgctccgctcgcgcagtcgcgctggaggtgcgtgattctttttcgccgccacgtcctcagttcatgctgtgttgttcgcctgcgaccgtgaatccgtgattgccacgcacatttcattagtctgcatttatttctatcttggggataaaagaatgtcgggagctcggaactctccgtgttatttgaatgccaagacaaatgcttagcaccagcgaactcgtggccttgacctgaagaaaaatcgtttttttctctcactcgtagtattaaatatttactatcattatttcttaagtttgcagctaaagctactgattggttcgtactgaccagccaagccaaagagggattctttggaggcaaccagaggtgtttggtttggtcaagctcccttcttttgtcttgcccatggaatgcttgctgtgaactgcttgtattcatgcttgagagaatttcagtgtagcatcttgtggtcttgtcctctctgattggaagagaaaacgtgctgtcttgtggcttgctatgtctgtctcggagaaggtggtgctatcatcatcagtttcttcgtcgtcagatttagatccgttgctgaagggtcttacggagaagaagttgagctttaggaggaacgtggtgtcattggcagccgagctcaaggatgtgaggagcaagcttgcttcccaggagcagctgtttgtaagggaatctcaaactagaaagcttgtggatacaaaagcaaggagcatggaagaggaagtaagcaagttgcagaaatgcttacaggacaaggatgagcaactgcgttcatccacaagtagcacggaacagctaagtcagcccagatgcagtgcttatcattgctgaaagagctgaatgagaaggacatctcgctcaaagagcacgggcttcgagtgaacaagctaggtgagcagcttgatcttctccagagggaactacaagcaagggagctctcgcaaatgcaacttaaagatgaagttataagaatcgagaccgacatcatggatgcagttgccaaagctgggtctaggtctgacaaagataatgagcttttaaagatcttatctgatgtttcaccaaggaatgtccagaacctcaacaaccttttgaatgctaaggatacagaaattgcgaggttgagagaggaaatcagaatattgtctgctcactggacgaacaaaaccaaggaacttgagtcacatttagaaaagcaccggagaactgatcaggagctgaagaagagggttctaaagcttgaattttgccttcaagaatcccagtctcagatgcgaaaattaaagaggatgggcgagagaagagacaaggctctcaaggagctcatggaccaggtggccacgaagcagccaaacagcatgtgccatggcaacaaggagaatttctgggagggccagggcttcaagttcatcgtgtctatgtcgatgctggcactagtgatcctcgcaaagcgatgaagcagcatcgcatacccaatcttgtgtaaagaaggtagagattccatctatcgttaggtgagcaactagctcatagcttaagcagatgtcgatgtagcgtttacattagtttgttgtttgtattcttgggcagctgtgcataatgcatggtcagaagttgcagtctgtaatccgtagtctctgctagggcatgtgaactcagaaggtgtcttgtactcacatctagttcatgtcagctcttgagcagtcatgaatctacatcttgtaatttcagagtagcttcagcagttgtcacatgtaactctataattgctgaatctacatcttataatttgcactcttatggttgcgaatttggtaaaaacgcgtgatgcagcattcatcgtttctttttagttgtcgctggatagttcaattttgcactatccagcgacaactaaaacgaaacggagtatgacgcaagcccagcttgaattagaaatatatggtgttgttgaacaccctcaaatcaaatgaatatgattattcaccg

SEQ ID NO: 4243 - DNA, 1033 bp, Zea Mays
cctctccgcgttcctcgtttcgctagcataagcaacccgtctggaccctcacccgccgcaacgccgaggagacgagaggaggggaggcgcgccagcggaagcggaaacctcgggtgtcgtcgaccaacctcgtcgatccggttgcgacgcggtgtgctagaataactaccgaccatggtggaggaggagatcaccgagggcttgaagaacctcaccgtcaccggagacgcggcggcttcgggcggagaagggcagaggaggggcggcggcatcagcagcaaccgcatccaggtgtccaacaccaagaagcccctcttcttctacgtaaacctcgccaagaggtatatgcagcagcacggcgatgtggagttgtccgctcttggaatggccatagcgacagttgtgaccgtggcagaaattctgaagaataatggatttgctgttgaaaagagacatctactgttgacataaacgacgaatcacgagggcgtccattccaaaaggccaagattgagataatcttgggaaagagtgacagattcaatgagttgatggctgctgctgccgaagagaggggagaagttgaagaaggcgaagagcaggcttgaaagaaaaaaaaaacagtaccgacgacaagcggctgttgttgtggtctgttagttttgcttaatttaatgccatgcgcatgagagctggcatgcgttctcgctcatctacattgccatggcaatgtctgcaaactcatggattgatggatggatgctggtttcttccaattttgacagcttcatttgtttctttggctacgcatgttttgccagtctgacgttctccttacgaaatatggcgtgctttgttgactagacagaccatggttccttccggaactaatgattctgcagacactgttggtcttcgggatcatttgacagctagtagttcatttgtttcttttggctacactgttggatccccgaagaactccacacggaactgctcaaattcttcccatgttcgacatgggtcttttttg

SEQ ID NO: 4244 - DNA, 1640 bp, Zea Mays
tactggttttatttcgttggttgattgattgatgaactgctgtcgaacttgttaggctacttgatttgtgctaaacgctgtttcttctcattactcctagcttgtataggtagacttgccttttggaatgctggcatgctcttgatttctttggattatgaattttgccgtgaactatgagcaatactcagtttgatgagaaattgtgacattttggctggcgtgcaggcagtcaggcaggacaacaagcagcggtttagtctgttggaggaagatggcgagctgttgatccgggcgaaccaggggcacacagtaacaactgtcacatcagagagcctgctgaagcccattttgtcccccgacgaagtgtcagtttgtgtgcatggaacttacagaaaaaaccttgactcgattttgcaatttgggctaaagcgtatggcaaggttacacatacatttctcaagcggcttaccatcagatggagaagtaaccagtggtgtacggcagaatgtaaacatcttgatacatctggacgttagtaaagcacttaaaggtgggatgaagctttatatttcagacaacaaagtgatcttgacagaaggttttgatggcgtcgtcccggtgaaatactttgaaagagtcgaaacatggccaggacgagctccaataccgttccagagataacaggccatgttaccatttttcgtgattcgattgatgattttccggactccgtgaaaagctgtggttctttgtgtgtcttttcggtttttgtgtaacgaaaccaaaagacgagttagtttctctgtgcctgaggatgtcaagagggtttgccaaccatctatcctaattaatggagtacgagaagtttgcggagtatgagcagaagtactcagaggatgcagcaaccaaacattgaaaagtatcatggggagttgcctgcctgctgggctgatgcccttcctcagctcagtttggcaacttccagaagcatacgcctgaggtgcgcaacgtctgcttcggagcgagggagcatggcatgggcggcatttgcaacggtgggcacagcccagggctccgtttcatggccaacgactgctatgcaagcagtccttctttacaagcgtgcaagcaaacatccggtccattagattacgatccaaccacagatataactataatttgttatggttttttataaagattattgagttggtggtgaaaaggtttaagtattaaatgtgacctacggttgaatcacgatctaatggaccagatggtttgcttatggtttgcttgcacgcttgcaaagaaggactgcttgcatagcagtcgttgccccgttctatgttgttggtacctatcttgcttctctgatcgatcaataaaaggagacattatttgagggaccctttttgggtgccttgtatgctgtagctgttcaagtggctgaataaggctgcaagtcttgtgtaaggtgagactctgatgcataagctttgcaacttgcaagtgatgttggattttggaatgttatcaactttagtacacgttttctggccgtctgatcgaatcctggacaccaggggtagaattaattggtcgatcagagctgttaatcgtccaggccttgaaaaacg

SEQ ID NO: 4245 - DNA, 1507 bp, Zea Mays
tcataaaccccctccttgatcacctttcctaaccgctaaacttattagatccaccctcaccaaccagccgcctgacgttcgagccgcaccggccctaaacccttccacctccagccgccataactgtaatcccttccaccatcagctgtccctccgttcgagccgtcgacgccctaaccctatcaccttctggccgcccaaatccctttcggctcctgccgccctctgtttaaggcgcagaccatggagtcgtcggttatggcggcacagaccatggagtcacaggctatgatggcgcaggtcttagtctttaggccatggagtcgcagtcaggcgttcaagatgctctgagacttgtgtcaggttcttccaacatgcatgatggattcagtacaccaaaaaaattaatatccttctgacatcggtgagctgctctttgctttggtttgttctgctgccatattgataaattcatgtaatgcctcgttgcagctgtccatctgtgtacttgattgtgatgataaattgaagccagtaattggaacgtcatttggttctctagaggaggtggaagaattgtacaagatatatgctcttgagaattttattggctgcaacattccagaacatatcgaaatccatccaccatccgatgttcactcccagtaaaaacatcaagaaatccaaagaactatttaaatcgtgtaaagggaaaaatagtaaagtgagacgaaggtagtcaaacagtcatattgctaaagtattacaggtatgagaaagaatccaacaacatgttgaggagcttctacagtgttattggcatgggaattttgttagcttctatagtgctattggtatgttgaggagcttcaaccagtcagctcatcagttagaagactacaatgaaatatctgaaatagcagatataacttctagtggatgttcactggagatggttgctagtatgtaacaacttctagtttcttctctattgtcatatatagtgcttattttctggagctaacgtaaatgttctttcagcaacatacaatgagaggtctattaggtcacatctctgacgtgtgaaggggctactatctctgtctagtctttatgtttccctgtcaacgtccttagctctgcttcaggagtctgctcaaggaaaattagcaggacttatatatgtgatctctgttcactgatgtggctggagcgtcatgtcaactgctcaccctccccctaacaaattaaactacacggatgagtggagcttcatgttggatgatccatgcaccttttaagttttggaacgtcgtactcaaatgtagcttgtgttggttgaacctattgtactttcttttggatttaaattatatgatatttaaacattttttatgtttaatacttgtgttggatgctttatgcttcaaataatcatcacaattcgtttgatgtttaatacttgtgttggatgctttatggttcaaatattcgtcacaattcgttt

SEQ ID NO: 4246 - DNA, 2872 bp, Zea Mays
gcatcttcgagccttccacagttccacctcccgcctgctggaccctaggctttcttgccccacgccgtatccaccagcacgagtggagaaactgaagcacgatcccgaccacttcagaacccgatttggtggccacctccgttttcgctagtacttaatcccagttacatcaacaagaattgctcctctaagttctattggagcgtaatctgatcggtttgggtcggttcgagaacttgagattgcgatttgggagttgcgggagagaaaggaagagatgggccagagcaaggcggagtttttggagcagttcggtggggactacggttacccggacgcgcccaggggcatcgacgatctgcgggccgccgagttcaagcggctggaagggatggtttacctggaccatgctggtgcgacactgtactcagaggcacagatgacggatgttgctagagaccttatgtctaatgtctatgggaatcctcatagtcagaacgatccaagcatggctacaagtgatattgttacttctgcgcggcatcaggtcctaaaatacttcaatgcatcaccaaaggactacaaatgtatatttacatcaggggcaacagcagctctgaaacttgttggtgaatgttttccatggagtagagacagctgctatatgtacacaatggaaaatcataatagtgtgcttgggataagggaatatgctctgagcaaaggagctactgcatcagcagttgatgttcaagaggttatcgatccatcaaagagtcatgaaagtgacagtatgtttaaggtttcaaaacacctaaatcaaagaagaggtgatgatgtgcttctgcacaagtatcagaatgggagcctggcacctatttcaggaaacagtttaaatctatttgcattcccttcagagtgcaatttctcaggacataagttcaacctcagcttggtcaagttcatcaaggaagggaaatttatggatttgccatcacagcagcagggccagtggatggttctgatagatgctgcaaaaggatgtacaactgaaccaccaaacttaaccctgtattctgctgactttgttgtctgttcgttttacaagatatttggctatccaactggtcttggtgccttaatcgtaaaaaatggaacggtagctgcttcaattgctgacatcgactttgttcagaaaagaaaaagcattgagcaagctcttgaggatggaacaatctcattcttgagcatatcttctcttcgacatggatttaagataatcaatatgctaactatctcggctattgcacggcatactgcatctcttgctacttatgtgagaaataaaatgctagagctgaagcatagcaatgggaaaaatgtttgcatgatctatggacagacttctaaggtgaatcatctgaaaatgggtcctacaatcacattcaatttgaaaagagaagatgacacctggtttggatatcgtgaggtggagaagcttgcctcactgtcaagaattcatttgcgtacgggctgcttttgtaaccctggtgcatgtgctaagtatgttggtttgtcgcactcagatcttgtttccaattttgaggctgggcatgtttgttgggatggtaatgatgtaataaatgggaaaccaactggtgctgtgaggatatcatttggctatatgtctacatatgaagatgcagaggaatttctgaagttcctacggtcatcttttgtgtccaaacctgtaggattgaacaatgaatacatggtgaatatggatactcttaatttagtagatgattggagccaacaagctctttcagttattcgcttgaaatccataactatctatcctgtaaaatcttgccaaggatttagtgtgcagagctggccactgacaactggtggtttaaaatatgacagagaatggcttctccaaggattaggtggtgaaattttgacgcaaaaaaaggagatctgcatgtcatttcaattaaggagagaaaaacaagaggtctggcaaggccagaccgattacaaaaggaacacaacaaaacccacaaggccacaactcagacgagggtcctcaaccacgaccaacaaaaagaacaccctaaagaaaaactcaaactaaaccatctagcgacccaaccaggaactcctgtagctttgaagctccagccatgcaccacattttgcattcctccacaatcttccttagaagatcagatatacacggtcttccattataaaaaacacagctatttcggtgcttccaaattttccaggcagcaaggatgatcagagagttcagccccctatgccttccctttggcgtcaaacgaaccacctttctccaccactcagggaaagaataatcatccagagtgggagatagacctggaatgtggagtgcctggaacatatgaaaccatagctgtctagaaaaactgcaaccaactagaatgtgaatgtgattaatggtctcatctgcttgatcacaaagggggcaaacctcagggtggggtaaccctcttttggccagcctatcggctgtccaacgacacttcttgaacaccagccatataaagaacttgcaacgaagtggtgcccaactcttcgaaattttcttccatggagaaaaacggatggatccaacaaagaaagctgcatatgcggacctgctagaatattcccctgaatctgaaagcttccatctaaaagtgtcaggaacctctggctataggataaccccttgcacttgatcctagacctggacataatcaatcagaactggaatggttaggccccttgaatatccatccaccacccacttgagattatttagagcttcagctacagttct

SEQ ID NO: 4247 - DNA, 1487 bp, Zea Mays
cgaaattgagaactgcctgctgtcctctccccaaccccatttcatttctcgggcgcacttggaggagacgggcaaagccgctgagcaagttgcacttaaccctgataagtggctagagttcaagctccaagagaaggcaacagtcagtcacaactcacagttattcaggttttcatttgatccatcaactaaactgggacttgatgttgcctcgtgcctcatcacaagggcacctataggcgaggaagctgagggaagaaggaaatatgttattcgcccgtacacacctatctctgatccagactctaaaggatattttgacctactgatcaaggtttaccctgatggaaaaatgagtcagtattttgcaagtttgaagccaggagatgttgttgaagtcaaagggcccattgaaaagctcagatacaacccgaacatgaaaaaacaaattgggatggtaagatagccttaacttgctttgaccttttgatttcatccctgcaaggattttttttcgaaaacgcaggagagctgcgtatcaatatattaagaagaaagggtgaggcaagataatttttcatgtatttgattcaattgtttttagctcgtatgtttgttttaccttgattagagagtaaccctgcagatactatagctgttgaataatgtgcatgcctttggttccagatcgctggtggttctggtataacaccaatgctgcaggttgtcagggctatcctcaaaaaccctaatgacaacactcaggtctccttaatttacgccaatgtgtcaccagatgatatattgctcaaaagagaactggatagacttgccagtagctatcctaacttcaaggtattttatacagttgataaaccgtcaactgactggaggggtggtgttggttttgtatcaaaggacatggttttgaaaggtttgccaggcccagcggaggactctctgattcttgtttgtggtccaccaggaatgatgaatcacatatctggagacaaggccaaggatagatcacagggcgagctctctggcgttctgaaagacttaggatacaccgcagagatggtatacaaattctgagaagacagtagtagactctgctgacgcacacacattcttgctgccctgcagtcaataaaccacacctgaactttttgttgttgctgctgcatctggctctgaactggaaaccgttttgacttgtttcctgatgtaataataattttcatccgagaattctaggtgtagcttcgggtgttctgcagatgccacgctgcgatgtttgcgaaaattctagtatgctggcacttgagataagagctatcgagttctactggatagctgcagcgaattatggtatgttggaagttggaacccagtcatttgtcgcaatctggcgcgtatgtgccgtggcatctaggaactcgttgccgtatggtggatgtcgtaatcgtagagagagagagatgctt

SEQ ID NO: 4248 - DNA, 2464 bp, Zea Mays
tagcatgctaattgtctctcattgggagtggttttccgagataatcaagttgtgcaggaaagaataatggactccaatgacctagaacgggaaagagggatcacgattctgagcaagaatacatcaataacctataagggcactaaaatcaatataattgatactcctggacattcagattttggtggggaggttgagcgtgttctgaacatggtggaaggagttcttctagtggttgattctgtagaggggcctatgccacagacaaggtttgttctgaagaaagctctagaatttggacatgctgttgttgtagttgtaaacaagatcgacagacctactgctcgtcctgagtttgtggtgaattcaacatttgaactatttattgaattaaatgcaactgatgaacagtgtgatttccaaacagtctatgcaagtggaattaaaggaaaggccagtctatctcctgacaatttagctgatgacctaggacccctttttgaggcaattcttagatgcataccagagccacgcgttgagaaagatggtgccctgcaaatgcttgtatctaatactgaatatgatgagcacaaaggaagaattgcaattggacggctgcatgcaggagaacttcagcgtggcatggaggtcaaggtttgtacaccagacgatgcttgcagggttggtaaagtgagtgagctttttgtttatcagaacttcagccgtgcccccgttgaatctgttagtgctggtgacatttgtgctgtatgtggaatcgatgatatcatgatcggggaaactatagctgataaagttacaggaacaccattgcccactatcaaagtggaggagccaacagtcagaatgtctttctccatcaatacatcaccttttgttggacgggaggggaaatatgttactagccgaaatctccgtgacaggttgtatcgcgagctcgaaaggaatttggctatgaaagtagaagacggggaaactgctgatacatttcttgttagtggcagaggcacactacatctcacaatattgatagaaaatatgcggagagaaggatatgaatttatgattggacctccaaaggtcataaacaagacagtcgatggaaaactactagagccttatgagatagctgctgttgaagtcccagaggagtccatgggatcagttgttgagcttttagggaaaaggcgtggacagatggttgacatggaagctaacgggaaatgactataagggctagtgccaatagtgttctgatttatcaggcttcaactgatttcctagaacaaccagacggagggaacaacattgctgaaatacaagattcctaccagaggccttattggacttcggaatgcaattcttacagcttctcgtggcagagctatattgaatacaatctttgacagctatggcccatgggctggagatcttagctcacgtgatcagggatccttggttgcttttgaagatggaagcactacttcttatgcacttcttaatgcacaagaaagaggtatgttgtttgtccaaccagggcaggatgtttacaaaggtcaaattgttggtatccatcagagacctggtgatttagcaattaatgtgtgcaagaaaaaggctgctacaaatgttcgttccaacaaagaaactacagtggttcttgatgaacctttaagctacagtttggatgactgcatagagtttatccaagaagatgagatagtggaggttactcctgcaagcatccgtatgtgcaagaacccaaaagtttcgaagaaaaagtaacataatcgcatccatttgtcgtcaatgcatcttctacacatagaagctgcatgctccgttgccaggtctcgtatgagtgacggctgcacggcgtcctcaagtcagtaatcaggatatttttggtggtctacagacaaagactaaaggtcgccagattaagatagaggattatatggcagttttgtgatgaataaatcagccgatacctggagtagtattatttggccacggataaggcgggcactgtttctcatctacttctccctgttctttttatttgtcgtgttttagttcaaaaatgaactagacgacaaatatttgagaacgaagttagtattacacatatattgtgtaggtcatacgtaggactataggcattgtacacgattctttcgacgctagtaaagactggaagaaagctttagcaaatggattagcacacaactgctgctacagactcttatttatttgtaattcaagccagtctataagttgcaacaaactcctgtgcaattttgaactgaagattatagggaagaacctaccattacacgaatgggcccatagatttagaggtactgtaatggttacattagggctagtttggtagtccaaatactggaggggttaaaatcccctccttagggctagtttggaaact

SEQ ID NO: 4249 - DNA, 1604 bp, Zea Mays
cagcttccttttttccaattcccaccacttgagcagaagtcgcacaagtcacaaccaagagccaacagagcaacgcaggcacacacgacacgaaccaggcaaccagctgcggacggaggaaccctagcggaacactgtgccggtgacggcggcgcgctaccggtgacgggggatacggcggcatcggcccctcctccatccccggcgcggcggcgccagcagccggcctgcaggtagttgaatggcttcaagtgcacgggacattatgtttcggcctctcaaaacattaactataagcccggcactggcatctggtgtgatcagacagcgttaccagcttcaacagcatgcaccagtgagtggcacatccaaaggaaaggctaagctcaaagcaggtcagcctttgaagcgttccaccattggagcaaagaaaggggcaccttccgctgctggtggcggcggtggtcgtggtcgtcgtgaggccattgagcgcattattcagatttccgagtcatgtctcaatgcatctactccgttgcggcacttgcccctcaaggagcgtcttcgtgaggccaaacgtgaggaactgggtcttgtctccaaggagaggcaacgagagcttgatatagccaaagccaaatctaaagccaaatctaaaggtcctggtggagatgatggagaccgtgtgcttatgggtccaccgggccttgactatatcagtcttgggctagttgatgaggaggcaatccccaagtatgaactcacagtcgaggatggtcggcgacttgctaaagaatacagtcgtgtactaatgcggcggcaccgtgcaaggcaaacagcagagtcaatgcttctaaccctaaaaaaggaggccattgatgctctccctgagaagctacgagctgctgctatggtacctgacatgacaccgttccctgcaaaccggtacatggcgacactcacaccaccaattgaaggatatattgaaaaagtgcgggaagcggccaagaagcactctgtgaaggagaaacttcgctgagaattcaagagaggaaactgtttccgtaaggatgtttgctgttgagaggcatgcttggtgcaagtgcaatggtgagagctgccttactcgttatcatgtcgcagtttcgatgcacctctttgtctttgcggggaaaagacttcgatttatcccctatttacacctcatttatagtcatgtgggagcctctaggacgtttgttgttgacagcaacttccgcaataaagggttagcagtgagaccatgaaactaagaatctcccgattcctcacaaatgccccccgtactattttatactctagattgctgatacagcaagggttatatgatgcagcattttgttcgtatgtgctttcaatttttagttgcactgcatctttccatgaggtaatggtatattgtgtaccttatgtttctgcgagatgtcagtttcgacttttgagtagccctcatttggacatttggatttactacattgcagccgttcttgcatgaccttcgctccaggttatgcgtatgttatccatttgtgctgtacgatcttgaccgtgttctagtactgctg

SEQ ID NO: 4250 - DNA, 1613 bp, Zea Mays
caagagccaacagagcaacgcaggcacacacgacacgaaccaggcaaccagctgcggacggaggaaccctagcggaacactgtgccggtgacggcggcgcgctaccggtgacgggggatacggcggcatcggcccctcctccatccccggcgcggcggcgccagcagccggcctgcaggtagttgaatggcttcaagtgcacgggacattatgtttcggcctctcaaaacattaactataagcccggcactggcatctggtgtgatcagacagcgttaccagcttcaacagcatgcaccagtgagtggcacatccaaaggaaaggctaagctcaaagcaggtcagcctttgaagcgttccaccattggagcaaagaaaggggcaccttccgctgctggtggcggcggtggtcgtggtcgtcgtgaggccattgagcgcattattcagatttccgagtcatgtctcaatgcatctactccgttgcggcacttgcccctcaaggagcgtcttcgtgaggccaaacgtgaggaactgggtcttgtctccaaggagaggcaacgagagcttgatatagccaaagccaaatctaaagccaaatctaaaggtcctggtggagatgatggagaccgtgtgcttatgggtccaccgggccttgactatatcagtcttgggctagttgatgaggaggcaatccccaagtatgaactcacagtcgaggatggtcggcgacttgctaaagaatacagtcgtgtactaatgcggcggcaccgtgcaaggcaaacagcagagtcaatgcttctaaccctaaaaaaggaggccattgatgctctccctgagaagctacgagctgctgctatggtacctgacatgacaccgttccctgcaaaccggtacatggcgacactcacaccaccaattgaaggatatattgaaaaagtgcgggaagcggccaagaagcactctgtgaaggagaaacttcgctgagaattcaagagaggaaactgtttccgtaaggtgaataaatattcaacctaatgtacaagaacagctttggcacaaactgcaattgccatatttggatgtttgctgttgagaggcatgcttggtgcaagtgcaatggtgagagctgccttactcgttatcatgtcgcagtttcgatgcacctctttgtctttgcggggaaaagacttcgatttatcccctatttacacctcatttatagtcatgtgggagcctctaggacgtttgttgttgacagcaacttccgcaataaagggttagcagtgagaccatgaaactaagaatctcccgattcctcacaaatgccccccgtactattttatactctagattgctgatacagcaagggttatatgatgcagcattttgttcgtatgtgctttcaatttttagttgcactgcatctttccatgaggtaatggtatattgtgtaccttatgtttctgcgagatgtcagtttcgacttttgagtagccctcatttggacatttggatttactacattgcagccgttcttgcatgaccttcgctccaggttatgcgtatgttatccatttgtgctgtacgatcttgaccgtgttctagtactgctg

SEQ ID NO: 4251 - DNA, 1812 bp, Zea Mays
ccgtggcggcggctcgcctcctcaaggcctccagactccagtgctcggcgtcgacgtgcgaatcagcgacctccaacacgccgccgcttcgtttctcctgtctcctgattcccgatccgctgagcgccagcgacgacctgctctgcgcgcctggccgtccccgtccttctgcgcagtgccttctctacctcttctcctcgccttccccgcaagactgccttggcgtctctggtagttgaatggcttcaagtgcacgggacattatgtttcggcctctcaaaacattaactataagcccggcactggcatctggtgtgatcagacagcgttaccagcttcaacagcatgcaccagtgagtggcacatccaaaggaaaggctaagctcaaagcaggtcagcctttgaagcgttccaccattggagcaaagaaaggggcaccttccgctgctggtggcggcggtggtcgtggtcgtcgtgaggccattgagcgcattattcagatttccgagtcatgtctcaatgcatctactccgttgcggcacttgcccctcaaggagcgtcttcgtgaggccaaacgtgaggaactgggtcttgtctccaaggagaggcaacgagagcttgatatagccaaagccaaatctaaagccaaatctaaaggtcctggtggagatgatggagaccgtgtgcttatgggtccaccgggccttgactatatcagtcttgggctagttgatgaggaggcaatccccaagtatgaactcacagtcgaggatggtcggcgacttgctaaagaatacagtcgtgtactaatgcggcggcaccgtgcaaggcaaacagcagagtcaatgcttctaaccctaaaaaaggaggccattgatgctctccctgagaagctacgagctgctgctatggtacctgacatgacaccgttccctgcaaaccggtacatggcgacactcacaccaccaattgaaggatatattgaaaaagtgcgggaagcggccaagaagcactctgtgaaggagaaacttcgctgagaattcaagagaggaaactgtttccgtaaggtgaataaatattcaacctaatgtacaagaacagctttggcacaaactgcaattgccatatttggtgatctaatcagacatcccaatttgctgagcagccattatctagtgaaatcctttttgccatttttatgcaactctacaggattgttttttttttttgcagttgtcgctagactgtcatttcattttctgtttttgctcatttaggatgtttgctgttgagaggcatgcttggtgcaagtgcaatggtgagagctgccttactcgttatcatgtcgcagtttcgatgcacctctttgtctttgcggggaaaagacttcgatttatcccctatttacacctcatttatagtcatgtgggagcctctaggacgtttgttgttgacagcaacttccgcaataaagggttagcagtgagaccatgaaactaagaatctcccgattcctcacaaatgccccccgtactattttatactctagattgctgatacagcaagggttatatgatgcagcattttgttcgtatgtgctttcaatttttagttgcactgcatctttccatgaggtaatggtatattgtgtaccttatgtttctgcgagatgtcagtttcgacttttgagtagccctcatttggacatttggatttactacattgcagccgttcttgcatgaccttcgctccaggttatgcgtatgttatccatttgtgctgtacgatcttgaccgtgttctagtactgctg

SEQ ID NO: 4252 - DNA, 2868 bp, Zea Mays
cctcttccctcctccacccacttcacctggcacactagtggccactgcactggtagtagtagcccagtactggcaccgctctagcccagatcaaagctcgggagaagagggagaggaggtagtgcaacataaatcccgagtcccaccaaatcgcaagtcctagcagcttccggtctgcaactgcaacgccgcgggcttgagtgcgagagtgcgcgtgggggatgaggcgggtggcaccggcgatgaccgccgccagcagcgctgctggcggcgaggagacggcggtggtggagaagacgctgctcaacggggacgtctaccgcggcggctcgccgcacgggaagggcaggtacgtgtgggccgacggctgcatgtacgaggggaactggcggcggggcaaggcgtccgggaagggccgcttctcgtggccgtcgggcgccacgttcgaggggcagttccgcaggggccgcatcgacgggcagggcgtgttcgtcggcccagacggcgccacctaccgcggcgcgtgggtggcggaccgtcgccacggcctgggcaacaagacctacgccaacggggactgctacgagggccagtggcgccgcaacctccaggacggccacggccggtacgtctgggccaacggcaaccagtacatcggggagtggcgcgccggggtgctctccggccgcggcgcgcttatctgtgccaatggcagccgctacgacggcgtctgggagaacggcgtgcccaaagggtcaggggtcttcacgtggcccaccggcggctcctggcctgggagctcggtagacctgccggccatgagcgccactttcttcgcgcctcctggtgctgttgctgtgagtaggaggtcttctgtggagggcgtgggggacaaggcgaccccgcggatctgcatatgggagtcggagggcgaggctggagacattacctgcgacatcgtcgacgcgctcgaggcgtctatgcctatgctcttcaaggaagccgcggctatcgcgggtggagcaacttacatgcgatcagccagcggagtcccacgctgggcgtcggcggtggcaaccacgccgcagagtaaacgacccgggcggaccatatccaagcgacacaagaattacgagcttatgctgcagctgcaattaggcatcatgcattccgtggggaagtcttcggctgtgccgatgcgagaactggaacagggagattttgatccaagggaaaatgctttgtcctggacagagttcccaccagagggttcgaaggccacactgccgcattcaactgggtacttctgctggaaggactactgccccatggtgttcaggcatttgaggaagttgtttgctgtggatacaggggattacatgctttcgatctgtggcaatgatcctctgagggagctgtcttcgcctgggaaaagcgggagcttcttttaccttacccaagacgaccaattcatgattaagacagtgaagaaatcagaagtcaagctgctacttaagatgttaaatagctactgcaaacatgtcgatcgatacaagaactcattaatcacgaggttctatggtgtacactgtgtgaagcgccataatggacagaagattcatcgccgttttgatttgaaaggttcatcatatggacgaacagcagacaagtttgaagatgagattgatgagacaactacactcaaggacttggacctcaattttgtcttccggttgcagaaatcttggtacaccgatctccatgaacaattgagacgagactgcgatttcttggaatcagaagggattatggattacagtttcttgataggaattcacttttgtgatgacatctctgcctcaaagatgggatcctctacttttactgcttctccaagtggtggcacaacagagctttgcttctcagatgatgcttttgatatggtacctgattgcagccggaaatctttgattagactgggcgcacacatgccaggccgggcagagcaagcatccagaaggagcgggttcgtattcccaaaccagaccggcgaagtgcacgacgtgattctctttttcgggataattgacatccttcaggattacagcgtcaaaaagcggctcgagcatagttacaagtcattgcagacagaccccaactcgatctctgccgtggaacccaagctctactcgaggaggtttcaagagttcatcggcagaattttcgtggaagatggctaacacgcattgggtacagattaaccggtggagcagcagctcatcggcggctaggtaactaaccgtgaagcctcgggtcagcggtgaaggggatctgagttcgaagcaaacttgccccgaattctctccgaaaaccattcgagtggctggatttttgaagcgcagccatgggatcggatggttttgtctgtaaattatgtgattggttcttccggctacattatagcagcagtttgtttgtcctccttaatttagttggaggtttttttatcttcaccccccccccccccccccccccttccccttctgtatatcggtccgatgtgaagaatcgggcagtgagttttgtttccagaaaggattatttaagggctttatagggtgcatgggattgatggacatataatccatggattatatgatacttacaaggcattatatgtcccttgatcccatccaatctgcatgtaaccaaagtcataaggctgcggcaggcagtgaataataagatcgtgtacagatacaccttgatcctgggaatgggtggattagaattcaattcagcgtcgtcatgacccgtgggtcccagatcacggcttctccctcttcacctttgtgctgtttgtttctt

SEQ ID NO: 4253 - DNA, 1320 bp, Zea Mays
ccccaggcccccactgcaggcccaccaaaagaaaagatcacgacgcgacccgctcgctctcgctctcgggccccagtccgatcgggtcggtgcctacccacccccgctggccgccgcacccaggcgaggcgaggcaaggcgcgtcccgaacaacggaaccaactgcaccgaccgagtcaatcaatccggcgagtgaccgagtggggtaggttgtgtgcggcatgacgaccacgcgcgaccgtggcgccggcggcggatcggcgtcgagggtcggtgacggggacgtcgacctgggcgagggctgggactggggcgccatcccgcggctcctctcctccgcctgcctcttcctctgctccggaggctgttttggttgctgcgataagactgtaaagcaactgggtgaactgtccagaaacttgatcacccaggaccaaattaccattggagagccattttggagcacaaccaccatcgaggttgaaccagcagatctcagtggtgttacttcagtcaatacatctaacttggcctctggaactggtagcagtcataaccttcctggacttggtaataatggacttgttctgtgggaacatacaaggcaggagtggactgaaactagaagtctgcggctgaaggtgaagcagttggaatgcagcatatgagagtctgcttggatcaaataagccatttcctcaacccattcctcttcatgagatggtcgatttccttgtggacatctgggagcaggaggggctgtatgactagcgcaaatgatttcatgggataacatctgggataacacatagttgttcctcaagagaggggaaaaagaatgacatagagggtgtaggcttgggatgtggtgatgagttggcctgtcatacttgttttttgtcaatggaggcctgctgtacttgcagaatacagagctgtggttgtaagcttgtaagaagtcctgatactaatagtggctttgtttaatttgtcaaagaaaggtgtgtgaggttgagttgtgacaaaagtggattaggcctgctgatgggtttggattgaaatgagtttaaagggctgtgttttcatgtggttgcattttggttgggtagaaatgggttgatttactaagcgagctggggtggattaggtttaatagaaaattaagttgatgggttagtattgacttttttgggaggtttgaatgggcttaacctatgagtgtgttgtagtatacgtatatattggtttgaaaggaaattaatcgctgagtgtaacatgtacacttaaagtggggcccacgtgtttatattagcacactaa

SEQ ID NO: 4254 - DNA, 2407 bp, Zea Mays
ccccaggcccccactgcaggcccaccaaaagaaaagatcacgacgcgacccgctcgctctcgctctcgggccccagtccgatcgggtcggtgcctacccacccccgctggccgccgcacccaggcgaggcgaggcaaggcgcgtcccgaacaacggaaccaactgcaccgaccgagtcaatcaatccggcgagtgaccgagtggggtaggttgtgtgcggcatgacgaccacgcgcgaccgtggcgccggcggcggatcggcgtcgagggtcggtgacggggacgtcgacctgggcgagggctgggactggggcgccatcccgcggctcctctcctccgcctgcctcttcctctgctccggaggctgttttggttgctgcgataagactgtaaagcaactgggtgaactgtccagaaacttgatcacccaggaccaaattaccattggagagccattttggagcacaaccaccatcgaggttgaaccagcagatctcagtggtgttacttcagtcaatacatctaacttggcctctggaactggtagcagtcataaccttcctggacttggtaataatggacttgttctgtgggaacatacaaggcaggagtggactgaaactagaagtctgcggctgaaggtgaagcaggttcgtgaaccagtattgaggtatgagtgaatgaaatgacaaccagaacccaaaaagtttacctttacccatatcacgtttctgtcagacaagtatgtattctataaagtacatttattttaccaaatgcactttggcccttcttcatattaaaagcaaagggttatgctgggatcaccagcttttcagatcaaacctcagaataacatgttcgtctatcatcattttagctttcagtaacaattttgtctgcattcttatggaaacataaatattttcatctataatttagtttatatttagaggcataattttgttctcctgaagtttgaaattattgtgatggacctgttcttatccaggtgatatcagctgtattggctttgatggtttcagtttctactgaatcttccaattgtgtgctgttagtctaatttatcacttcattcatgttgtgcactatatgttgctcaagcccaatatgttctttcatgcactccctacgatttcacaatatttgctcatcatcctcactagcgtcattgggaacacttctacacctattttaattgtagggattaggaagtgattaagtgattgtaaaacaatatctgataaggttatattgagcttggtcatgcatactgtaaatggttatatctcatgtgacctgtaagttctacaacatattgtctaagaaacttccataagcaacaaatagcgtacctttgaatcaaatttgatggcagctgctcattttacaagaacaatgcagtgaaccagctatgatgttaattgaataagaaaacggacagtcagtcttatttctctacaatttgtttccggtgaaatagatacaaggtttttattccattctgcataatatgctgatatcttattttgcttctgattgtgtatttcgtttgtgcaaccccaagaagctttaaggaatgctatcttattgactggagatttctgtgattgtgctaaaaaatctatatttccatatgcagttggaatgcagcatatgagagtctgcttggatcaaataagccatttcctcaacccattcctcttcatgtaagatctaacacatttcagtctagaatttcttgcaaggaatgcacgctcaaacatgggtcatgacattgcaggagatggtcgatttccttgtggacatctgggagcaggaggggctgtatgactagcgcaaatgatttcatgggataacatctgggataacacatagttgttcctcaagagaggggaaaaagaatgacatagagggtgtaggcttgggatgtggtgatgagttggcctgtcatacttgttttttgtcaatggaggcctgctgtacttgcagaatacagagctgtggttgtaagcttgtaagaagtcctgatactaatagtggctttgtttaatttgtcaaagaaaggtgtgtgaggttgagttgtgacaaaagtggattaggcctgctgatgggtttggattgaaatgagtttaaagggctgtgttttcatgtggttgcattttggttgggtagaaatgggttgatttactaagcgagctggggtggattaggtttaatagaaaattaagttgatgggttagtattgacttttttgggaggtttgaatgggcttaacctatgagtgtgttgtagtatacgtatatattggtttgaaaggaaattaatcgctgagtgtaacatgtacacttaaagtggggcccacgtgtttatattagcacactaa

SEQ ID NO: 4255 - DNA, 2143 bp, Zea Mays
gcccgcctcgctcactactggtctgcttgctgcttctggaatcccccctcccctccgccacccataacttccatcgccatcgctccaccaaagctggggacgcctccccgcccgaccagcgccgacgccgacgacgagcatcccatccgccagtgaccgaaatttcacaccaggcgctgcaagcgactgcaatggctatgtaccagcgctccaagcgggcagccgggaactagctcatcagtcattactgacggcgtaatcttcatccgagtggtcagtggcgtctacagtcgcagcagcttgtgcgcgcatggctagcaacatgtacggcaccacggtggcctgtaggatgtgctacagagaccagtacaggccgccgccgcgcgacttcacttgcgaggccaggaaatcggaggccaggaggtggggaaacgggtaccacctcatccccaggctctgccagtggaagcccagaggcagcaagtctgatggctcactgctcggcgacggccacggtggccgcgatgctcgctgccactcttgtggttcccataacagctgcgagtgcgaaactagagactgcgatgctatggaagatgctgctgcgagctcttaccgagatttcaagcaacattcaaggggaaatcctcaattttcagatgatcaagtttcatcgaagaataagtcagcctatgctagtcaagggttggctgaagcctgcaaatttgtttacaatgatgctaagtttgtaaatgaaagggctcaaaatgacattctattactttcacgtggcataacaaggctgaacaaacgcgcatgccaggatgctgctgttttgggcctggggtttctcaaacttgatgctcgtgcacggaaggatactcaaaagattgaccacacagtgaaggagagagcagcgcttcttaaccattttgccagagcatttaaggagcgagctcagtcagacttgaagaaagctgcagacaaacattggagtgatggtgccttggagacctgcgacgagctgacttggttgttaaacgacgtgccatggaagacgctttcatggcattgaagtttgttcaggatatccatgacatgatggtgaacagattatatgagcagcttccgaaggacggttcatcttctcgtacaaattcaacagggtttattacgcttgagaagaacgggaaggctcttgaactgtttcctggtgaagtttctgctgatcagatttatgccatagaggaagcataccagagtatggcatctgccttttctgaagctgatggtattgactacacagatcctgaggagcttgaattgttggtagcaactctaattgacctggatgccatggatgggaaaaggagtgtttccttgattgctgaatgttcaagctctccagatgttaatactaggaaagccctagctaatgcattggctacagctccatctatgtggactcttgggaatgctggcatgggtgcattgcagaggctggctcaagatcccaactacgccgtagctagggctgcatcaagagccattgatgaactcaagaagcagtgggaacttgaagaaggtgacagtctgaggtttgtgatgaaccagaatctggcctccagggatactgaggatgacaattcaccagcggatgatgccgcatgagtcataaacaagatgaaagattccagtttcagtggcaatggatcaaagcacaaggaaccaccatgggcagcacataagcattcccattttacgtttaggactgaaaatcagatagatgtgttctagttgaggggggggggggggggggggatgtgttctggaacttgggtaaatgggggaattatgaaaacagtgtaaatagaagtctgctccctttggatattgttcatgcatgaagcaaaatgttatatctgaaaagcgcgtaccttgtaccagagtatctagtcttaggtgctccttgtttttatatatagtactgtaatatggcaaaaattatgtatctggataacacatgtagcttggttttgtcggcactgcatattgaggattgagtatgacttgtaccagcaattaataagtacctttattcgggtaacaattgcacacaggaacatggatccgttataggatg

SEQ ID NO: 4256 - DNA, 2704 bp, Zea Mays
actcgtcagctacaattctacggtccatacaagtagatcgagggtggtcgagcgtttctttctctcttcggctgaacgcggttttgcacaagcgagcaaagagagggagagagagaaagaaaagaaaagaaaagaaggggagggccgcgactgtagtggggagatgcctcggcatactgcgcccgcggcgccgccatcggagcgcggcgagatggacgaggtggtagaggcggatccggacacggaggcggaggatcaggaggagaggtgggcgacgctgctaccagagttgctctccgacgtgttgctgcgcgtcgaggcctccggcgccgagcagtggccggcgcggaaggacatcgtctctttcgcctgcgtgtgccgctggtggcggaaggccgcagtctccgttgtgcgtcctccggcggagtccgccaagatcaccttcccctcctcgctcaagcaggaaaactcatgaagtccatgaactgcggaggagtttagggttaggggctgggggttttggtggggaggaatttgttcttgacaatggcaccgctcattgtggtggtgggaattgatgatgggggaggtatgtttcattctagttagcgagggactagcagtgatgacagatgcagtggcaggagccgctagagacagaggaggcaggcacagtgggggtgctagagccaggaggaaaactatgggagaagcgaaaggagtcgtacggcttggtgctcatggtgtgcgacaccatgacacgcagatgacaggaaggcggcaggcggggtgcttcatttggcccattgaatctggtgtacaggtatcattgcagtagcaatatggaaaagaaaacaggtcactggatgtccgtcataaaggtccaaatctgacgtactttgggcacaacaatctgtctcagaatttgcttttggaggtgaatcaatctggttcattagtttatctaatgcattgggtgacgtttgatactggccatgggtttacaaaaatattccacaatcagaatccagaagtgtctagtttttgctacaaattaacctagcagatggaaatgcgggggttagcattttctgggggttactttggttatttaagattctaatgagataaataaccaggcaggtcgattgcatggtttgcgttatatggcgacatcagtattttttatacgatcagccattcagatatttaggacatagtttgagaagtttctttgcaaattcagtgtcatagtgtttcttatttgacatctgtgttcctaaatcttacaccatttctcaaaacacagccagggcctagggagaacccaatgcaatgctttatcatgcggaataagaactctacattctacctctaccttggcttcacaagttcacctgtgtataaagggaagtttctcatggctgctagaagattaaggcgtggtccccatactgagtacattatatctcttgatgcagaggacttatcacaagggagcaattcatacatgggaaaactgagatctgatttctgggggacaaacttcaaaatatatgatagcaagccaccatatgacggcgctaaagcatcaagtagtcgatctagtcgtcgtttcggaagcagaaggattagtccccaagtatcgtctggtaactatgaagttggacaggtttcatacaaatacaacttgctcaaatccagaggccccaggagaatgaattgcactcttgaatgcccttcagcgcaagagacctgggaaaactcactcaagacaaagttcaggaggcccttgggtcccacaactttacgaaacaaagcgccccgctggcatgagcagctgcagtgctggtgcttaaacttccatgggcgggtaacagttgcatcggtcaagaatttccagcttgtgactgctgccggccccagtgaccctactagcaacgtggacgaggaaacggttctgctgcagtttggtaaggtcgacgatgatattttcacaatggattaccggcaaccgctctctgcgttccaagcttttgccatcagccttagcagctttgggaacaagctagcctgtgaatagcgatacggttcgatgctcgtcgcgtggctatatggtttgcggtggtgggtgcttgctcgccgttgttacaatgtgatctgttctttttttttagttgagtatcgacgtactatttgtaccatgctgttgtacaagagatgcactatactgcattactgctgtcttgtcaaaaggacttgttcaagaaggaaatactgtgtcataaactttttgctctgattccatgcaaaaggcattccggtgctcatatatgctcatggtgaagtgatattttccccttcttgataaatattatttttgttttgtttgggtaactactgctactagtgctgggatgctgagcgcatcttagggaaatcttcttatgatttcactagtatagtgaccgtgcgttgctacggcatgtcaattatttgataaaatgttagttcacaacgattacaatgttttgtgacaatatgttaggatgaaaacagacaatttacattgacaatactttcttaaacatggagttggataggtagagggagactggtattgcagccaagaagcaagaaaataagaaaagagaggcaaaagtagccacctactgtttgtcccccaacaaatacaagcgtgaag

SEQ ID NO: 4257 - DNA, 980 bp, Zea Mays
aaagacctgatggatcacctagataggtggcgtggcgtccaatgggatctcaacacagcgatcgagttgatggatcatcaggcaaaacacatcaagctcaacacacatggctgacaatgccggtctagtaggcctgctcttggagcagcaccagctgcgcccaccagcagcagcatcaagagcaccacctcaaatcacaagcaaggccactcgtcccctcctcgccaccgccaagaacgacgtcgtcgacaagggcagctccgccgccgcttccttcagccgctcttcctcttcttcttcttcccgtgcaccggcgccgacggtgtcgccgacgaccgcctgccctttcctgcaccggtgcttcttctgccacggggagctcgccgacggcagggacatatacatgtacagaggcgagagggcgttctgcagcgaggagtgccgctgccgccatatcctggcagaggaggacgatgacgacactactacctcggtcggggtcgtggcagcggcagcggactgctccacccagctccgccatcaggcccttgctgccagcttcacgttctgaggtggtgtccggccgagcgggcgggcgggtagaccaccgaggactcgtacggtgggcctgccaccggcggcttgccgtggaggaagcaacgatgtccatcaccttgagtcagatagcttgtccaaacacagatgggtgtcacggactcatgcacggctgatataatctgattgggcttcaatttcaacgtttcaaaatgatgggttaagtttcttgttttttgttggaggtgaatgttttttttttgcaaattgtcttcttatacagtatattattctgtcgaaactaccttcttgttttcagtgctctatgattatctcttgttaagtaagttggatagtaagtttgtacatttctatcctctttaagcttttgtatttatataattatatcatataccttggttgca

SEQ ID NO: 4258 - DNA, 1495 bp, Zea Mays
agaagaaacgggcatcaagagaattccttaggaccgtagcccatctccgtcctcggacaaacacttttggtgcagttgcaagagtgagaaatactctggcatacgcaactcataaattctttcaagacaatggatttgtttgggtttcgagcccaattattacggcctcagattgtgaaggagctggggagcagttttacgtgactactttgctttcaaacagcgctgatggtggttctctactcaaagatattcctgctaccaaggatggaagggttgattggtcacagcatttctgacagtgtctggacagcttaatggtgaaacatatgcttcagctctatctgatatttacacatttggtccaacgtttagggctgaaaattcaaacacttcaagacatctggctgaattttggatgattgaacctgagcttgcctttgcggatctgaacgatgacatggcttgtgcaactgcatatctccagtatgtagtaaagtatattctggagaactgcaaagaggatatggatttcttcaatacttggattgaaaaaggcatcatagatcggttaaatgatgtagtagagaagaacttcgttcacctgtcttacactgatgctgttgagctacttcttgggtccaagaaggaattcgagttcccggtaaagtggggtttggatcttcaaagcgagcatgagcgatatatcacagaagttgcctttggtgggcgccctgtaataattagagattacccaaaggagatcaaagctttctatatgagagaaaatgatgatgggaagacagttgctgcaatggatctgttggttcctcgggttggtgaacttattggaggaagccagagggaagagcgtcttgattaccttgaagcccggttggacgagcaaaatctgaataaggagagctactggtggtatttggacctacgacgatatggatcagttccacacgctggtttcggtctcggatttgagcggcttgtacagtttgctactggaatggacaacatcagagacaccatcccatttcctcgagttcctggctctgccgagttttagcgccctgaaagtgttgtcgtatacgtatactttagaaacattctttcctaggatgtaatgtgagaaaggcatacgttgtactgtactactgtttcatcattgtacagagttaagctgagacttgtgattaatcggaggcaagcagtgctgtggcaagctttgtcgtttgttgtaattgtcgtcaaagaatgtcactggtggatgatgcaattttttcacgggtaagactgagaccaacacgaagacttgcatcagacaacgcaaacgcaaaatgagttgcgcagagtactgtgcgtggtgggagcatgcaaagggcgcaggacgatctaaaaatagaatcctctcttctctacgcataactatatagtcattttattggctataagaacgttcaacgattattaagatccacctttg

SEQ ID NO: 4259 - DNA, 1027 bp, Zea Mays
cagcactcgataatgccgacaaaaatacatttcaagcaacaattatgggggggacaaagttatgctcacgacacttgcctcaggatattatttactgtgttggtggtgtctccgtatttttcccactcttcactcaattttttgatgctgcaagtgatattgagaaatgttgccatacatctgttgtcaatgataaattggtggctgaggtcattgagctagttgctactgttctggatggaaatgtgtcaaatcagcaacagatgtatcttctttctgggttatctattctaggcttcttgcttcaatcagctaccccacagctcttaaccaccaaaactctttctgcactgaagtatatgtttgacattctgaggaactgcagcatgtcaaaagtcctcctcaaagatgctatctcacaaatttatttgaatccacaaatatgggtatatgcaagctatgaagtacaaagagatctctatatgtttgtgataaactattttgaaacagatggaaggcttttaccacttctatgtggacttccttgggttattgatattgtgtgccgatattactgggaaaaggcagattctaggcatgttgttgcttccaagcctttgtttcattcagttaccaaacaagttattggagagagacctgaggtagttgaaattcgcaagcttcgtcttctcctcctgagtttagcagaaatgagcttaaagataaaagtttctcctgatgacataagagcgcttgtagcttttattgagaggagtcaagacatagcatgtatcagcgatgtactggacatgatcatccgtgctctttcacagggagaagttttttcatcatttgttgggaacgtaaattaccttggtggttgttgcattttcattaatcttctcaagaggactggtggaggaatgcagagcagcaggtggataaaagtcagcgcaaaggcttcaattctgctgtcatcttagtcgcttggtggctgtggaaacatcggaacacttgtgtctttgag

SEQ ID NO: 4260 - DNA, 2649 bp, Zea Mays
cgatcacctcccccaccattcctctttcctgccctcgtccgtttccgcatcggtgtatcttcgcccccggcgaaggcgctatcctcccgaccacccggcggtgccggtacgccggtaaggcaggttgccagaccccgcgaccccgatcccgatcggtcgctggcgaggcggcgtgacctaccccggctcatcctctcaagccagacggtctggctgctgtgcatccccgttttggcggctaccttacctctggcaaggcaatcccccctcacccctggcaagcacgggagaacatggagagtgcttcagatgtacaaatgcaacatcgtgctgaagattccgagactacaattgagatcaaaatcaagacattggattcccagacatacaatttgcgtgtgaataaatgtgtgccagttcctctgttgaaagagaaaattgctactgtaactggaatattgtctgaacagcaacgcttgatttgtcgtgggagagtcttgaaggatgatgaactcttgtctgcttatcatgtcgaagatggtcatacattacatcttgttgttagacatccaggccagtcagctacatttggaaatgcagcaaccgaagctaacacatcaaattctggccgtcgtcatgggcccacagtggcaagaagtgtagtacttgaggctgttaatgtggatcctgggagcagtgaactcccagcttttgttgcgcagattctccaaagtgtgcttggaacaatcaatgcacaatctacgatccttcacaatcttccatcccaaatactataagagttgaactcgaccagcaacaagctcctctgctttttcagtctgaacccgcacatgagtcatctcaaccaaatgtcatccctgatgctttgacaactatgtctcagtacattaactttatgagggactcatttaggagggagggctttagtcttaatggacaaacagagggtaatgtggaaaacagaactgcagagcctgaatcagcttctgtgcttgggcttcataatgcatcattgctagctgaaaatatgcactctactaggcaaattattgttgaacaggctggtgcattgctgtcttcagaagcggttgtaaactctggaccagctctttatatatctccatcagggccaaatcctcttatggttcaacctgttccatttccaggaaggtctgtccaaatgggtactttgttttctagtctgggttcacaaggatctgttctacatccgagagatgttgatatccatgtccgcacaagtgggtccgtgcctggagccagtactaacccaagtgattcagctggtgcgcaagcgcatcaaaatgtgaataggccaggagatgcttcgcatgcaaatattggtgaagcgttttcaggggttgcaggtggcactcctttttcagttgagtccggagttagactattgccacttagaacagtggttgccatgcctgctggcatcagtcgtgctccatcagggtcgtctagtggtgggcttggtattatctatccatttctcactagggttcgacaaagggcaaacactaatggtaatgatgaaaggaatggtcaatctccaaatgaatcggctcgtagtagcacccatcttaatcagcaatcaattccgcagtcatctcaaactcatgaagcaggtaatctgagatctccagttgatgtcaatgttggagatggctctgagacctcacctgggcagcagaatggtctggtcactctctctcagataatggacttttttggatcaatgctcccaggcgaaaatgttcgaggaaatacttcaagccagcaaccaccaatggcttccaccgagcagggagagggtagaaatcttgcaacaccagaagtgtcaggagccagtgaggaggccctacgctttgctggcatggtcagacaaattatgccatttatctcccaagttgaaacacagaatcaaagtgccccaccagacagcagcagcacacctgcacaggctgcatctgggagtgcagacagagctagggatgtcccaaatgattctacgagttcccgtcaacataaccgcgaccaaattgatgagcctaattctaaaaggcaaagaactagtgactgattggaatctacttgtgagctgagaatcttgccagttcttgatttaccccagcggatgatcaaaataaggacttgagacaaatggtggcagtattgagacaaaaatggattagctgtggtatatacttggcactgagggcactagacgaggcacctatgccttttttttttgagggggcgcatcttataagctgttatttttttagtgcaacgagcatacatgctgctggcatccaatccccaatatgtacaagttttaattcaggttgtgatcatttacgcaacgaatcaaagcctccgctctggtcattgccgtagcatacggaggactgacgcaatcaatcatattgttacgagaatgtatagcttaagattgtatgtttttttttaccatcgcttaagacaatcagagcatatagttcatgcttattatagtatgatccaaataggactagtagtattgttcatgcttatcattagcattgcttaagagcttgtttgggagtaagagaattaaaaaga

SEQ ID NO: 4261 - DNA, 2835 bp, Zea Mays
ccggcccatcagagtatcagacgatcacctcccccaccattcctctttcctgccctcgtccgtttccgcatcggtgtatcttcgcccccggcgaaggcgctatcctcccgaccacccggcggtgccggtacgccggtaaggcaggttgccagaccccgcgaccccgatcccgatcggtcgctggcgaggcggcgtgacctaccccggctcatcctctcaagccagacggtctggctgctgtgcatccccgttttggcggctaccttacctctggcaaggcaatcccccctcacccctggcaagcacgggagaacatggagagtgcttcagatgtacaaatgcaacatcgtgctgaagattccgagactacaattgagatcaaaatcaagacattggattcccagacatacaatttgcgtgtgaataaatgtgtgccagttcctctgttgaaagagaaaattgctactgtaactggaatattgtctgaacagcaacgcttgatttgtcgtgggagagtcttgaaggatgatgaactcttgtctgcttatcatgtcgaagatggtcatacattacatcttgttgttagacatccaggccagtcagctacatttggaaatgcagcaaccgaagctaacacatcaaattctggccgtcgtcatgggcccacagtggcaagaagtgtagtacttgaggctgttaatgtggatcctgggagcagtgaactcccagcttttgttgcgcagattctccaaagtgtgcttggaacaatcaatgcacaatctacgatccttcacaatcttccatcccaaatactataagagttgaactcgaccagcaacaagctcctctgctttttcagtctgaacccgcacatgagtcatctcaaccaaatgtcatccctgatgctttgacaactatgtctcagtacattaactttatgagggactcatttaggagggagggctttagtcttaatggacaaacagagggtaatgtggaaaacagaactgcagagcctgaatcagcttctgtgcttgggcttcataatgcatcattgctagctgaaaatatgcactctactaggcaaattattgttgaacaggctggtgcattgctgtctcaactctcaactcagctgggagatctagagaatgtaactgattctgcaatacgaagggacattcaaagtagtgcagttcgcacgggttctctatttcagaaccttggttctttgcttctggaacttgggcgcaccacaatgctcctgcgtataaatccgtcatcttcagaagcggttgtaaactctggaccagctctttatatatctccatcagggccaaatcctcttatggttcaacctgttccatttccaggaaggtctgtccaaatgggtactttgttttctagtctgggttcacaaggatctgttctacatccgagagatgttgatatccatgtccgcacaagtgggtccgtgcctggagccagtactaacccaagtgattcagctggtgcgcaagcgcatcaaaatgtgaataggccaggagatgcttcgcatgcaaatattggtgaagcgttttcaggggttgcaggtggcactcctttttcagttgagtccggagttagactattgccacttagaacagtggttgccatgcctgctggcatcagtcgtgctccatcagggtcgtctagtggtgggcttggtattatctatccatttctcactagggttcgacaaagggcaaacactaatggtaatgatgaaaggaatggtcaatctccaaatgaatcggctcgtagtagcacccatcttaatcagcaatcaattccgcagtcatctcaaactcatgaagcaggtaatctgagatctccagttgatgtcaatgttggagatggctctgagacctcacctgggcagcagaatggtctggtcactctctctcagataatggacttttttggatcaatgctcccaggcgaaaatgttcgaggaaatacttcaagccagcaaccaccaatggcttccaccgagcagggagagggtagaaatcttgcaacaccagaagtgtcaggagccagtgaggaggccctacgctttgctggcatggtcagacaaattatgccatttatctcccaagttgaaacacagaatcaaagtgccccaccagacagcagcagcacacctgcacaggctgcatctgggagtgcagacagagctagggatgtcccaaatgattctacgagttcccgtcaacataaccgcgaccaaattgatgagcctaattctaaaaggcaaagaactagtgactgattggaatctacttgtgagctgagaatcttgccagttcttgatttaccccagcggatgatcaaaataaggacttgagacaaatggtggcagtattgagacaaaaatggattagctgtggtatatacttggcactgagggcactagacgaggcacctatgccttttttttttgagggggcgcatcttataagctgttatttttttagtgcaacgagcatacatgctgctggcatccaatccccaatatgtacaagttttaattcaggttgtgatcatttacgcaacgaatcaaagcctccgctctggtcattgccgtagcatacggaggactgacgcaatcaatcatattgttacgagaatgtatagcttaagattgtatgtttttttttaccatcgcttaagacaatcagagcatatagttcatgcttattatagtatgatccaaataggactagtagtattgttcatgcttatcattagcattgcttaagagcttgtttgggagtaagagaattaaaaaga

SEQ ID NO: 4262 - DNA, 2362 bp, Zea Mays
gcgcagtagcagtgtagcacccccacaattccagctcacgctgcactcctccatcccagtcgacctgttcccaacttcccatcccctcggcaccggcccgactaccggagcctcttgccgcatttttcagactgtcctgtttcgtgacgtcccaggattctaggagaagagaacaccctcgcccccctggggcatagtcgctgccgagccagtggtactggccgcgacggagcggtcagaagctgcggcggccggcgcggtttcggtttcggtttcctggctggcccgaggagtttgactcctctcctgatttgtgcgccggggcgtctcttgttctgctgcagcggattgtcgcggactggacgcggtgaggcggacatccctgtgcggaaggcgtgctcgggcagggccagcccaaccgccgttcgtgcgctagagttcctcgctcagaaagtggagaaataagatacacagtggaagatgagatcagttgttcggtcacttcgccagcttcgccgtttcactcagcaccatgcagaggggcactcacaagcaaccagattgttcgggcagcagaacgctttaatcatgtgcggttcgacatctggttcactgagcacgttacgttgtaatggtgaaattagcagatttgcaagccctggcgtcgagttgatgaggtccatgttctctactgtagtgactgatccgatcaaagatattggaagaggtggtccaatggtggaatatgagaggagaatagcatcaggagagctagtagacggtgatagctttcaggttgatacaattcaacaattacaaaggctctatgaggagttgattgagaatgaagaagactgtcagctggatagatataaatcatctgagaaatcaggccggagtcgatggctatggtcccgcctcattactcagccttctacgtatgctcctattaagggcctttacctctatggtggtgttggtacagggaagacaatgcttatggacttgttctatgaacagctgccatttaattggagaaaaaaacgtattcactttcatgatttcatgctgaatgtacatagtcgtcttcagatgcacaaaggtgtttcagatccccttgatgttgtagcagctgagatttcagatgaggccatcatattatgtcttgatgagtttatggtaactgatgttgctgatgctatgattctgaaccgtctgttcagacaattgttcagcaaaggcgttattcttgtttcgacttctaaccgtgctccagataagctttatgaaggtggcttacaacgggaccttttcttgccatttattgacaccttgaaagaaagatgcatcgtgcatgccattggatctgcggtggactatcgtcaactgggttctgctgaacaaggtttctattttgtcggaaaacattacagtacgcttctgaaacagaagctccagtctttaattggagatgagaaacccagcccacaaactgttgaagtaattatgggaaggaaattacaggttcccctaggagcaaatggttgtgcatattttccttttgaagacctttgtgataaacctttaggtgcagcagattactttggactctttaaaaaatttcacaccctggcacttgatggtattccaaagcttgggtctagtaacagaacagcagcttatcggttcgtcacactgattgatgttatgtacgagaacaaggcaaggctgttatgtacagccgaggctggaccagtaggactgttcgagaatatcgtgactgttgctgaagcacggaaggtttcaccaagatcttcacgctcacagaaaagcgacgacactgacctatgcgtggacaatgagcttggatttgccaaggatcgtacgattagcaggttgacagagatcaacagcagagaatatttggaggacttcgaaatgagattgaggcaacagcagcagctgcccttgcaaggtctagataaaaggtggtgatgctgtactaaacataagaagcagaaggcttctgcgcctcatcttgaaattcttgtattcacacccacctggcttacataggcaactgagaagctatgcttttccaacagtggtgcatgtaaatgtccaataaagctatgtaagggcatttttgctaacaggtgagtgatctataaaatggcccaacctgggggaggggggataccatatcgttttttttagtgtatcacatatttccaaacctttagagaggcctcctaaggctcaaaaacagcatgagttacactgcataaagccatatataggctgaaagctttcgctgaactttgtgaattgagggaaaaaaagtctaacaattgttcatgtt

SEQ ID NO: 4263 - DNA, 1210 bp, Zea Mays
gagctgccatgaggcccgaacagttgaagctactagcgtgtagctagggaagagaagcgcgcgagtagctagcagacgtacgtaggcagaagcctagctgggtttgaagggccccgatcgatgatcccctacgcgactgcggcggaggcggagggagcactggggcgcaccatgacgtgggctgagacagcatggtacgagtactcggcggtgatgccagattcctggctgcactgccacaccacatttatcctgttcgtcatctacagcatcgccccgctgcccctgctactcctagagcagttcgctccgtccgtcgtgctgccgtacaagctgcagccccgggtacggctgcccccggcagcctccctcagctgctacatggacgcggcctgcatctttccgctcgccgttggccttcagttcgtctcctatcctgcggtcgccaagatactaaggacccgaatgggactgccgttgccgtcggtgagggagaccatcgcgcagctagtcgtatactctctagtggaggattacctcagctactggatgcaccgtctgctgcacacccagtggtgctacgagaagatccaccgcgtccaccacgagttcacggctcctacaggcttcgccatgtcgtacagccactgggccgagaacgtcgtcctttctatcccggccttggccggcccagtgctcgtgccatgccatgtcaccacgcagtggctatggttctccatccgcctaattgagggcattaacacgcacagcgggctgattccattctacggaggggctgcataccatgactaccatcactatgcaggaggccgtagccaaagcaactttgcacccctgttcacctactgtgattatttatataggacagacaaaggctacagataccacaagctaaagcaagagaagctgaagagtctagcagaaaatagtgcggataaaggaggcaactactcattcgacgaagggaaaaagaacagatatttttgtgcctgagcgtacgaagaataatcaaggctattacttcgtcctgttcgaagggaagatttgcaaataaataattcgaatttactgcagaagctcttgattggtcgacgaacaaatatattgttgcaatccgtttcgtgtattctatatatctaatatgaaacttttttgtcggaatatatggatcatcccgatacattacttt

SEQ ID NO: 4264 - DNA, 1219 bp, Zea Mays
gagctgccatgaggcccgaacagttgaagctactagcgtgtagctagggaagagaagcgcgcgagtagctagcagacgtacgtaggcagaagcctagctgggtttgaagggccccgatcgatgatcccctacgcgactgcggcggaggcggagggagcactggggcgcaccatgacgtgggctgagacagcatggtacgagtactcggcggtgatgccagattcctggctgcactgccacaccacatttatcctgttcgtcatctacagcatcgccccgctgcccctgctactcctagagcagttcgctccgtccgtcgtgctgccgtacaagctgcagccccgggtacggctgcccccggcagcctccctcagctgctacatggacgcggcctgcatctttccgctcgccgttggccttcagttcgtctcctatcctgcggtcgccaagatactaaggacccgaatgggactgccgttgccgtcggtgagggagaccatcgcgcagctagtcgtatactctctagtggaggattacctcagctactggatgcaccgtctgctgcacacccagtggtgctacgagaagatccaccgcgtccaccacgagttcacggctcctacaggcttcgccatgtcgtacagccactgggccgagaacgtcgtcctttctatcccggccttggccggcccagtgctcgtgccatgccatgtcaccacgcagtggctatggttctccatccgcctaattgagggcattaacacgcacagcggcccttgcaggctgattccattctacggaggggctgcataccatgactaccatcactatgcaggaggccgtagccaaagcaactttgcacccctgttcacctactgtgattatttatataggacagacaaaggctacagataccacaagctaaagcaagagaagctgaagagtctagcagaaaatagtgcggataaaggaggcaactactcattcgacgaagggaaaaagaacagatatttttgtgcctgagcgtacgaagaataatcaaggctattacttcgtcctgttcgaagggaagatttgcaaataaataattcgaatttactgcagaagctcttgattggtcgacgaacaaatatattgttgcaatccgtttcgtgtattctatatatctaatatgaaacttttttgtcggaatatatggatcatcccgatacattacttt

SEQ ID NO: 4265 - DNA, 994 bp, Zea Mays
gtccatgctcccccaccggcccacctaaaccaagaaagatttttgggacactccagcggtccagcccgacctctttccaaaccggcaaatcctcagatccgccccctcctccgcctccgcctccgcctcctgtaccctcacgccgtgcttccacagccctcccacctccgaatccagatccgccgccaccaactcctgcttctcacctcctaggctgcttcgcgcgacaacctccgcgaggagcagcaggagcggcggcggcggcatggggcgggacggcggtggcggtgtcgccggcggaatgtctgaatcggtgctgcggaaggtgctcctctcctacttgggtggcctactacaatcatgtcaagctgcaggcgctcaaggctaaggaggcccagaagaaagccgcacaggctgatgaggaggttgggtcgctcttgcaggagcgcgatggacatggtgatcataagagcgacaatcaggcttagactgtcagatctgatcctggccttcccatattggggatctgatgcaaggtgcaaagaccggagtttggtctacggttgctttcaaggaggtggatgacggtttcttgcacttctttaactttgtgtctggagagaaaatcagaggtatttaacgtttaggaaatatgcacctgcttggtggagagctttgccttgttattttagacactttgttctactgaaaggcagccatgccttactacctcacttgtccattgcctagatttatttgttctgctagtagattagggactaaaaatgtactgctgcagaatgttaatttggtggttattttcgatatataatgagcttaccgtaatctacgagctgagcctctcgtgccgtcgtgtgaagtcttgtttattcgtgggactggtagcacgtgttatatggattattttttactggtgatggttattgttaggatgccttttcagatttaaggtcagatgtatatattctagtct

SEQ ID NO: 4266 - DNA, 1431 bp, Zea Mays
ttttttttttgcaaagagttttatatttcaatttaaaataccagtttgagacattgttagtttgaggcatcgtatgctctaagaacgaaaccaatcatcagacgagatccccacaccaaatagatctctttcgcgtcagtcaatgccgtccgccgacgccggagatgctgacgcgatgcccgcgccgccgccgcaaacaagggccgccatctcgcatgtcatcttcgacatggacggcctcctcctcgatacggaggggttctacacaacggtacaggagaagatcctgatgaggttcggcaaggtgttcgactggtccgtgaaggccaagatgatgggcaagaccacggccgagtccacgcgcatcttgtttgaggagttcggcctcgccggcctgctcaccccggagcagttcctggaggaacgcgaaaccatgctcaagaagctcttgcccacttgcgttgccatgccaggtctgctacgtttgatcaatcttctccacacaaatggaataccgatagctgttgcaacaggaacccataaacatcactttgcactgaagacacaaaaccacgaggacatattttctctgatgcatcatattgtcacaggagatgatccagaagtgaaggcgggcaagccatctcctgatattttccttgctgctatgagaagatttgagtaattgcttggtatttgaagatgcaccgttgggtgtggcagcagccaaaacttcaggaaagcacgtggtgatggttccagatccaaggctagatgtttcacatcacaaaggagctgaccaagttctcacttcactattggaattcaatcctagcgaatggggcctgccaccttttgtggattagattattttcagagacatcaagcatgtttcacagacacacaagccctacaaccacacagtaaacgccccgtattcatattagggaaaattttttggttgcgtatagttagaaatttcaacataaaaaaaggaacacacctgtttctgcctagtagcgaaagggcctctagctgagttagttaggtggtctgagtagcactcctcaggtcctgagttcgactccccgtgggagcaaatttcaggctgtggttaaaaaaatcccctcgtctgtcccacgccaaagcacaggtctaaggctcagccccggtcgtggtcgttctcacatgggcttcgatgccgctgtgtatgggtggggcaggggttcgggggttttcttgacctgtgtgagaaggtcttcttcttaatacaatacccgggggctgtcttaccccccgcaggtcaagttttttttttgtttctgcctagtaatatactggtgtaactactactaaacatctgtgctgctactgcagtttacagtatttttaagaaacattcttcatatataaattttattttaatagaaa

SEQ ID NO: 4267 - DNA, 2506 bp, Zea Mays
gtacgggctccctcccgtctcgtctctcgtctctcgtctctcgtctcgtgcatatccagttccgatcccactctaccttctacgcagtgtggacgccagaccccgtcactgtcagtcgtcctcttccactctagtattaccggtagatcgacaaagatttcagcctccgttttcgacgccatcagagcaggctccacagatgaagatgctgcggcggctcatgctgagcctgagcttcatcctcctcctcccttcctatctcgcctacccactatgcaccgatgggcgccggtgctgctcaacaccacgctcaagttttgcgcctcccccagcaggaacagcagaggctgctgcgacgccaccgctgatgccgcgctcagcaagcagttcgacgccatggccatctccgacgctgcctgcgctgccgtcgtcaagtcaatcctctgcgctaaatgcagtccatattccgcggacctgttcggcgcggggccaaagatccggacggttccttccctctgcaactccacgtcgtcggcaaactctgctgagtccaaggaaaccaccaccaccaccactcaggactactgcaaactcgtctgggatacttgcaaggacgtgagcatcgccagctctcccttccaacccccgctgcaaggcaccgcgccgcctcctacttcaccgtcgaagctcaccgacgcgtggcagtcccagagcgacttctgcggctccttcggcggccggtcgtctgtatgcctcagcggcgacacggtctcgttcaacgccgccggaccttcaccctccccaagaccagaaccaagaggggtatgcctggagaggatcgacaacgggtcctaccttagcctggctcctcaccccgacggctccagcaggatcttcctcggcagccaagccgggaagatatggctggccaccgtccccgagcaagggtccgggggcgcgctgcagttcgagggcgcaggcccatttgtcgacctgaccgaccaggtgcacttcgactcggcgttggggctcatgggcatggcgttccacccgggtttcgcgaccaacggccgcttcttcgcctcgtacaactgtgaccggaccaagtcgcccagctgcaccgggaggtgctcctgcaactccgacgtgggctgcgacccttccaagcttggcaccgacagcggcgcccagccgtgccagtaccaggtcgtggtgtcagagtactcagccagaggctccgccgcggcgaatgtttctcaggcaacttctgccgccgatccatctgaggtgaggagaatcttcgcgatggggctgccttacacgtccgggcatggaggccaggtactgttcggccctgccgatgggtacctctacctcatgctgggcgacggagggaagggggaccctttcaacttcgcccagaacaagaagtcgctcctgggcaagatcgtgaggcttgatgtcgacagcacgccttcttcatcaggaggagatctcggcaacacgagtctgtggggcaattactccatcccgaaggacaacccttacgccgatgacagcgagctagagccagagatctgggcgctgggccttagaaacccgtggaggtgcagctttgactccgagaggccctcctacttctactgtggagatgttgggcaggacgcgtacgaggaggtggatctcatctccaaaggcgggaactatggatggcgtgcgctggagggtccgctcgtctatcacccgcagtgggcgcctggaggaaacacctcgctcagctccattgacgccattcctcccatcatgggatacagccattcagatgtcaacaagaatatcgggtcggcgtcgatcatgggaggttacgtgtacagagggtccgctgatccctgcctgtatggaaggtatttgtatgctgacctgtacgcctcggccatgtggaccggcgcggaggctccagagagcagtggcaactacacctccgctctgatccccttcagctgctccaaggagtctccgataccatgcgacgccgctgctgggagccctctcccgtcgcttggctacgtatactcgttcggcgaggacaacagcaaggacatgtatgtgttggccagcaaaggcgtctaccgagttgtgaggcccagcctctgcagctatacttgcccggcagagagacaggagacatcgccgcctgctgctccttcatccaacaaggcgtccatggcggagatgggaatgggaatgcttttggtgtctgtcattgtggtttgggttttggtaacataggatcatgctgtgatgagacatgtcatatgcaacgaccagtcctgaggaagaataagagtgccagtcagtcagtgagattagaatagaagtgataggcagtcagttaggctgtctccaataaattgtgtatatgatcatgtaaaatattattttatattatagactgtattgttcacagaacgaagtttgaaatacttctgagatgggtcatatgatg

SEQ ID NO: 4268 - DNA, 1687 bp, Zea Mays
gaacacgccatcatgttcagtccatcacgttcagtcgagccggctagtggttcaactttgatcaccccggtcctgcaccagcggcggcatgggaaagaagattcgcaacaccgatggcacctcgacgccggccaggcccatgaatcaggccgtgtcgctccgcgaggagacctccgggaggacgcgcgtagacgatgcctccctgctgagggtcaagcatttgcagaggctagcggcgtgggcgggcccggaggccggggtgcgcccgatcggcgcgctgctggggcgccgcctcgccgcgagcgccgaggccgccggagtacccctcaacgccgccactttcctttgccagaggtgtgagacaatcttaaagccaggcttcaactgcactgtccgcataaggaacaagagaaataaagcaaaacgtcggaagaaatcaaactgttgtcagaacagtgtttcctatgcatgccatttctgtggagatcagaacctaatattgggtagtgggaagggtgttgttcagagcctgttactgtcaagagggcatgctaccatgaactcatcccatataattgtgagaggaaacggtagcaacacaagagcacatgataagaaagaagtgcttgagctttctcaagcagcaattttgcaagtggaatcgtcatctctgttgaggcagtcgactactgaaagtgacgagcatggcgaaaggttaaattgtaatcttgatgaacagatgcgtgaaactagccatatttttcctgagaaggttaggatatgtgaagctactttgcaagcagaacttgcacctggttcatcatttgtcacgcctcagaaaatgaaaccaccggtggtgactgttgcaaaagattcagcaggactactcaagacaggaagtggcatgatttctggctcagccattgacgccctctcaggctccagcaagtctgcctcgaatggctctagaaataatgtgaaatatgcagcaagagattcttctcaggtttctggcagctcaaggaagcgggcaaggaagggttggacaacgctgaaacagatggctgagaaggatgagctcgagaggaaggagaagatggggaattttgtaatcccgttcttcatgcagtaagtgggatgctaaaatatttgccggcattgtgatcgtttggtcattagtttatctattgagaaggacagtgtttttttttgccggctagattttgcagtattaaagatacgaggttaacaaagtttggttgaattaacaacatgtgattaaaggggaacacgtccaaggcgagccatcagccatagcaacattatatcctgttgcggtgcgattgcctacgttcagccggaactttgtaatccagctgcaaaatctaatagctcgctctacgcccaaaattacattgtcggcaacaaattctagacgaaccatgataacattgacgatgaacctaaaaacgcagaagcattttgagtcttcctcatcaatgagtagtaaactaagcaaaagaaaaatcacttccttgtcaaggagcttaggagttgtttggaagcaaagtatttttttgggttttcagataaaagtatgatattagagcatatcatgttattcttcgtcaggaggtgtttgactatattgtaaaaactcagttgtgaatatcattgtttaatagtt

SEQ ID NO: 4269 - DNA, 1695 bp, Zea Mays
cctcgatcaggggagctggagctgttttaggcgtacagaggcagagccatgttttggtgctctgcccttctggctctggctccgaaggagcagcgtctggggagcccctcccaaacatggcctacgtctatgaacattgtgaatatttccgacaatctaacttttagaccaactacaattatttcctatcaagctgaaagtggcttagtcgagccgacaacactacttgatggcagtgaacaagcagttatattgctttgtcaggatattgatattatttctgttatccttattttgttaacgtcatttctatgttttgattagtgctgtatcatcgactggtggaggacttgtatgtaattgtgtgagacaatcttaaagccaggcttcaactgcactgtccgcataaggaacaagagaaataaagcaaaacgtcggaagaaatcaaactgttgtcagaacagtgtttcctatgcatgccatttctgtggagatcagaacctaatattgggtagtgggaagggtgttgttcagagcctgttactgtcaagagggcatgctaccatgaactcatcccatataattgtgagaggaaacggtagcaacacaagagcacatgataagaaagaagtgcttgagctttctcaagcagcaattttgcaagtggaatcgtcatctctgttgaggcagtcgactactgaaagtgacgagcatggcgaaaggttaaattgtaatcttgatgaacagatgcgtgaaactagccatatttttcctgagaaggttaggatatgtgaagctactttgcaagcagaacttgcacctggttcatcatttgtcacgcctcagaaaatgaaaccaccggtggtgactgttgcaaaagattcagcaggactactcaagacaggaagtggcatgatttctggctcagccattgacgccctctcaggctccagcaagtctgcctcgaatggctctagaaataatgtgaaatatgcagcaagagattcttctcaggtttctggcagctcaaggaagcgggcaaggaagggttggacaacgctgaaacagatggctgagaaggatgagctcgagaggaaggagaagatggggaattttgtaatcccgttcttcatgcagtaagtgggatgctaaaatatttgccggcattgtgatcgtttggtcattagtttatctattgagaaggacagtgtttttttttgccggctagattttgcagtattaaagatacgaggttaacaaagtttggttgaattaacaacatgtgattaaaggggaacacgtccaaggcgagccatcagccatagcaacattatatcctgttgcggtgcgattgcctacgttcagccggaactttgtaatccagctgcaaaatctaatagctcgctctacgcccaaaattacattgtcggcaacaaattctagacgaaccatgataacattgacgatgaacctaaaaacgcagaagcattttgagtcttcctcatcaatgagtagtaaactaagcaaaagaaaaatcacttccttgtcaaggagcttaggagttgtttggaagcaaagtatttttttgggttttcagataaaagtatgatattagagcatatcatgttattcttcgtcaggaggtgtttgactatattgtaaaaactcagttgtgaatatcattgtttaatagtt

SEQ ID NO: 4270 - DNA, 2270 bp, Zea Mays
tccacatgtgcgagttgatggacgcataaacattagccatttcttacttagttttttcatccgcggtggcatccacgagttgctgaagccagcccataaaatccatcctgcgcgcgtgcggcctctccattttccccgtcttcccgccaccccgaaaatttccgcccgaattccatttcaacattctcacatttcgcttcccagttgccacgaagaactcgaaatccaatccccggcgtcctagctcctccagattccgcagaccccgatccatcctcgacagcgactggcatagcagattccttcccagatcagatggggagaccgcggaagaccaaggccgagccggagccagcccccgccttcccgatcggcaactgcaaggtggagatccgtgggagcggactgcggtgcgagacgacagagcagggtctgacaatctccggacccaggggcgccaaggtcgtcgtctctgtttctggggatcagaagggcgcttcgaatggcgtcggtgagggctctcagttcatccttctcaatccaagcgatgcagatagccaaaccaagtccttgcttgaggaagtgctaatgctttataagaaagaacttcctactatggactatgctgcagacactgggagaaagtcagggtttcttgaaacatgcacaactaatgggaaatacaagactctaattctgatgtctagctctgcagcacagcatgaagaggtcatagctactgtatcgtatcagattgtgccagctgacactcagtatgctgaaatacctctggcagttgtgagatcatcttatcaacgtgtgggtattggcaagctcttatataaggaactatcgcagaggcttcagaatgttggtgttacatccattttctgctgggcagataaggtctctgagggtttttggctaaaacagggttttgtatctgttggagaagtgaatactaaagaattgccagtcatgcaaacatgggagaaaccccagacatcactccatactgtagtaccagatagtatctctcctggtgataccaatgtctcatgtgagaacatggtcctccaaacatataaacgtcgtgttgttagaaatactgcaaaggtggcaacaaatgaagtcagcaatgcttatagtgaaagttcattatctgagcaagagccaaagaaacgcatgtacaaaacatcgtcatcatcactaaagtcaaaaagaataagatgtagcaatcatgacgacaattgccaagacatgaatcaaattggtgtgcatgacaataacttgtgcagttcccctgagaattcactgcatgtaattcttaaagaacatcacattcctagcactggagctcatatttattctaatggtagtggaagccctacaattatgctcatgaatattgcagacgaacaaaagaaggcacgccttacaaaggttgttgaaacacttagggggtttgttacttgcgatggacattcatgcacacatgttgttactggaaaagctcgcaggactatgaatttctgtattgctttgtgctctgggagaagcacaatatgttctggaagatgaagaatataggatgcaatataagtctgaacttagagatgcagttatgagagctaaagaaaggcctaactctttatttgctggttatactttctgtctgtcaaagtacatccagccctcttttgatgttctctcagccattattaaatctaccggaggcaagatcataaaaaaactgagtgagttagatgagctgtcccggacaatctttttggtgtgtgaagaggaggcagaacttgcattggttgcagcaaaaagtggcatcaaaacattcagcagtgactggttcatgagctgtgtcatgaaacaggaacttgaccttgaggcccctcagtttattgtatctctatgatgtgcctacagttcaagtcctcctaactcctaatatatctctttctttggttgggatataaattgtttctcctggttcttcgtggatatacaaattttctcatttccttagttacaaaagctgaagtagtgtcaaactagttatcatcctgtgacgatgatgacctgtttaaatggaaaaggttgcggtggagctattccaatttctgtataggcccatttgattcccttcattttgagtaaatggaaactaactaatggagtaggttatttcttttaaaatgtgtcattccatatctttccaaagtttatatataagtctatcttaaattcaccgtgag

SEQ ID NO: 4271 - DNA, 2377 bp, Zea Mays
gcgagttgatggacgcataaacattagccatttcttacttagttttttcatccgcggtggcatccacgagttgctgaagccagcccataaaatccatcctgcgcgcgtgcggcctctccattttccccgtcttcccgccaccccgaaaatttccgcccgaattccatttcaacattctcacatttcgcttcccagttgccacgaagaactcgaaatccaatccccggcgtcctagctcctccagattccgcagaccccgatccatcctcgacagcgactggcatagcagattccttcccagatcagatggggagaccgcggaagaccaaggccgagccggagccagcccccgccttcccgatcggcaactgcaaggtggagatccgtgggagcggactgcggtgcgagacgacagagcagggtctgacaatctccggacccaggggcgccaaggtcgtcgtctctggtgagggctctcagttcatccttctcaatccaagcgatgcagatagccaaaccaagtccttgcttgaggaagtgctaatgctttataagaaagaacttcctactatggactatgctgcagacactgggagaaagtcagggtttcttgaaacatgcacaactaatgggaaatacaagactctaattctgatgtctagctctgcagcacagcatgaagaggtcatagctactgtatcgtatcagattgtgccagctgacactcagtatgctgaaatacctctggcagttgtgagatcatcttatcaacgtgtgggtattggcaagctcttatataaggaactatcgcagaggcttcagaatgttggtgttacatccattttctgctgggcagataaggtctctgagggtttttggctaaaacagggttttgtatctgttggagaagtgaatactaaaggtaagattcgaaagattccagtaagggctgatataaagagagcattatgctttccaggaggatcaacacttatggttgcccaccttaataaagaattgccagtcatgcaaacatgggagaaaccccagacatcactccatactgtagtaccagatagtatctctcctggtgataccaatgtctcatgtgagaacatggtcctccaaacatataaacgtcgtgttgttagaaatactgcaaaggtggcaacaaatgaagtcagcaatgcttatagtgaaagttcattatctgagcaagagccaaagaaacgcatgtacaaaacatcgtcatcatcactaaagtcaaaaagaataagatgtagcaatcatgacgacaattgccaagacatgaatcaaattggtgtgcatgacaataacttgtgcagttcccctgagaattcactgcatgtaattcttaaagaacatcacattcctagcactggagctcatatttattctaatggtagtggaagccctacaattatgctcatgaatattgcagacgaacaaaagaaggcacgccttacaaaggttgttgaaacacttagggggtttgttacttgcgatggacattcatgcacacatgttgttactggaaaagctcgcaggactatgaatttctgtattgctttgtgctctggtgcttggataatttccccaaactggttaaaagaaagcttcagagaagggcagtttgtaggagaagcacaatatgttctggaagatgaagaatataggatgcaatataagtctgaacttagagatgcagttatgagagctaaagaaaggcctaactctttatttgctggttatactttctgtctgtcaaagtacatccagccctcttttgatgttctctcagccattattaaatctaccggaggcaagatcataaaaaaactgagtgagttagatgagctgtcccggacaatctttttggtgtgtgaagaggaggcagaacttgcattggttgcagcaaaaagtggcatcaaaacattcagcagtgactggttcatgagctgtgtcatgaaacaggaacttgaccttgaggcccctcagtttattgtatctctatgatgtgcctacagttcaagtcctcctaactcctaatatatctctttctttggttgggatataaattgtttctcctggttcttcgtggatatacaaattttctcatttccttagttacaaaagctgaagtagtgtcaaactagttatcatcctgtgacgatgatgacctgtttaaatggaaaaggttgcggtggagctattccaatttctgtataggcccatttgattcccttcattttgagtaaatggaaactaactaatggagtaggttatttcttttaaaatgtgtcattccatatctttccaaagtttatatataagtctatcttaaattcaccgtgag

SEQ ID NO: 4272 - DNA, 1456 bp, Zea Mays
cagaacctccatgaatttcctgatcaaaacaaacttacaattttatacagagttgcatgaaatgtatggctttagcctcgttgaatcctttttgttttccatcctttttgttctcttgacatcagtttattcattggggagcatatacgtggaatgatgattaatgtttctgtatattaatgtattttatcataacatgttggcgccataaaaaacgtacgggtatacacctagtgacacgcattaatactgggagtcggaatatcagatccatcatgaccttgagtaacagtgcattaatatatgaaaaaatgtccgtgagtcggtctagcacttagtatataacaacttgaatcgttcaacagaattgctgagttcattcatggagtatatatggacagaactcagagcaggcgtaggtctatgcctcactgacttgccaactcttgagaaaatgaggccaacgacattcctatttgccataactaacctatcgacctaccagctagatcaaattgcctgcataatccaataaccgtacagagtagggaacatagtatctactgagaattcgacggagatgaatgaaggcatgacaccgagcagacgccagggaacgtgcagatctacacacggcccgagggaaggagctgcggcgaggaagaaaaaaaagggggcaaatcttacctgcagcgacggcgatcgggatccaatctaatcgaagccgaagggcaaggcgaagagatggggcttcgttggtaggtgggcttacccttgcgtgctctcctcggcgggggctttgacggctcctttacctggctgtctggctctcctggggcagatccgtagagggcagggcagcgcgaggcgggaggctcgtgagcagcggcaatggccagcgggcatgaaaaggcgctcgtccttggccccctcctcgccttcggtggtatagagacggggcgttcaggagcgacgggcggagcgcacgaggcgaggacggggaggaatgcagggggagggcttgaaggagcaacgccaagagagaaggaattattagatcgtataagtagtttagagcaaatgcttcttgctacccaagacgaagttgagaggcttaaagcaaaggagtcataaggagcagaaggatgactgcaacaacaatagtagtgaagtggaagttaaattcaactgttacctagagcttgtaatgatagaaagcagttgtagtacgttttaaccataaaagagtacactaagttgatccgatggattatctattagaaatcatttgcgcattatgtattattttcaaatatttcttagatatttcctttcttattagatggatttaaaaatgagatttgttatatatgatggtctagtgttatgatgtgatgcttttgttctttataagtccttgttcgtttatataaatccagctctcgattaccgttgg

SEQ ID NO: 4273 - DNA, 1818 bp, Zea Mays
atgggcggcagaggaaggccgaggcaaaggcaatcaggtgtggggtcaacgtggcatccgtgggacccttcgcggattgcggagtggcattgggttggcagcacgcccctgcacacggtgacacgggccacggcgcggcgcggcgcggcacggggagcgagcgccgagcgagagcaagcaaccgctgtccgccgggccggccacggcgctgccccctgcttcgcgccttcgccggtgcgctcacgcctcacgcagttgtgttcctctctctctctctcccacgcgcgggctttctggaccggtggacggacggctgctctgctccttcaagcccccggccgcggtcgtgaagctgacgcagaggaggtaaaggtgcatgcatcgacctacggtatcctagtctgggatcagaaaagaacacagcaacaacaaagaagaaaggcgcgagcgatggacggtgacgccggaccagagcaacacgggtgcgtgcactacaggagggggtgcaagataagggcgccgtgctgcggcgaggtatttggttgcaggcactgccacaacgaagccaaggactcgctggaggtcagcgtccacgaccgccacgtgcttccccgtcacgacatcaagctggttatctgctctctctgcaacaaagaacaggatgtaagttccctgacgaagcagggacagtgttcttcggccactgttggtgttacctgccacacaccacatgaaaaaaaaaacccatctcgtctgtcgacaggtgcagcaagactgtgcgaactgcggagcatgtctcggcaaatacttctgcgcgaaatgcaacttcttcgacgacgatgtaagctctccccccctttttttgatgtgttaagcgaagtggccgatgggattttacgcgctaatttagatgtaatttcagaagtgttccctcttctgttttctccggttttgttgtcgcgttccctggcatttcaggtgtcgaagaaccaatttcactgcgatgggtgcggcatatgcaggactggtggcgcagagaatttctatcactgtggcagatgtggatgctgctacaccactacgctgaaggattctcaccgctgcgtggacggagctatgcatcacaactgccctgtctgcatggagtatctattcgactcgatgaaagctatcagcgtgctccactgcggacacaccatccacctggaatgcctttacgagatgagagcgcaccagcagttttcatgcccggtgtgcctgaggtctgcctgcaacatgtccgacatctggcaaaagctggatcagcaggttgcagcgtccccgatgccagcgatctatcagaagaagatggtatggatcctttgcaacgactgtggcgtgacgtccaacgtgcagttccacatcttggcgcacaagtgccctggatgcagctcttacaacacccggcagacgaggggcgatccagccgcatgctctagagtttgagagcaaataaaactgcagtactgcactgcacataaactcgtggggttgtgcggtcgatcgataggtagcttgcatggaggaaattaaagactaccattgcgcatggacacgattggtgccggcagttgagtacgtgtattaggcctgtcatatgtagatgtatcatatgctatgccttcgcaaagaagaatttggcgcagcggacagggtatatacatttcttttgttgctatatatacacacatatttttgttgcgcggtgcttgtgccaatgatggagagttcgcacgttgtttttcttatatttaattgagcttgcttcaaccttgaatc

SEQ ID NO: 4274 - DNA, 2282 bp, Zea Mays
cacagtccacacccgccgaggccacccccgtcctcccccacgcgccgctcgcgtgatgctcgaatctacgctcgcgatggttatgccccgccgctcgctgccccagccccctcccctgcgtgcgtgcataaaaagggagagcgacgatggaaatattccgagcatggcttgaacacctggtcaatgctagatgatctgttggttgaaagactagcaagctgtccaagtggaactacgacggatcgagcaccggccaaatcccagctgacacggtgtggacacgagttctgcgctactcctgtggtcattgtttggagaagttttcctaaagcttctttatgtatattcttagtctttttttagaacaatgtcataacctactaatagttgtttatcactatattcttttgttcctactattccttgatatgccagatctcaacttttgtgctaatatacatctctaggcatgttgtatgtgcatcatttcaaaaaaaacacttaccaaaagagtggtctgtaccaaacattttgccttcaagacttcaactcataaccttgtatagtctgaaatccttaggattggttctgaacctcagtttgatggaggtgttacaaaacttagaagggatactaaatttctctttgtagtatgagtgaacagaagtaggatttgtcacaatctcactattttaccaagctaaccaaataacaaatttggccagtatgtatgtgcatcatttcaaaaaaaactgttaccaaaagggtggtatgtaccaaacattttgccttcaaggcttcaacccataaccttgtacagtctggaatccttaggatttgtactgaacctcagtaggtgttacagaacttagaagagatactggatttctctttgtagtaggagtgaacaaaagtaggatttgtcacaatctcacacttttaccaagctaactaaataccaaaattcggccagttacagacagtcagacactgatcttaacttgctcgaacagtcttaaacctttttgtatcaaaggctcatagcatatcaaacgcttctaatgaaaccttaacacaccgcaagaaaacaccaagcatcgaatttgttcagtgtgtgtgaagtagtagtgtatgatcatgccatacatatttttctacacatctcaaattctagatttaatttggttacatgttatacatgtatcttagatttttgataactggtcacagagcggttcaaattgaatttgacatggagttcagatgtcctttcatattctgttactgaggttatttccaaatagtgattcagatctaatgattttatgatgcaatttattctacaacatttaaatgccagaacgctcattagaggctgaacatttaatggttataggattaggcctaaaacggcgttttgcagcgattaaacgctacattttttgtgtttaaacgctttaagctagaaatgctgttgattttgtgtattatatttagagtatgacatttttccaagatctatgttttaaatgcaaggatattgagattttttagatattttattttaaatgctaattcatatatttttttccttgccgaatgtaacccctaagaagactgaagagactgctttgatatctgatgttgttgcaaattcaccacaacaaggttttcatagtgggcattgctggagtgatctcatctgagatgattttggcataactcctaaaagaggaggcgcttctgctcatgctaagaaagcaagctttgaccgtgaaacctaatggcagaaaagtccttcctcccccaagtccctagagcctagacgaatggcgctgcagctcactgttccttcttcagttcactcatgtagtcctattcattgaaaagtggaagacatttcagttctgcacttttgaagttatcttcctgattggaagataaggaaggtttgaggagctcatttctgaagttgtagctggaagggagaagagctcatgttaatggtattttgactgctccaaaacactttcgacttgtgatattctttaacctatatgcgttgaagaatttttggagacaaagcatgcaagcacagagtctgctctggtggtaagataagtgaggtgacttctgaagaagcctacagagaatgtaaaaataagtgtgttattttcactgctttgacacagtctcaattgtgcaatgatttattatcacattgtaatttgacatatgctacatgatcctaaattatgttgtaatgaatgttctactcccta

SEQ ID NO: 4275 - DNA, 272 bp, Zea Mays
tgcaaacataaccggccgttgtttctcttcttatctgtgtggattgggatacttctgtccgtttatctcttcttccactgcctccccaccacttcgtcctcgccggctcgcaactccttgatggcggccacggcgagtctcactaccactgctccctcccctccagctctcctcaaagcatcagctcctttgcttatctcctttcgccccgtctcccgccactgcaagaacctgtgcatcaagaccaagtttggtagaacagttggttcggg

SEQ ID NO: 4276 - DNA, 1993 bp, Zea Mays
accgtccagttccagttccagcggtccgagcgagatcgatcgcccctccgcaaggccgcaacaacagacgcggcaagcgggtacaagggagttcttctggaggcgcgggagatcacgcgagtgtgttgcgcttgaaaagaagaaaaaaacaggcagggaggagggagtcccgttcccgaacccgaactacaagccagcgcaactgctgctgccgccgcccgcccagcaggaggagcgagggcattgcccggccccatcgccgtcgcgccgtcgccgtcgccgcgctgcaggcagaggaggacggcgccggccagcatgggcgggtacgagctcgtcaggagcgacgacgcggcgggcgccgcgggagccgacctcgagtccggctccggcgccagcaaggtcgccggcgccccgccgccctcgccggccccgtcggcgtcgcccgccgcgcggcagcagcgcctcgcctcgctcgacgtcttccgcggcataaccgtcctgcttatgatcatcgtcgacgacgctggaggcttcctcccggcgctgaaccactctccctgggacggcgtcacagtagctgatttcatcatgccgttcttccttttcatagtcggagtctcactaacactagcgtacaagcgggtgccggatagagtggaggcaactaggaaggcagtgcttcgtgccctcaagctgttctgccttggtcttgttctccaaggtggatttttccatggcgtccacagtctcacgtttggtgttgacctaacgaagattcggttgatgggcatacttcagaggattgcaatagcctatctcctagctgcagtatgtgaaatctggctcaagggagacgacgatgtagattctgggtatggtttgctgaggagataccgctaccaactgattggtcctctctatagcgtactctattcttctctacggcatgtacgttccagactgggagtaccagatagcaggccctggttccagttccacagagaagtcgttctctgtgaaatgcggagtgagaggagacaccggaccagcttgcaacgcagtcggaatggtcgaccgtacggtcctagggatcgaccacctctacagacggccagtttatgcgcgcacgaagtatagattatccagagaatgggcctctcccacctgacgctccgtcgtggtgccaggcgccatttgatcctgaaggcctcctcagctccgttatggcgattgtcacttgcttgatcggactccagtttgggcatgtaattatacatttcgagaagcacaggggaagaatcgccagttggttggtcccttccttcagcatgctagctctagccttcgtaatggacttcgtcggaatgcgaatgaataaaccactatacacgatgagctacactctggctactgctggcgctgcgggtcttctcttcgctggaatctatgctcttgtggatctgtacgggttcagaagacctaccatcgccatggagtggatggggaagcacgccctgatgatatacgtgctggtggcgtgcaacatccttcccatgttcatccgtggcttctattggagggaccccaacaacagccttctgaaagtcattggtatcggggcgtgaagccatgaccttctacatgttcaggcccaaacttggacatgcacagcgctctcgcatgtttaagagcaataatctaggtgctcaggccaagttttgctatgcggttagaggaccatagcgcgctcaggtcatgcgccatggggctgcctatattctcagcactgccgagatgcctgttgccacttgcagatgcatggaatccattctcccagccaactttgtatatggtggagttgagcacatgtacatgatatcacacgagtaatatgttgtgattcagatgaaatatatactagtacatatcagtccatattctataataatactacctccggtcttgaatatattttcgtcggctagtttatttt

SEQ ID NO: 4277 - DNA, 2669 bp, Zea Mays
cgggcggctgccgggtcgccgtcgaggcgtcctccctcccgagtcccacgagcacggagcaccggcctccggttcagattcggtgacacgcacggcacggacgaacccaacggggcactgctcacgggaaagagagaggattcctccgccgcgtccgcgttggactggacagctcacgccgctgcgaaagcaaccagccagagccagatccgtcggttccaacgaaacatccattcacgcccgccaccggcatccccatctccgatccgccgcagccgcagtcgcaggcacgtcctcctctccggccacccggagcgcggcagccagcgagcgagccactgtggtcgccgtgcaggcaatcaaaagatgtcgtcaaggcactaaagaaacggattggccacaagaatccaaaagttcaacttcttgcactaactctgttggaaactgttataaaaaattgtggggatatacttcacatgcatgttgcagagagagatatattgcatgatatggtgaagatagtgaagaaaaagtctgatcctcgtgttaaagagaaggtattggtgctgatagatacatggcaagacgtgtttgggggatcacatgcaagatatccacaatactatgcagcataccatgagttggtgcgtgctggagctgaattcccgaagagacccgagaaacctgcacctttgtttaatggccagtctcaggcagcaaggaatatgcgtagtcctgaccaacaggaagcggaatcttctgctgccaatgattttcctgctttgagcatgtcggagattcataacgcttgtggtattatggatgtacttgctgagatgctgaatgctttagacccaggaaacagagaggggctaaggcaggaggtaattgtggaacttgtggatcaatgccgcacttacaagcagagagtagtgcagctagttaattctaccacggacgaggaacttatgtcgcaggggctcacactgaatgatgatttgcagcgtgttctagcaaaacatgatgcaatagcagcaggcattgcagtccgagtggagaaaaaatcgaagtctttgcaagcacttgtagagaccaaggattcgacaaaccaggattccaaaaaggagcaaggactcatagatattgaggatcccacaagtcaagatgctgcaaaagatccaaatcaaagtacaagtgaccaatctccttttgagcaattagctcttccagcaccaccagtgtcaaatggcgcagcaacttcagcaccacaatctgatcttggcattgatcttctgagctgggatgatacccctgctacaacacaaaatccacttgctcttgttcctgtcacagatcctcttgctgactctacttcatcaaatcaaaatgcgctagcaattgttgacacattttcagaaaacagcaccacgaaccacaacgctcaaccagctgacccctttggtctcaatccgagttctgctattccaggatctcagctatacaacacgccaactcagcagcctttccagtcacaacagcctccgcagcaggcggcgctctatgcgaatgggggtgctgtggaccctggaacgtcttacgatcaggcatcccagtttaaaaatgttagttctgggtggaatggtcaagctgccaaccctgttgtgcccctgccagagcaagcactgaattacgaaaaaaaagtgatgatagtatccaaactctgtagatgatcaaagtggaaaccttccaccgcctccttgggaggctcagccagcgtcaaacaatgaattgccaaatggccaattgggaagcttgcaacctctcccaggttcagctggccagatcggtggcatgcagcagccactgcaaccacaagttaaccacatgggagttccacaaagccagccaatgtatagtaaccaaccaatgcaacccggtcaggttgccgccacaacacagatgcagcctggcttcggaaaccagcagttcggttcgctaccaccaacatccatgctgggcatgcaattcggtggcatgcagcctccgcagatgtatggcggatcgcagccagtcatgatgtacccgcaacaaatggcagtggcccagtatggagcaatgccgcggcagcagccgacgtatggtggtcgattggcgggttacatgcagcatcctgctgtggctgccgcacactactacaacaaccaggggatgtatggctaccccggtgcgaacgggctgtcacagagcatgtatggcctctcggtgcaggacaactcgtccatggggatgaggtcgtcttaccagactacgacggcgccaccctccacggggcaacctatgaagccgacgaagcccgaagacaagcttttcggtgacctcctgagcattgccaagacgaagaaagcttcatgagacgagctggagcgggagcggccttctgatatatcgtctccccttttttttgtggtttttcgtgctgtttgatcttacacttgtaacattatctgaatgtgtaaacttttttggggtccttttcttttattcccacgtcgtgtgtgatcctattgatcccattggattcgttataccgtgtgcgtgtactgatcacgagcgatgggaaactttggccgtaaatgatgattcaataaagggtgtgcagtacgtgatta

SEQ ID NO: 4278 - DNA, 1218 bp, Zea Mays
gatccggaacaattgaatcgctgcatcggtgtttcgccgccgccgcaaaaagaggcggccgcggtgagttcaagggaggaggaggaagagggtgtgaggcgctgcagaactcctgtggatcggtgagccgagggcgatatggggatgttcttcagcaaggcggaaccgccgccgcccatggtgctggtgccgccgctcttcgactaccctcccatcgctgcccgcaccaggatggcggtgccagcatatgagctaatgtttgggaaagtctccctgcacaatctgtttgaggactactttgatcaagctgggaatatgacctcaaggatcatgttgaagccgcttgaagatcctcacgttgatttgattgctactgtgtctgctgctgctgatagaaacagtggaacagaagtaaaaggggatgctttatttcgctggcagagagagctggatgacccccatacctttgtggaccttcttgtgtcaacttcaaatcccttgctgcagctgagattatgtgcatatcatcctaagtatcgtattggtgcctttggaacattacctttgctaatggggaacagggtgcgttcagaagactatggggtcatgggtgtaagatatggttcagagaatttatctgttggagcatcctttgtgccaatttccttacccagtgaggtaccctttggtgcatggttggttgggagaaaagggagcttatctgcaggagtacaatacaagccacttagtggcagcaaatatcctatgccatttacagaattggagaactggaattatgcaatcagttatggtgttggctcaactagcccgctcagcccttcattcattttctccctggaacttgccagaagcacacagctaaccgcatcattctatcagcacctggttgttcaaagaagggtaaaaaatccttttgaagatgatcaggttgttggcattacaaactacatcgattttggacttgagttggctgccaaggttgataaagataaagtgagtggggatggcaactcgtttcagttggctgcaagttggcaagctaacaaaaactttctgctgaagggaaagcttggtccttccacgtcctctgtagctctggcattcaaatcatggtggagaccatcctttacatttagtgtaacagctgtaaataattttaccttaagcatgatgggcagcacaggcttcatggctcgg

SEQ ID NO: 4279 - DNA, 2722 bp, Zea Mays
tccgcataaataccgcgcgtctgctccgcgccgcgaaacaacacgcaagaaaccagaagcgctcgcgagaagtaagggagagagaggggggacgacgacagccttgggacccgcggactgcatcgctcgccggtagctgacgtcactcggccccgtggaattttcaagctttggtggtggctcgtctgtctgatccgcgctctgctgctttttcttcgcccgccgcactgtatcacaactataacagtacctacgtgttcacaggtctaggcatttgtcctaccagtacagtacattggactagtaataactagtatgtatccagcaaaccgccacatggatccatactactcgcactatagaaaccatgttccttacccatactatcctcctgccagatgggaaatcccatccggtcatccacaggcaatggactcatcttattattatcggccaccaaactgtggaacttggccatatcatgatatctcacatccttctgagttccattgttgctgcaaccgggcatatcttcctgattactacagtttcagacccccattccctcaagagcttccaccccctcatttatactatcacgtgccatctccacatcatccaaatgcatgtccttcttactttgtcccatcacatccttacccttttgatcagacaccatatggttatgaaaagttcaagagccactgctgtggatgtccaactcatgtgtgccctggggctgagaagaacaatgtgaaaatcgaggaacaaaggcctgatgtcaagcttgagagcggtgagcacaagaatgctgatagtgacagtataattcaacacccaaacaagaagtatccattcatatggctgccatcaggcaatatgaaaggcaaggagaatggagagcattatgaattgtcacctcaggttttaaatgaatgggctcctgtgagtgggaagtggttaggggatgtgaagcaacaagggcaggataatgagaaggggaaacaattccagtggccaatagtttggatgccagcaggatatgatgcaccaaaccaaaaggctaaagatatgaatgacacagaagagaccccaaaatccccaaagatttctgaagtgtctcctcaatcacccaagatcattcctctgtcttggtttgggaatggtcatcatcatgatcagaaatcggctgccagaaatggttctggagaccacaacaacggatcagcagtgaagaaccaacctgtggttactgaccatcaagacagcatgatactggaaggaaaccctaaaatcactccagctgtgcccaagagcatacacgttgggaagaaacctccaagggaaaactgcaagaccattccagttgtgccagagaaagagattaatgaaaagaaggccagtacttacagaaccattccggtcataaaagaaagtgatgagaagaagattggcatgagggaaaagagggagtcaaaggaggccaacagtgctgaaatggttgaagagaacaggaaaacaaaacacaatgactcatcagtagttaagcattcaaaattgcccccagtatgcttacgtgtggatcccttgccaagaaagaaacctggaaatggttcttctaggtctcctagtccaccaaggaaggatactgacaacacgaagaaggacgtggatgaggcccagagccagatcctggagcctaaacagtctagtacaagtaaggatatcactgtgtctgaagtgaaagaaaaatcgccttatgaaatgaagaaggaagttgggtttagaaatgaaacagtggaagctgcttctgttgaacatctgcaggaggaagaagctcccacaagtaaagatggccaaaaggtccaagctgctagcactacagttggtgatcaagaaaatgcagccctgaatagcatagaggaagatcatgtgcaagaaaatgctggtgcaggaagcttgaatggatgtgacaaaagaaaaaatgaagatgggacagtgattgaaagtgaaactgcgaaagatgatgccagaacatatggagttaatttgtcagaatcagatgctgcagttcgtattcagtctgcctacagagggtatgatgttcgaaaatggcaacctttggataaactctggaagatcaagcatgtgcatgaacagatgcaagttgtgaggaagcagattcaatgccttttagattcttgcagtaagccaacacaaaaagagcaagtggccataggtgaaactattatgaatttactcctgaagcttgacgcaatccagggcttgcatccaagtgtaagggaagctaggaagtctgttgctcgagaactgatttgcttgcaggagaagcttgatactttatgcaaagcagcatctggagacttgaatcacacagatagtaatgatgatgaatctgaggggaccaagaacattatccaaactgaagctcctactgtaataactgaagcttctgatagacagaagagaactattgaactgggtaaggtacaagaaccatgttcagtggactccatggagccatgcaacacagttccatctggagtttcctgggaggtgaggccagatgtagacgctagcgaggagaagaatgaaaaacaagagtcatgtagcaccacagtggacgaagcgcacgaacaagcgttcagggggcttcaatgcttgctagagaagatgcaccgctgtggggattggctggtgc

SEQ ID NO: 4280 - DNA, 4501 bp, Zea Mays
ctccttccaccttcactcctcggagggccctggccccgttctccgcataaataccgcgcgtctgctccgcgccgcgaaacaacacgcaagaaaccagaagcgctcgcgagaagtaagggagagagaggggggacgacgacagccttgggacccgcggactgcatcgctcgccggtagctgacgtcactcggccccgtggaattttcaagctttggtggtggctcgtctgtctgatccgcgctctgctgctttttcttcgcccgccgcactgtatcacaactataacagtacctacgtgttcacaggtctaggcatttgtcctaccagtacagtacattggactagtaataactagtatgtatccagcaaaccgccacatggatccatactactcgcactatagaaaccatgttccttacccatactatcctcctgccagatgggaaatcccatccggtcatccacaggcaatggactcatcttattattatcggccaccaaactgtggaacttggccatatcatgatatctcacatccttctgagttccattgttgctgcaaccgggcatatcttcctgattactacagtttcagacccccattccctcaagagcttccaccccctcatttatactatcacgtgccatctccacatcatccaaatgcatgtccttcttactttgtcccatcacatccttacccttttgatcagacaccatatggttatgaaaagttcaagagccactgctgtggatgtccaactcatgtgtgccctggggctgagaagaacaatgtgaaaatcgaggaacaaaggcctgatgtcaagcttgagagcggtgagcacaagaatgctgatagtgacagtataattcaacacccaaacaagaagtatccattcatatggctgccatcaggcaatatgaaaggcaaggagaatggagagcattatgaattgtcacctcaggttttaaatgaatgggctcctgtgagtgggaagtggttaggggatgtgaagcaacaagggcaggataatgagaaggggaaacaattccagtggccaatagtttggatgccagcaggatatgatgcaccaaaccaaaaggctaaagatatgaatgacacagaagagaccccaaaatccccaaagatttctgaagtgtctcctcaatcacccaagatcattcctctgtcttggtttgggaatggtcatcatcatgatcagaaatcggctgccagaaatggttctggagaccacaacaacggatcagcagtgaagaaccaacctgtggttactgaccatcaagacagcatgatactggaaggaaaccctaaaatcactccagctgtgcccaagagcatacacgttgggaagaaacctccaagggaaaactgcaagaccattccagttgtgccagagaaagagattaatgaaaagaaggccagtacttacagaaccattccggtcataaaagaaagtgatgagaagaagattggcatgagggaaaagagggagtcaaaggaggccaacagtgctgaaatggttgaagagaacaggaaaacaaaacacaatgactcatcagtagttaagcattcaaaattgcccccagtatgcttacgtgtggatcccttgccaagaaagaaacctggaaatggttcttctaggtctcctagtccaccaaggaaggatactgacaacacgaagaaggacgtggatgaggcccagagccagatcctggagcctaaacagtctagtacaagtaaggatatcactgtgtctgaagtgaaagaaaaatcgccttatgaaatgaagaaggaagttgggtttagaaatgaaacagtggaagctgcttctgttgaacatctgcaggaggaagaagctcccacaagtaaagatggccaaaaggtccaagctgctagcactacagttggtgatcaagaaaatgcagccctgaatagcatagaggaagatcatgtgcaagaaaatgctggtgcaggaagcttgaatggatgtgacaaaagaaaaaatgaagatgggacagtgattgaaagtgaaactgcgaaagatgatgccagaacatatggagttaatttgtcagaatcagatgctgcagttcgtattcagtctgcctacagagggtatgatgttcgaaaatggcaacctttggataaactctggaagatcaagcatgtgcatgaacagatgcaagttgtgaggaagcagattcaatgccttttagattcttgcagtaagccaacacaaaaagagcaagtggccataggtgaaactattatgaatttactcctgaagcttgacgcaatccagggcttgcatccaagtgtaagggaagctaggaagtctgttgctcgagaactgatttgcttgcaggagaagcttgatactttatgcaaagcagcatctggagacttgaatcacacagatagtaatgatgatgaatctgaggggaccaagaacattatccaaactgaagctcctactgtaataactgaagcttctgatagaaagagaactattgaactgggtaaggtacaagaaccatgttcagtggactccatggagccatgcaacacagttccatctggagtttcctgggaggtgaggccagatgtagacgctagcgaggagaagaatgaaaaacaagagtcatgtagcaccacagtggacgaagcgcacgaacaagtagcatcatcgatggatatgataagtgatgaagcttttacagctgacaaccaggagcatggaattggagaatcaaatgttacttcagtggaacaagtgactgaagaagagaaaccagcatctgaggatgaagtaaaagagccaccattggtgaactccacggcactattgtatgatactacttcatcaggggattccagtggactgaaacaatacacagcttcgaccgatcagaatctctatgctgaatcaaatacagggtcgtctcctgcatccactgaggacattgacataagtactctggctgtggaaagtgaagtggcggctgagaatgatggcccaattaacagtcaggtgcatgaaactgtagctctagaaaatgtggaaatgaaagatgatgtttcttctgctgaaaatgagcataacagatcgagcagccctgttattcatttagaggacccactagtgtctttgaaggatgttgagcagcatggtccaactcctactaaggactttgttgtacctaacacagaagaccaacaagaagccagagatatcagcttgcaggtacaagctgtggattccatgaaagattgtggcgaagtaccagatggaacaatagaggcttcgacgaatgatgatgaattagaactgggtacttctgcagatgtagaaaagaatgatcaacctaccttgctggaaccaagatcggagtctgtctctgtcccagaactgtccgtcttggatgaatctgacgataaaatgcaatgtggtgtttctggcaaggatgaggaagcacatgtggaggagaaaactgtaactattgctgttgacaaggtaacaggaggttctgcaaatttcgaggatcctctttgtgaggcatcgaggaaggaacctgacattgagaagagtcacccaagcctcggagaagaggaagacgatacaataggtggaacagtcttccctggttcaggtagctgtgaattatcatgtccacaggatggtggcatcgcagtctacgaggggcctgagatggtgtcaccagagagccaaactgatgctcggaaagaaaacatccattcagatgtcgctgagacagatgaatgcaccaagactcagaaggccgctctagcaggcacagagggagaaaattctgctgaagattctggtgtgccggtgtctgagatggacaaatgcaacgagatgccgaaggatgctccgacacttacagcagcaggtgcaaatcctgctgaagacgaagcttccctgaaagacctctctgtgcagacagagaacaaggcttcttctgcctccccagctcctgatgatccgaaggccagcgacgagaagacgctggcagaagagaaccagaagctgaaagagcttctgcaaaagcttctggcgtccggcaacgatcagatgggggtcatcacggacctaagtgagaaggtcaaggtgctggagcggaggctggcacgcaagaagagaccaaaggtgagggtgcacaagccatccaggcatgcttcctgtgtccactgaaaggataagtctgtaaggttttgaggttttatgttgtatggatccccatgttgcttcctgtgtccagctattgtgcactgtgtaggtatagccatgctgtggcactgtgcttcgtcttggacaacacaaggtgtggcatgttctgtattttatgtctgtataatgcatccaactacatctagtgttctgtgagcaattgattgggacaaatcgatatgacatatgcgtctgtgttgtgctatatataattcgaaaaacacata

SEQ ID NO: 4281 - DNA, 4533 bp, Zea Mays
cgcgaaccctctcgaacccccaacggcttctccttccaccttcactcctcggagggccctggccccgttctccgcataaataccgcgcgtctgctccgcgccgcgaaacaacacgcaagaaaccagaagcgctcgcgagaagtaagggagagagaggggggacgacgacagccttgggacccgcggactgcatcgctcgccggtagctgacgtcactcggccccgtggaattttcaagctttggtggtggctcgtctgtctgatccgcgctctgctgctttttcttcgcccgccgcactgtatcacaactataacagtacctacgtgttcacaggtctaggcatttgtcctaccagtacagtacattggactagtaataactagtatgtatccagcaaaccgccacatggatccatactactcgcactatagaaaccatgttccttacccatactatcctcctgccagatgggaaatcccatccggtcatccacaggcaatggactcatcttattattatcggccaccaaactgtggaacttggccatatcatgatatctcacatccttctgagttccattgttgctgcaaccgggcatatcttcctgattactacagtttcagacccccattccctcaagagcttccaccccctcatttatactatcacgtgccatctccacatcatccaaatgcatgtccttcttactttgtcccatcacatccttacccttttgatcagacaccatatggttatgaaaagttcaagagccactgctgtggatgtccaactcatgtgtgccctggggctgagaagaacaatgtgaaaatcgaggaacaaaggcctgatgtcaagcttgagagcggtgagcacaagaatgctgatagtgacagtataattcaacacccaaacaagaagtatccattcatatggctgccatcaggcaatatgaaaggcaaggagaatggagagcattatgaattgtcacctcaggttttaaatgaatgggctcctgtgagtgggaagtggttaggggatgtgaagcaacaagggcaggataatgagaaggggaaacaattccagtggccaatagtttggatgccagcaggatatgatgcaccaaaccaaaaggctaaagatatgaatgacacagaagagaccccaaaatccccaaagatttctgaagtgtctcctcaatcacccaagatcattcctctgtcttggtttgggaatggtcatcatcatgatcagaaatcggctgccagaaatggttctggagaccacaacaacggatcagcagtgaagaaccaacctgtggttactgaccatcaagacagcatgatactggaaggaaaccctaaaatcactccagctgtgcccaagagcatacacgttgggaagaaacctccaagggaaaactgcaagaccattccagttgtgccagagaaagagattaatgaaaagaaggccagtacttacagaaccattccggtcataaaagaaagtgatgagaagaagattggcatgagggaaaagagggagtcaaaggaggccaacagtgctgaaatggttgaagagaacaggaaaacaaaacacaatgactcatcagtagttaagcattcaaaattgcccccagtatgcttacgtgtggatcccttgccaagaaagaaacctggaaatggttcttctaggtctcctagtccaccaaggaaggatactgacaacacgaagaaggacgtggatgaggcccagagccagatcctggagcctaaacagtctagtacaagtaaggatatcactgtgtctgaagtgaaagaaaaatcgccttatgaaatgaagaaggaagttgggtttagaaatgaaacagtggaagctgcttctgttgaacatctgcaggaggaagaagctcccacaagtaaagatggccaaaaggtccaagctgctagcactacagttggtgatcaagaaaatgcagccctgaatagcatagaggaagatcatgtgcaagaaaatgctggtgcaggaagcttgaatggatgtgacaaaagaaaaaatgaagatgggacagtgattgaaagtgaaactgcgaaagatgatgccagaacatatggagttaatttgtcagaatcagatgctgcagttcgtattcagtctgcctacagagggtatgatgttcgaaaatggcaacctttggataaactctggaagatcaagcatgtgcatgaacagatgcaagttgtgaggaagcagattcaatgccttttagattcttgcagtaagccaacacaaaaagagcaagtggccataggtgaaactattatgaatttactcctgaagcttgacgcaatccagggcttgcatccaagtgtaagggaagctaggaagtctgttgctcgagaactgatttgcttgcaggagaagcttgatactttatgcaaagcagcatctggagacttgaatcacacagatagtaatgatgatgaatctgaggggaccaagaacattatccaaactgaagctcctactgtaataactgaagcttctgatagacagaagagaactattgaactgggtaaggtacaagaaccatgttcagtggactccatggagccatgcaacacagttccatctggagtttcctgggaggtgaggccagatgtagacgctagcgaggagaagaatgaaaaacaagagtcatgtagcaccacagtggacgaagcgcacgaacaagtagcatcatcgatggatatgataagtgatgaagcttttacagctgacaaccaggagcatggaattggagaatcaaatgttacttcagtggaacaagtgactgaagaagagaaaccagcatctgaggatgaagtaaaagagccaccattggtgaactccacggcactattgtatgatactacttcatcaggggattccagtggactgaaacaatacacagcttcgaccgatcagaatctctatgctgaatcaaatacagggtcgtctcctgcatccactgaggacattgacataagtactctggctgtggaaagtgaagtggcggctgagaatgatggcccaattaacagtcaggtgcatgaaactgtagctctagaaaatgtggaaatgaaagatgatgtttcttctgctgaaaatgagcataacagatcgagcagccctgttattcatttagaggacccactagtgtctttgaaggatgttgagcagcatggtccaactcctactaaggactttgttgtacctaacacagaagaccaacaagaagccagagatatcagcttgcaggtacaagctgtggattccatgaaagattgtggcgaagtaccagatggaacaatagaggcttcgacgaatgatgatgaattagaactgggtacttctgcagatgtagaaaagaatgatcaacctaccttgctggaaccaagatcggagtctgtctctgtcccagaactgtccgtcttggatgaatctgacgataaaatgcaatgtggtgtttctggcaaggatgaggaagcacatgtggaggagaaaactgtaactattgctgttgacaaggtaacaggaggttctgcaaatttcgaggatcctctttgtgaggcatcgaggaaggaacctgacattgagaagagtcacccaagcctcggagaagaggaagacgatacaataggtggaacagtcttccctggttcaggtagctgtgaattatcatgtccacaggatggtggcatcgcagtctacgaggggcctgagatggtgtcaccagagagccaaactgatgctcggaaagaaaacatccattcagatgtcgctgagacagatgaatgcaccaagactcagaaggccgctctagcaggcacagagggagaaaattctgctgaagattctggtgtgccggtgtctgagatggacaaatgcaacgagatgccgaaggatgctccgacacttacagcagcaggtgcaaatcctgctgaagacgaagcttccctgaaagacctctctgtgcagacagagaacaaggcttcttctgcctccccagctcctgatgatccgaaggccagcgacgagaagacgctggcagaagagaaccagaagctgaaagagcttctgcaaaagcttctggcgtccggcaacgatcagatgggggtcatcacggacctaagtgagaaggtcaaggtgctggagcggaggctggcacgcaagaagagaccaaaggtgagggtgcacaagccatccaggcatgcttcctgtgtccactgaaaggataagtctgtaaggttttgaggttttatgttgtatggatccccatgttgcttcctgtgtccagctattgtgcactgtgtaggtatagccatgctgtggcactgtgcttcgtcttggacaacacaaggtgtggcatgttctgtattttatgtctgtataatgcatccaactacatctagtgttctgtgagcaattgattgggacaaatcgatatgacatatgcgtctgtgttgtgctatatataattcgaaaaacacata

SEQ ID NO: 4282 - DNA, 1585 bp, Zea Mays
aatgatgccctctctctaatcagctttctcaccgacggcgaccgaccgaccagccatataataaagaagcgaagctaagcgagaccggaggggcacgagcgccaccgccttgatcccgcccgctcctccccagatctcctcgccattgccgccgccctgccaggattcgcgccctactcgcccagatccgaccgcggctctgattttccaactgacgcaggagcgccactaccttgacgagctggcatctgctggttacattctgctcccttcatgtagcattatggatgaagttctttgagcataagccttttgattcaagaactgtcatgggatttggagtacttaacggaatctccattgggctcctcaacttgagtcttggcttcaactctgttgggttttaccagatgactaagctggcaatcatcccgtgcactgtcattttagagacacttttcttcaggaagaagttcagtcggagtatccagatgtccctttctgtgcttcttcttggtgttggtgttgcaactgtcactgatctgcaactcaatgctgtgggatccatactgtccttgctggcaattatcacgacttgcattgctcaaattatgacaaacactatccagaagaagttcaaggtctcatcaacccaactgctttaccagtcttgcccttaccaatcactgaccctgtttctcattggccccttccttgatggctttttgactaaccaaaatgtctttgcttttaattatacatctcaagttgtgtttttcatcgtcctgtcatgcttgatatctgtttcagtgaacttcagcactttccttgtgatcggaaagacatctcctgttacttaccaagtcctgggccatcttaaaacatgccttgttcttgcttttggttatgttttgcttcacgatccgtttagctggagaaacatacttggaatcctaattgctgtagttggaatggtcttgtattcatacttctgcacagtggagacccagcaaaaaaatgttgaagtctccccacaacaggtgaaagaaagcgaggcaggccctttgatcgcagactctatgagcaaagttgaaaacgggggtggtggtgttgatgacgagcctttgaaggtacccatgtggagctcaaagtactcgcgggagtgaaaaggtcacgatggcatggcaccatacaggattcaatttagtaggcagatagtagggttggaagccaacccagagtgtaatgaacatttcagttacatttttgggcttctttagtgtcgcagtctactagcagttaaaggatctgtttcttggaaggatcctaccttcagggctctcagacctaccttgaaactagacagcaggtattgtatgattgtatctcgatatgctccacatcctcttactgtaacttccaactggtacatggcgtgcctatatccaaagatagacctcattctttttgtatcaagaagatccggataagaagacttgtgcaagatttgtagcgtttagtgaaatttgtgactgtcagtcatgttcgctttaaaaaagtttagtaatttaaaagtcaattaaga

SEQ ID NO: 4283 - DNA, 1688 bp, Zea Mays
gccgagtggaatgaagaaagagtgagaagcagcacaaggcgggaagccgggaacggataagataacaatcaacaaacaacaagcccgcgcgagactgttctttctccatttcccaatggccgccgccgccgccgtcttctttccctccaccccgaatcctcggcaccgcctcgccgccgccgcccgccgccctccacccagcttcaccggcgccaccgacgccgtgccgctaccggaggacgaggactccagcgacgacgatgccgacgacgacggcgcgccacgcaggagcgggcgcagggaccggcgccgcgcggtgcgcgtcgcgtgggagaagctagtccggtggtcccgctcctggcgccgccgcaaccgcagcgacgtcctcgagaccacgcgcaaggtggtggttctcgggggcgggtcgttcgggacggccatggccgctcacgtggcggccaagaaggccgatctcgaggtggccatgctgctcagggacgaccacatctgccggtccatcaacaacgcacatgtcaattgcaagtacttatcagaacacagattgccagaaaatatcgtcgcaacaactagtgctgctgatgctttagcaggagctgatttctgcttccatgctgttccggttcagttcatcctttcttgaaagtatttcaacacatgttgatccaaagttgccattcatatcacttagcaaagggctggaactcaatacccttcggacaatgtctacaatcatcccacgagcattgggaaatcgccgccaaccgtttgttgttctgtcaggaccatcatttgctgtagagttaatgaacaaattgcctacagcaatggtggtggcatccaaagacaacaagttggcaagttctgttcaacaactgttagcatccccaaatttgaggataagcacatcaagtgatgttacaggagtagaaatcgcaggtgccctgaagaacgttcttgcaatagctgcaggtatagtggaaggcatgagtctcgggaacaactgtatggctgcccttgttgcccaaggctgttcagagatacggtggttggcgacgaagatgggagcaaagccaaccactctttctggcttgtctgggtccggtgacatcatgctcacatgcttcgtcaacctttcgcggaatagaacagtgggactacgcctcggttctggtgaaaagcttgacagaatcatgggttctatgaatcaggttgctgaaggcgtatcaactgctggggctgtcattgcgttggcgcagaagtacaaggtcaaaatgccggtattgacagcggtggcacggataattgataatgagttaactccaactaaggcggttttggagttaatgaatcttccccaggttgaggaagtctgacgaggctagcaacggagttctgcatttttccacttggctccgagtgtagcttgggcccatggccgaccgtatgaaaaatctgccaaagaccgttacttttttttgggtagcattacattattaatgaaaaaatgatatccagtaacggtggtatttagcatttcctaaatttcgaaacacattttcctgtccttgtacaccggcaaaaacttcacgatgacgtttcttttgaaagaggaaactgttctcaagctctggcatttaaattggaaacgtttctagcactcactggtt

SEQ ID NO: 4284 - DNA, 1260 bp, Zea Mays
attaggggcgggcgcaggccggctcgccgtcctctcgtctcgggctctcggctcggctcggccacccaacgggcaagacgacgagggtttttgccgccgccatggcgatccctcgagcacgtctaactcgcctgctcctccacttcggcagccggggctccagattcctagcgcaacccttctctacctcttcctccgcacacggcctcttcccctctctgtggccaacgccgtccaccgccggcgcgtggcggcgcgcgttccacgatgggcggccgcgagggccgctgtggcggagcaagaagctgatcgggaaggaggccttatttgcgatccagggcctcaagcggttcaagggggacgaggagaagctagcggatttcgtgcggcggtatgtggccagactgctcaaggcggacaagcttgccgtgctcggcgagctggaacgccaggaggagatgtttaggatcatacaaaaggaggactggtataaaccagatatttacatgtacaaagacttgattattgcattagccaaatgcaagaatatggaggaagcaatggtaatctgggggaacatgagagatgagaacttgtttcctgactcacagacttatgccgaagtaataagaggattcttgagatatggctccccatcagatgcaatgaatatttacgaggacatgaaaaagtcacctgatccaccagaagagttaccttttagggtattgttgaagggtcttttacctcacccactgctaagaaatagagtaaaacaagattttgaagagatgttcccagaaaggcatatctatgatcctccagaagaaatttttggcatgcactgaggtatattcagaggcatgaatgtgtttatcaattggatggtcgcgttgcaataaatgggcgaaaactgagaagctgattattctgatttctgatagacagattagttgtccatatcattgtgctgtcctttgttgttcagccaagctcattaatactgggccatctattcaactcaaccagtacaactttgcatggttgcaatgcctgatcttatgagtagtaacagaaaaaaaatgtgttcttctttgggcccacttgtatgattacgttgttagaacaatgtactggcgtctggctacattcatgtcgttccttccctaactgcatgagagacctacttcgcatgaacattgtgatggtacctcatttcgtgaccctgttgagtttatgggtgatgattattgttatttg

SEQ ID NO: 4285 - DNA, 2827 bp, Zea Mays
cgccattaacctgacgcgcaccaggcgcaggccgccgcagactcgccgtcgagaggacgagggaaaaagtcattcccttgcctgcttctgctcgcccgaaaaggctcccgttctgcaggcccgccccgccccgattcaatgcagccattgccttgttgagctcgtctcgtcccgctgctttccctctcgtcgtgctcctccccacgcggccacgccacgcctcgctgtaaaccgaccctgttgaggcttggacgcacccgcgtgtccgcgcctgcctcccatcccacgccccctcccctccactccactccactcccgcgccgtcaccggccggggggaaagctccaaccgaggggtttttgtttgtacgcgcccgtttggcccttgctgtggtcacatcgcccgctcccccgctgcagcagcgccaaagatatgagaggaaagtttgggatcagttccccggtgccccgccccctcatgtgcccgcgccagtgacctcgaaaaggaccgcgcgccgcgccttgccccgtgcccagccgactctctctctctcttctcgtcccgattctgatctggttgccggcaccagcgaggtccagtctcggcgccgccggcgaatgcagggtctggaggcgcccgcccgctaatctcgacttggagctcgaggcttgcattttgtgccgccgtcgtctgatgtgatgtaactgaagggcagcaggggcagccacaagccagccagccagccgcgggttttccggattctctcctgctgctgacgcgacttcagtttcttcctaggagggggaggagcgtgtgaaactcaggttgggcgaggatggagagccgggggcggcggccgcggagccccgagcgccggaggccggcggcgcggaaggtgccggtggtgtactacctcacccggagccgccacctcgagcacccgcacttcgtcgaggtgccgctggcctcgccggaggggctctatctcagagatgtgattaatcacctgaacatggtgcgcggcaagggcatggccgcgatgtactcgtggtcctgcaagaggagctacaagaacgggttcgtgtggcacgacctttcggaggacgacctcgtcctcccggcaaccgacggcgagtacgtgctcaagggctccgagctcgtggaccaatccccttcgggtccattttaccctgtcactgtcagcaacggcaaccagaagcaacagagcaggccgaaagagggcgcgcggcagccactgccaagagaccaatccgacccatcctccccgcctagcgtgacagtcagagaagccaaggcccggcggtcaccgtccgtgccttcgcaagacgaggaggatgacaccccgtctccgtgcagggatcgctccatgtcacagccacaggagctggagccccagcggaacgagaggaggacgcaaccgccagcgagcgggtctgcgagcccagtggagctcagagctcacaggcccaccaccggctgcacggacgccgcaacccagaccgacgatctcggcagaaggccggcgggccgcagggcgctcgagctgccgcgcaagaagagtctgagcacggaccacgacgccgtcgtccgtgagatcgcagagtaccggcagagccaccctcgccggtcggcagacctccacgggatctcccgggagctcctgcgccagtgcatcactactccgctgaccgtaccctcgacctgcgccaagtccgagagcctagagtcgctgatacgcgcggacaacgtgatgacggacagcttcaggatcctcgaagaggaggacgtcgtcgcgcgcacctgccccaagctgaggccggcgagcgtgctgatgcagctcgtcacctgtggctcgctctcggtgaagggtcacggggacgctggggtcgttcggacgtgcaagccgaggttccccaacctcaggttcctcccctcgccgctgatctcgcgcaccatgatgatgggcgagctcgactacctgtcggaaaaccccaggttgatggggatgaagctggaggagaaggagtacttcagcgggagccttgttgagaccaagaagacgcaaagagatggtccggctgagaggtattcggcgcttaaacggtcttcttcctacaatgcagaaagggccggcgaggctctggactgcacaagacgcgaagaggataaagccgacgacgtgtcgtcgcgcacgaggtgcctcccgcggacgccgatcctgtcatccttcctgcacccgaagggcgactcgctcaggtctcccgtctcggactgccggcggagctcctcggcccggcgggactacgacgcggcctccggggacgggagcaggaggttcgccgacgcctccgtcgcgtccgcgaccacaggggccgagtcgttcaggaaggaggagaaactcgtcaagatcgaggaaagttaagtgccgcccgtggcctttctttacctgaacctactgtgaactctttgtcagtgctcggctgtcgtccggagcccgtgtcgtgatccactacaccgtcccttgcaacgacagcgacgaaggctctgaacgctcggaggagtgacactgctgttcagctagacgacccattttttcttcccgttttttttttcactttctcccttagaaacattaggcccccttatcattgtataagtgcctgttataatgtatcattcatgtgtttcacttaaaaagatgtctcatgagactgcatggtagagtgtgtaaaatagaggacaagaaacggtttgtagaaacaagtttgaaatatgggatgaaatagaagatctggccatatgtgca

SEQ ID NO: 4286 - DNA, 1874 bp, Zea Mays
cggcacgctcccgctaaaaccagtggccgtagcagttcgcggctcccctgcctcacgcttcctgttcgaactcttcgtcgcctcacactggtgctcctcctctccccatcgctccgccactcccatggcgtccctcttcggggctggccgccggcgatcaccggaggacgacggcgaggacgatagatccggcagagggaggaccaagcgcttccgcctctccccggaggaggacgcagcgtcgccggcggaggcggggcccggcgcggcgacggagaccggctggctctccggcttcgtctacggagcgaagagggtcatttcttccgttttactgttctcctcgcccgaggagaccggctcgggggaggacgaggaagaggagaaggacgacgacgacgacgaagagggcatccacttgaatgaacatgaagctactcatgacactcatggagcaatagttccttatagcgagccaaagcttactattgagcaaatggttatgaaggaaacattctcaagggatgaatgtgataggatggtagagctaataaaatcaagagttagagattctacttttcctgaagcccatgagtatgtaaagccagaagaaatccctagtaggaatgcaggcattacacatgacttcacaggaacatggcgctccttgagccgtgatcggaatgtccctgaatcagttccactctctagtatgagaacaagacctggtagtttttctcaaggctctccactccaagcatcacctgagctatgcactgcagcagttacggaagcaaaaaaatggttggaagagaaaaggcagggactgggcttcaagcctgaagacaatggaccatgcacactaaatactgatatacttagttctcatgatgactctgtctctgacctgggttctccagttgatttagcgaaatcatacatgcagtcgttacctccttggaaatccccattcttaggccgtcagaagtttaacacaccaccctccaaatattttatctcatcagcagaggtaactacaaaggaggactacctttccagcttttggacaaaattggaggaatcacaaagagctcgtattggatcatctggaggttctgctgatgctcctaaattctggaattatggttctaattccaggttatttgagaatgacacctctatattttcattgggcactgatgaaaaagttggagatcctaccaaaatctataatgggtctgggaaatttgcagcaacagaaccagttggtggatgctgcttacctattacacccactgaagatagaactgatggtattactgagcctgtggaccttgcaaggaacaacgggaatgcaccccaagaaaaccaggttgcatctgaaattctccctgataaagttccagagggtaacgatgtgtcttccactggaattactaaggacactactggccatagtggagatgttaaagctcccacttcagaaccacatttaggggaaacacgtatcaactcagcatcagtatctacatccaaacggacccttagattatccagctgagagcagggagcgattggccacatatcatggacaaccttgcctgcaggctcaggaaaggcataattgctgatgttagccagtaaatcatgtcttcaattggaatgccactacacagacaagtttgagacgatttatgttgaaaaaaaaactacaactcctggttccaggtttatatgggttttacaaccatcatgaggcttattgataaaaaaaaacattgtgaggcattacgatgcttgtggtttggtggaaacttaaacattggtataaaccatatatgtagttttttttttgtcatgtgtggttataccgc

SEQ ID NO: 4287 - DNA, 2879 bp, Zea Mays
ccctccagatcacaccactgccgcctccgcctgcaaatccatttctagactcaagctgttgctgcgagcgagctagggttggtgctcaggtctccagggtttcgcctccccgctcccggtgcccatcgccttggaccttggcctgccgggttagggttgggtcgcagctgcgggggccgtggggcggggatgcggccgatgcggcgatcgcgggcgatcgggaggctgtagcggcggcggggcagggtatctcttgggtggattctccggcgatggccgcagacgcactatccatcatcccgggcgccgtgcttcgcaacctctctgacaagctctacgagaagcggaagaacgccgcgcttgagattgagggaattgtgaagcagcttgcaacgtttggggagcatgagaagatatcagcggttatctcgctgctcaccaacgatttcacatattcgccacaggcgaaccatcgaaagggtgggttgattggccttgcagcagttactgttggactcaccagtgaggcagctcagcatctcgagcaaattgtacctcctgtgcttacttctttcctggaccaagatagtagagtgcgttactatgcttgtgaagcgctatacaacatagcaaaagtggtaagaggggatttcatcatctacttcaacaaaatttttgatgctttatgcaagctttctgcagattccgatgctaatgttcaaagtgccgctcaccttcttgataagcttgtcaaggatatcgtaactgagagtgatcagttcagcatagaagaattcataccgctcttgagagagcgcatgaatgtgttgaacccttatgtaagacaatttttggttgggtggataacagtgttagatagtgttcctgatattgacatgcttggttttcttcctgattttcttgacggtttgttcaatatgctgagtgattccagtcatgagataaggcagcaagctgatgcagcactttctgagtttcttcaggagataaagaactcaccaaatgtagattatggtcgtatggctgaaatactcgttcggagggcaggctctactgatgaattcactcggttgacatctatcacatggatcaacgagtttgtgaagcttggtggggaacaacttgttccctactatgcagatatattgggcgctgtcttaccatgcatatctgacgaggaggagaaaatccgagtggttgcacgcgaaacaaatgaggaactccgtgctataaaagctgatccagctgagggatttgatatcggagcaattctttcaatcgcaaaaagagaattgaacagtgaacatgaggccactcgaatcgaagcattgcattggttcttcactttgctggatcgatattgtgctgagttcttggcttacctgaacgatatttttgatccactcctaaatgcactttctgatccttcggacgcggttgtcctattagtattggaggttcatgcacgcatagctgaagaatctcaccacttccatcatcttgtatcctacctgatccgcaccttccacaacaaccattttgtactggagaaacgtggtgctttgatagtccgtcggctctgtgttcttctaggtgctgaaaaagtatatcgagagttctccactattcttgagagtgaagttgatcttgatttcgcatccgtcatggttcaggttttgaatttgattttgctcacatcaactgaacttggtgagctccgctctcctcttaagaagtcgttagtggattcttgtggcaaggacttgtttcagtctttatatgcttcatggcgccactctccgatggctacgataagtttatgtttacttgctcaggcatacaatcacgcaagctgtgttattcagtcactgggagaagaagacataaatgtgaattttttggttcaattagataaattgatccgtctcttagagactccagtatttgcttacttgcgtttacagcttctcgagcctggaaaacacacttggcttctgaaaactctttacggtctcctgatgcttttgcctcagactctgttgggagagattatacatcgtggggtttatatgtttacacagcaaagtgcggccttcaagatcttgaggactcgactgaagactgtgccattcagtgaaaatcttaagcgcacatcttcagcgaatccatactctcagattctgcaagtgacggaagatggcaatagaaaccaagatatgcagaactacagtgcaatcaatttcccattccttctccagcaatttgagaacatgcagctgcagcatcgtaaccatttgaaggatcaactgcaatcccgtaaatctgcttcgactttaacattatctcaggagatacaaagatacgaagaagcgcattcctcatcgctgtcagagattaacaggcccccttcaagaacatccaaaggcattttatgatgcatttgttcttgcgatgtatgatatatttgccggaagcatcaccacatatatgttggggctttggttagtctcctcgttttttttcaaaggaggttgcatagggtacatagtgtaatcttttctatttcgttcctagattttgtcaagagatggcaattatttgttggagaaagctcgttgccacattctagtcattcttttcttagtggtttcactgctcatctggtttctgtaatttttcaattgaaggccaaatgagcaaagtagtaattggagatagaaatatgttactactgtcctatctatcgatctccaataaattagcgttgcaatgtaaattcctgttggctcgtatgatatatttattatattatttatatgccttatctttacccccattttatattattacaatatcgc

SEQ ID NO: 4288 - DNA, 3336 bp, Zea Mays
ccgtggaccatcatcacccacgggaaacaggcgccgtgttaatggccgccacaacggtaaacgttacccttgccgaagagaagggaaaatagcagtagcgcccggatcccctctccttccctccagatcacaccactgccgcctccgcctgcaaatccatttctagactcaagctgttgctgcgagcgagctagggttggtgctcaggtctccagggtttcgcctccccgctcccggtgcccatcgccttggaccttggcctgccgggttagggttgggtcgcagctgcgggggccgtggggcggggatgcggccgatgcggcgatcgcgggcgatcgggaggctgtagcggcggcggggcagggtatctcttgggtggattctccggcgatggccgcagacgcactatccatcatcccgggcgccgtgcttcgcaacctctctgacaagctctacgagaagcggaagaacgccgcgcttgagattgagggaattgtgaagcagcttgcaacgtttggggagcatgagaagatatcagcggttatctcgctgctcaccaacgatttcacatattcgccacaggcgaaccatcgaaagggtgggttgattggccttgcagcagttactgttggactcaccagtgaggcagctcagcatctcgagcaaattgtacctcctgtgcttacttctttcctggaccaagatagtagagtgcgttactatgcttgtgaagcgctatacaacatagcaaaagtggtaagaggggatttcatcatctacttcaacaaaatttttgatgctttatgcaagctttctgcagattccgatgctaatgttcaaagtgccgctcaccttcttgataagcttgtcaaggatatcgtaactgagagtgatcagttcagcatagaagaattcataccgctcttgagagagcgcatgaatgtgttgaacccttatgtaagacaatttttggttgggtggataacagtgttagatagtgttcctgatattgacatgcttggttttcttcctgattttcttgacggtttgttcaatatgctgagtgattccagtcatgagataaggcagcaagctgatgcagcactttctgagtttcttcaggagataaagaactcaccaaatgtagattatggtcgtatggctgaaatactcgttcggagggcaggctctactgatgaattcactcggttgacatctatcacatggatcaacgagtttgtgaagcttggtggggaacaacttgttccctactatgcagatatattgggcgctgtcttaccatgcatatctgacgaggaggagaaaatccgagtggttgcacgcgaaacaaatgaggaactccgtgctataaaagctgatccagctgagggatttgatatcggagcaattctttcaatcgcaaaaagagaattgaacagtgaacatgaggccactcgaatcgaagcattgcattggttcttcactttgctggatcgatattgtgctgagttcttggcttacctgaacgatatttttgatccactcctaaatgcactttctgatccttcggacgcggttgtcctattagtattggaggttcatgcacgcatagctgaagaatctcaccacttccatcatcttgtatcctacctgatccgcaccttccacaacaaccattttgtactggagaaacgtggtgctttgatagtccgtcggctctgtgttcttctaggtgctgaaaaagtatatcgagagttctccactattcttgagagtgaagttgatcttgatttcgcatccgtcatggttcaggttttgaatttgattttgctcacatcaactgaacttggtgagctccgctctcctcttaagaagtcgttagtggattcttgtggcaaggacttgtttcagtctttatatgcttcatggcgccactctccgatggctacgataagtttatgtttacttgctcaggcatacaatcacgcaagctgtgttattcagtcactgggagaagaagacataaatgtgaattttttggttcaattagataaattgatccgtctcttagagactccagtatttgcttacttgcgtttacaggtaacttggtctgataatccgttcctgcaaatttatctttctgtttctcaggcacatttgaattccgaaacttggagagttctacctggcttttttaatttgatttctagtgctacattaatggcatgataagcctggaccaatctttgtctcatgctgtttatctgtagttctgtacatttactgtatgctcgccttttggtacaatgtttccagactattgctatcccctaatgattccacattcagtttggatgctgtaaaactaacatgttggggtttatgtgacgcaacatgatatgaaaactgtgatgacttgttggcaaaaaaaaactctagtacagagacttttgttgttatatcttcttactgatcattttggcatggaaattccacaacatgctcttaaaaatctgcagcttctcgagcctggaaaacacacttggcttctgaaaactctttacggtctcctgatgcttttgcctcagcaaagtgcggccttcaagatcttgaggactcgactgaagactgtgccattcagtgaaaatcttaagcgcacatcttcagcgaatccatactctcagattctgcaagtgacggaagatggcaatagaaaccaagatatgcagaactacagtgcaatcaatttcccattccttctccagcaatttgagaacatgcagctgcagcatcgtaaccatttgaaggatcaactgcaatcccgagatacaaagatacgaagaagcgcattcctcatcgctgtcagagattaacaggcccccttcaagaacatccaaaggcattttatgatgcatttgttcttgcgatgtatgatatatttgccggaagcatcaccacatatatgttggggctttggttagtctcctcgttttttttcaaaggaggttgcatagggtacatagtgtaatcttttctatttcgttcctagattttgtcaagagatggcaattatttgttggagaaagctcgttgccacattctagtcattcttttcttagtggtttcactgctcatctggtttctgtaatttttcaattgaaggccaaatgagcaaagtagtaattggagatagaaatatgttactactgtcctatctatcgatctccaataaattagcgttgcaatgtaaattcctgttggctcgtatgatatatttattatattatttatatgccttatctttacccccattttatattattacaatatcgc

SEQ ID NO: 4289 - DNA, 3383 bp, Zea Mays
caacggtaaacgttacccttgccgaagagaagggaaaatagcagtagcgcccggatcccctctccttccctccagatcacaccactgccgcctccgcctgcaaatccatttctagactcaagctgttgctgcgagcgagctagggttggtgctcaggtctccagggtttcgcctccccgctcccggtgcccatcgccttggaccttggcctgccgggttagggttgggtcgcagctgcgggggccgtggggcggggatgcggccgatgcggcgatcgcgggcgatcgggaggctgtagcggcggcggggcagggtatctcttgggtggattctccggcgatggccgcagacgcactatccatcatcccgggcgccgtgcttcgcaacctctctgacaagctctacgagaagcggaagaacgccgcgcttgagattgagggaattgtgaagcagcttgcaacgtttggggagcatgagaagatatcagcggttatctcgctgctcaccaacgatttcacatattcgccacaggcgaaccatcgaaagggtgggttgattggccttgcagcagttactgttggactcaccagtgaggcagctcagcatctcgagcaaattgtacctcctgtgcttacttctttcctggaccaagatagtagagtgcgttactatgcttgtgaagcgctatacaacatagcaaaagtggtaagaggggatttcatcatctacttcaacaaaatttttgatgctttatgcaagctttctgcagattccgatgctaatgttcaaagtgccgctcaccttcttgataagcttgtcaaggatatcgtaactgagagtgatcagttcaggtatgctgtgtattatttgccttttccttattaacgtgttgcttgttttaatgtctgtgttgattcctgatttggttttgctcttcagcatagaagaattcataccgctcttgagagagcgcatgaatgtgttgaacccttatgtaagacaatttttggttgggtggataacagtgttagatagtgttcctgatattgacatgcttggttttcttcctgattttcttgacggtttgttcaatatgctgagtgattccagtcatgagataaggcagcaagctgatgcagcactttctgagtttcttcaggagataaagaactcaccaatcaacgagtttgtgaagcttggtggggaacaacttgttccctactatgcagatatattgggcgctgtcttaccatgcatatctgacgaggaggagaaaatccgagtggttgcacgcgaaacaaatgaggaactccgtgctataaaagctgatccagctgagggatttgatatcggagcaattctttcaatcgcaaaaagagaattgaacagtgaacatgaggccactcgaatcgaagcattgcattggttcttcactttgctggatcgatattgtgctgagttcttggcttacctgaacgatatttttgatccactcctaaatgcactttctgatccttcggacgcggttgtcctattagtattggaggttcatgcacgcatagctgaagaatctcaccacttccatcatcttgtatcctacctgatccgcaccttccacaacaaccattttgtactggagaaacgtggtgctttgatagtccgtcggctctgtgttcttctaggtgctgaaaaagtatatcgagagttctccactattcttgagagtgaagttgatcttgatttcgcatccgtcatggttcaggttttgaatttgattttgctcacatcaactgaacttggtgagctccgctctcctcttaagaagtcgttagtggattcttgtggcaaggacttgtttcagtctttatatgcttcatggcgccactctccgatggctacgataagtttatgtttacttgctcaggcatacaatcacgcaagctgtgttattcagtcactgggagaagaagacataaatgtgaattttttggttcaattagataaattgatccgtctcttagagactccagtatttgcttacttgcgtttacaggtaacttggtctgataatccgttcctgcaaatttatctttctgtttctcaggcacatttgaattccgaaacttggagagttctacctggcttttttaatttgatttctagtgctacattaatggcatgataagcctggaccaatctttgtctcatgctgtttatctgtagttctgtacatttactgtatgctcgccttttggtacaatgtttccagactattgctatcccctaatgattccacattcagtttggatgctgtaaaactaacatgttggggtttatgtgacgcaacatgatatgaaaactgtgatgacttgttggcaaaaaaaaactctagtacagagacttttgttgttatatcttcttactgatcattttggcatggaaattccacaacatgctcttaaaaatctgcagcttctcgagcctggaaaacacacttggcttctgaaaactctttacggtctcctgatgcttttgcctcaggtcaaacttctaaccagactctgttgggagagattatacatcgtggggtttatatgtttacacagcaaagtgcggccttcaagatcttgaggactcgactgaagactgtgccattcagtgaaaatcttaagcgcacatcttcagcgaatccatactctcagattctgcaagtgacggaagatggcaatagaaaccaagatatgcagaactacagtgcaatcaatttcccattccttctccagcaatttgagaacatgcagctgcagcatcgtaaccatttgaaggatcaactgcaatcccgtaaatctgcttcgactttaacattatctcaggagatacaaagatacgaagaagcgcattcctcatcgctgtcagagattaacaggcccccttcaagaacatccaaaggcattttatgatgcatttgttcttgcgatgtatgatatatttgccggaagcatcaccacatatatgttggggctttggttagtctcctcgttttttttcaaaggaggttgcatagggtacatagtgtaatcttttctatttcgttcctagattttgtcaagagatggcaattatttgttggagaaagctcgttgccacattctagtcattcttttcttagtggtttcactgctcatctggtttctgtaatttttcaattgaaggccaaatgagcaaagtagtaattggagatagaaatatgttactactgtcctatctatcgatctccaataaattagcgttgcaatgtaaattcctgttggctcgtatgatatatttattatattatttatatgccttatctttacccccattttatattattacaatatcgc

SEQ ID NO: 4290 - DNA, 1594 bp, Zea Mays
aggtcccgtgcctgcccgctctctcgacgatttccatctctccctccattttgccccctcgctcttctcttcacttcctccgctccgcttgctgtctcctagtccttcccttagggtttgtccagctccgcgctccgcctcgctcgctagctccctctctcgtcgatcccacggccccgatcagcgcgatctccgcgcggccatggtctccggcgcggcgcacaacccgggcgggggcgccgccgcccagaccacccagcgctcgccgccgcagctgggggcccggacggccctcgccacgccgccgccggtctccggcggcgctgcgcactccgcgtctactagcggcggcaccgctggttcaccaccgtccagccgcagcgagcagcacgcccccgacggtgctgtcaagggtcccgccctcggcactgcgcccgcagcggcggcggcgtccacgcctgccagcgacagcacgttcctccgcttgaataatctcgacatcaacggcgacgacgcgccgtcgtcgcaggctcccacgagcaagaagaaaaggagaggcacacgggcagtgggtcctgataaaggaaaccggggactgcgccagtttagtatgaaagtttgtgagaaagttgaaagtaaagggagaacaacatataatgaggtggcagatgaacttgttgctgagtttacagaccccaataataatattgaggcaccagaccctgataaccctaatgcgataaaaaggagatccagtggaagggcttgccgcggactagtataagtgatattgaagaattgaagactgagcttgtgggactgaaaggtagaattgagaagaaaagtgtttacttacaggagctacaagatcaatatgtaggtttgcaaaacctgattcaacgaaatgagcaattatatggttcaggaaacacaccttctggtggagtggctttgccattcatcctagtccagacccgacctcatgcaaccgtggaagttgagatatcagaagatatgcagctggttcattttgacttcaatagcactccatttgagctgcatgatgactcatatgtcctaaaggaaatgcggttctgtggaagagaacaacatgatggaactcaagagtcgatatcaaatggaggtgagagttcaaacgtgtcaaatatttattggcaacaagcacagcgtatggagatgccaaacaatggcacagttaggttatcaagctcaccgcctattccagggatattaaaagggcgtgtgaagcacgagcagcactagcgcttcggttttggttaactggcgttgtcgtcctgagagcagtttgttttattacttttctccgttgtgtaaagcgcctgtaaattattaggcaagggggagggtagtagctctgatctgatttagctctgattggtagaacgacgggtgtaactatatccttgattcggttctctcggtatggttgagaaaagggttgacatgtaatttgtagagcattataaaaactaaaattgttgatgtcttctggggctgcgtgcttcgttctgggcacaagcatatttatttcctgttcctttttcttctctct

SEQ ID NO: 4291 - DNA, 2203 bp, Zea Mays
gctttcagcctcatggccagcgcgggactccaccactcctcctccccctctccgcggatcacccaccgaacccacgcgaaaccggcgtccagatcttctcccccgcggttcagatccccggacgcagccggcgccttctgacttgggttggcacagccgtacaggttgctttgcgctgcggtggatctcctggcgtggcgacatgggcctgggtttgggagctcttctcaaatccggcgggctctcggtctcggatcacgacgccatcgtctcgattaacatcttcatcgcgctgctctgcagctgcattgtcatcggccacttgctggaagggaaccgatgggtgaacgagtccatcaccgcgcttgtcatgggcctcatcaccggaggcgtcatcctgctggttactaatgggacaaactcacgcattcttgtgttcagcgaggacctgtttttcatatatttacttccgccgataatcttcaatgccgggtttcaagtaaagaaaaagcaattcttccgcaactttataacaattattttgtttggtgctattgggactctgatttcctttgtaataatctctcttggtgctatggggttgttcaagaaacttgatgttggtccactcgagcttggggactatcttgcaattggtgctattttctcggcaacagattctgtttgcaccttacaggtgcttaaccaggatgaaacacccctactctatagtctagtttttggtgaaggtgttgttaatgatgccacatctgttgtgctcttcaatgcaattgaaaaccttgatattgataattttgatgctattgttctgttgaatttcgtcggaaaatttctctacttgttcttcaccagcaccatacttggagtagctaccgggttgcttagtgcatacattatcaagaagctctgctttgccagacattcaactgatagagaagtttctatcatgatactcatggcatacctttcatacatgatatcaatgctgttggacctgagtggaattcttactgtcttcttctgtggaatagtaatgtcacattacacttggcataatgtgacagaaagttctagggttaccaccaagcatacttttgcaactttatcattcattgcagaaattttccttttcctctatgttgggatggatgcattggacattgagaagtggaaattagctagtagcagtcctaagaaaccaattgctttaagtgcaattattttgggcttggttatggttggaagagcggcatttgtattccctttgtcgttcttatccaacctaagcaaaaaggaggcccgtccaaagatctccttcaagcaacaagtaatcatatggtgggctggtctcatgagaggagcagtgtcaattgcgcttgcctataacaaggccatgtaaaattttgcagtttacagcatctggtcacactgaagtgcgagtcaatgctatcatgatcaccagcacagttattgttgttctattcagcacaatggttttcggcctgctgacgaagccgcttctcagtctcctcatcccaccaaggactggactgaacacgtcgtctctgctctcaagccagtctatgctggacccactccttactagcatgatggggtctgactttgatgtagggcagatcaactcccctcaatacaacctccagttcattctcaccgcgccagctcgctccgtccatcgcctttggcgcaagtttgacgatcggttcatgcgcccggtgttcggggggcgaggtttcgtcccctttgtgcctggttcgccggtggagaggagtgtccctgaatctcacctgggcactgtgacggaggctgagcgcagttgaaatgaggcaagagggatgccgacaattttctgtagatcttcagacagataccactcatactcctattttattttcagaatccactggtgcgaattgttctttgtagtaccttgtgcatatagttttatatagagctgctacacaagctgctgtaaatttctgggaggcactcccaactgtagattactgcaattcatctgtaaatttcaatcttgttcaagaagaatgatcatatattggcatgttttttcttagcagttgtataattgtgagcctgacacaacaaatcccttttaccccaagaatgttaaatgtagaaaagacaagattgtcaaaactcc

SEQ ID NO: 4292 - DNA, 1838 bp, Zea Mays
aaatcttcttgtgctcctcttttccaactctccgcgccgatctccaaatcccaaaaccctgacccatccacctcctcttccgccgccaccagcccagtagcccaccatcaccgccgacatgggaggaggaggcggcggccgcaaggcccgcaacttcgcgaccttccgcctctttccgcgcgccggcgctgccgatcccaacgaccgcgtctttgtccgcgtcgacaacaacgactacaccgttcccgggttcgccgatgaggactccttcgacccctccttcggcgatggcaacttccactctgcctccggccccctcccagaacacgtccgccgcgagatcctcgagcttggcctccccgacgacggttacaactacctctcccacctccgcgagctccgtcccgccgccgtcgccgcctcatccttcgtccccagctccactgcgcgccccgagcctgtcccgctcgatgtcaaggcttatgatgcaagtagggtacgggttggtcccagcgagggtgaactggacgaggggaagacgatgtgtaaggtggctgccaagactgcaccagtgaggcgaattgagaaggctgtcgacccagatgtcgccaggttgctcgatgagagcgatgtgtctcatgttgggtctgaggatgagggcctggaggaagattttgtcatcatagctaaccaggctgagggggaggaattcgaggaagatgacatagaagggatggaagagtggaatggtgttttgagtgatgtggaagaggaggagttcgattttgacgaggatgagccaaagccaagagtgagacgattgctggatgaacaatttgatctacttgctttggaagagtatggagacagtgatgatgatggcggggttgttaaaggtggggaatatgaactgccaagcgaggctttagatgaactgaaattgttccaaaatcagaatgtatctgttgacgaagaatatagaacaccagcagattttgttcgtcaaaaactggactcaagcgcggcagacgaggtggatgaatctgcttgtgtgataaaaaaatgttctgaatacgctgaaagatatttcaatgaaactgcagaagatgtggtagtacttgtgtcggaaagcagtgatgaatctgaagtttgggactgtgagaccattgtttccacattctctaaccttgataatcatcctgggaaaattgaaactccaggaatccacagaaagcggctccctagagttttccctggagaaacaactacgacaaatgacatcatcaagcttcatgggaaagagaaactgccagtagaatacctgccacagaggagaagaaatggtgaaaaggagaagaaagtaaagcccgtagaagcttctgtcactgataaatttaaaaaaggagctgagaaggaaacaaaagaggacaagaaggcaagaaaggcagcagtgaaagaagaaaagagagaagcccggaaagcaaagaaagagctcaaaggcctgtataaatcagaaacacagaaggctcagaaagttgctgctgttactggaccatcgtccatacgattaatgtgatggttgtccgccaggacaaatgcatcaaagctacgaaagattcatgataccagttcatctttgtgccatgctcgtggattttgtggacaagatacccaatgcatagttcttgcctttgagttatataatcttgttgcaaaatatagagttcttgcgtcttctcttctgaaacacgacgtttgctatgctattcaaaaacagaggcattgtagcactgctatgtattaattcagttaatcgaaggagaagataagaagtttat

SEQ ID NO: 4293 - DNA, 1239 bp, Zea Mays
atgaagagctcctgattttgtgaatgttgactgggacataagcaatggttggcggaagtacagtttcttggtgttctggagcacccaaatctcgtaaagctacttggatattgcgctgttgatagcgaacgaggggcacaaagattgctagtctacgagtttatgcccaataagagcctggaagaccacttgttcaggcgagctaatcctcctatatcatggaacacaaggcttcaggttatcttgggggccgcagaaggattggcttacctgcatgaaggggtggaagttcaggtaatctaccgggacttcaaaacgtccaacgttctattggacaaggacttcagagcaaagctatcagacttcggcctagccagggaggggccaactggagcaaacactcacgtctcgactgcggtcgtcgggacgcacgggtacgctgcgccggagtacatggacacggggcacctgacggcgaagagcgacgtgtggagcttcggcgtggtgctctacgagatcctgacgggacggcggtcgctggaccggaacagaccggcggcggagcagaagctgctggagtgggtggcccagttcccgccggacagccgcaacttccggatgatcatggaccccaggctccgcggcgagtactcggcgaaggccgcccgggagatcgccaagctggccgacagctgcctgctcaagaacgccaaggagcggcccaccatgagcgaggtggtcgaggtcctcaggcgggccgtgcaggcgcacgccgagcctgacggccggactcccggccccggcgccagggggaagaaagccgccgccgccgccgccgccgccgcgccgtccaggcggtgatggctacatgtcgtcaccggtaaaggcgcgctgttgccttatttctgagaccattgtttggtcagtcctagccgtgactcggtgagttgtgattgtgacagcacaaaaggaatgtttatgcttgggtacattcttggacacattgcttagacgacttgtgtacatatagatgagttggcggattgaactttgttagctttcgaaagtgagcattttgaaagaaaaaaaatatataggtctcaaggagtcaaggatttcgaaagtgggcaactgagaagatgttgcgctggctctacaaaaggatcttgttttggcagtatccagtgaaaccagacacgagcgcacaaattttcagaaaccagctggcaagaactccgt

SEQ ID NO: 4294 - DNA, 2526 bp, Zea Mays
tttggcgtgatacagatgagaggattttttaaccacaacctgaaattcggtcccacagggagtcaaacccagtacctgaggagtgctactcataccacctaaccaactcaactagaggccctttcgcaacttttccattgttttagatatttcgaaatataatagtggcaagccaaattatattttggggtattttgttttttatttgaaatgttatgtttgtaaattaagttttttataacttttggtggtatctggatctggatatcattttctgcctttgaatctataaatcttagaaaaagtgaactcataatgcttcatttgttggaaaattcagttgtagctttgtgttcagtattctgcacttctcatgcacctgcttatatgatttataccagtagtccattttttctcctggattctatttgaatgcatggataagtctgcttgaagaatgaagataaatgcttcttgatctacggtgtggagcaaagaagtctttagctgatctacccaaacatccattggcactgaagtcttgtgacattagctctgtctgttcccatcaaatccttgttggtgggagcgatgcatttgctaggttgtacgatagaagaatgcttccaccattgagctcgtgtcaaaccaaaaggaagccaccaccatgtgttaaaatgttctgcccattgcatcttgctgacagtaagaagacatattcacaccttacacatgttgcattcagcccaaatgggaaggaggttcttttaagttacagtggtgaacatgtttatctgttcgatgttgacccagatggtatgagttctagatacacagcagactatgtaagggaacaattatttgtacctccttttcacaaagtatcagcaaaaggacatgcaaaacaaaagaaggcttcagtaaatacaacttcaagaagtttgtctagggtagatatgtgcaagaaatttatgcaagtcgcaacaagatctctggagacagggatcatagaatttgatctacagaggaaatggaaaaatgatgtttacatggcgattcgagattgcaatagaacgtggaagattgatgtcacatcgtatcaagcacacttgcatatggctgaggcactattgcagttaggaagactgaaggaggcatctgagcatgcagaggtggcaaatggtcttcttccacctcattgtccattgagggagcaggtggatgatttcaagcaacgcatcgcttcagctgagcttgagaagaacagagcggataaaaatgggagctcaaaagctgatactcatggaaaattacgctcattgagtgagatactctttagacctgatgttggtggttcatcacaggagggacgagaagattcagattatgatgatgatacggaaatggactatgaaacaacggtatctggtcatgaaagccgagagaatgatcaaggtgtcttccggggtagtttaagtttccaatttcatcaaagagaggatcaaaccaatgtacacactgatgagaatgggtcagttgagtcccctcgaaaagatgattatgcttttcagtcagatgttgccattgatatgaaacaaagatatgttgcacactgcaatgtagggacagatataaaacaagccagttttcttggtgagcaaggggagttcattgccagtggaagtgatgatggtagatggttcatatgggagaagagaacaggaaggcttattaaaatgcttgcaggggacggagctgttgtgaactgcatacagtctcatcccttcgactgtgccgttgcaacaagcggaatcgataacacaataaagctatggacacccgatgcaaatgctacatcaatggtttctggacctgaacttgatgtattgagtgccatagagaataatcagcagaagttatgtcggaaccgtcactttgtactgccttctgaatttttagaacgatttcagatgcatgagttttcagaaggtttcgagtgtgcccagagctgatttactatcgctggagctgcttgaggaaaagggtaatacttggaagaatgatatcatccaagctacaagcagcctatgtttgaattagtgaaatcggaaggccttgttgccattatagagtgtagacgcacctggatagataaacaggtgtgccggtgctgaaactattgcttgagatgtcaataaacactggaattatgttgttgtttgggggtggtataatgattcatacgtgtgtaatgcagtgtggattcattcccttgtacagattgtagataggtgagattctgcaataagtgacaatcacagatgtacatgtgtggtattcttgtctctgcgtgccgcaggtaggtcatgctagtttgtggctgacgattggggtatatcttctcttaaagacttgctgggtctggatgtggtgtaggaactgtgttactttatgtttcctaaatatgttactctttccatcccaatttataattcatttaatttcttttgttcttcctgcgtgcat

SEQ ID NO: 4295 - DNA, 1331 bp, Zea Mays
tcatcacccttcttccgccggaaggaaaagagaaaaacacacactctctttccgagctctctcgctgtctctcacccagccgccaccatgtcaggcctctacaaccagggcttctcccctgcaagaaccctctccccccagattaggagcaaccccgacgctgatagccagtacttggccgagcttctcgccgagcaccagaagttggggccattcatgcaggtgctgccgatatgcagccggctgctcaaccaagaaatcatgcgggtgtcaagcatggttcatgaccatggatttagtgatcttgacagacgccggtttagaagtcctagccctatgtcttcaccgattgtccggcctaatctacatggaaatggttttggtccttggaatgggatgcaccaagagttcaactttgtgggacgcattctagggccaaggggtaattctctaaagcgagttgaatcatcaactggctgccgtgtttttattagagggaagggttccgtcaaagatacagaaaaggaggacaaacttaaaggaaaacctgggtatgaacatctgaacgagccactgcatatattaatcgaggctgagttaccagcgaacattgttgatacaagactgagacaggcacaagaagtcatggaggaattgctaaagccagtggacgagtcacaagatttgtacaagaggcaacagctgagggagttggctatgctaaactctactctgagagaagacagtcctcaccctggaagtgtctcccctttcagcaacggcggcatgaagcgcgcaaaaccaagccagtagagaaaggtttcaggctctcctccaccctcctccactccagtcgttcttggtgcagcaccagcaaggtgtgcctgcccttgaacctgcgctgcttcgtgtcgtgggtgcttgtgtaagaaaaaaaaggtatatgcattttgctgctgctggacggacaggtggtcgagacgaggaggaaatcgctggtcgttgaactgtctccatcttcggtggatccggccattttgctgctgtaaggtgatgggcattcgttctattcgttactgactgttgaccagattatgatgccgtggtttcaggggagactagctatgcctatggccctgataattagtgtgagctggttcgtttaggtgtttaattagtttgtattattattattcgcgttacgttgtggagtagtagcaaacgtcacagctggtgatgcactccgctctgacagtttgatgaggacagctttgaataaaccatgtgaattcagaatgttactgaaacggtgggacgtccgttctatgcct

SEQ ID NO: 4296 - DNA, 1963 bp, Zea Mays
acgaaggaatgatgatagctgtgctggacagctggagcaccaactctcatcaaaccgactccgcacacgttgacgaatcggggtctccctttcgtgcttagtgcaagcgaattcaatcctcagattctacgcaaaaaaagcttaatcggagagccacggagatcagatcatcagctccgcagacgcgcaaatggcatcgccaacgaatagagcgcttgaacggtacaagagcgccatcacggccgccacgtccgtggtgggcgcggccatgctgctgcgtcggctcgtcgctggcgtcctcccagccggcacgccgccgctggtgggcgcgctgctcctcctgccgccgccctccgcccggcgccacgccgtggtgatcgaggagttcgacggcgccttctacaaccgggtcttcctagcggtcagggcgtacgtctccacgctcctcgccgcggcgccgaccggcgcgccacccgtggtcaaggccagcctgccgcgcggcgccggcgccggcgcggagcagatcaggctcgccatgggccccggcacggccgtcgtggacgtgttccgcggcgccgagctcacgtggcgcctgaggagtcacggtcacggcggcggcgcgggcgaggcgttcaggctcagcttcgacgggcagcacagggacctggcgctcggcgcctacctgccgttcgtcatggcccgcttcgaggccatggcgcgggaccggaggcaggccaagctctacagcaacgagtgggggaagtggcggtccgtcaggctccgcaacgcctccacgttcgcgacgctggccatggacgcggcgctgcggcaggacgtgctggacgacctgggcaggttcctgggccagaaggagtactacgagcgcacggggtgggcgtggaagagaggctacctcatccacgggccgccggggaccggcaagtccagtctcgtggccgccatgtccaaccacctccacttcgacgtgtatgacctcgacctcggcgccgtccggtcgaacaccgagctgaggaaactgctgattcggatgaagagcaggtccatactgctgatcgaagatgtcgactgcgcgtcggtgacagcgcagagcagagaagccgatgcgagcaacccggctcccaagcatcaaaaggtcaccctgtccgggctgctcagcatggtggacgggctctggtccagcagcgggcacgagcgcatcctcgtcttcaccaccaaccacatggaccggctcgacccggcgctgatccggccgggccggatggacaagcgcatccacatgggctactgcggtttcggcgccttcaaggagctcgcggccatctaccacggcgtcgacgcccaccgcctgttcccggagattgaagcgttgctgcgggaggtggacgtggcgcccgcggagctcgcggaaaagctgcttgcgacggacgacgccgacgccgcgctcgagacggccgcgaagctgctgagggatagggaggcggggatcgaggaggatggcggcgggtacgtcaaacagaagctgcacgtggggccgacccgggcccgaccccgcccgcggccagtgccggcgccggcgcggggtgtgagtgctgcgcgacaggtggtgtttggcgaggaaatcgtgctgggcatctcgcggcgacaggggcacgggtctgggcggcgcggtgccggtcaaggtggaagtggaatgcgcggactgggaaggggacggcgataggcctcggccacggccagtcgggctagctgccagtgccaactgccaagtccaagaaaaacattaggatgcttatgctttgtctcgtgagtgagttactaccatgccagcataactttttttttgtatggataaataacataggcacctttcattaggccccatctcatcttgtttttttcacaacaacgtcttatttgtagtattcatctggcatcatcacac

SEQ ID NO: 4297 - DNA, 1107 bp, Zea Mays
acaggacaaagctgctgatttttcaggtggaagtgttgcacttttcatgggaccagggaaattggaaagcatctgtaccagtaaaattgcttgactggggtgaggatggtcatagatcagaacaagaaattgctgcactgcgagcagcttttgcacaagaagttgttgtctggcataagcttgaacatccgaacgttactaagaacaggagaaggaagcttgcctttaaagttgtggtccaaatagctcttgacattgccaggggattatgctatctccactcagagaagatagtgcatcgtgatgtcaagactgaaaatatgcttctggacaaaacgagaactgtaaaaattgctgattttggtgttgcccgagttgaggcttcaaaccctagcgatatgacgggcgaaacagggacacttggttacatggctccagaggttctcaacggccatgcttacaacaggaagtgtgacgtgtacagctttgggatctgcctgtgggaggtatactgctgtgacatgccgtaccccgaccttagcttttctgaagtcacctctgccgtggttcgccagaacctgaggcctgagataccgcgctgctgcccgagctcgctagcgaacgtgatgaagcgatgctgggacgcgaacccggacaagcgtcccgagatggcggaggtggtgtccatgctggaggtgatcgacacgtccaagggtggcggcatgatccccaaggaccagacgcagggctggctctcgtgtttccgccggtaccgaggcccctaacgcagagttgcttttacccggcgaaatgatgatattggtctccacgactcagtgtaatctaatcgcagaactggctataattgagagttttctcgttgtcctgggcgtaaatgcatggatgggccggcagttgacgattgatgtccgttcaaatgcttgctgtaagttaattcaggtgtagagggagttgctgtggccgtttgctcacatcgtttaatttcatggccgtgacgtgaagcaggtcatttttagaaaaaaaatatgtattaatatttcagtctctatcgattgacacatatagttgtccaaagttacatctaac

SEQ ID NO: 4298 - DNA, 626 bp, Zea Mays
attgtattagggagttgctatgaactaaccctaatcacacacactcctaactcccatcccatcccatcccatcccagccgccacagctgctgctcgccctctccctgtctcctctctctttccagccacggtttccccttcccccatccgcgcgctagggcacgaggcaaatctgtggccctctcctagtctcctgaagtccgactcagccgtctcccagctcccgctcgctcgaactcgggttggggaggcacggagtcactgaccccttcgcgttaggcggtgcccttaccggctcttcgtctaaggtgtagtcaagctgccggccacgcccggcacccccctatccagtacaaggccttctccgagatccagtacaaggtcgtcgtctccaagatctgaccccgacgctagtgaggagggaagagtgggtggacgaagtgggggaggatgagcgaggagaggccggtgccgcggcgggagagcccgtggggtctgcctgagggcgacacgcggcagcccaaggctcaccgctgcaacgaccgcgccgaggacgtcgtccagactactattggaagctccaatacaaatctggaaaacaaagattggattgagcaaatagacaa

SEQ ID NO: 4299 - DNA, 1817 bp, Zea Mays
cccagaaagaaaactagcccagcccatgtatatccaccggcactcggcacgaagtccatagccagcgaaactcccgaaaccgtaccaaccagacaattcaccatggcggcgccggcgcaggcgcaggcgcaggtcctgcctctcctccggtggagccggagcgcctccttcctctgcgcctcgtcgcgccgcctcttctccgccctccaacgcccctctgccgctgctcgctgcgaggccggctccaaggccatgctcaaggggatggactactcggaactcgagaattgggtgcaggcgcaggggtttcggccaggccaggccatgatgctgtggaaatgcctgtacgggaacaacgtttgggctcattgctacgacgagttggctggtttaaataaggatttcaggaagatgataaccgagcatgctgatctcaaggcattaactatgaaggacatccatattgcatcagatggaacccgtaaggatgttacagatattgttctctcttgaagatggttcagtgattgaaacagttatcattccttgcgctaggggcaggacaactatctgtgtttcaagccaagttggttgtgccatgaactgccagttttgtttcactggaaggatgggtttgagaaaacatctctcgacagctgaaattgtcgagcaggctgtgtttgctcgtaggttattctcagatgaattgggatcaattaacaatgttgtatttatgggcatgggtgaaccatttcacaatattgacaatgtaataaaagcctcagcaataatggttgatgagcaaggtcttcattttagccctcgcaaggttactgtctccacaagtggtcttgtccctcagttaaaacgcttcctccaggaatccaattgctccctggctgtcagtcttaatgcgacaacagatgaggttaggaactggataatgcccataaacagaaagtacaatcttaacttgcttcttggcactttaagggaggaacttaacctcagacaaaaacaaatagtgctatttgaatatgtcatgctttctggagtgaacgacagtatggatgatgccaagaggcttatagagctagtccaagggatcccatgcaagataaacctcatctctttcaatccccacggcggttcccaattcaagcccacaccagacgataagataattgagttccgcaacgttttaattcaaggtggcctcactgtttttgttcggctcagcagaggggatgatcagatggctgcctgcgggcagctaggagagcctggaggctatcagctacctctgctccgtgtgcccgagaaatttcaggtcgccttgtgatgctaaacagtgcatacagtaaaaatggtcctgagcagcttgacgaacacacggagtaattggcttggaacgacgattcgatcgtgcaaatcttgcaagttctaccgccttcggaagcttgtgtggacttctgcaataacgtgcaaatctgaacctgggtacttgtgcgacaacacatttagacatggtgttgcttctgctagtacgtggtgtacccaaaccaaattcgataagattattattattataaattggtattttctggcaaatcgttgctgtataagacattaacagtgtaacatgctttcacttggtacttcgaaaaatatggaatgaacttatacggtaatcagcaatgagagaagaatctggaggacaaggttgcttgcctgaatgagataccttaaccactaaggtgtgcatggtactagccacctacacacctgatcaccccaaatgaaagaaagaaaaaaaa

SEQ ID NO: 4300 - DNA, 2798 bp, Zea Mays
ctgattcctcgtcgcatttcaaattgaaccccccgtttcctcaagtgctgtcgtttcgttcgcaccccaccccatggtggccagctcccactcgtccccggcggccagccggacgccgaacctgaaatcggcgctggcgccgtcaccatccccatccacccgccgggcggcaacagatgtggcatcggcgtcggccgcggtggactcgaaagcacggttcgaggcttacaaccggctgcaggcggcggcagtggctttcggcgagaatcttcccatcccggagatagtggcgataggaggccagtcggatgggaagagctccctcctggaggcgctccttggcttccgcttcaacgtccgcgaggttgagatgggcacccgccgtcctctcgtcctccagatggttcacgaccccaccgccctcgagcccagatgccgattccaggaggaggattccgaggagtacgggagcccgatggtgctggctactgccatcgcggacctcatcaagcagcgcactgaatcacacctccggaagatccaggctgctgtctcatccaaaccaatcgtcatgagggcagagtatgcccactgccccaacctcacaatcatcgacaccccaggctaagagaggcgagccagggagcacaccggatgagatacggtcaatggtgaagtcactcgcgtcccctcctcaccgcctcgttctgttcctccagcaaagcagcgttgagtggtgctcgtcgatctggcttgacacgcttaaagagattgaccccactttcaggcgcaccataatagtcatctccaagtttgacaaccgtctcaaggaattcacagagaggtgggaggtcgataccttcttgagtgcaagtggctaccttggggataacatccacccgttcttcgtggctcttccaaaggaccatggtacaatttccaatgaggagttccgcaggcagatctgtcaggtcgatattgatgtgctacgtcacttgcgagaaaatgtgaaagggggtttcaatgaagagaaatatgtatcatgcattgggttcagctgcctcaagaagtacctcgaatctgaacttcagaagaggtacaaagaagcagctccagctaccctggcattgttagagcagaggtgcaccgaagtctcaatgaacctaacgagactagactccaaactacaagcagcgtcggatgtctctcagctccggagatcggcaatgcttcatgcagcttctatttgcaccaacttgaatgcattacttgatggagctgctgatccagctccagaaatatgggggaaaactacggaggaggaacaaatacatagtggtattggcagctggcctggcattaatatgcctgtaaaacctgccaactccagccttaagctgtatggtggtgcagcttttgagagagtaatgcatgaatttcgctgtgcaacgtattcattggaatgcccacaagtgtcaagggagaaggttgcgaacatactacttgctcatgctggaagacgcggaagcagtaggttgactgaggcagcagttgcgatagctcgtgcagccgcacgatcatggcttgctcctcttattgataccgcatgtgaccggcttgcatttgtcctacaaaatctgtttgatcttgctatggagcgcaaccgcaataatgactcacaatatcatcaaaattttgaagatatggatagttatgttggctttcttgctgctctccggtgctcatattataagttcgtcaaagaactgtccaagcaatgcaagcagatagtgcgtcatcaccttgattctgttacgagcccctactcccatatttgctacgacgacgacttttttagtggtgttggatctgtagcaaactccacgtgtaggtttaaccacttcactggagttacatcctttgacctagcagacagtggatcagcactagaggaagctcaggagaacttgcctccaaaagatcagcaccatatgacaccgcctattaataaagggaatgactcaaaggaggtcctcagagaaagccagctaacagtacctgagacaccttctcctgatctgccatctgatatacatggtggtaagaagaaagataatgggatcccaaatgacggtggcccaaggaaaagacatgccaggatggcagcatatacaagcagaaatcaccataacagtatgattggtgctgatgacatggcctcaaagtcagggtcatcatactccaccatatgcgcaatatctgctcaatattttgccaaaatgcgagaagtccttattgaaagaaatgccccctctgcattgaactctggattcttaacaccatgccgtgaaaggttatttctggcacttggctttgagctatttgctgtgagtgacaataagttcatgggcatgtttgtcctgcctggggcagttgatggtatccagaatgagcgccattctcttctcaaacggcagaagattttgctgtcctgtttgaacgagtttaagaacatatcccgggctctgtaatgatgatgtttctcgatttcttcaggcctttattgtgtatcctttagacccattctgttgtcatgtatctttcttggcataacctattttcttgaaatctgtaccactctctgtcaagttccttcgctgacaaggtctttatcactaacatttgttcagattcaatacttgatattattgattatgctcgatgactcgaatacaaaactattaacttgtgatctcatcagtttgggcacatgccctgcgaaacttcatacaaatatc

SEQ ID NO: 4301 - DNA, 1772 bp, Zea Mays
ccaaagtccaaaccaacccatccatctccattcatccgtcttgacagctccactcctaactccagcgaccaccgcgtccccaccatggccgctcgccggagcactagccccgcccggcacggcgtcctccccgccctccttctcatcctatgctcgtccctcccttccctcgccgccgcataccgcccaggcgacatcgtcccgatgctccgctcgggccagtaccacggctcgaggtcggtgtggttcgacgtggtggggcgccattgcccggccttcgcggtcaaccgggaggtgctgatgccgatcccaaagcctacggggttcactggtgctgatccgtacaagatgtgagtaacatccctctagacatgtctaaattatgcattagtataatacaatacttaatgtgatcgtgtgaattcttcagttttatcagggctatttaggtgttgccaagttgactagtagtttctaaaaaatacaagattctagaactgttagatgtacaagtgctttttctctggatgagaaatgacgttcaaccttgttctttctctaagatagcatatctgtaaatgtgctgtgcctgtgagttaatcacataagtgtttaggtctttctacctcatgattattttgattatggaggatttaaatcctggaattaattagcaagacattactggatgatgtgataggaaggatttgcaatatataactataccttatgaaacatccatccaatgcaaaggcccataatggttatggctgtaactcccctggaattgcacattctagaacttgccatgttctagagaaaatctgtaatattcctctgagtatgatatgatgctcattttgaggcggacatgtattaaggattatattatgcactgcacttatcttcaaatggactgaatttgatcagcgaaataacaatgactgaatatgataatgttgcaccactttgtatgctttttactcaattattgtttttttatgaggctatctttgcagaagtatgtttgtcttacctttatgactctgcagaacatttcaaattggacatgaaaagttccatgttccttggctttatgttataaatcgcaaaacctctgaagttccactgatcgatttccatttgaagtactctggaaatgatatacttggggtgacagctaaagttgtggacatgcctcaccactacgtggaagttcatcctgacataaagaagaatttctgggatccacagaattggccaaaatacgttcttgttagatatacatgggaggagcaatcagagatagatgttactggaggattttatgtgttatttggatccgggcttgttttgtccttcattcttgcaatatatgtcctacagtcatctcaagagaagttgacaaggtttgtgcgagaagcagttgcagatagtagcctcccagatggagttgcaaaggtcgagtgatgacctgtctacgatgagctgtcttattacccactaatttctacactgatcagaacctcaagttttttaacagtcaactttcttagctgcggaacgagtaatacaacagagtagcatacatatgaagagctagtggtttatttgattctcttgtgcatgctcttaaaccaactttgcttatatggtggaagtgcataatttcatttccaggcaggagttttggtgcttgctatctcaactgtgagaatttgggactgaataggtttattgtttgcatggttttaaagacggctagggagaac

SEQ ID NO: 4302 - DNA, 1137 bp, Zea Mays
atctttctagaaggattttgcagaaggattttgcttggcatcaaggaacagtgcaaactagaagaaacccccgtcatcagcgacctctccccaacggcgccgacgatggcgcaacagcagacgcagctaaccactggctcgggcatcctggatgccgtcccgctcttcgtcgtcatcctcctcgcggcccacgtcctggccctcgtgttctggatgtacaagctggcttccgagaagcaaccaccccggaggaagacacagtgacggcgccgatctacgccatcggcgatccttcgctagcctctttatcggaggcactcgcgttggggtcgctcatcgacgacaagaagaaacttggtgactgccagttcgacctctagaaacagtcctacatggccgcatgtgccgctatgtatgacaagctccggcgcagctgccgcttggacgcggtgcagagcggctgctctgcgctgtccatcgtcaagcaggggggcctcatggtcgtcgccaacgtcgacgactcatcgggttgttctggacaccgcatcgacgacaacgtcatcacgtcgtccagctcatcgttcacctgaagctcaacctgtcacgtaagtcgctactgtctggccatgaattcttgtgcgttgagacgatggtcgttgctgacgttgtatgagtgtcctcgaacacgatatatgtagaggagtagcgcatccggtggtgcaacggccaggggtactaccttactgatgagtctggggtgcacttcgttttacagcccagccaagagtcatcagtactcggtatgtcacgcgcgttcgacgactactatatcgaggactgtggtgtcatcttagcgccataggtgacgcagaggaggaccgacaacaatgaccagttcgtcatcctcgccaccgttggggtagcttttgtgccggcttgcctttaattctcttcgcaaacacacacttgtctttttgtttaagcaaaagagtatggtggtacgtgtctgatgactaacgatgtacgagggaatttttttcggtatgtgtggaacgtgttatctaatgatgagaccatgcaaatcgtgacataaatcgaagtctgcatgatactgatggttgcaatgtagtggtgaaa

SEQ ID NO: 4303 - DNA, 2556 bp, Zea Mays
aaaaaatccaaatttctccactgttggatggctgttgggccggccgataaacaattttcccgttcgagcgtctcgcttctcccgttcccgatcccgatcccgatcccgatcccgatccctgcgtcctttcgcttatcccgttgatccggcgttcactcgtgcgatctcctgtggcgacaactgggcgatcgacgccgccgctgctgtcgccgtcctatacgagaggtgcgcaggcgttcgttggtcccttcgccaggcttttgtctacccttcgccgacgacgagcacaatttatttgcaggccagatttctttgtctgacttgtggaagcctcttacaactattgtacaaggctgctgtattgaagatgtctgagttccttgacctagagctacaagatgggataaggatgccctggaatgttattccaggcacaaaacaggagactgtgaactgtgtgattcctgtttccgctatctacacacctttgaaaccaatttctgatatccctgttcttccatattcacctcttcgctgtcgcatgtgtcgttccatcctcaaccctttctccattgttgactatgttgctaagatttgggtctgttcattctgctttcaacgcaaccagttccctcaacactactcttcgatctcagaaaataatctccctgcggaactctttcctcagtacaccaccgtcgagtacatatcttcaactgaaactggtcctatagttccaccggttttcatttttgttgtagatacttgcatgattgaagaagaaattggttatttgaagtctgcactggcacaagctgttgagctattgccagataattctcttgttggattcattacgttcgggacgtatgtgcaggaacaaaggaggtcaccaaggagcaaatattggaacaaatgtgcttttttgcggggaagaaaatgcctaccacaggcgtgattgctggtaccagagatggcctttcatctgagagcatctctagatttctgctgcctgcttctgaatgcgagtttgtattgaactcagttatagaagaaatacaaaaggacccttggcctgttccagctgatcagcgtgcatctaggtgcactggagctgccttaagtgttgcagccaatctccttggggtttgtgttcctggatcaggtgctaggataatggcatttgttggtggtccatctacggagggccctggtcctattgtatccaaatccttatcagagcccattcgttcacacaaagaccttgataaagactcggcaccactctatgataaagctgttaagttttatgatcaaattgcaaagcagcttgtgcaccaagggcatgtgctggatttgtttgcttgtgcagttgaccaggttggagtcgctgaaatgaaggttgcgattgagaagactggaggaattgttgtccttgctgaaagttttggtcattctgttttcaaagactcacttctccgcatctttcagtcaacagatgacaaccttggtttatcattcaatggtattcttgaaattaactgttcaaaggatgtaaaggttcaaggcatcattggaccctgttcttccctggagaagaaaagtcctttgtcttccgacactgttattggtcaaggaaacactagcgcttggaagatgtgcggccttgacaggaagacatcactttgcttggtatatgatattgcaaaaaaagatggcccagattcaattgctcaatcagcaaacaatcagttctacttccagttcttaacctactatcagcataatgagggtcagatgagattaagatcgaccacaatctccagaagatgggtctctggtgacaaccatgtggaggaactagtagctggctttgatcaagaagctgcagctgcagtcatggcacgcttggtgtcatttaagatggaaactgaggttgattttgacccagtaaggtggcttgatcgagctttgatacgtttatgctcaaaatttggagattatcagaaggagacaccctcatcgttcagtttatccccacggctatcaatatttccccaatttatatttaatttgaggcgttctcagtttgttcaggtttttaataacagtcctgatgaaactgcgtattttaggatgatgttggacagagagaatgtaaccaatacagttgtgatgattcaaccttcacttatatcctattcatttcaatcagggccagagccagttctcttggatgcaactgcaattgcttctgacaagatccttttattggactcttattttactgttgtcatattccatggggtaaccattgcgcagtggcgaaatgctggctaccaagatcaagaaggtcacgaggtttttgctcagttgttaaaagctccacatgaggaagctaatttaataataaaggagcgatttcctgtaccccgtttggtagtctgtgatcaatatggatctcaggctcgatttttactggcgaagttaaatccatcagtgacatataactcggacaatccctcccctggtggagacgtcatattcacagatgat

SEQ ID NO: 4304 - DNA, 2589 bp, Zea Mays
aaaaaatccaaatttctccactgttggatggctgttgggccggccgataaacaattttcccgttcgagcgtctcgcttctcccgttcccgatcccgatcccgatcccgatcccgatccctgcgtcctttcgcttatcccgttgatccggcgttcactcgtgcgatctcctgtggcgacaactgggcgatcgacgccgccgctgctgtcgccgtcctatacgagaggtgcgcaggcgttcgttggtcccttcgccaggcttttgtctacccttcgccgacgacgagcacaatttatttgcaggccagatttctttgtctgacttgtggaagcctcttacaactattgtacaaggctgctgtattgaagatgtctgagttccttgacctagagctacaagatgggataaggatgccctggaatgttattccaggcacaaaacaggagactgtgaactgtgtgattcctgtttccgctatctacacacctttgaaaccaatttctgatatccctgttcttccatattcacctcttcgctgtcgcatgtgtcgttccatcctcaaccctttctccattgttgactatgttgctaagatttgggtctgttcattctgctttcaacgcaaccagttccctcaacactactcttcgatctcagaaaataatctccctgcggaactctttcctcagtacaccaccgtcgagtacatatcttcaactgaaactggtcctatagttccaccggttttcatttttgttgtagatacttgcatgattgaagaagaaattggttatttgaagtctgcactggcacaagctgttgagctattgccagataattctcttgttggattcattacgttcgggacgtatgtgcaggttcatgaattgggttttggcttattgccaaaatcatatgtattcaaaggaacaaaggaggtcaccaaggagcaaatattggaacaaatgtgcttttttgcggggaagaaaatgcctaccacaggcgtgattgctggtaccagagatggcctttcatctgagagcatctctagatttctgctgcctgcttctgaatgcgagttatagaagaaatacaaaaggacccttggcctgttccagctgatcagcgtgcatctaggtgcactggagctgccttaagtgttgcagccaatctccttggggtttgtgttcctggatcaggtgctaggataatggcatttgttggtggtccatctacggagggccctggtcctattgtatccaaatccttatcagagcccattcgttcacacaaagaccttgataaagactcggcaccactctatgataaagctgttaagttttatgatcaaattgcaaagcagcttgtgcaccaagggcatgtgctggatttgtttgcttgtgcagttgaccaggttggagtcgctgaaatgaaggttgcgattgagaagactggaggaattgttgtccttgctgaaagttttggtcattctgttttcaaagactcacttctccgcatctttcagtcaacagatgacaaccttggtttatcattcaatggtattcttgaaattaactgttcaaaggatgtaaaggttcaaggcatcattggaccctgttcttccctggagaagaaaagtcctttgtcttccgacactgttattggtcaaggaaacactagcgcttggaagatgtgcggccttgacaggaagacatcactttgcttggtatatgatattgcaaaaaaagatggcccagattcaattgctcaatcagcaaacaatcagttctacttccagttcttaacctactatcagcataatgagggtcagatgagattaagatcgaccacaatctccagaagatgggtctctggtgacaaccatgtggaggaactagtagctggctttgatcaagaagctgcagctgcagtcatggcacgcttggtgtcatttaagatggaaactgaggttgattttgacccagtaaggtggcttgatcgagctttgatacgtttatgctcaaaatttggagattatcagaaggagacaccctcatcgttcagtttatccccacggctatcaatatttccccaatttatatttaatttgaggcgttctcagtttgttcaggtttttaataacagtcctgatgaaactgcgtattttaggatgatgttggacagagagaatgtaaccaatacagttgtgatgattcaaccttcacttatatcctattcatttcaatcagggccagagccagttctcttggatgcaactgcaattgcttctgacaagatccttttattggactcttattttactgttgtcatattccatggggtaaccattgcgcagtggcgaaatgctggctaccaagatcaagaaggtcacgaggtttttgctcagttgttaaaagctccacatgaggaagctaatttaataataaaggagcgatttcctgtaccccgtttggtagtctgtgatcaatatggatctcaggctcgatttttactggcgaagttaaatccatcagtgacatataactcggacaatccctcccctggtggagacgtcatattcacagatgat

SEQ ID NO: 4305 - DNA, 2574 bp, Zea Mays
tttttttaaaaaggttcgtttgcacgatttgcagtaatggttggtttccatcgaagatggaaacacacacagtgcaggccgtgatccgatggaaacacacacagtgcaggccgtgatcatcggatcgtccttccgtagccttccgtgaccgtgatccctcatccctgatcagctacttcgtacaggaaccttccagaactcttgagaactgggatccaacgcagctgggctcctctcggttttataaaaatctcaacagggtttcgttttttcgccttaatccccatcaaaccccaagcgcgcacccatcttctggcctttccagccgccaagccttctagaagcttcaagagctcgattcgatcggaaccctcgccatggccgacgaggcgaaggcgaagggtaacgcggcgttctcggccggccgcttcgaggaggcggcgcggcacttcacggacgccatcgcgcttgccccagacaaccacgtcctctactccaaccggtcggcggcgctcgcctcgctccaccgctactccgatgctctcgccgacgcgcagaagaccgtcgacctcaagcccgactgggccaagggctactcccgcctcggcgcggcgcacctcggcctcggcgacgcggccagcgccgtcgccgcctacgagaagggcctcgagctcgaccccagcaacgagggcctcaaagcggggctccaggacgccaagaaagccgccgccgcccctccgcgccgcgggtcgtccggccccgacgccatcggccagatgttccagggccccgagctgtggagcaagatcgcgtccgacccctccacgcgcgcctaccttaacgagcccgattttatgcatatgatgcgcgaagtgcagaggaaccccagcagcatcagtatgtatctctccgatccccgcatgatgcaggtgctcagcctcatgcttaatgtcaagatccagagacccgaggcctccgagccgtcgcagtctaccccgccgccgccgaagcagcagcagcagcagcagacgccgccttctgagacgaaggctagggatgtggagcccgagcccgaggcagagccgatggatttgactgatgaggaaaaggaccgcaagcagacgaaagctgctgctcagaaagagaaggagttaggtaacgcagcttacaagaagaaggacttcgaggtggcaatccagcattacaccaaagccttggaacttgacgacgaggatatttcctatctgactaaccgagcagcagtctacattgagatgggaaagtacgatgaatgcatcaaggactgtgataaggctgtggagaggggaagagaacttcgtgctgatttcaagatgatttcaagggcactgacaagaaaaggaacagctctggtcaaacttgctaagacctctaaggattttgatattgctatcgagaccttccagaaggctctgactgagcatcggaacccagacactcttaaaaagttaaatgaggctgagaaagcaaagaaagagttagagcaacaagagtattatgatccaaaattggcagatgaggagagagagaaaggcaatgagttcttcaaggagcaaaaatacccagaagcaataaaacactacacagaggctctcaagagaaacccgaaggatcctagggtttatagcaatagggccgcctgctacaccaagttaggagccatgcctgaaggtcttaaagacgcagaaaagtgtcttgaacttgaccccaccttcaccaaagggtatacgaggaaaggtgcaattcagttcttcatgaaagaatatgacaaggccgtggaaacctaccaggctggcttgaagcatgacccgaacaaccaggaactgcttgatggtgttaagaggtgtgttgaacagatcaacaaggccaacagaggtgaaataagccaggacgaattgcaagaaagacagaacaaagctatgcaagacccagagatccagaacattcttaccgaccctatcatgcgacaggttctaatagatttccaggagaacccaagtgcggcccaggagcacctgaagaaccccggggttatgcagaagattcagaagcttgtaagtgctgggatagttcagatgagatgatcgagcgatgcgatgattggctttgttcgttcacgtgcaccctggtcatacatatgttttaacaagcagcagcggcataagaatgaacctgttcgggggctaatcttattccttttggattggctgcctcactgctcgttacccgtttgatttgaatttgaggcttgaggacttggttaaagccacacctccctccagtcaaactggcattttcgaagaagcatacagaaatttcattggaatctagggtggtcgactgtcgagggagcgtcttattcctatgaaatttctgctttattttataaaatttctactttctaaattgacccttcgttattgaaagctcgattgaaggattattttctgaatcctgctctttttttctatgtttttgaactaattcatgtaaaatttatgtactatttttgtgaaattctgcgttccaaagaag

SEQ ID NO: 4306 - DNA, 2735 bp, Zea Mays
tttttttaaaaaggttcgtttgcacgatttgcagtaatggttggtttccatcgaagatggaaacacacacagtgcaggccgtgatccgatggaaacacacacagtgcaggccgtgatcatcggatcgtccttccgtagccttccgtgaccgtgatccctcatccctgatcagctacttcgtacaggaaccttccagaactcttgagaactgggatccaacgcagctgggctcctctcggttttataaaaatctcaacagggtttcgttttttcgccttaatccccatcaaaccccaagcgcgcacccatcttctggcctttccagccgccaagccttctagaagcttcaagagctcgattcgatcggaaccctcgccatggccgacgaggcgaaggcgaagggtaacgcggcgttctcggccggccgcttcgaggaggcggcgcggcacttcacggacgccatcgcgcttgccccagacaaccacgtcctctactccaaccggtcggcggcgctcgcctcgctccaccgctactccgatgctctcgccgacgcgcagaagaccgtcgacctcaagcccgactgggccaagggctactcccgcctcggcgcggcgcacctcggcctcggcgacgcggccagcgccgtcgccgcctacgagaagggcctcgagctcgaccccagcaacgagggcctcaaagcggggctccaggacgccaagaaagccgccgccgcccctccgcgccgcgggtcgtccggccccgacgccatcggccagatgttccagggccccgagctgtggagcaagatcgcgtccgacccctccacgcgcgcctaccttaacgagcccgattttatgcatatgatgcgcgaagtgcagaggaaccccagcagcatcagtatgtatctctccgatccccgcatgatgcaggtgctcagcctcatgcttaatgtcaagatccagagacccgaggcctccgagccgtcgcagtctaccccgccgccgccgaagcagcagcagcagcagcagacgccgccttctgagacgaaggctagggatgtggagcccgagcccgaggcagagccgatggatttgactgatgaggaaaaggaccgcaagcagacgaaagctgctgctcagaaagagaaggagttaggtaacgcagcttacaagaagaaggacttcgaggtggcaatccagcattacaccaaagccttggaacttgacgacgaggatatttcctatctgactaaccgagcagcagtctacattgagatgggaaagtacgatgaatgcatcaaggactgtgataaggctgtggagaggggaagagaacttcgtgctgatttcaagatgatttcaagggcactgacaagaaaaggaacagctctggtcaaacttgctaagacctctaaggattttgatattgctatcgagaccttccagaaggctctgactgagcatcggaacccagacactcttaaaaagttaaatgaggctgagaaagcaaagaaagagttagagcaacaagagtattatgatccaaaattggcagatgaggagagagagaaaggcaatgagttcttcaaggagcaaaaatacccagaagcaataaaacactacacagaggctctcaagagaaacccgaaggatcctagggtttatagcaatagggccgcctgctacaccaagttaggagccatgcctgaaggtcttaaagacgcagaaaagtgtcttgaacttgaccccaccttcaccaaagggtatacgaggaaaggtgcaattcagttcttcatgaaagaatatgacaaggccgtggaaacctaccaggctggcttgaagcatgacccgaacaaccaggaactgcttgatggtgttaagaggtgtgttgaacagatcaacaaggccaacagaggtgaaataagccaggacgaattgcaagaaagacagaacaaagctatgcaagacccagagatccagaacattcttaccgaccctatcatgcgacaggttctaatagatttccaggagaacccaagtgcggcccaggagcacctgaagaaccccggggttatgcagaagattcagaagcttgtaagtgctgggatagttcagatgagatgatcgagcgatgcgatgattggctttgttcgttcacgtgcaccctggtcatacatatgttttaacaagcagcagcggcataagaatgaacctgttcgggggctaatcttattccttttggattggctgcctcactgctcgttacccgtttgatttgaatttgaggcttgaggacttggttaaagccacacctccctccagtcaaactggaggaagatgatggtgatatcgagtttgtggagttccctaagggggtggaggttgaaggaatatgtgctagccttttggttttggtggcatgcttttagccttttggatgttgacaggttctaacttagaacttctaagggagataggagtcatagccttttggatgctgctagccttttgttggcatgttgacatgctgcacttgtgctgctagagcagcagtgctagccttttggtggttgactgcgactagttctggttgtttcttttcatggcaggaaagtgcatgtaaaagtggctaaactattactcacctaggaacagaatgtacattgtcttttgtctagtctagtggtacagtcttgttgacacataatgaaaatgtaaaattgtatgttgtctaaa

SEQ ID NO: 4307 - DNA, 2764 bp, Zea Mays
tctcttctaaaagcagggcacaagtttgccaaaccatttgttcattggaaccgcctgcattgcatacaagctgccttccttgtctaaccagctcttagacaacaagattctgcttccagaccaggatactacgcccgtttctgtctgtgtgcctccgttcaatgcacacgcttcatttggtttctgtcacttgttcatcacgctctaccgtctctagcgccatctccgtactagttttgatgactggacttatttgatgctcttgccgttctcgacttggggcgcgagccgatggatctcctccggatgaaacttctcctgccctccttcatcagctgccttcttctgatgcaggcagcactatgtgatggcgccgccgccaccaccaccaccaccggcgaaaacggaacggcaaactggacatgtgtgtgcgcagctcatcctctcggtgaaccagactccaacagcagcttgctgtccaattgctcttcctcctgccattgccaccgagcagatgagaacggcggcggcggcggcggcggcgcaggctcgtggaactgcacgtgtgcctctggtgatgagggccttcagaaggaagagcatgctgagctacgtgacgggagctgtttcacttcctgcaactgcacgtcgggtactggaacttcagaggaagggagaaagcgtgtctcaagcaaaacagtcatagctacgctcctggtctgcgtggttctcaccaccaccgctttcctcgtcaccaccgtatactacttccgccgcaaggacgccctctctccgcgatcgcagatatactccttcgatagatacactactagctggagcagcaggtcgaacctcgtcagcagtcgatcgtctccgcttccccagatgaaacccaaaccaaagcttggtggtctgaaagagtttctgtgcagctgcaatcttgtcatctgtgggggagagagcggcgcattccccggtgtcgtcgcccggttctcgtacgcagagctggagcaagcgaccgggagattctcggacgaccaccttatcggagtcggtgggtcaagcaaggtgtaccgcggccagctcggcgatggcagagtcgttgccgtgaagaagcttaggccgctaggaggcacggacgaagacttggagttcctgtcagagatcgagctgctgtcgaggctgaaccactgccacgtggtgccgttgctggggtactgctcggagagccagggccggcagctggagcggctgctggtgttcgagtgcatggccaacggcaacctgagggactgcctagacctgaagcgagggaggaagcccatggactggcagacgcgggtgagcgtcgcgctcggcgccgcgagggggctggagtacctgcacgaggcggcggcgccgcgcatcctccaccgcgacatcaagtccaccaacatcctcctggacgacaagttcagagccaagatcactgacctcggcatggccaagtgcctgatgaacgacggcgtgaccagctgctcgagctccccggcgcggatgctgggcacgttcggctacttcgcaccggagtacgccatcgtgggcaaggcgtcgctcaagtccgacgtcttcagcttcggcgtcgttgtgctggagctcatcaccggccggcagcccatccacaagtcgtcgtcgacgagggccgacgagagcctcgtactctgggcgacgtcgcggctgcgggacagcgggctggtggtcacggagctgccggacccgacgctgcagggcaagttcccggcggaggagatgcagatcatggcgcacctggcgcgggagtgcctgcagtgggaccccgaggccaggcccaccatgacggaggtcgtgcacatcctcgccaccatcgcaccactccagcacggcgccaagcgtcggaaccttcccatcgccaccgccttcaacctcacgccatcgccgcacgtcgggcggtgtgacccggagcctaaagacgacgacatcgagaggcagatgcagcagcaggagtgctcgccgacgacggctgtccagtggcaacaacaacaagcgcgctgcacccacgcgccaacgggccgcgcgtcgtggcccggcgacagggggaacgttgtgagcagaggcgcggcggtgtcgggcgagctggtgaacgggacggtgctgatgaacccccacgggcggggcagctggcggcggccgccgccgcttggcgacgaggaggcagtggacgtggatctgacggagccccggatggaggcgttcacgcagccggcggcgtttcagcctttcaggtgacggaaggattaggatcaggtggtggtggttctgattggtgcggcggcggcgggtgctgctgtacatcttcttgttcgtgcctccacgatccacaccaggatcatctgcttctgcatctgcgttcatgaatgtacagtacaggcaaatacatctagattggcaacgggaaaagaaaagaaaggcatcgagatcgttatgggatataggacctagattgaacacgagatcaatgcatgaatctgaatccacggcgcgcgtcattggacacatcactgttgtacacaagcaaacagacaatgagtgttcacagaagcaaaaaatataagaccgagttcaatgcatgaatctcaaaagcagctcttttcagctttgtgcttcgtggtcttcgggtcgttagaatatacgtgtccataacgggcccaactttttgatttttggcccttattacaagatttttaca

SEQ ID NO: 4308 - DNA, 2117 bp, Zea Mays
tctgtccacctcgacagacacctggccaacatcccctcctgttctcgggcgaatcccactcccactcgcgcacaattccgtcggcatgcacgacattggcctctccgcccgcgcggccggcgcgacgtcttgctcctccgccgccgccgccgccggggacggcggcgacgagtccaagacccggaaggcgcaccctagcttcgtcgtctccgcctacacccgcctgcactcctcccaccgcaccgtcgcctccctgctgctctttctcaccgtcgccgtcgctgccttccttgcgggccgcgcccgccctagcgtcgactgcgcgccgccgcgcctcgatgcgcgcttcctcgccctccccgacgccgccgccgcctccgactttggctccctcggcgtcccctggtgcagatcaaaaacagggaagactgtggaatggacgtctaaagacctacttaatggattggaagaatttgtaccaatatatgagacgcgccccattaagaataacgtatatggaatgggctttgaccacagttttgggctttggtttatggctcgctggattaaaccggatttgatgattgagagtggtgctttcaaggggcactctacttgggttttgcggaaggccatgccaaatactaggattatatcactctctcctaggcaccctgagaaatatcttaagaaaggacctgcatatgttgatggaaactgcacttacctcgctgggaaggattttgttgattttggaagcattgattggggaaagctattgagaaatcatggcatttctgatcctgataaggtgcttgttttctttgatgaccaccaaagcgagttgaaaaggttaaagcaagcactaaaggctggattcaggcatctcatatttgaggacaactatgatactggtacaggtgaccattattccttgaggcagatctgtgatcaatcatacatcagaggtttgtggcttgtcaccttagactctaaatgtccatggtacaactgatcccctgtgcaacagatctgtgatcagccatacatcagatcttcatcttctttcaattgatgacaaggaatgtatttgtcaacattgtacatagagtaacatacttgtttcccctttgctcaccttatctaagattcacagattacctgttatggagcaaagggtttttattgatctgtaatatttgtttgcctgaagattccttgtgataaaagtatagtattatactaaaagaacatagtgacggtgcaccataattgcaaaaaatgtaatcaccatattctattgcatccaggtggtggacatagctgcttttgggagagtgatgaggcaagactaagattcgaacggaagaagttctgggagaaggctgtggggatagctgatctatgcggaaaggatgatgcatggtggggtgttaaaggttacatgagggacaatttcaaccatagcaatatggccatctcgtacaaagagcattttcagaacagcaggctcgtggaatctgtgttggatatgtattgggagcttcctcctgttgccggcccatccttaacacaccaaacaaggtatgacccagcacgtacagttgacccaatcatcgaagatggtcgctacggcttgttccgaaagaccggtctagcgaggttggatgcctcggtgttcaatggttacactcagatggcatatgtgcagatatcaggttcaatgttgagcacggacgatgtttaaagattttttgtgggtgagcttgtttcgtttttggccaactgttgataggctttttgtacaacactgatgcgcttctatgcttacttagtttcttttaaccttccagaaattaatatttaccagaccaccttccaaatatttatgagggttgtgtttcttgggtaaggtcacttttctgtgaaatttggttctgaataatcacatgtacttctagggcctgcgctacatgcctacattacattagccaaccaatggcttgtgtgctcttgtacggatgtgtgtattatattcagaagtcactagtaccaaccttgtacaatatctacataaccactttgcttttgataatagcaatctaaaaaataaagag

SEQ ID NO: 4309 - DNA, 2189 bp, Zea Mays
tctgtccacctcgacagacacctggccaacatcccctcctgttctcgggcgaatcccactcccactcgcgcacaattacgcactcaaagcccggcctcccccaccactagtccaccaccgggaaactttcccccgatctgtcttctcgccgttccgtcggcatgcacgacattggcctctccgcccgcgcggccggcgcgacgtcttgctcctccgccgccgccgccgccggggacggcggcgacgagtccaagacccggaaggcgcaccctagcttcgtcgtctccgcctacacccgcctgcactcctcccaccgcaccgtcgcctccctgctgctctttctcaccgtcgccgtcgctgccttccttgcgggccgcgcccgccctagcgtcgactgcgcgccgccgcgcctcgatgcgcgcttcctcgccctccccgacgccgccgccgcctccgactttggctccctcggcgtcccctggtatcaaaaacagggaagactgtggaatggacgtctaaagacctacttaatggattggaagaatttgtaccaatatatgagacgcgccccattaagaataacgtatatggaatgggctttgaccacagttttgggctttggtttatggctcgctggattaaaccggatttgatgattgagagtggtgctttcaaggggcactctacttgggttttgcggaaggccatgccaaatactaggattatatcactctctcctaggcaccctgagaaatatcttaagaaaggacctgcatatgttgatggaaactgcacttacctcgctgggaaggattttgttgattttggaagcattgattggggaaagctattgagaaatcatggcatttctgatcctgataaggtgcttgttttctttgatgaccaccaaagcgagttgaaaaggttaaagcaagcactaaaggctggattcaggcatctcatatttgaggacaactatgatactggtacaggtgaccattattccttgaggcagatctgtgatcaatcatacatcagaggtttgtggcttgtcaccttagactctaaatgtccatggtacaactgatcccctgtgcaacagatctgtgatcagccatacatcagatcttcatcttctttcaattgatgacaaggaatgtatttgtcaacattgtacatagagtaacatacttgtttcccctttgctcaccttatctaagattcacagattacctgttatggagcaaagggtttttattgatctgtaatatttgtttgcctgaagattccttgtgataaaagtatagtattatactaaaagaacatagtgacggtgcaccataattgcaaaaaatgtaatcaccatattctattgcatccaggtggtggacatagctgcttttgggagagtgatgaggcaagactaagattcgaacggaagaagttctgggagaaggctgtggggatagctgatctatgcggaaaggatgatgcatggtggggtgttaaaggttacatgagggacaatttcaaccatagcaatatggccatctcgtacaaagagcattttcagaacagcaggctcgtggaatctgtgttggatatgtattgggagcttcctcctgttgccggcccatccttaacacaccaaacaaggtatgacccagcacgtacagttgacccaatcatcgaagatggtcgctacggcttgttccgaaagaccggtctagcgaggttggatgcctcggtgttcaatggttacactcagatggcatatgtgcagatatcaggttcaatgttgagcacggacgatgtttaaagattttttgtgggtgagcttgtttcgtttttggccaactgttgataggctttttgtacaacactgatgcgcttctatgcttacttagtttcttttaaccttccagaaattaatatttaccagaccaccttccaaatatttatgagggttgtgtttcttgggtaaggtcacttttctgtgaaatttggttctgaataatcacatgtacttctagggcctgcgctacatgcctacattacattagccaaccaatggcttgtgtgctcttgtacggatgtgtgtattatattcagaagtcactagtaccaaccttgtacaatatctacataaccactttgcttttgataatagcaatctaaaaaataaagag

SEQ ID NO: 4310 - DNA, 1857 bp, Zea Mays
ctcccctcctcgcccgcccccgtacgtgtccatctctccactcctttcctttccttgttggtaagagcaaggcgagacgtaacgtaatccggccatggcgttcttccggggcctcaccgcggtctcgagactgcgatcccgcatggcgcaggaggccaccacgctgggtggtgtgagatggctgcagatgcagagcgcgtccgacctcgatcttaagtcccagctgcgggaactgattccggaacagcaggaccgcttaaagaagcttaaatcagagcatgggaaggttcagcttggaaacataactgtggatatggtccttggtggaatgagagggatcattggaatgctttgggagacatccctagtcgacccagaggagggtattcgttttaggggcctctcaattccagagtgccgaaaagtgctgccaacagcagttgagggtggtgaacctttgcctgagggtctcctctggcttcttttgacagggaaggtcccaaccaaagatcaagttgatgctctatcaaaagaattgcttgcgcgctcaactgtcccaggtaatagatgctctcccagtaactgcacatcctatgacacaatttaccgcaggaataatggctcttcaggttgagagcgaatttcaaaaagcttacggcaatggattgcccaaaatcaaagctttgggagcctacttatgaagactgcttaaatttgattgctcggcttccaccagtggcttcttatgtttaccggagaattttcaaggatgggaaatcaatagaagctgatgattctctggattatgcggcaaatttatcacatatgcttggttttgacgaccccaggatgctggagctgatgcggctccattgatcatgaaggcgggaatatcagttctcatactggtcatctggttggaagtgctctgtcagatccttatctttctttcgcatcatctgtgaatgggttagctgggccactacatggccttgcaaatcaggaagcgcttctatggctcaagtctataattcaggaaacagggagcgacgttacgacagaccaactcaaagactatgtctggaagacactgaagagtggaaaggttgttcatggatttggtcatggagttctgcgtaggacggacccacggtatctatgccaaagggagtttgccctgaagtatttgccagaggatccgcttttccaactgctgtccaagttatatgaggtcgtgcctccgatcctcactgagctgggaaaggtcaagaacccatggcccaatgttgacgctcacagtggactcttgctgaaccactttggactatctgaaacacggtatcacactgtcttgttcggtgtttcgagaagcatgggggtaggatcccagctcatctgggaccgtgcccttggcctgccactcgagaggcccaagagcgttaccatggagtggctggagaactactgcaagaacaaggctgcctgaagcttttcacaaatgctgctgctttttttccccccagccttggctgttaatgattaaacatgagttgtagaactattctttttccccccattggccgttgaataacgcaatagcagcgtgctctcgggcgctagaattctgtatctctccgtcacttggtggacgtccagatagacagttcatctgcggcaacactgtgcagaagagattaggacatttcacttggtgtatgccgacacttgagtttttgtttaacgttatgtttggcagagttaatcggtaattacagatttgggctatggcatgttatgttatcatgtatgccagttatctcgttgtggcggttgatccacgacatggctggattgctg

SEQ ID NO: 4311 - DNA, 2089 bp, Zea Mays
ctcccctcctcgcccgcccccgtacgtgtccatctctccactcctttcctttccttgttggtaagagcaaggcgagacgtaacgtaatccggccatggcgttcttccggggcctcaccgcggtctcgagactgcgatcccgcatggcgcaggaggccaccacgctgggtggtgtgagatggctgcagatgcagagcgcgtccgacctcgatcttaagtcccagctgcgggaactgattccggaacagcaggaccgcttaaagaagcttaaatcagagcatgggaaggttcagcttggaaacataactgtggatatggtccttggtggaatgagagggatcattggaatgctttgggagacatccctagtcgacccagaggagggtattcgttttaggggcctctcaattccagagtgccgaaaagtgctgccaacagcagttgagggtggtgaacctttgcctgagggtctcctctggcttcttttgacagggaaggtcccaaccaaagatcaagttgatgctctatcaaaagaattgcttgcgcgctcaactgtcccaggtattttgatcacaccgctggctacttgtgttattgttttgaccaattaaatctacaaatcatctgaatgaactgatgctgatgtctccctgttctaaagttcaaaggtagtcacagattgatagagaggtctatatgattctgtcagtatgattgtgttaatgtttatatgctttatcttgctactctctagcggctcataattaatatccttgcagctcatgtctataaggtaatagatgctctcccagtaactgcacatcctatgacacaatttaccgcaggaataatggctcttcaggttgagagcgaatttcaaaaagcttacggcaatggattgcccaaaatcaaagctttgggagcctacttatgaagactgcttaaatttgattgctcggcttccaccagtggcttcttatgtttaccggagaattttcaaggatgggaaatcaatagaagctgatgattctctggattatgcggcaaatttatcacatatgcttggttttgacgaccccaggatgctggagctgatgcggctccattgatcatgaaggcgggaatatcagttctcatactggtcatctggttggaagtgctctgtcagatccttatctttctttcgcatcatctgtgaatgggttagctgggccactacatggccttgcaaatcaggaagcgcttctatggctcaagtctataattcaggaaacagggagcgacgttacgacagaccaactcaaagactatgtctggaagacactgaagagtggaaaggttgttcatggatttggtcatggagttctgcgtaggacggacccacggtatctatgccaaagggagtttgccctgaagtatttgccagaggatccgcttttccaactgctgtccaagttatatgaggtcgtgcctccgatcctcactgagctgggaaaggtcaagaacccatggcccaatgttgacgctcacagtggactcttgctgaaccactttggactatctgaaacacggtatcacactgtcttgttcggtgtttcgagaagcatgggggtaggatcccagctcatctgggaccgtgcccttggcctgccactcgagaggcccaagagcgttaccatggagtggctggagaactactgcaagaacaaggctgcctgaagcttttcacaaatgctgctgctttttttccccccagccttggctgttaatgattaaacatgagttgtagaactattctttttccccccattggccgttgaataacgcaatagcagcgtgctctcgggcgctagaattctgtatctctccgtcacttggtggacgtccagatagacagttcatctgcggcaacactgtgcagaagagattaggacatttcacttggtgtatgccgacacttgagtttttgtttaacgttatgtttggcagagttaatcggtaattacagatttgggctatggcatgttatgttatcatgtatgccagttatctcgttgtggcggttgatccacgacatggctggattgctg

SEQ ID NO: 4312 - DNA, 639 bp, Zea Mays
ggagggggcgtaagttctattcgcgcaaccgcgtagaaaaaaaaaaggtccagtcctcaaactctacagcgggggcgagccgaggaagaagaggtcgccgccgccgccaccgcttccatgtctgggggaatcgcccgcggccgccttgccgaggagcgcaaggcctggcgcaagaaccacccgcacggtttcgtcgcaaagccggagtcgctgcccgacgggacggtgaaccttatgatttggcactgcaccatccccggcaagcaagggactgattgggaaggtggatacttcccactcacccttcatttcagtgaggattaccctagcaagcctcccaagtgcaagttccctcagggtttcttccacccaaatggttggagaccagctattactgttaagcagattctcgtcgggatccaggacttgctagatcagccaaatcctgctgatcctgctcaaacggatggctatcacctttttatccaggatcctacagaatataagaggcgtgttaaactgcaggcgaagcagtatcccgcgttggtctgagaacttcgccctactagggatccaagctgcacattcgcatagttgttgctagtgtcttgaatggaagactaaagaacaagatcaaca

SEQ ID NO: 4313 - DNA, 1741 bp, Zea Mays
gcggaccttcaaagcctgtatcatgctgcatcttccttccctggggccagcctcgtcaactccgcttccggttctggcccattggcgttgcttcacatcgacgcgcctgcgccgccggtccgccgcgccttcccctcccttctcccccgcgtgccctcctattccttctctgcggcggcgtggggagctgcatctgccttcgtctggaggagtgggaagaagcgctgccgaaggggtgatttacgaagccagagagcggctgggagcaagagtgcctgggactgggagttgaagctagagaggctagttgcttgtttggtgcgctgccaaaccgccctcaacatctgacccgtctctccctcacttccacggttccagcgagcggcgcaaccgcgcaactgagcagctagcatgggggacgaagaagatgatcctgactggctccgcgcgtttcagaggggtcaactatggatgaaaaacaagctaatactcctagacgcttgactccaaagaaggatatggtaacactttcatctggttctgatgcttcaccgggaaacagcctttcgagggcccatgaagataaccatgaagagggctcacttagcactgccaagagaaagaatgctcaacaaactaagactaaaaaaacaaaggatgctggaacaaaaactggtgcagaccaagcagggaatggagatgctgaggatgatgtgcaagataaactcacagggaactctgtctcccagaggttaccattaatatttccagataaagttcaacgttcaaaggcattgattgaatgtgatggtgactcgatagatttaagtggagatattggtgcggttgggaggatagtagtttcaaatggtcctactgcaaaacaggatttgttgttggacctgaaaggaacaatatacaaaacaactatagttccatccaggacattttgtgttgtgagtgtgggacaatcagaagcaaagatagaggctataatgaatgacttcattcaactggaaccacaatccaatttatttgaagcagagactatggtggaaggtacccttgatggattcacatttgattcagatgaggagggtgacaaactctatgaaccacaggctaatcaaaacgatctgaataataacgaagatgaaggtcaacctaaggcaaagaccaaaaggaaagcagagaaaacaacggggaaggcaccgaagaaggcgaaggttgcaggaaagggccctaaaaagggcacgaggaaaacccaacctgcgaagagaggtaggaaggctaagaaatgatgacatgttgatttcctcggataagaagaaaaagtctattgagaacctggatagctggcaacaaagatgtgaatttttcaacgcatagtcatggctgtgaggcgcgtcgtcagttcaacatcatgcagtacttgttttagagagagagaacatgtaaagctgtaaacgttgttgtgtactctatgagcgttcagctttggatcattgaaaagaccgagatgttcacgtggaggcgaactgacttctctattttttttcacaaattaaaatctatcagtaaggctttgttcgtttatgccggattggtggatcgaaacgattcctaactggattgcttctctaatttatataaactttgattaggtaaaacgattccgggtgcaatccgacataaacgaacaaggcctaagtctgcttcattccttctgagttgaaagggt

SEQ ID NO: 4314 - DNA, 1515 bp, Zea Mays
gcagaaccctgccccgcctacggagggtcgaggcacaacaagtgggtaatgcggagaagaagggaatctggttctacgactctacaaggagagggcacatgggtggtggccgtgcgtcgtgcctgtctgccctgagggctgcctgatttgctcggatctgcggtctgcctgcctgtgcgtacaacagacagggccagtgccgccggcagagtggtagacaacagactgccatgcgtgcctcacgttgtatccatggagatgaggacgacattgcctccaagtctgctccaccggcatccatcgacggtgcaagatccagcagatagattgatggcgaagaggacgactccatgtccaggcgtactccccgccttgcatcgacattgcagtttccgagcggatcccagtttccggtcgatccggccgcgtagataggagatacgacagctagaggactggctcagggaggtcgacagccgcctctgcgtccgccgccacgcccaccgtgtcatcccggcccttcccatacggcctcgcctgcgggaggaccgaggtcccttgataccaacaacggcggcctccttggggtagcgctccccgttaggcatgagtagggtgagccatcgccatcttggctgtcttcaatgcctggagctccgcgataccgccgggcactagggcataagcgagcgccgccggcctccgtaggcccacccgcccttctcctgtaccttcgccacctggctccgacgagcgcaccccacaacggtgctgctcgccgaatccgaggtggaggcgcctgcgctgtcgacggagctgtcgagcctgtggtggtgtggctgagcctgccctcctatgggctcaccgacatgctgtctcggccttcaggaacctcacgttcctgcagatgctgaacctgagctatgattggttccgtggggaggtcctggcgaccatcggccgccttgcgcatctgcaagtgctagacctgagctacaacgccttctccgaagcaacaggtgagctcattgagccctcaatggtaggtggctggacctggtggaccgaagatcctgagccattctgcataccagcacatggataaacaatgctccatagatcatgaagcagatgctcccgccacctaaggatttggagattgctatagtgcaagtagagtgtagtgattatgtagctatagtgcaagcagatgcccccgccacctaagtagcttctttggtgtacacaaaataatgttcaaaggctacaagcattagccgggacatagtccaagcctgatacaagaaaagtgtcacttaacgttatgcccaacattgttttgtttgtgctacgagctgtataactatttaagcaattatgtagctatttttatttcagtttcactagcattgtctagaacacagtgttcgatatacatgttttatagtaatttttaacttccgtggcaacgtacgggcacatacctagtaaaaagtataaattggtttaattcta

SEQ ID NO: 4315 - DNA, 947 bp, Zea Mays
atgttgacgttctgttaagcatatattcacttgcagatgtatggtcatgtggagttactctttttgtcatgcttgtgggagcctacccgtttgaagatcaggatgatcctaaaaatattagaaagaccattcagcgaattgcagcaattcaatataatatcccagacaacattcgcatatctgatgattgcagacaactcatttcacgtatctttgtcagcaatccattaaggagaatcaccatgagggaaataaaaagccatccatggttcctaaagaacttgccgagggagctcacagaggcggtgcagttatcctacttcaggagggacaacagtgtctctgcattttcagaccaaacaaccgaagaaatcatgaagattgtcaaggaggcaagaaccttgccaaaatcgtcgagatcaggctatggttacagtgaagaatgctcagatgaggaggaaaaggaagtggagagcgaacccaaagaggaggaagaagaagctgagtgtgataagacagttagggaggttcgcgagagcggggagctggatatgacctcactgcacatctaaatgctgcctgtgaggctgtgacgtgtctgtagataattggctttattgtctgctgaatttggtagaacttatgcaattctggcgtcagatatagtggtctatataagccttttccatcctgtaatatatttgttttgttgaactgtatgtgtggtactccgtatatgggtttgttctaagggagcaaggctttgtacaggcacacctgattgtgtttttggataggaagttttaccgtctgtttgcacactgcagcaaacattttggagtttgtaagccatatgttgcggcatatccagtaaaaatggatgaaacgctgcaaattccgtcaaaatggcttgtataactttgcaaagattgaagataaaagatttt

SEQ ID NO: 4316 - DNA, 969 bp, Zea Mays
ctaaactgtgtggtcactggtcagcacataggttctccttttttattcaagcttgcagatgtatggtcatgtggagttactctttttgtcatgcttgtgggagcctacccgtttgaagatcaggatgatcctaaaaatattagaaagaccattcagcgaattgcagcaattcaatataatatcccagacaacattcgcatatctgatgattgcagacaactcatttcacgtatctttgtcagcaatccattaaggagaatcaccatgagggaaataaaaagccatccatggttcctaaagaacttgccgagggagctcacagaggcggtgcagttatcctacttcaggagggacaacagtgtctctgcattttcagaccaaacaaccgaagaaatcatgaagattgtcaaggaggcaagaaccttgccaaaatcgtcgagatcaggctatggttacagtgaagaatgctcagatgaggaggaaaaggaagtggagagcgaacccaaagaggaggaagaagaagctgagtgtgataagacagttagggaggttcgcgagagcggggagctggatatgacctcactgcacatctaaatgctgcctgtgaggctgtgacgtgtctgtagataattggctttattgtctgctgaatttggtagaacttatgcaattctggcgtcagatatagtggtctatataagccttttccatcctgtaatatatttgttttgttgaactgtatgtgtggtactccgtatatgggtttgttctaagggagcaaggctttgtacaggcacacctgattgtgtttttggataggaagttttaccgtctgtttgcacactgcagcaaacattttggagtttgtaagccatatgttgcggcatatccagtaaaaatggatgaaacgctgcaaattccgtcaaaatggcttgtataactttgcaaagattgaagataaaagatttt

SEQ ID NO: 4317 - DNA, 2566 bp, Zea Mays
atagacactggatgtctggatggcatagcgctaaatttgagaccggcaaaatagcaatttttccccctgtgagcccgcgacgcagcgcgaggtgcggccccgtcccctcgccaccggaggagcaggacgacgaggtggcgccggcgcgaggtagtcgcgcgcctggaagagcggcggcatcagagtcgcaggcggaggcgaggaagtgaggggagagccctatagccaccgccgcggggcgtcctgctcgctgcacgcactcccaccattttgtcccaactcgaagctcagactcgtgctgtcgtgcacttcccctcccctagcatcccaagctcctcactgagaaaacaggagatgggaagagacggggaacagactaggcgccggagccgcaagagatcccgcgacgcctccccctcctcgtcggattccgattccttcgactccccatcctctccgagcagtagccctgagcgacggagccgcagcagtaagcggaatagatcatcctcatcgcaccgccacagccgcaagaaaagcgaccggtcgcggagatcccgcgacgaggaccgccggcggcggagaagacggggccaggagagaaagcggcacggtggggatggtggcaggtcctccgactcccaatcgtcggaggaggatagggcggaggaggcgcgggagatcgtccgagatatactcatcgaattgccggccatagccgaagagcttcgccagcttctccaaattatagacagtggtgaaagcattgatatttctggaatttctgacaaactattggtgaagcgcttgaagaaacttttccgatctctgagattgaaagaaagtgcaagtggggcttacttgttgccttcaaaaaatgttcctacgcttgatattgttggatcattactattagcaagttccaaacttgcagacaacaaaagtggaaagccagtgtcaccaaatagagaagcactacaacaggctaactttgatgtgcaaaataaagataaagattatattgtttccgaagagccaaaaattgttgatgtggaagaggaacctcctaaaagaaggataattggtcctgcaatgccatctcgtgaattattggctgcagcagctgaaatgacagaggctcttaggtgccgggatgctgaactggaagccaatgatgatttgctcataggccctccaccgcctgccgtagttgctgaagctgcatctgcaaatgaagctgagcgatttgaagaggttactagaatattggcagctgacacaaattcaccttatgaggttttgggggtaaattggaagatgtcaactgataacatgaagaaaaggtattggaagttgtctcttttagtgcacccggacaaatgtccacatccttccgcacaagaggcattcgtgaaattaaataatgccttcaaagacttacaagaccctgataaggttccagcatagtttgtctttgactagcaaaattcaatgttctccccctctatttatcatatggcgtgaccgtcgtggcgagcggaggggcgagtgcaaggtcagcagggactgggaactcgaggggagcaggtagcgaggaagaacggcggtgggctcttcgctggtgacaactgctgaatctcctaatggcaccgtcgaaggggaaacctcaccctgacacagggaggtgcaatagacgagaagataaaaaagaaagaggagatggaacaatttgaggttgagcttaaagcaatgcgtgaggctgcggaatggagacgaatacaaggtgtatcactcgcaggtgatgatgaacttttagcaggtccaaaagagtcacagagacctacgagagatgaatggatgaccacattgccacctgagagaaaagcaggagtgccaatgcattcaactacatcatttagtatgaatggtaaagaaggacgtggagacacaagtgtctggactgatacccctcttgatagagcacaaaaagcacaacaaagctatctagaagcctacaataagacaaaggcaattgcagaaggcgacgacgtgaagagcaagaacccggatgcttcaatcgtagataaatacaacacctccaaacgatcagtgtcccttgtgcagaagcaccgagagagtaaaaaggagaaaaagaagcaaaagcagcaggagaaagaggaatgggagggaagccacccatggaagccatgggaccgggagaaggatctgtctgctgggcgccagaatgtggccttagacgcagagaacatgtcgcaaggattatcttcccgtttcgcatctggtgctgttcagcggaacttcctgtgagctgtgtggaaagatactcctggagcttggtctaatcgatgattaatgtccagttattacatcctggtcggcagatggcaaagataatgctgacatataaaaacgagttatgttaccaaggaccatcgtcctgtaatatcgatcgtgcttgttgtgcttattttctcagtgtattatcgggtgagctaaaatggtgccatagtttgttcgtacgatacaattactttttttttcaaac

SEQ ID NO: 4318 - DNA, 2090 bp, Zea Mays
cccgccgcgaaacccagcacgaccgatccatccacctcacaccgcgtcttcgtccagctcactcccccgccgcgcccccgctccgctcccctctcttcctcgccgcgggtcgcgcgcagccaggcgccgagccgccgaccagtaaccgacgtatatctcatccttccccctcccccctgcacagccccctctacaactccccgattaaaccctagaatctcccaactcccaaatgcgcgcccccacctaggcccccgaattcggcatccgctccgcggaaggtgtgcaagccagggtgcacacaatgagtgcgggtttcaacaagcagatactggctcagaagctttcgaagcttaatagctcacagcagagcatagaaactttatcacattggtgtgtctttcatcatcgttactgccaacaagttgtagaaacatgggattgcgagtttcatgcagctcctggagagaggagggtatctttgctgtaccttgcaaatgatattatgcagaatagcagaaaagaaggcaatggatatataactgaattcatgagggtcatccctgctgccttgaatgaagtgttgactatcagagatgattttgggcggaatgttccaaaaagactggtagcagcaatcaatcggaatttatgcagggggtgcaggaacaacacaacattctcagaaactccattgaacaactcaaattgtcagaatcactcagggccactctgatttctcatttgaaggaagcgctgaatgagcaggagctcaaagtggaacaagtcagaagcctgcttcaggcagctcagcctcgattcaagagagctgctgagctctgcgtggggcttggaagcaacatggaaatgcatgagccatcaaatcaagggcataagaggtctagcctctctgatccacttagtactgttgctccaggagctgagaagtctcttcaaaagggacagtcaagtgcagtgttgtattcacaggagggaaatggttttgagcacatcatgacagagacaaagcttgctgcaggtgatgcttcagacaatatacgtggtggtgatttgccttcacaagtgaatgggggcaacaccaagctgaaaatagaagagcacacttctggtaacaagaggcagaagctagaggatgacacagatatttctcagcctcaatcacagtcaccgccaccgccacccccattccctcatcctgacgcattcgaaccaccaccaccaccaccacctgaggttcctccatcaccagagcctagcccaccaccaccgccaacttcaccgccacccaatatgatccccccgccgccgccggcaatgccaccccaaatgatctcacatgtaccacctccagctggtacatttgtaccttttcctgctggaccacctggtccaatgtattccagctacccaccttttactcctgtggtcaacttccccataaccagcccaccagctggtttccctagtccaagcccgcctccgccttttcaaggattagtgggtacattctatggccctcagttccccaccgcacccccaccagcagacaggaaatgagtgtagtaacctaccggcagcccccctcatcatactagtttatttccccttttcaacagagaatatgactcggggggtggggggggggggggggggcgctccatcagcatgtgttgtggagctcagaagattgttgtaaatttagccagtcagtgcgcagcagtgaattttctgaactagttgtggtcttggtcctggagtagaagtgtagaacctgtagatttcgactgctagagagaattagggattctgagagccgagaacaaatgcctgcgacagattaataataagttgtggtcttgttggagtaaaaactgtagattcccacagcttagagagagagcatggaactcggtagcatgacatgttgtaactcatgtacaattgtgttcattgccagatcatccgagaacatgtacatgttcccgtgatgttttgagcgtgtaattctgttgttctgtgtaagatatggcttgagccgctgtcgatggttgaaactttttgctctcggt

SEQ ID NO: 4319 - DNA, 3767 bp, Zea Mays
cccgccgcgaaacccagcacgaccgatccatccacctcacaccgcgtcttcgtccagctcactcccccgccgcgcccccgctccgctcccctctcttcctcgccgcgggtcgcgcgcagccaggcgccgagccgccgaccagtaaccgacgtatatctcatccttccccctcccccctgcacagccccctctacaactccccgattaaaccctagaatctcccaactcccaaatgcgcgcccccacctaggcccccgaattcggcatccgctccgcggaaggtgtgcaagccagggtgcacacaatgagtgcgggtttcaacaagcagatactggctcagaagctttcgaagcttaatagctcacagcagagcatagaaactttatcacattggtgtgtctttcatcatcgttactgccaacaagttgtagaaacatgggattgcgagtttcatgcagctcctggagagaggagggtatctttgctgtaccttgcaaatgatattatgcagaatagcagaaaagaaggcaatggatatataactgaattcatgagggtcatccctgctgccttgaatgaagtgttgactatcagagatgattttgggcggaatgttccaaaaagactgattgacatatgggaagaccgtaaaatatttgatactcaggcacaaagcctcaaagatgactttttcagaaggttaaaggacattagaaacaaattgaaaaatacgggcagtgagctgctggagaaggttgtctctagctacaaacatgtcctgaatgctcctatggatgaggatactctgatgcgaaaatgccaagcagctcttatcaattttgatgaactcaataaaacgtattcagcctcagaattcagaattggtattggacagcttgattaccgttgtttggatgcacaagaatttggcactggaatttgagtccagtaccaactcgacattcacttcacctgtgcccccttgccaccaattcggagcctcacccctccgttttgtggggaattaggccactaggaaaaaaaaacttcggcctttcaattctgtgttctgtacatccaaacagatatcgagtttgatggtttctatgattccaaaagtcaattttatggccatccaaacaacggatttcaattgtgttccatttcaatatcaaggctgatttggtattctctccaattcaattccttcccttccaatatcaacatccaaacaaagcctaaggatattctcacatgtcctgtcattatttactagttaatatgtagctcatagcatgcagaaactagtgattatgtggagttatagtttggtctgcaagttcttcacctcagttgcggtgcaccacatatgcagggttttcacaaaaccaacaaactaccatggtctcaagcataacacattgatgtttatctgtgcatgggtttgctgggttttagcaggagctaaggagatcggtagtatgggcttagttgctgccctgggcgaggtcgggtctagtttcagtactactatgtaattcccttcgggataatgtgggtctttgggagatttgctctgcaacatctcctcttttgtaatgtctcctttcctctttaatatataagatgcgcagttctcctgcgcgttctcaaaaaaaaaactgtgcatgggtttgttgtatctaggttgatgtagctaatgtgcaaatggtttgcatcacacctgtgttgcaactgagacatccttgagcctagatggtttgtataaagagatgcactgtacgttaaaaaccctcatttccatctttagcaagaggatgtccagtgactagatttattgtgtttcagccctatgccctgatggcattgtcaatgggacttctccgcaatttctaccttgagttgcttcataacagatacagaaattggattcttccactacgtagtttcttcagccttaactagattcaggggttggtgtcatgttctttcctctgaaatttgggcagcaagcaaaatgacctatgcttttgacggccctttcatactcactgttggtttataagggttatgacaaacaacttcaagcttcgctttgtgacaacaatgaatggttcccatggcttttgagggcacacgctagataaagcctaaacaagtgaaattgaatatcatatgccacacggtgtgctatgggaaattgattcatagcctcataggtgggcttgggctcgacacaacccaattgttatcccaacgtcagtccaacctgcttagatccagctaatttcaatgaggttgcaaggtagcagcaatcaatcggaatttatgcagggggtgcaggaacaacacaacattctcagaaactccattgaacaactcaaattgtcagaatcactcagggccactctgatttctcatttgaaggaagcgctgaatgagcaggagctcaaagtggaacaagtcagaagcctgcttcaggcagctcagcctcgattcaagagagctgctgagctctgcgtggggcttggaagcaacatggaaatgcatgagccatcaaatcaagggcataagaggtctagcctctctgatccacttagtactgttgctccaggagctgagaagtctcttcaaaagggacagtcaagtgcagtgttgtattcacaggagggaaatggttttgagcacatcatgacagagacaaagcttgctgcaggtgatgcttcagacaatatacgtggtggtgatttgccttcacaagtgaatgggggcaacaccaagctgaaaatagaagagcacacttctggtaacaagaggcagaagctagaggatgacacagatatttctcagcctcaatcacagtcaccgccaccgccacccccattccctcatcctgacgcattcgaaccaccaccaccaccaccacctgaggttcctccatcaccagagcctagcccaccaccaccgccaacttcaccgccacccaatatgatccccccgccgccgccggcaatgccaccccaaatgatctcacatgtaccacctccagctggtacatttgtaccttttcctgctggaccacctggtccaatgtattccagctacccaccttttactcctgtggtcaacttccccataaccagcccaccagctggtttccctagtccaagcccgcctccgccttttcaaggattagtgggtacattctatggccctcagttccccaccgcacccccaccagcagacaggaaatgagtgtagtaacctaccggcagcccccctcatcatactagtttatttccccttttcaacagagaatatgactcggggggtggggggggggggggggggcgctccatcagcatgtgttgtggagctcagaagattgttgtaaatttagccagtcagtgcgcagcagtgaattttctgaactagttgtggtcttggtcctggagtagaagtgtagaacctgtagatttcgactgctagagagaattagggattctgagagccgagaacaaatgcctgcgacagattaataataagttgtggtcttgttggagtaaaaactgtagattcccacagcttagagagagagcatggaactcggtagcatgacatgttgtaactcatgtacaattgtgttcattgccagatcatccgagaacatgtacatgttcccgtgatgttttgagcgtgtaattctgttgttctgtgtaagatatggcttgagccgctgtcgatggttgaaactttttgctctcggt

SEQ ID NO: 4320 - DNA, 1471 bp, Zea Mays
atgaggttgcaaggtagcagcaatcaatcggaatttatgcagggggtgcaggaacaacacaacattctcagaaactccattgaacaactcaaattgtcagaatcactcagggccactctgatttctcatttgaaggaagcgctgaatgagcaggagctcaaagtggaacaagtcagaagcctgcttcagctcagcctcgattcaagagagctgctgagctctgcgtggggcttggaagcaacatggaaatgcatgagccatcaaatcaagggcataagaggtctagcctctctgatccacttagtactgttgctccaggagctgagaagtctcttcaaaagggacagtcaagtgcagtgttgtattcacaggagggaaatggttttgagcacatcatgacagagacaaagcttgctgcaggtgatgcttcagacaatatacgtggtggtgatttgccttcacaagtgaatgggggcaacaccaagctgaaaatagaagagcacacttctggtaacaagaggcagaagctagaggatgacacagatatttctcagcctcaatcacagtcaccgccaccgccacccccattccctcatcctgacgcattcgaaccaccaccaccaccaccacctgaggttcctccatcaccagagcctagcccaccaccaccgccaacttcaccgccacccaatatgatccccccgccgccgccggcaatgccaccccaaatgatctcacatgtaccacctccagctggtacatttgtaccttttcctgctggaccacctggtccaatgtattccagctacccaccttttactcctgtggtcaacttccccataaccagcccaccagctggtttccctagtccaagcccgcctccgccttttcaaggattagtgggtacattctatggccctcagttccccaccgcacccccaccagcagacaggaaatgagtgtagtaacctaccggcagcccccctcatcatactagtttatttccccttttcaacagagaatatgactcggggggtggggggggggggggggggcgctccatcagcatgtgttgtggagctcagaagattgttgtaaatttagccagtcagtgcgcagcagtgaattttctgaactagttgtggtcttggtcctggagtagaagtgtagaacctgtagatttcgactgctagagagaattagggattctgagagccgagaacaaatgcctgcgacagattaataataagttgtggtcttgttggagtaaaaactgtagattcccacagcttagagagagagcatggaactcggtagcatgacatgttgtaactcatgtacaattgtgttcattgccagatcatccgagaacatgtacatgttcccgtgatgttttgagcgtgtaattctgttgttctgtgtaagatatggcttgagccgctgtcgatggttgaaactttttgctctcggt

SEQ ID NO: 4321 - DNA, 2657 bp, Zea Mays
ccggtgggcgtcagagcgctgttggcgctttcctagattatgtattcttggattccattggcttctatcttcagtatggatgagccaaacaacaattttaatgcaacggtgcatgccaatgagatgtttgatagcaatggtgtgatccatgaagatgagatggcccatgacgatgagatgatccatggccatgcgatgttccttggcgatgagatgattcgtgggaccgagatggttgaaggaagtgagatgatccatggtcatgatatggttcaggttaatgatctcatccacggcaatgagatggttccagttcacgacatggtcaacggtgacaagatagcccatggtaatgaattggttaattctcagatgaccccacgaatatcaagacgtcggaagaagaagtcgctagtttgggagcacttcactatagaactcatgccagggggaagttcaagagcatgctgcaagttatgcaagcaaacctttgcgtatagttctggctcaaaaattgcaggcactagccatctcaagcggcacatcacactaggctcctgtcctgttatgaaagaccaagacaggaagctagcattgccacttgcagggggccatgtcactgataatgatggtgagggtactgcagaacgtcctactaagaggcgttacagatacactggttatgcaaatgctacttttgatccacagcggagcacctcttatctgacaaagatgataattttgcatgactacccacttcacattgctcaacagtcatcctttattaattttattgagagtctgcagcctcgtttcagagttgtagatgtggagacaatggaaggagaggtgtatgctgttttccagaaagcaaaagaaaacctgttgcaagcattcagcactatgccaggaaggatcagcctcactataggactctggacaaccagtcagactcttggctatgtttctcttgctgggcagtttattgactccgattggaaagtgcaccgaagaatgctcaacttcatgatggtgtcttctccccattcagagaatgcacttagtgaagctattagctcaagcctttctgagtggaatatgaaggacaagctgttcactatcacattggataatgattgctcttcccatgatatttacagtgcaaatcttagggatcacctctccaataagaacaacgtcatgcttaagggacagctctttgttgtgaggtgctatgcacatatcctgaatgtagttgctcaagatgtaattgcttcgattcatggtgtgatttacagcatccgtgagagtatcaagttcataaaagcttctccaagtcgtgaggagaagtttgctgagattgctctgcagctggagattcccagtaccaagactctttgtttagatgttacaacccagtggaacacaacttatctgatgctactggctgccttggactataagcaggcttttgctacactggagacatgtgatgataattacaatgaatctccttcagcagaggactggaagaaagttgaggctagctgtaattacctgaaactgctatatgactctgcacatagtgtgatggcttcagcgaaccctactgcaaacatctttttccatgaagcttggaaaattcagcttgaactagccaatggcacagaacatggaagtccctttttcagctgtattgccaaggatatgcatgagagatttgacaaatactggaaagattgcagcctggtgttagccattgctgttgttatggatccacgtttcaagatgaagcttgtcgagttcagttactctaaaatttatggtgctgaggctgcaaaatatgttaaggttgtcaatgactctctgcatgagctgtataaggagtatgtggcacagacactccccttggctcctgcctatgttgaagctaataacgtggctgccaacacgaatgttaaccagggaaatcctcctccaactagtgatggtcttcttgactttgatatgtacctttctgagattcaaagtagccagcctgcaaaatgtgaactggagcagtatctggaggaatctctcactccacgcatccaggagtttgatattcttaactggtggaagcttaatacacttaagtttccaaccctgtcgaagatggcccgtgatatcttggcaatcccaatgtcgatggttagcagtggcagctccatattctctgctggaactgggaaccgcatgcttgatgattacagaagctctctccggccggagactgtggaggcacttgtatgcgcaaaagactggctccagtattcaccggccgcaactgaggcgccaggttctgagatgatgaaagcagaagcattgtagattgccgatactgcttccctgttgaagcacaaataaggttgcagtatctttgagcatagttaacagtaggtatattttaggcagcagttgcagacatatatttcttctggcatttatctcatagtggtctaatttgtcatgtcgaacaaagtttaactcattgtagtgtgagctgagtttatctgtggtctgacccggcacacatggtgcgggtgcaaactgcaaactgcgggattttttagggattcaggttgttgagcaccatttatggcactgggcatggtcgg

SEQ ID NO: 4322 - DNA, 2008 bp, Zea Mays
cttctcccttcacaaccccaacctcgaaaacgaaggcgccaaaccattccccaaacgctctcgcgtccgcccgacagctcgcctgcctgcctctccgtcgtcgccgagtccctcgccggctctaccaggcggtggcgaaggcacttcggcggggacgctcaaccgccccgcgggcggcgtcgacggtcggttcccggcggcctcgcggaggttgcatcccgtgtcgaatcgaggtatttgtcggcaggatcctacgccaaatgcctctctttgataagaaacctttctccttgctggagccccctaaggacttggattcaaaggagaaggtgttccaaattcgattcacgaaggagatattccgagattatgaagaatacctgaagaggctaaacctttatcgtcaaagagtttggacatgtaatatatctggaaaatctaatttaacttttgaagaagctttggtatctgagcacaaagcgatggagaaggctcaaaatttgccaactgagctaatggctcaagttcttcggatgactcaatacagccctcttggtttatatgaacttgttgataagatatatgctagtctgctggaagaagtatttgagggaatagaattacatgctaataaggatggtaatgtggcaccttgcaagattttgaagattttagattctggtggcacaaagatgtgtgaagttggttggattcggaagggtaaggctataaccaacacatcagtaatcaaagctgcagatctgttttaccggagggcacctgttagcaggaatacgctgaagttttttattagagatgctacgtcacaaagtaatccatgggttatccatgagaatcttgccaaaaaatttggcataaccatcgagccccctgatagtgtaatgaagaaagggagaaaaagacaagagaatgaaactgttgaagatggaaggaaaaagctcaagacagatgaagaacatgcttatgtgctgattaagtatccaatagatgatctgctagtaaggcccaatgcagatgatccgtctttatttaagagacctcttctggctacagattttagagtaccaagatgttctgtgggagatctccttatggtatgggacttctgctcgtcttttgggagggctctgaatctgtccccatttccgctaacagatctggagaatgcaatttgccacaaagaaagcaatgttcttcttgtggaaatacatgcagctttgtttcacttgcttatgaaggatgaaggtgactatttcactgttccgcagaacaagaaacagaagttaaaggtaagttcagtaacatgggctgagtatctatgtgacttcttggaaatgacaaaaaatgaagaactatccactaacattgcaacagtaagaaggggatattatggtcttattgacactaatataaagcttaagatccttcgggaactagtggaagaagctattgaaacctctgccataagggagatactaagtgatcgtgtggaccagaaacaagtccttaatgcaacaaaaagagagaacaccagaaaggacaaaaaagagcaaaatctgaacactgaaattgccatgaaaaatgaggagaatcagacagatgctgtgcaaggtggccatgaaggtgtagatgagctggttaggagaaaagaagaaaatgacaagagtaatatttctcggggtaggacagaagtgaaacgacacatgcaccttgagacggagatcgagaaattatccatccgttccagccctcttggtaaagacagacagtacagtaggtactggtttttcaagcgtgaaggaagactttttgttgaaactgcagattccagagaatggggttactacagcactaaggaagagcttgatgcgctcatggactcattgaatgtcaaaggtataagggagagagctttgaaacggcaactagagaagttctatagtaagataagtgtacttgtacttggaggcttacaaggtgtttggtt

SEQ ID NO: 4323 - DNA, 1699 bp, Zea Mays
gcatccaatacgacaggcatgcacgcacgtcaatcaacaggggggcatcatggaatcgaataataaataaagcaggattcccccacagtttgatccgccgaatataataaaataaaaatccagcagcatttctcccccgcccatacgacgacgacggccactcggcgcagtgatttggggcgccccgcaaagcggtggctccaccggccagcgcatcaaaggccctgtggaatatggcgccgcgccgcttgccggggccgggcccgggccctcctcttatatacggcgtggcgagcaaaccccaaaccctcgcaggcagaaggcaaacgcggctgcgagcgcggcgcccctctcccactccccagcagccgccagcccgcacacccctccctcgcgcgctcagggtttcggaatggaagccgaggcggcggccaagaggacgcgggacagcggggaggacgccgccgcggcggggatctccgccgtcatcccgggatggttctccgagatcagccccatgtggcccggtgaggcgcactctttgaaggtggacaaggtgctgttccaagggaagtcagactaccaaagcgttatggtctttcagtcctctacgtacgggaaggtgctcgtcctcgatggagttattcaggtgacggagagggatgagtgtgcgtaccaagagatgatcactcacctgcccctttgctccatcaaagaccccaagaaggtgttggttattggagggggtgacggtggtgttctgcgtgaggtttcacggcattcctctgtggaacaaattgacatctgtgaaattgacaagatggtggtagatgtctccaaacaatttttccctcatttagctgttggatttgaagaccctcgtgtgtcattacacattggagatggggttgcctttttgaaaaatgctccagaaggtcctgctcaagagctttttgagaagcctttcttccagttggtggccagagctttgcgtccaggtggagttgtatgcacccaagcagagagcatatggctacatatgcacattattgaagatattgttgtcaattgtcgacaagttttcaaaggctcggttaactatgcttggacaacggtgcctacataccctagcggagttattgggttcatgctttgctccaccgaagggcctgctgttgatttccagcaccctgttttcaacatcgaggaggatgagcatcctatgaaatcaaagggaccccttaagttctacaactcggagatccacacggcatcattctgtttgccttcttttgcaaagagggtaatcgagtcaaaagcgaactagatgtgaagggtatctccaagggctaagtaccttaggcgcgcaacacagaatttgttgtagtgtgaaaagcggatgcctccctcccttttctcccactttgatgaatagtataagcacaggagatgagatgcaacagttatcggagttatcggtctacatggtcctgaccagtcgtatgtctcggctgcctggtgcagctatgaaaacgttttgcaatagcttttttcggcagtcctcacatcatcacggttgtgtttccgcttccatatctgaatggaatacatatacgtatgaaataaaactgtgtaatggctgttgctcggatccttttcaaaacaggttcagctctcgtcgagtgatttgtaggtcctt

SEQ ID NO: 4324 - DNA, 2615 bp, Zea Mays
ctcagatttcctcatccctcatctctcctcccgtgacgtcgcgccacatcgtcctcttcctccgcgtgccgctgctaccgtggcccccttgcctgctcgcctccacggccacacgaaggccccctgtgttgctctcggatatgcgctgccatcgccggcgtagccggagctggccgtccacgcaaccctgccacgggagggcgacgcgttgatgctggagctcacaaggtgtcgctgctggagcagcgtacgacgacgaaggcgctgtggcagcacctggtgctagcgctacactactactgaattttgtgatgttgcaatttcatcttttattttgttttttggggtgatgcaaaaaaacaaaactcaaaagtctactaaaggccataaattgagcaatgttgctgcttcaagaaacaaattatcaacttattcccatctaacctttgatgggatttggtttagcattaaggaattctcaaaatcaaaatagcagtttcaagtgccagatgatgcaaggctttcagctagaagtgtagctgttctctgaaatctttgccaaaaggttaatttcattctaccttgcatgctacctgtttagcatgatcgttagtttattcgctaacaaaaaactttgccgaatggatgacttccttctgagaagactgaactgaataattatgtcaaagttgtttcagtagtttggcctaatcagtattgatctatggtgtatagtctacaggttgtactatatggttgattgttctgatttcgagcttggttagtctaatgttcttaattatggatgatgatcctttgaagttcatgcacgaagacttgccgttctgaaggcccttacttcctgttccactagtagttctgagatgatggaaaagctaaacgaaatcgtgtttgacatcttggaaaaggttggccatccataatttgagtattctttgtacagttacattagtctttaaactacttttctcatcctcactaattatattgtcggcaatatattgtcgacaagaatggttctggatatattgaatgttcaatggtactcctattggataatcctatcagcacgacaagtgcttccatagcttatgatgttgaattttgctgctccatggcagcagcagcagcccctgccagttgaccattctgacgccttctcctagcattatgctttcttgtagcttcatttggaaaaggcagattgctcaaggaatttcatgcttagttgcaccacaccagggtatcatcaatcattcagccccattctactgatgtaaattgtgcaaatcctttttctttgagacttttgagagtggtctgtcgattacttgcaagaaatatgaacctttgtttctgtgcatgggcataaaacaaacagcttctagcctcttttacggtacttgcacttgcaagaaatgtgaactccttttcatttctgtatgtggacataatgccaaagcatccaggatttttcatggttgttgatgtctttacacagttcatctccaccagtatgccctcctcgtactctatataaacacatcaacagcaccgcaattagccacataaacacatctcgcagccacctttttttgttctgttgtaagtatactttcccttaccatctttatttgttagtttaatttgtaattgggaagtattagtggaaagaggatgagacgctatcatctatgtactctgcaaatgcatctgacattatatgggctgcttcatataatttgaattgctccattcttgccgacaatatattgcaaggtacatgtctaggagctatttaaactacgtcgacctcactaattataagcattgaaaaagcaacaattgctacagtgcacttaaacttgcagctcattattatctggctaagatgatgggccaacttagtttatttgatctaaaaattgtgagtcttatgttctgaactcaaacttgtgacaatttattttattttcgcagtctattatacgtggtaatttgcaatatgcttctttaagtgcactcagaaggcatccacttgatctcggtaatcaagcattcctccaccgagctgtggaaggattaaatacaggaacatgacccctgaagcagctttggatcatgtacgatccattaggcctcgagtgcttttggcaccctcgcagtgctaaaagtttgcagaaatggcaccatcaagatcgatctggagaccaacaagatcatggacttcatcaagtttgacgtcggcaatgtggtcatggtgaccggcgggaggaacaccgggcgtgtaggagtgatcaagaacagggagaagcacaagggcagcttcgagaccatccacgtgctgcttggagctttttgctatgtctagttttctcctatttgttgtacaggaaaacatagaatggaattcaaatttggtggccacaaaagtgtggagacttgaattcatataaagttagccttaacattagtgcaaacagttgtatcttagtttagatttagagtacacttatgtatgcgttgtttgacaatgcttatttatgatatattgaatggtacttatttatattatattaattataatgttgttc

SEQ ID NO: 4325 - DNA, 1129 bp, Zea Mays
gagagagatatggcttgaccaccaatgcaaagaaaaaatgaggaatttctgctcagttatactggaaggaattatggtctggctgctggatcatggttgggtccatatgctatgtgccgggcatggcagacccttattcgcacaaatagagagcaagctgatgctgtagatgggaaggaaaatttccctatggcgctgtatgtggtttcgggtgatgaagatggcgaaagaggtggagctccagttgtttgcattgatgttgctgctcagctttgctctgatttcaacaaaggaccatctacatggtcacctattcttttgttagttcctctggttcttggccttgacaaaattaacccaaggtacatcccattactaaaggagacatttatgttcccacaaagcttgggcattttaggtggaaaacctggtacatcaacatacattgctggggtacaggatgatagggctctctacctagatccccatgaagttcagatgacggttgacattgcactggataacttggaggcagacacttcctcataccactgcagcgttgtccgagccttagctctggaacaaatagatccctccctggctattggtttttactgtcgtgacaaagacgactttgatgatttctgttctcgggcctctgagttggcggagaaggccaatggcgcgccactctttactgttgtgcagtcaatcgagccatcgaaacaaatgtataaacaggatgatggactgggttgttctggcagtagcatggccaatgacgacgaccttgatggctctggtgaagcagaagagtggcagatcctttagacgaggctaagacatgttgggctgaagaaaaaaaaacttgcattgaaaatgttgtctgaatgccctcgtctgcgtgtgaatagaggggattatttgtgtgatctcggggtggaaatgttcagaacatacactcgtagtcgtggatgataataattaaatgtatttattattccatattctaacatcgttttaccacggcgtggttgtttctcaattgttggctacagttgcacctgccaaaaagtttgtggtgttggtatgttacatttgcaatgccaacatatcgctgtttgatgtg

SEQ ID NO: 4326 - DNA, 1830 bp, Zea Mays
gtattgcctccatgacatcctgggtgtccttcacacacatgcggcgttaggtgatgacgagcttgcctgagaggggagaatcacctgtgccgccactcgattctctgcgccaggactctgccgtgaccgtcctagcggctgccgccgttgcctcttcctccgctggctccgatcgcaaggaagacagcggctccaggcagcccaaggcctccatcctgtccggcgtcttctctcccccttttgccatattcgaggggcagcagcagggctcctcgtcgccggcgtgcgacgccaggtcgacaaagtcgtcctcagggtcctatggtttatccaggatcctgaggaggttcgtgggcagcggctccatgtggcgacttctggggtgcggcagggtcttgacctccagtgacgtgtggttccttggtaaatgctataaggtgtcgcctgaagaagaggagtctggcgactcggagtccgacagcgggcatgctgcgtttctggaagatttctcttccaggatatggatcacttaccggaaaggctttgatgcaatatctgattccaagctaactagtgatgtgaactggggatgcatggttagaagcagtcaaatgctggttgctcaggcgctgatttttcaccaccttggaagatcttggagaaagcccccagagaagccatacaacccagattatataggggtcttacacctattcggtgattctgaagcttgtgctttctctattcacaatttacttcaagctggaaggaattatggtctggctgctggatcatggttgggtccatatgctatgtgccgggcatggcagacccttattcgcacaaatagagagcaagctgatgctgtagatgggaaggaaaatttccctatggcgctgtatgtggtttcgggtgatgaagatggcgaaagaggtggagctccagttgtttgcattgatgttgctgctcagctttgctctgatttcaacaaaggaccatctacatggtcacctattcttttgttagttcctctggttcttggccttgacaaaattaacccaaggtacatcccattactaaaggagacatttatgttcccacaaagcttgggcattttaggtggaaaacctggtacatcaacatacattgctggggtacaggatgatagggctctctacctagatccccatgaagttcagatgacggttgacattgcactggataacttggaggcagacacttcctcataccactgcagcgttgtccgagccttagctctggaacaaatagatccctccctggctattggtttttactgtcgtgacaaagacgactttgatgatttctgttctcgggcctctgagttggcggagaaggccaatggcgcgccactctttactgttgtgcagtcaatcgagccatcgaaacaaatgtataaacaggatgatggactgggttgttctggcagtagcatggccaatgacgacgaccttgatggctctggtgaagcagaagagtggcagatcctttagacgaggctaagacatgttgggctgaagaaaaaaaaacttgcattgaaaatgttgtctgaatgccctcgtctgcgtgtgaatagaggggattatttgtgtgatctcggggtggaaatgttcagaacatacactcgtagtcgtggatgataataattaaatgtatttattattccatattctaacatcgttttaccacggcgtggttgtttctcaattgttggctacagttgcacctgccaaaaagtttgtggtgttggtatgttacatttgcaatgccaacatatcgctgtttgatgtg

SEQ ID NO: 4327 - DNA, 1977 bp, Zea Mays
tcccctcctccaagcaaatccgaggcccacccacgggccgctcgaacatctgtcaccgccaagtggccccacccacccctcccctccgctgccccttcttctacaaataccccggccggccgcggccgttcccgaatcgagcggtgactggcgaggcaaaagcattgcgaccacagacagcgcgcgcttcaaggcctttttttttgagataacaaggaggagaggaggagatggcggtcacgatcacgtgggtgaaggcgaggcagatcttcgacagccgcggcaaccccaccgtcgaggtggacgtgggccttagcgacggcagctacgcgaggggggccgtacccagcggcgcatccactgggatatatgaggccttggagttgagggatggaggatctgattatcttggcaagggtgttcttaaggctgtcagcaatgtaaataacattattggaccagcaattgttggaaaggaccccactgagcaggttgagattgacaacttcatggtccaacagcttgatgggacctccaatgagtggggctggtgcaaacagaagcttggagcaaatgccatccttgcggtttcacttgcggtgtgcaaagctggagctatggtgaagaagattcctctttaccagcacatcgcaaatcttgctggaaacaaaactctggtgctccctgtacctgcctttaacgtgattaatggagggtcacatgctggaaacaagcttgccatgcaggagttcatgatcctcccaactggtgcctcctcgttcaaggaggccatgaagatgggagttgaggtgtaccacaacctgaagagcatcatcaagaagaagtacggtcaggatgcgacaaatgttggggatgaaggtggttttgcacctaacattcaggaaaacaaagaaggccttgaactattgaaggcagccatagaaaaggctggctacactggaaaggtggtcattggaatggatgttgctgcttctgagttcttcggtgagaaagacaagacttatgatcttaatttcaaggaggagaacaacgatggctcaaagaaaatttcaggcgacagcctgaaagacctgtacaagtcctttgtttctgagtaccctatcgagtcgatcgaagacccatttgatcaggacgactggagcacttatgccaaactcactgatgagattggacagaaagtgcagattgtaggagatgatcttctcgttaccaaccccaccagggtcgccaaggccatcaatgagaagacctgcaatgctctcctcttgaaggtgaaccaaatcgggtctgtgaccgagagtatcgaagctgtcaggatgtccaagcgcgccggatggggagtgatggcaagccacaggagtggcgagacagaggacaccttcattgctgacctctcagttggcctgtctacgggccaaatcaagacgggagctccttgccggtctgagcgcctggccaaatacaaccaggatcgaggaagagctcggtgatgccgcggtctacgccggagcaaagttcagggcaccagtggagccctactaagaaaggaagaggatggggatgttttcttgtggagctatactagctcgctgctgccttttgttacaatgtttgtacggtcgcaataaatgtatggtcgtgtttgctcgagagctactcaggtgattttgtcgtgggagcaccaaaagcagaaaagaactgtttttttcttctctctctctagattctgacgagtggtggtctgcactcgtcgtaatgtcgtttgcctaaactgattttgatggaacaggaaatcttgctggtcttgccatatgcgtgcgagtgactttcttgttccttatggtgtgtgaggccattttcgtattcagcatggaaaattacgggttcgttttgtagcgacaggcagcttgggcgtaggagccacgacccgcaaaaataaaatcttgttggttgcat

SEQ ID NO: 4328 - DNA, 1854 bp, Zea Mays
gaccagcaggccccacgggctcggcccccctcctcccccgaggccccgagttcgctgcgcttccgccttccggtgacaagcgagtgaccgatctaccccgacccaccacccaccgcaccacgcgagccgcgagcgagatctctcggctccagggtaggctccctcctatggatctccgccgcctcgcggtgtttgcggccgccctcgccgccgggtggtggtcccgcggcgcggaggcgtcgatccacacctacgaccgggagcccttccgcgaggtttgtgaatgttacattttggagaaccccagaagctgcggaatcacacgcaaaaatggcacatagtacaggcttggtacaggctatcctatttgaagttgtggacagggataacatcgggggatctgcctatggcggacagaggtccatatgttgtaccccagatcttgctaaactagagggctgcaagcaaggggaagtaatcaggaggccatcctctgatgatccagattggcccttcgtgctagacacacacttcagtgctaatcacctttcagtgaagttagaagatgagccagtgcgcattacaaagacaggcatgtacaacttgttcttcatatcctgtgatccaaaactgagaggccttactatgagtggcaagactatctggaagaatcctggtgggtatctaccgggacgaatggcgcctttgatgaaattttatgttctcatgtcgctggcgtatctgttggtaatgattgtttggtttagccagtacgtaaggttctggagggatatattgccaatacagaattggatcactctaatcattgcacttggtctgtttgagatgacactatggtactttgagtacttgaacttcaacagcagtggtgtgaggccagttggaatcacaacttgggtggtcactgttggagctatcagaaaaacagtttcacgtctactcatcctttctatctcaatgggttatggtgttgttcgtccaactttgggaggtctcacttccaaggtgttgctactcggacttacatatttcctggcgtctgagttgctggacattgcagaaaatgttggaacaattaatgatatatcaggcaaagcaaggcttttcctggtccttcctgatgcatttttggatgcttttctcatactctggattttcacttctctttcccgcacactagagaagctacaggcaaggaggagttctgtgaaattggatatatacagaaagttcacaaatgcattggctgtttctgtgatagcttcagttgcctggattggttatgaggtctatttcaaagcgacagaccccttcagtgagaggtggcagagcgcatggatcataactgccttctgggatgtccttgcgtttgtgttgcttcttgtgatttgttatctgtgggcaccttcccaaagctcgcaaagatatgcatattctggtgaagctgctgacgatgacgatgaggaatctcaatctctgacgaaaggagatggtgaagtagggatggtaaaaattgacaaggacagaaatgctggtgtcagcagtgctttcggcttagaagatgaggctgaggaggacaagcgggaatagccatttcttgttcctgatgtcccctaggtcccagaaacaatcgatattttggagcagcaatattgcaagaatacttctttttcaagttacatgtggttgctgtagaagtgcttggtattgtaaacatgcgaactctatttaaaagaaaaggattaggaattctaatccaaaggcaaaaactaacgtgcaattaagctttacatacaaccgtgctgcaattaaactatcaaaagtcatgttttt

SEQ ID NO: 4329 - DNA, 2209 bp, Zea Mays
tctccctctaggatcaagcggccttactggcccatttaaccaaggaatcatgcagccataattgatgtgcaccattgccaatcccgttgatgttttgcatggagctattcacgaggcgtcaacaatgaaccattattgatttgtccactgttatgttcgttgctggtgcaatcatgggatacattatgttcactgaatctacactcccagttcacactgaacttacccctaaatcttgtggcttccaagattgcagtctagactacggtgatgaatccaataaccaaatatccttggacttttattgtagctttttgtgtgcatttgttccgatacttaacaattaacattatatgacaccatagtttctctaatcacatgtaactccatctagccatctaggtttgtcctaagtcaaacatatcttttaattttgattagaaatatctataaaaaataattgtcttaaataagcagagttatttggttttagtaatgaatttagcaatgccaatgctatttttatcgttctatataaattttagatattcatggtcaaacttaaaaatgtttgacttggacaaatatagatagacctacacatgcattgtgattttaggaagtcctacaattctcctccccaaagtctgctatcaacttctaacagttagtccagttttcatgaacaaatttagttttaatcattctatgttgtgccaaccgccagcaactaataatcagagctgggtcatatcatcatatcatagtagattgtatagctttcttccctgtgcatgcttactggttactagatgaaaaaggtcgtgttacgttatggcgcactcctctcctttgaataggacatgctttcacactctcaattcggcatatccttctagagactagctcacactccaatggtcttctaaatgaatagcacactatagtcaagagtatgacttaccaaattcattattggttccaagcatcttgaaagagaagtccatcgtctctcttactgtcatctcagcatggctaacagaagcacgcagcgacaagattaccccacatgttgtatcatggtttactagctagagaggctactcaagatgaggaatttgaagttatgtatggtgaggacgatgatgaagacaaagatgacgaggatgatgatgattatgatacaaagaccaagggggctactggagggggaagggcagcagcgaacgacctgttgagtgcaagcaggagtgagtgctgcacattgaatattggcatgcattggttgtggagcaattagtctggttctacttgatgcaaggtcattgagttattgaagtgatattttgtcgaatattttatatgccattgcaaagcacgggcatctaactagtctttcttatatatgtacactacaatacataatcatttatgccattgtttactacaaatatatatattaggcaactcttgaactggttgcaaggaatatttccactaaatctgcagttgctgaacctccccatgtatcacgtgaagaatgtgctcgccaattatttaagttcatttgttcccaacaactagacccgagcatgtatgcattcattattccaccttcaattaagtatcattggttatttgaatttcaagttgcaattttttttaggtccatcattgattttggaggatatggtggttctgtcttggatgttgtccaatcttttgggcctaataaatgccaagaacttttcatgcagggattcattgactgtattcgtgatgatgatatattatacaatccagataccatgatcaacacactcatactaaatgtcaatgttggtgtcggagaggaaattctccggccgggtggcggaatgcacccgccctaaatcctaagatgaggaggggcctaagtgttttgcctgtgagatggattcgggaagaacacaaaagcacacaagaatttagagtggttcgggccgtcggagcgtaatatcctactccactgtgtgttgtattgctcgagagcttgtatgaacttgtgagtctcagagtctaagtgagtgtgtcttgtaacgtcgtgtgcctccccttttatagctcaagcggggcacgcacaagggtactgagccccgacatgtgggctcaggaacataacggatgtaatacttggagcaactaatgctagtcgccagtgcaatcttcc

SEQ ID NO: 4330 - DNA, 3344 bp, Zea Mays
gaatattagctataacctatgtttgattgtgtatatttgtatacttttattgtgtttcaggaaggacaaaatcatgttgtacaggatcctcccacatatggtgcaccaaagtttgatagaacccccagttagtcatgtcgtgacatgttcttatctctactactaattatgtgcctatcgtaggcgttcacaattccttggttctgtcgtcgcgctcgcctgccatctccctccgcgctccatccgccaccatccgcgctcgcctcccttcgcgcatcctacaaccgcgtgctccttccttcgatggtgcggatcccccgtgactaccatctccctccgccctcccgcgctccatccgccaccatccgcgcttcctacagccgcgcgctccttcgacggcgcggatcccgcaccctcgaatcacgccagcagatcccacaatcaagcagcggcgacaggaataggggcgggctacgcgggcgctactacgacgagggtgagggcgagcgctccggcgccgcggcgccattcatcataatcggtcgagctcctggagggaacggctgcagagcggacgagatcgaggagcgggcgggcgggtgccgcccgtgacggcgcctaggctcaggctccgcgacggccgccacctcgccgcgcaaaggtctcaccggctcccgagaggacagcgcccgcgcctcccaggcctgttgatattctaaggaaattgtttgatgggaacaccttgagatcacaaatcaaagaattctttaatcgctttggtgctggagaggctgctgcaatgtgcttaatgatagctgcgaagctactttatgttgaagatagtctgataagcaattctgtttctgagaaagccactgaggcatttgaggaccctgggcttgttgggatgcctcaaattgttggtaccactgctttatctaatacacgaacttaggctggaggctttactatgggccaagttgttcaagaagcataacctttgttttctggtgcatatgaagggctttgtttgtgctcgtcaagactactttatctcatatgggagtttcctattatagtgattcgaagaccggctggtactaataaatgcaaggatggtgtaattgtttgtaggctttcagctggggccatgaaaattcttgagagcaagattcattcactggaaacatttttaagatctagaagaaataagagaaggggccacgcagtaccattgacacttaccctcaaggcctacagttgttgtaattgaagcgggtcaagacatagcatttgcaaagatttagttcattctgatcactctgcaatatttcggtagtcgatggatggagaatggtggatcgaggagaccgatgacatactgctgcatcccgtgctgctcaatgggaagcagtaccggccagtctggtcaaacgacggcaccgtgatccacgcagatttctagttaagtttcttctgatggtgatggtactaaagaggactatgttcatatccgggcaaagcgaggccaagccactaacagccaaagccttgcagaaagactagggagaaagaagataagtgagaggatgaagcttcttcaagatcttgttcctgaatgcagtaagatcattggcaaggcaatcatgctcgatgagattatcaactatgtgcagtcattgcaacgacaagtcgagatcatatccaaacaagtaaagccacccactcgatcaccatatctccctctaggatcaagcggccttactggcccatttaaccaaggaatcatgcagccataattgatgtgcaccattgccaatcccgttgatgttttgcatggagctattcacgaggcgtcaacaatgaaccattattgatttgtccactgttatgttcgttgctggtgcaatcatgggatacattatgttcactgaatctacactcccagttcacactgaacttacccctaaatcttgtggcttccaagattgcagtctagactacggtgatgaatccaataaccaaatatccttggacttttattgtagctttttgtgtgcatttgttccgatacttaacaattaacattatatgacaccatagtttctctaatcacatgtaactccatctagccatctaggtttgtcctaagtcaaacatatcttttaattttgattagaaatatctataaaaaataattgtcttaaataagcagagttatttggttttagtaatgaatttagcaatgccaatgctatttttatcgttctatataaattttagatattcatggtcaaacttaaaaatgtttgacttggacaaatatagatagacctacacatgcattgtgattttaggaagtcctacaattctcctccccaaagtctgctatcaacttctaacagttagtccagttttcatgaacaaatttagttttaatcattctatgttgtgccaaccgccagcaactaataatcagagctgggtcatatcatcatatcatagtagattgtatagctttcttccctgtgcatgcttactggttactagatgaaaaaggtcgtgttacgttatggcgcactcctctcctttgaataggacatgctttcacactctcaattcggcatatccttctagagactagctcacactccaatggtcttctaaatgaatagcacactatagtcaagagtatgacttaccaaattcattattggttccaagcatcttgaaagagaagtccatcgtctctcttactgtcatctcagcatggctaacagaagcacgcagtaggagtttctccaccttcctttcatcatgctacttcttgctgagggtggcgtgaaaaagtcagcaacaagttcctctatggtggcgacagagaagacaagggaggctctggcgacattgtggcgacgacgagaagcgagcaaggatataaatcgatctgtttctttggaaattagctgtagtagaatatttacgtgatacaaatctctattctctatatctctatatctattacgtttctcatgtctctatttttattataatggtttggaaaaatgtcgctcatcttctgctctaatctttcgaaattaggtgtagtggaatattattgccagatattgctacactacaatagtgaaattattgtccaaaattgaagattgccgtatgccttaggtcactataaaatcgagttattttataataatagttttttgttttacataagccccactcttttatctaaaagcccataaattattgtccaaaatggaagattaagagtttgtttattacttctaaattatcctttctatatctaccatatgtaccat

SEQ ID NO: 4331 - DNA, 1661 bp, Zea Mays
ttagtcgccgccaggaatccagcccacccggctctgcgctccgctcccacagacggacagcttgggctcgacggatgaacatgtgtgagaaagatcagaatttgccatggggatacgacctgttccgcgacccttttgctcctcccaacgggtactacgggcctcctcccggttactgtgatggccactgttgtgacctccatcattacgcatcacatccagatgagactcagttgcattcttctcaactcgcatatgatatgtacaacccatcagtaggcatctaccatcctggaagcacccatgagcacgagcacgagcacgagacagtatatgtagaaccgtctagttcctctccagacacaggtggtgacggttgttttgagatggaggaggaagtagggaagaggttttaccccatggtcccagttccccatgtccccaaaattaatggagaaatcccatcaattgatgaagccactatggaccatgaaaggctgacagaaaggttgaggctgtatgagctggttgaaaacaaggtgaaaggagatggcaactgtcagttccgagcactatcagatcagctttaccaaagtccggatcaccatgaatttgtgaggtcgcagataattaaccagcttaaaactaaccgtgacgcctatgatggatacgttcccatggcatatgatgattacttggagaaagttgcacggaacggtgaatggggtgaccatgtgacgctgcaggctgctgctgacaagtatggagtaaaaatcttcgtgatgacatcgttcaaggatacttgctacatcgagatcctgcctaaggttcagaagtccaacaaagtgatactgttgagcttctgggcggaggtgcactacaactccatacatccgcagaacgatgctccgaggtcgcagacgaccaagaggagaagatggtggccgttctcgcagcaccaccaccattgatggcgggttcagctctcttggggctggatggatgttcaggatcaggtggtggtcccggtcccggccatcgtccagatgatactacaagggacgtacgacattatgattaatatatatatacccagagcggagcagaaagacctgataagggaattagttgggatgaatgaaatggaataaacatgggatgggatgggaatcgtcgtcccgtatatagtttagagtggaggccggtgagcgccaactcaaactctttgtattgttgtttatatctacaaattttgccggaacgaggctagaattattggggaacaattatggtaataataaatcggttaagaattgagatgacccagctgttggcagagctcggatcatcatatgaccagaatcagaatggattccccagtgcatctagttttcctctggaagaacagaacaacataaaagaaaaacgttgaacactgaagtgggaagctgtaaccagaaatcttagatttgagcccaactgctctttttggaaggcaatatctagtttttggcccatgagtccaggacattttcagagggcccatgagtcatttcacaggtgaacaaccattgtagccattatacatacagagtaggctggtgtcttattttcgggttcaattgtaaatgattagtcaatgccatacagtcatttttggc

SEQ ID NO: 4332 - DNA, 1703 bp, Zea Mays
cgagcttgatgaatcgaatcgctgatctctgttagcgctccgctcccacagacggacagcttgggctcgacggatgaacatgtgtgagaaagatcagaatttgccatggggatacgacctgttccgcgacccttttgctcctcccaacgggtactacgggcctcctcccggttactgtgatggccactgttgtgacctccatcattacgcatcacatccagatgagactcagttgcattcttctcaactcgcatatgatatgtacaacccatcagtaggcatctaccatcctggaagcacccatgagcacgagcacgagcacgagacagtatatgtagaaccgtctagttcctctccagacacaggtggtgacggttgttttgagatggaggaggaagtagggaagaggttttaccccatggtcccagttccccatgtccccaaaattaatggagaaatcccatcaattgatgaagccactatggaccatgaaaggctgacagaaaggttgaggctgtatgagctggttgaaaacaaggtgaaaggagatggcaactgtcagttccgagcactatcagatcagctttaccaaagtccggatcaccatgaatttgtgaggtcgcagataattaaccagcttaaaactaaccgtgacgcctatgatggatacgttcccatggcatatgatgattacttggagaaagttgcacggaacggtgaatggggtgaccatgtgacgctgcaggctgctgctgacaagtatggagtaaaaatcttcgtgatgacatcgttcaaggatacttgctacatcgagatcctgcctaaggttcagaagtccaacaaagtgatactgttgagcttctgggcggaggtgcactacaactccatacatccgcagaacggtgagtaggcgtgccgttggcatgccgggccttcaccgccaacatgctccgaggtcgcagacgaccaagaggagaagatggtggccgttctcgcagcaccaccaccattgatggcgggttcagctctcttggggctggatggatgttcaggatcaggtggtggtcccggtcccggccatcgtccagatgatactacaagggacgtacgacattatgattaatatatatatacccagagcggagcagaaagacctgataagggaattagttgggatgaatgaaatggaataaacatgggatgggatgggaatcgtcgtcccgtatatagtttagagtggaggccggtgagcgccaactcaaactctttgtattgttgtttatatctacaaattttgccggaacgaggctagaattattggggaacaattatggtaataataaatcggttaagaattgagatgacccagctgttggcagagctcggatcatcatatgaccagaatcagaatggattccccagtgcatctagttttcctctggaagaacagaacaacataaaagaaaaacgttgaacactgaagtgggaagctgtaaccagaaatcttagatttgagcccaactgctctttttggaaggcaatatctagtttttggcccatgagtccaggacattttcagagggcccatgagtcatttcacaggtgaacaaccattgtagccattatacatacagagtaggctggtgtcttattttcgggttcaattgtaaatgattagtcaatgccatacagtcatttttggc

SEQ ID NO: 4333 - DNA, 2075 bp, Zea Mays
gcggaggactctgggatggggtgcgggggccgaggggccacgcgggcgcgcagaggcggggggcacgcgggggcaagcggaaccgtggtgaagcagtgtggacacctacgctatagccttctagagcagtagagattgacaccacgggcacgcacgtcagcgcctccaccttcctccccagccgcaagcagagcaagaaccggagctggggatcgattccgcgccgcctgatctgcgatcgggactcgatcgtgcataatccgaggttcttcctctctgtcgtctccgatccagacgggtgtgcctggtctgcatcttcatcctctgcaagaaatcacacatctcgtggcgcaccttgcatcagccgcggccggcacctctactctcgcccgccccctatgtcgtaagcgcgcaatcagaactcccgatcacccgcacgctggtgcgccagtgtcgtcttcgccaccatgaactccatcgagcccttcaacaggctggtgaagctggcggcccgcgccttctacgatgacgtctcaatgaagggcgacaaccagcccaagacctcccgcggggacaaccgcggcatggccgtcgtcgtcctggacgcgctcaccagacgaccgtgggtccgagaggaagatttggctaaagcattgaagctccactcgaaacagctgcgtcgcattctccgtttctttgaagaggagaaactagtcacaagggatcatcggaaggagtcagcaaaaaatgccaaagcacataatgctgcagctgctaatgacggtcaaacagttgctaaggagggagaagagaaagtaaagatgcacacacattcatactgttgcttggattatgctcagatatgtgatgttgtcaggtatcggattcaccgcatgaaaaaaaaattgaaggatgaattggacagcagaaatacaattcaacactatatatgtcctagctgtaataaaagatactcagcctttgatgcactacaactggtaagctacacggatgagtacttccattgtgaaacttgcaatggtgaactggttgctgaggatgacaagcttgcttctgaggaaatgggagatggcgatgacaatgttagaaagcgcaggcgtgagaaattaaaggacatgcagcaaagaattgaagttgaagttgatatattgagtgatggtgaaaaagaaggtgctgaatcaggtaaagatggttctgaactcaaagtcatacctccatggatgatcaaagatggcatgaatcttacaaaggaacaaagaggagagaaaattgagtcacaaaaacttgaaaaatctgaagccaaagatgataagaaacaggacttgaaagatgatcaaagtgtacaggaagaatacataaaggcctattatgaggccttgaggaaaaagcaggaagaggaagaagcaaaaaacagaatgcagcaggaaggcaagatttctgtccctgattctcaaactgaacgccaagtgggcaagaaatacaagcgggacgacgatgatgatgaagacattgaatgggaagagcatcaacctacagctgcagggaatgcaaccgaaacatacaaattggcagatttgaatgcggaggcccaagaatctggcgatgatgaagatgataatgtgtgggaagagggctaatgctaaaaagataacagactattcctgtgcggctgcgcccttaggattttggtatcccaccagaggtcgagagtatttcactaatgagcttagttatgttgaacgcatgatcccgagaaacttgtcaagtgaaaagccagcccctatgcatttttagttgaagatgtacaaattatacttaaatactttatgagccggtcagcagtttcccctgttacttcgaagagctgttgtagtcttgtagactgttaatgtgtgggcaacttgcatgcctttgtttcgctgaaaggaattacacgtacatgcacgtttatgtcctgaaagtgaaaatgcaatcgttgtagttgccattcatcgatgcccacattcgacatgtatttgatagttatctagtaatccaagtttctgagttgtcgc

SEQ ID NO: 4334 - DNA, 1706 bp, Zea Mays
cgtgtcatgaccccatcaccctgcatctgcagctccagatctctgcatagctagcagcactgctcggctgctccataactggtggagagaaggtaccggaggtaccgggagcagatgagggccgtggcggggtccttcgaggcggtggccggggagcgggcggcggcggcgtacacgaggctggcgcagcggacgatatccaggcacttccggagcgtgagggacggagtggcggcgcagatgcaggcggtgcgccgggcgctcggcgagaaggacgcggacgacggcggcgtcgtcccggcggcggccgggatgatggccaacaagggggagaccacgcccaggctgcgggtcatcgaccagtgcctgcggcagcaccgggcgtaccagaccggcgtcgtcctcgagagccagccgtggagaccgcagcgcggcctgccggagcgcgccgtctccatcctccgggcgtggatgttcgagcacttcttgcacccgtatccaagcgacgtggacaagcacatcctggcgcgccagaccggcctgtcacgcagccaagtctccaactggttcatcaacgcgagggttaggctgtggaagccgatggtggaggagatgtactcggaggagatgaaggaccccaaggagggcgcctgcagtaacgcgaacagcagcgtgaacactggcgccggctacgcctccgaggagctagggcagccgctggggcacgggggcgcctgtggtggcgtggacgagcagaagccgacgcgggcgcagctggtccacgacgccgggtcgctagcatcagccgtcagcatcggcagcagcagggaccagcagcagatcagcagcatcaacttccgcatgatggaccacctcgacttcgacgcgtacagcggcgaccccgccgcggccggcgggccagcagctgggttcggtggtgctggtgcttccggcggcgtgtcgctcacgctcgggctgcagcagcacgccgacggcgacccccacggcggcgtcaacatcgcgttcgccgcggctccgtcggccgcgcacgagttcctgttcatggcaggcggcggcgagcatcggatggtcgcggctggcgccgtgcacccgtcgtcgtcccacggccacggtcagttcgccgccagcatgcaaggcgacagcgccggtgtggcctcctcgcactaccaccggggcctcggcgccgccactgggttccagctcctccatgacctggccggctgatcgcattagcatggcaagggacggaccctgatgactaggccgatcgagcgctttaattggctttggaggttcacgcgcggccggttgacggggatgtgccaacggcagcagctagccggatggcattggcatgagcgcatggcgctcgcgcagcttgcgcgcttcggatttttgtagggtttagattcctctcgcttcaattcttggcacggtgtctctgtctacatgtgtatctgtatcgcttcggagaatgccattatctgccatggacatggacgtctcttgctccgcgcgaacactagcatctaagaatttttataaaatttactccctaaatcatcatataaaaagtcatatgagtaaaaattattttctatatatttatatccttcaacagtttttttaatattttgtatgtatattctagatatttatcctcaaaaatctgaagtaaagaatca

SEQ ID NO: 4335 - DNA, 1102 bp, Zea Mays
ggaggtgttttgttcgtgccttcacgggataatgggacattgggtcctggaattgatggctgggaagtatctttgaaaggaatgatgagcatagtggtactccttggacttgtcataacttccatctattggggagtgaacaagtttgttttgaatgatccttcacttccaaaggctgatcgtaagaagaaaaaggaaaagcctaaacttggcatgaaagagagtctgaaggttctgctctcctcgaggtatgtgagggatctagctaccctagtggttgcttatggcattagtatcaatcttgtcgaagtcacgtggaaatcaaaactcaaggcacagttccctagtccaaatgaatattcatctttcatgggtgatttctcgactgcaactggaattgcaactttcacaatgatgctgttaggccgtattatactacggaaatttggctggggtgtggctgcaaagatcacccccaccgttctgttgctgactggtgttggattcttctctctgattttgtttggacagccactgactcctatgcttgccactatgggtatgacccccctactggcagccgtttatgtgggtgccatgcagaacatatttagcaagagtgcaaagtacagtttatttgacccatgcaaggaaatggcatatatccctttggatgaagatatgaaggtaaaaggaaaggcagccattgatgttgtctgcaacccactgggcaagtcgggcggcgcacttatccaacagttcatgatcctgacgttcggatccctggcaaattcgactccataccttgggggcatactcctggtcatcgttctcgcgtggctaggcgcggcgagctcattggacaagcagttctcgagcctggctaagcaagacatggagagggagaaggctgcccaagaccaagggaaactagaacgctcgctactcacgtgcggcttcaagcctgcccgtaatcttcctttgtaataataacatgagcaaaatcttgacagccggcagcgaatgtcgctctggagatggcaaatgtgtgttttgaactgaatggtaaatgtgcggttatctcttgaatagtatcttggct

SEQ ID NO: 4336 - DNA, 2215 bp, Zea Mays
ctctgctttccccccatttcgcgtctcggggtttggaccagccacccggcggaggcggccgggcagactgggccgagcgaccggagcgccgccgccatcggcaaagccacgggacggcccatggagtcgcgagcgctcctgcacgcccggcccgccgccctccctcaccgcgccggcctgcgcctccatctcccgctcctgcgcccgcgtgcagtctcccgctcccccgccgccaagcccgcgctccagtccccgctcctcgcgtcgaggggccccttccttcaacggcacgatgcggttctgggcaacgggttcgtgaaacggagagcggccagcgctggcggtgatgtgtccttccgcgcccaggcggcggcctcggcggcggtgccggcgccgcagccggaggagtccacaaaaaagctccttggcatcgacgtgaagacgctcaagaagatcgtgccgttggggctcatgttcttctgcatcctcttcaactacaccatcctgcgggacaccaaggacgtgctggtggtcactgccaaggggagcagcgccgagatcatccctttcctcaagacctgggttaacctgcccatggccatcggtttcatgctcctgtacaccaagctttccaacgttctctcacgggatgcgctcttctacaccgtcatcttcccgttcatcgccttcttcggcgccttcgcctttgtgctctacccgctcagggacgtcatccatcccaccgcgctcgcggacaagcttctcgccgcgctcggtccgagcttccttggtccggtggcgatactgaggatttggagcttctgcttgttctatgttatggctgagctctggggcagcgtcgtcatctctgtgctcttctgggggttcgctaatcagattaccacagttgatgaagcaaaggaattctacccgttatttggccttggggctaatattgctcttatcttttctgggcgtactgtgaagtatttctcaaatttgcgcaggacattgggtcctggaattgatggctgggaagtatctttgaaaggaatgatgagcatagtggtactccttggacttgtcataacttccatctattggggagtgaacaagtttgttttgaatgatccttcacttccaaaggctgatcgtaagaagaaaaaggaaaagcctaaacttggcatgaaagagagtctgaaggttctgctctcctcgagttccctagtccaaatgaatattcatctttcatgggtgatttctcgactgcaactggaattgcaactttcacaatgatgctgttaggccgtattatactacggaaatttggctggggtgtggctgcaaagatcacccccaccgttctgttgctgactggtgttggattcttctctctgattttgtttggacagccactgactcctatgcttgccactatgggtatgacccccctactggcagccgtttatgtgggtgccatgcagaacatatttagcaagagtgcaaagtacagtttatttgacccatgcaaggaaatggcatatatccctttggatgaagatatgaaggtaaaaggaaaggcagccattgatgttgtctgcaacccactgggcaagtcgggcggcgcacttatccaacagttcatgatcctgacgttcggatccctggcaaattcgactccataccttgggggcatactcctggtcatcgttctcgcgtggctaggcgcggcgagctcattggacaagcagttctcgagcctggctaagcaagacatggagagggagaaggctgcccaagaccaagggaaactagaacgctcgctactcagtaagcctgcagaaggcggcactggtgatgtactggtggagcagcagacaaatgggtcggcgacgagcaaagctactggaacagagagctcgccatcgaactcatccctccctccccccccccccccccccccccccccccccaattcaatagatcgtagttaggagagtgattacagcgagcagaaatagtcggcatttaaaataattcgtggctttcgagtttgtaacagcgtgcggcttcaagcctgcccgtaatcttcctttgtaataataacatgagcaaaatcttgacagccggcagcgaatgtcgctctggagatggcaaatgtgtgttttgaactgaatggtaaatgtgcggttatctcttgaatagtatcttggct

SEQ ID NO: 4337 - DNA, 1670 bp, Zea Mays
ctggaggcttcctgcgtcgcgtggaggcagacagagctcagggagggagggaggggaagaacgaagcagcagcaacagcgccatccgctcgcttccttccccttctctccctcctcccccaccgccggcgtcgcctctacgcgcgcgcgccccgccgggggctgccgtcgctgcacccgtggcccgtgggcggcggccgcgtacctgtacctacgtgctgccgggggggggggggggggggggagctacgcgtctcctctcgccatggacgccggtgtagagaagtgcggcgacgcggcggcggagggcggcggcgacctctacgctgtcctcgggctcaagaaggagtgctccgacgccgacctcaaggtcgcttaccggaagctcgccaagaaatggcacccggacaaatgctcctcctcctccatcagcgtgaagcacatggaggaagccaaggagaagttccaagagatccagggcgcctattcggtactctccgacgccaataaacggctcctctacgatgtgggagtatatgatgacgaggacgacgaggatagcatgcaggggatgggggacttcattggtgagatgacccagatgatgagccaggtgcggccgatgggcaggaaagctttgaggagctgcagcagctttttgtcgacatgttccagtctgatattgattcaggattctgcaatgggactgctaagggccatcaggttcaggggcaagccaaaagtagaacatgctcaccacggtcccctcctactactatagtaaaggaggcagaggtgtcatcatgtaatggcttcaataagcggggttcatcagcaatggactcaggaaagcctccaaggcctgttgaatgtggtgcaggtcagagccaggctggattttgttttggggtgagcgacacgccaaagccgcgaggtccgaacgccaaccggaagaggaacggccggaaacagaagctgttccccaagcactacgttacatccgaagatgatacggccggttcctagcatcagcagcacggtagcagtttgaccgttggctttggtgatgtcagcagtagggagggcacatcatgtcgcctctgccagctgctgtgatctgaagaggcgtttagctcatcatatgcctttagtcttttgagaggtctttagggttgaaaggtacttcgaaaaccgaaccagcgtctacaggcctaagagggatttccattgaaactcgtcgatgatactacagttttctttccccatctgtgccggttgtgttgtactaccactaccagtgacagtgagtgacttctaagctattcatttttttaactggagaagttgataccatgataattaaaaaaaattgggtgtgtattgaactattaccaagaaaatagtacttggattgtgatgttctgaacattatgttttgtaggcaatcgtgacttgaaagcggtcgaggtatatcttgttattttgtttccctccgatttttcaatatccgattgattttgttttgaagcaaatagagagcatgtccgtgagaatagtcatgaagcaaatagagaacatgtccgtgagaattgtcggttaatataatttttagtttttaatttgtacatgccactcttgagaaagatctctctcaagcttgtccatgtgcgt

SEQ ID NO: 4338 - DNA, 1737 bp, Zea Mays
ctggaggcttcctgcgtcgcgtggaggcagacagagctcagggagggagggaggggaagaacgaagcagcagcaacagcgccatccgctcgcttccttccccttctctccctcctcccccaccgccggcgtcgcctctacgcgcgcgcgccccgccgggggctgccgtcgctgcacccgtggcccgtgggcggcggccgcgtacctgtacctacgtgctgccgggggggggggggggggggggagctacgcgtctcctctcgccatggacgccggtgtagagaagtgcggcgacgcggcggcggagggcggcggcgacctctacgctgtcctcgggctcaagaaggagtgctccgacgccgacctcaaggtcgcttaccggaagctcgccaagaaatggcacccggacaaatgctcctcctcctccatcagcgtgaagcacatggaggaagccaaggagaagttccaagagatccagggcgcctattcggtactctccgacgccaataaacggctcctctacgatgtgggagtatatgatgacgaggacgacgaggatagcatgcaggggatgggggacttcattggtgagatgacccagatgatgagccaggcttaaaaaagacggaattgttatgaaagctccttatcctccatggttttttgtggatactaaaagctgaacttttagaggcaggaaagctttgaggagctgcagcagctttttgtcgacatgttccagtctgatattgattcaggattctgcaatgggactgctaagggccatcaggttcaggggcaagccaaaagtagaacatgctcaccacggtcccctcctactactatagtaaaggaggcagaggtgtcatcatgtaatggcttcaataagcggggttcatcagcaatggactcaggaaagcctccaaggcctgttgaatgtggtgcaggtcagagccaggctggattttgttttggggtgagcgacacgccaaagccgcgaggtccgaacgccaaccggaagaggaacggccggaaacagaagctgttccccaagcactacgttacatccgaagatgatacggccggttcctagcatcagcagcacggtagcagtttgaccgttggctttggtgatgtcagcagtagggagggcacatcatgtcgcctctgccagctgctgtgatctgaagaggcgtttagctcatcatatgcctttagtcttttgagaggtctttagggttgaaaggtacttcgaaaaccgaaccagcgtctacaggcctaagagggatttccattgaaactcgtcgatgatactacagttttctttccccatctgtgccggttgtgttgtactaccactaccagtgacagtgagtgacttctaagctattcatttttttaactggagaagttgataccatgataattaaaaaaaattgggtgtgtattgaactattaccaagaaaatagtacttggattgtgatgttctgaacattatgttttgtaggcaatcgtgacttgaaagcggtcgaggtatatcttgttattttgtttccctccgatttttcaatatccgattgattttgttttgaagcaaatagagagcatgtccgtgagaatagtcatgaagcaaatagagaacatgtccgtgagaattgtcggttaatataatttttagtttttaatttgtacatgccactcttgagaaagatctctctcaagcttgtccatgtgcgt

SEQ ID NO: 4339 - DNA, 2450 bp, Zea Mays
agacaagcagtgcacccacagcttcctggctgcttcgtccatctcgcccaatcgccctcccctactactcgctccccaccaccctacctctgacgcttcccccacccagtgccgccactcccagccttgactcgtccgctgggccgaacaccgccctcgagctcttcgctgtgccccctccaggctcctcttccccgcacggcggcgccgtcctggtggttacgcggggcgccggtcgggcgcgatcggccgtgcgggcacctgggctccggagagacattgtaaaatggaagtactgcgtgatatgcacctgccaccaggatttggattccatccttctgatatagaacttgtttctcactatctcaagaggaaaatacttggtcagaaaattgaatatgatcttataccagaggtggatatatacaagcatgaaccatgggatttacctgcaaagtgcaatcttccaatcaaggacaacaagtggcatttctttgcctctcgtgacaggaagtaccctactggctctaggtcaaacagagcaacactagctggttactggaaatcaactgggaaggaccgagccataaagctgaacaagctaactctaggaacaaaaaagacgttagtttttcatgaaggccgaccaccctctggcagacgcactgagtggattatgcatgagtactacatcgacgagaatggatgtaaagtcagccctgatatgaagtcgccactagctcgtacagatgttgggactggactgaaactccgagaacaccgtggatgggagcttattggtgaagatcggcagcgacggatccaggaatggactaaaggggggctgatttcatagtgaccattagtggaggcagcacaagctggatgcctttgtcctctgccgtgttactaaaagaaatgactggtcattagataatgataatgaggtgggcaacaggagctctcatctggaacaaccagatgctgctacatcagttgtcagcactgtaaagccagaagatgttgctgcctcagtcatctgtccagaagaatcgaaccatgcaactacaccaattggcagtgctgaactatctaatgatgttgctcaggcagctatcactcctgcagctatcactcctgattcaacaactccaaatggtggtaatgaactggaaacatggctgcaagaactgttggatccttcacctccatttaaccttgtagctgatactggttctgctgacgtgtgtccgactgaacaatatgctgaatcatcaaatttgcagaatcctggttccatggctccgaatatcagaccaggccatgctagccctatccaggatggaacagatgccacagactacctattcacagatgatcttcccgaggatctttacagtatgttgtatcctggtactgaccagttcaatgatagcatatttttggaacaaactggccaggaaggtaataacaatcagacaaactacatgatggggattggttcatatgttcttccaaacaactttgagaatgaaactccgaatgccgaattgcagttagatcatgaaaataacaagatggatatgtcaaatgaaaataatgacaccggaattacaatacgaaggcgcagagcaactgcgcctcccgctaacatttcactagcagctggcaagattaaaatgcaggttggaattaagaggatggttacgagtaattcagaatctatcaaccagactatgaagtttacagataacagtggtcgtcgtcttgatctcaggactgatgttgagcaccagaagaaaaatgcaaacaatgtcatttctgccaagcagtctgatgcagccaatcatgaagcccacagcaaccaaggttatctcgagggcttcaaaagatgttcatcagctggattcagggcatacatatttgttgccctttttgtggttggagttgctgctctagtgctgcattatcaccgctccaatgccaacctatgaatttgaatcatggaacatcagcatgcttgattgtagctctagtggtcagtggcagcattggcttcgtccttggagtagttcgctagctttgcttgcattggaaatggaatagaaatcgagttcctcagcttatctcactgggattactggaaatacatttttgcgaccactgattcccagttatctccactttttttttgtggtgctgtacatattaattttttttctctcttcttttgatcgtctagttgctaccaacgggtgcctatcgaaaatcgaaaaagaaaaaaagtgggaaaagggttggtcgtatgaacaaaaaagatgtagcttcagactgttactactatccttagctttgtaaatctgaaccatgtttgtacagtacactacatagtggagcggccactgcattgtctgcattctcttttattatagcatctttttgaacaagtg

SEQ ID NO: 4340 - DNA, 3215 bp, Zea Mays
aattccaattttctcctacctaccactgccggactgcggaatccggaggtatatccgcaaaacccaaggagaacccccacccgcttggctcgccatggacctgcagctcgcgccaccaccccacgctaacctccgcctcctcccccgccgccccaaggccgcctccgcctccgcctccacctccgctgtcaccgccgcgccctccacctcctgctcctcttccgcggagcccctcaagccccgcccacgcctcccgcgccagagccccgcgcccaggcccaggcccaaccccgctcgcctccccgccctctgcgctgccatcgagcggcacgcggcggctggccgccacgctgaggccctcgacctgttccgcctcgcccgcgcggcggctcccttcacgcccctcccggcccgcacctaccacgccctgctccgcgccgctgccgcgctgcgggagcccggcgcggccgcggcggtggcctggcacgtcgagagctccggcttcgagctcgacctgtacacgcacaaccacgtcctgaggatgtacctcgagtgcgggatgctcgccgaggcgcgccaggcgttcgacgggatgcccgaccggaacggcgtcacgtgggggatcatgatgggcggcctcgtcgaccggggccgcccccgggccgcactggcgctgttccgggagatgtgggcggaggccggtggggacgctccgccgaggtccctcgtggtggctgtccgtgcggctgcgtcctcggggtcggcgcgagccgggcggcagctgcactgctgtgttgtcaaggcgggggcgtgtggtgacgtcgctgaccggtacctgacgtgcgcgctgctcgacatgtacagcaagtgtggccggattgacgaggcgaggcgggtgtttgacgggctgccacgtcctcatcggacgactgtcgtggcatggaactccatgttggcggcgtatgttctccatggccacagcgaggaggcgctggagctgtaccaaaagatgtgcagcactcatgtcgccatggaccagttcacgttctcgaccatgctaggggtgttctctaggctggggctgctggagcacgcgaagcaggcgcacgctggcttgatccagagaggattgccactggacattgttgggaacacggcgcttgtggacctgtactgcaaatggggaagaatggaggacgcgagaaatgtcttcgagaggatgcctaggaggaacttgatctcatggaacgctctgatagctggatacggctaccatggcatgggagataaggcgatcgagatgttcgagaggctgatagctgagggtgctgtgccaaaccatgtaacttttctggcagtgctgaatgcatgtaggttttcaggtcttgttgacgaagggaagaggattttccagttgatgactgaaaatctgaggataaaaccacgggccatgcattatgcatgtgttattgagctttttggtagagaaggtctacttgatgaatcctattcaatgataagaagagcaccgttcactccaactgcaaacatgtggggagccttgcttactgctagcaggatccacaagagcatgcatcttgcaaaattttctgccgagcagctattggcaatggaacctgagaaaataaacagctatgttgtgctcctcaacttgtatgttagctctggtagacaggacagcgcctgcaaggtagttgaaacactgaagaggaaaggtttatatattggtaatgcctgtagctggatcacagtcaagaaaacggatcacaggtttttctttaaagatactttgcatccacaaagtgctgaaatatacaggaggctggacacattaatgaaggaggtacgagaagctggctttgttgctgaggagaatgaattgctccctgatattcatcctgacgagcaaaagatatcaagagcttaccacagtgagagactggcaattgcttttggccttatcagcacagccccacagactcccttgaggatcagtcaaagccatcgtttgtgcagtgactgccacaatttaattaagtttgtgtcaagagttaccaagagggaaatcattgttagggatggtagcaggttccaccactttaaactcggggtctgctcttgtggtgactactggtaattggctaatgactccaatgtttcaagccaattatctggaaattactttgattaatgaggataaagcagattggtcgaccatgatgctccaatgtttcagtgctacatgcaggcttggtcgcagctcacaacaccatttgtaagcaggtgatcttccattcagcaaccttctcagctggtacaagtccgagagcacgctacaatggcgaggatgggagttgctattctggtctgcgtagtggttttagccctggacgtcacagctggcatactaggaattgaggcgcaggctgctcagaacaagactaagaaggtgacgatcctcttcatccagtgcgagaaaccagtgtacagagcgtaccagcttggcctcgcagctgcagtgctcctggtagttgcccacgcggtagccaacttcctcggcggctgtgcctgcatctgctcccagctggagttcatcaaggcgtccatcaacaggaagctggcagccaccaccataattctctcatggatcgccctgattgccggattctcgctgctgctcgccggcgccatgtccaactccaagtccaagacgtcgtgcgggttcactcacggacacaccttggccctcggagggatcatgtgcttcgtccacggcgggatcaccgtcgcctactatgtcaccgccactgccgcagcgcacgaggttccttagtcgagcattttgcccgagagatcaccgctgttctttccttggtccagctgctccttgcttttctccttgtgatttgacatctacaagcatccgaagatatatgccttttttccgttcaaaaaaaaagaatacatgcctgttgtttgatttgttgctattgctgaggaaaaaacatgtcaaagttagcgtcagtgtgccacagtaatttaatttacgttgttgagaaagacaataacgccgctccatcttgtctcctggtgagggaggctacctcaagcagaccgtatatacggacagtgtataaaagaccacactgttttgcactgtagtagagtataatgtttgcatagtgaaatttaaa

SEQ ID NO: 4341 - DNA, 2222 bp, Zea Mays
caagcacacgccagccaacagtaaacaacttgatttccatccccaccagcacaagcacacggacccggcggcggtgggcggtggcgcacccacaccccagcaccagcaagcaggtgcagtcagtgtgaggtgcggcccggccgaagatttggcgcatgcacactcactcactccagtgcccactgcccactgcccactgcccgacgaggaagtttcacgatcccaacccgtataaatcgacgccgcgagggggagcgacgagcgatccccgtaattaacctgtcccagccgcaccgatccaccccccctcggcctcggcctccctccggccatggaggtgttctactacgtcgtgttcggcgcgctggccgccgtcgtggcggggctcgagctcggcaagagcggcaaggaccgcgtcgccaccacctccgcattcaactccttcaagaacaactacgtcctcgtctactccctcatgatgtccagtatggcttcgacaagggcgacatcggccgcctcttcatcgccggcttcggatcctccatgctcttcggcaccatcgtcggctccctcgccgacaaacagggccgcaagagggcctgcgtcacctattgcatcagctacatcctcagctgcatcaccaagcactcccccgagtacagggtcctcatgatcggccgcatcctcgggggcatcgccacctcgctgctcttctccgccttcgagtcctggctcgtcgccgagcacaacaagagaggctttgacccgcagtggctgtccataacattctctaaagccatcttccttgggaacggcttaattgccattgtatctgggctatttgcgaaccttcttgctgagaacttgggctttggtcctgtggctccattcgatgcggctgcgtgctttctggcgattggcatggctatcataatgtcctcatggagtgaaaactacggagatccatctgaaagcaaggacctgatggcccagttcaaggttgcggctaaggcaattgcgtcagatgaaaagattgcattactgggagccatacagtcattgtttgagggctccatgtacacatttgtcttcctatggactccagcattgagtccaaatgaagaagacattcctcatggttttatttttgctacattcatgctgtcatccatgctgggtagctccatcgcgtcacgtctattagcccgaaagctcaaggttgaaggctatatgcagatcgtgttctcgatatcggctgtcacccttgtcctccctgtcgccaccaacatcttagtgccaacgtcttctgtgaaaggaggcagcgtatcaattggaggttctcttcagcttcttggtttctgcacctttgaggcatgtgttggtatattctggccgtcaatcatgaagatgagatctcagtacattcctgaggaagcgagaagcacaatcatgaacttcttccgcataccactcaacttatttgtttgtgtggtgctttacaacgcaaggagccattccctctcccaactactatgttctctttagttgtgctggcaagaattatacagaaatatcagcacacaagtaacgctttgcctgtggacatggtctttgcaggtgaatgcattccctatcactgtcatgtttgggatgtgttctatcttcctcttcatggcagcaatcttgcagagacggctgatggttgtctctgatcaagtacacaaatcatcaactaaagcacaagaaatgatcggggaagatgagccactaaatccttagatgtcgacagaaccatacatgcgaaatcagatattgacgacgacgtccatactccatactgcatttcgtttcgtcacctgtgcaataagatggacgtcaaaaccatgtagtctagtggttttcgtttctgtagtgtagatttgaccaggctgctaagtttgcacctgtcccgagaagattagatgagcaagtcaatcgatattggctattcgcattgttgtttcttttttttaaaaaaagatgttcgctttaaagtttaaacgatacggtatatatccttgtaagtgttgcattgctgcatctgatgacaattctagtggtgctgttactgactgttgagggctctctctacttggtcgttgtaagaactgttgcttcttaatgaaaaacgggctcaataaattcagtagaagcctgcagttgcagtaatcatacaacacgat

SEQ ID NO: 4342 - DNA, 733 bp, Zea Mays
ccactagaaagcccagaacataccaaggcccctctatctttcttccccagcaatgcaattccgcagacagacgcaggcggcaggcagcggcgcagcgcaccgcttcttcctcttctatctctcatctacagccttcgctgcgccgccatggccaccacccgcttgctgccgctgctccgacgccgcctcgccgccgcaatcgccggatcgcctgctccctactccctccgaggaccctcatttcctgcaccagcagctgcagggctaaggtccctcctaaaagctgctggagcgagcgatactgcaacagaaccccaggaccaacagcattccgaaacaactcccccgccggcttctgtcccgacaccggagtccggtctcaaagtcagggacacctccaacctgaagatctcaccaaggcatgacctcgccatgatctttacgtgcaaggtgtgcgagaccaggtccatgaagatggccagcagggactcgtacgagaacggagtcgtggtcgtgcggtgcggtggctgcaacaacctccacctcatggcggacaggcttggctggtttggggagccagggagcattgaggacttcctagcgacgcaaggggaggaggtgaagaaaggttcgacagatactatcagctttactttggacgacttggctgggtctcaggtgaggccatgcgggcagaagaatcctgggcagcaggactggcacttgagcggcc

SEQ ID NO: 4343 - DNA, 2171 bp, Zea Mays
gcacactgttctaatagaggaaacattgatggtacaattatttgaactcagagtgcaagaaaggtgggtggtccagggaagaggatatgcttttgtgtgaggctcaaaaagttcttggaaacaagtggactgaaattgcaaaagttgtttcaggaagacaatgcagtgaagaaccggttttctactctatgcaaaaggagggctaaggatgacgagctataccaagaaaatggtgtgccatgttccaacacaaatgcaaagaaggttctcactgaaacaggacgcctcacaccaggcggagctggctctttggtacatattaagcagacgaggtgtgaagcgggagggtaattttctgaagaaggatgacccaaaagttgctactttattacagcaatctgactttctttgctcccttgcaacaaaaatcaaaagtgacaatacaagtaaaagcatggatgaagcatggcagcaactgcaagatcatttagtgaaaaaagagcacaacaaagtgccagaaaacagtgggtctgaaatagcttcacttttagaggagcttgatgatttaattgtagacccctatgagaggaaagatgaagatgaacagaagctaaggttatttatgaataaacactcaattttttgtcaaatatgtcgcttcagttgttgacccatcattatttccaatgcaaagcgagcacaatggacggaccgatgtggacaatgatcactgtaacggttcttcacaaactagcatagtagtaacgacaaatatggtcccagaggaaatgatgggagattgtccagtcgataactgcaatgaggatagtagtctttgtagaaaagtgctttctggaagtacagaaccttgcccaggtgcaaaaatgacaggatgtgggaatttgagcgaagaccaggttgctgaaggtagtgtgcttcaacgtgtagaatctatatctcctgttataacagatattgatgatttactcgtagacccgtatgagagtgaagcggaagatgaagaaaagtcaggggagcagaatggacagattgatgtgcatgctgagcagtgttttggttcttctcaaactatcatagaagtgatatcagacatggcccctgatgaagtcatggaaacttgttcagcagataaccgcgaagaacatagtagcatttgccgaaatgtgctttctggaagtatggcaccttgcccaggtgcagaaataccaacatctgaaaaaatgagtgaacttgctgaagatagcagacttcaatgtatggagtttgcatctcccgttctggcaaattttgcgagcaaggaatgtggagaaacaccagaaccacaagttcttaatgagattgttgaagatagcaggcttcaatgtattgaattcaactccccggctcacacaattctcccagataaaacaggcgccgaaaactttgcatccccaagttttgatgtggttgcaaaagatagtaagcctccgtctttggaattcacatcccctgctcatacagttgcaacattccaaccgtatgcagacggcatccctaccccaaaattcactgctagtgagaggagttttctgctgtcagttttagagctgacctcaccagggtcaaggcctgaaacttctcagcagccatcttgcaaaagggctcttcttaatagcctttgaaatgggtttgcataaaatcccaacaccaagcctgctatgcccctcagcataatttggctactcctatatgcatgaagtgtgcctaccctcaaagggtttcatagtatgttttgtttgttgtatagaatgatgcattggtgtagttgtattagcatacaggaacgaaagggtgatggtgtaagtgtttacagcttgtgttcaaaatatagaaaaagtaatattctttgtgtaattaactcttgtaattcttcccatgggtgcgagttattagattgttgcgtagtgtgatgtaatggctttcctttgttgagcttttggtatggaagaaccgactgcaggctatggctgtatgctttattgatttgtatggttggaacttggaaacatgatattcggttgatagactgcgttctctgcagctgatccggcactaagtttggtgtccattttcagaataaaattcatgtatttcccaggcctccagaatcc

SEQ ID NO: 4344 - DNA, 2737 bp, Zea Mays
tgcaaaaaattcctctcctcagttcctcagcttctcacccaccccggcccggcagccaatctgtcatccatcacgtcgcgtgccgtgcgtcaccccctcccttcgcctcgcttcaaaaatccctccgttggcgcccaagtaccaaaccctagcctcgtccgggcccgccccctctggccggccgggcggaacatgcgaatgcggccatggcgaccggggccgatctgacctccccaaccggcgccgctgcggcagcggccgccgccaggaaggaccgccacatcgtcagttggagctccgaggaggatggcgtgcttcgtgctcaaatcgctcttcatggcactgataactggacaattatagcggcacaattcaaggacaagacggccagacagtgcaggagaagatggtacaattatttgaactcagagtgcaagaaaggtgggtggtccagggaagaggatatgcttttgtgtgaggctcaaaaagttcttggaaacaagtggactgaaattgcaaaagttgtttcaggaagacaatgcagtgaagaaccggttttctactctatgcaaaaggagggctaaggatgacgagctataccaagaaaatggtgtgccatgttccaacacaaatgcaaagaaggttctcactgaaacaggacgcctcacaccaggcggagctggctctttggtacatattaagcagacgaggtcttccagttataatttgaaggagaaccttgtaccaaatatgaaattatttgaactagagaagagcacacaagatgccaggcaacctcttgctaccatttcttcgaacaaccaagataacgtgaatacagttaaatctcaaaatcttgtcccaaccacaaaacaattgttaggtccagaacaacattgtgtgaagcgggagggtaattttctgaagaaggatgacccaaaagttgctactttattacagcaatctgactttctttgctcccttgcaacaaaaatcaaaagtgacaatacaagtaaaagcatggatgaagcatggcagcaactgcaagatcatttagtgaaaaaagagcacaacaaagtgccagaaaacagtgggtctgaaatagcttcacttttagaggagcttgatgatttaattgtagacccctatgagaggaaagatgaagatgaacagaagctaaggttatttatgaataaacactcaattttttgtcaaatatgtcgcttcagttgttgacccatcattatttccaatgcaaagcgagcacaatggacggaccgatgtggacaatgatcactgtaacggttcttcacaaactagcatagtagtaacgacaaatatggtcccagaggaaatgatgggagattgtccagtcgataactgcaatgaggatagtagtctttgtagaaaagtgctttctggaagtacagaaccttgcccaggtgcaaaaatgacaggatgtgggaatttgagcgaagaccaggttgctgaaggtagtgtgcttcaacgtgtagaatctatatctcctgttataacagatattgatgatttactcgtagacccgtatgagagtgaagcggaagatgaagaaaagtcaggggagcagaatggacagattgatgtgcatgctgagcagtgttttggttcttctcaaactatcatagaagtgatatcagacatggcccctgatgaagtcatggaaacttgttcagcagataaccgcgaagaacatagtagcatttgccgaaatgtgctttctggaagtatggcaccttgcccaggtgcagaaataccaacatctgaaaaaatgagtgaacttgctgaagatagcagacttcaatgtatggagtttgcatctcccgttctggcaaattttgcgagcaaggaatgtggagaaacaccagaaccacaagttcttaatgagattgttgaagatagcaggcttcaatgtattgaattcaactccccggctcacacaattctcccagataaaacaggcgccgaaaactttgcatccccaagttttgatgtggttgcaaaagatagtaagcctccgtctttggaattcacatcccctgctcatacagttgcaacattccaaccgtatgcagacggcatccctaccccaaaattcactgctagtgagaggagttttctgctgtcagttttagagctgacctcaccagggtcaaggcctgaaacttctcagcagccatcttgcaaaagggctcttcttaatagcctttgaaatgggtttgcataaaatcccaacaccaagcctgctatgcccctcagcataatttggctactcctatatgcatgaagtgtgcctaccctcaaagggtttcatagtatgttttgtttgttgtatagaatgatgcattggtgtagttgtattagcatacaggaacgaaagggtgatggtgtaagtgtttacagcttgtgttcaaaatatagaaaaagtaatattctttgtgtaattaactcttgtaattcttcccatgggtgcgagttattagattgttgcgtagtgtgatgtaatggctttcctttgttgagcttttggtatggaagaaccgactgcaggctatggctgtatgctttattgatttgtatggttggaacttggaaacatgatattcggttgatagactgcgttctctgcagctgatccggcactaagtttggtgtccattttcagaataaaattcatgtatttcccaggcctccagaatcc

SEQ ID NO: 4345 - DNA, 1746 bp, Zea Mays
gttccattctcgtccgtttctcgaccaaacacgctctctctcggcagcgatgcgagaacgtgcctttccttctcgctttcactggtaccaggtggcgaccatacagcacggaactccagttcaccgctgcctttcttctactgttcaccccgcgtgcgctcgctcactcgctctctcccctctggctctgagtggcgctagtgggcgaccgccgccgcgtccctccgtcaggtgcccaggtgtagcctcgtcagcccctccgtcaggtcttcgtcggccccctcgccgacgagcacccaccagcagatcccattctttcgacgaggctgaagcagctgaaaatgcaaagtctgcagacattgaccggaggattttgcaagaaacaaaagccgaacaacacatccacaagctcttacttctcggtgctggagaatcggggaagtctacaatatttaaacaaataaagcttcttttccaaactggctttgacgaggcagagcttaggagctacacatcagtcatccatgctaatgtgtatcagacaattaaaatattatatgagggagctaaagagttagcccaagtggaaccagattcttcaaaatatgtcttatctccagataatcaggagattggagaaaaactatcagaaattggtgccagattggaatacccatcgttgaacaaagaacgtgtacaggatgtaagaaaactatggcaagatccagccattcaggaaacttattcacgtgggagtattctgcaagtcccagactgtgcacagtacttcatggaaaatttggacaaattatctgaagaagattatgtaccgacaaaggaggatgtgcttcatgcaagagtacggacaaatggtgtggtagaaactcagtttagccctctaggagagagcaaaagaggcggagaggtctataggctgtacgatgtaggaggccagagaaacgagagaaggaaatggatccatcttttcgaaggtgttaatgctgtaatattctgtgctgccattagcgagtatgatcagatgttatttgaggatgagacaaagaacagaatgatggagactaaagaactctttgattgggtgctaaagcaaagatgttttgaggtccctttaagcgtgtgcgagtggtttaaagattaccagcccactgcacctggcaaacaggaggtggaacacgcctacgagtttgtaaaaaagaagtttgaggagctctacttccaaagcagcaagcctgaccgtgtcgaccgagtgttcaagatctacagaacaacagccctggatcagaaacttgtaaagaagacattcaagctgatcgacgagagcatgaggcgttccagagaaggaacttgatcgaggatgtggtgttataagccacaagacaagtaactaggatggtgtgaggagcagaaagtttacagtgtcgcggctttggccgattgtgattctttttacatgaggaacatttgttgatctttttgccccaccacaagccagtaaaagtatctgttttgcgctggtcttggggaggtttgggtcgtctccatttccccccaatgttaggacaaaatgtacttaccatcttttggagctctgcctgtttggcctcacaatatcaagttcattcgttgttgtctatgcagcatgcctattcacgaattgtctgaatttgttaaccaacaacagatgaaagttcgattggtactctctcaagactgaatttggctacg

SEQ ID NO: 4346 - DNA, 762 bp, Zea Mays
ccccgagtcgcgaccccgggcaagtttccccacgggcggggcgacgaaatcaccgctctgctccgacgtccagctctactcgcgagcaggacatcaccgcgcgtccaccatctctggcttgctgtcctccgcgcgtcatctccatccctggcttgagataaggctcctccttaccgaaataggaaagggtcactttcacaaaacgtgatgttggcatgtgaggtgaatgtggcgatgaagagatgggcttacagtgtgttaagtggaagcaacacatgaagcggacatggagaaggaagctggcatgacactaaaacgcataaagttgacttgtgacgttcatgttttagatgtcttattctactgccaaacttcctagtactccatttttatactatattgtctatctgtacgtgtgaatggagatgatgatattatgtgatgtgatgatggatggattagcttcgttgaatattagatgatattatgtgatgatgatattaaacgggcattgtagtattgatacatgcttcatatttctggatttttagtgatgttttattgtttatgagttttctaaatattccttatttttgtttgattttttctaaatttttgatgtatttttttgctcaagaggggtatttagcacctttctttccaaacaatgccaggaaaatatacctgggaggggagattctctccgggaaataaggtggcatataaaatcccctcctgggttagtttccaagggattttttt

SEQ ID NO: 4347 - DNA, 1825 bp, Zea Mays
ctcggtggctcagccaccggtttcagcgccagttcaaccccgcacccgcaccccggtgcggcacggatcccaccgggcgcagcgcacgacccacaaagtcagaaagccgctgcccggaaatcgcccgcctccgctccgctacgctctcaccacctcctccgacgtctgatcggcatcgccttcgcctccgctaaaatactcgcggtccacgctctcctccaaatcccatcgccacgccttcgcccgcgcgcgtctctccctcccccacactccgccaccagcgccgaagcagagcagccatggccggttacgagcagcgcgtcgttgccgtcatcatggtcggcggccccaccaaagggacgcggttccggccgctgtcgctgaacgtgcccaagccgctcttccctatcgccggccagcccatggtgcaccaccccatctccgcctgcagccggatccccaacctggcacagatataccttatcgggttctacgacgagcgggaattcgcgctatatgtctcgtctatctccaacgagctcaggatccctgtcaggtacctgcgagaggataagcctcacgggtcagctggagggctctacatctttagagattacatcatggaagacagcccgtcacacatagttctgcttaactgcgacgtctgttctagcttcccccttccagacatgctggaggcccataaaaaatatggaggaatgggtactttactagtcaacaaggtatctgcagagtcagctaaccagtttggcgagttggtagctgatcctgaaacaaacgaactgctgcactatacggaaaagccagagacttttgtgagtgatctcataaattgtggagtatatatatttacccccaatatctttagcgccattgaggatgtcttaaaacagaaaaaagacagagcaaatttgcggcgtgtatctagctttgaagctcttcattcagcaaccaaggctcttccaccagactttgttcggttagatcaagacattttatcccctcgagcaggaaagaaagagctgtacacataccagacacttgatttttgggaacagataaaaaccccagggatgtctttgagatgctctggattatatctttctcggttccgccgtacctctcctcatcttttagcctcaggagatggcaaaagaactgccactattgtaggcgatgtgtatatccatccatctgccaaggtgcatcctacttcaaagattggccccaatgtttctatatcagcaaatgcgcgcgttggagctggtgccaggcttatcaattgcataattctagatggtgttgaaattatggaaaatgcggttgttatacattcaattgtggggtggaagtcatccattggaaaatggtcacgtgtacagggcgaaggtgatcaaaatgccaaacttggcattactattcttggtgaagccgttgatgttgaagatgaagtagtgatagttaacagcatcgtgctcccaaataaaactctcaatgtcagtgtccaagaggagatcatcctataatagccgtcattttttgttttatccctaataagcatgccactgcacaatcttgacttgctgtgctactttgattagcgagtgtggtgtaaaatgtacgaacaactaacacccgagctgctagcttcagattaaagcaagctgttcaaactgccgcagctgtaatccatagagacaaaacactattgaagacttctagcccacaagtgaaattggaagtataatcaaatcctaatataattgtcataatcatattgttaaactgtataagtgaattgcct

SEQ ID NO: 4348 - DNA, 2070 bp, Zea Mays
ctccctccgctgcatctcactttctctcccggctgtttcgtcttccttggctttcctcctctctacgcgctttcatttcatccatgtcggcttcctcgtttgctcggcttcagcacaaacgcttcatctggtattgacatccacctcggctctgtttgtttggtgagatacagtttcttttctcccccgtcgtctgctccttctcggtgggtatctggttctagattggaaatatccaacgccctctcgctttttaaatccttcaatcttccatatgcctgcttggcactgctagattcgtttaggttttccctacaacatgtgaatatgtcactgcctttttttggataaaatggtttggaagatctgcaaacttcatttttctttttttaggattccacccttctactgaaaggttcgtgttctcttgtttgtgctctccaattttgttttttttctttttcctaggcttcaggttcgtttcttttccgaaaatgatcctttttggttgagctaagttttcctttttatatcctcgtctgtttcgttttaggtggacatctgatttcattcaggtgaactgtttgcatcgaagcggagatttcattttccttttttgtcgatacattgaggttcgaaaagggcactattttacttagctaattgattgagtgcctctgttcttcaaactttttttcaatgtttagggtttgtctggttttagcttttcgagctattccttggtttctgtgctccattctaagacctgtatattgctcgtaactttgactatttgcaaataacagtgttgctattcctgagaagtaatagcagtgttgcttctgattttctacctttccctgagttcttcgtctttattttttttcactttaaccaaatgtagtttttatttcctgctcgttccgaacatttccttgtctctcatttttatatatgtctcctaagatcggttcatgcatccaacccacatcaaaatcaacagacatggtatctattgataaacagaggcaattactattgcagcttgggatcaaacatggtttacaaatttgttgtattactatgggcgtgtaaaaagggtcaattctatgttctaaacttatttccaaacattcaggcagaatttgatctgggcacaaggtacaatatgtcctaccttagagattttactacaaagtttatgtttattcctgttctttcgttgaaacatgttgaagaggacctcagatcgttagagacttcgctaacgagagcttgccggattgtttaattctctttaggggtacccatacgcacgcgcttgcgccaatcgtgccttattcaatggagaatagtgttgcagatgcaatgtacaacaaaattattgtttttgtttcgaccaagttgtggataccacaccctggaagagttggtggtagattcttcatcaagtatggaatgtctgcgatgcctagctaggtgcttgatggcaacaggtgcatatcaaaactattaattattttcatgtgttcctgcttcaagaacacatgcaatagtaataggtttccattagtttaaatgtcacatgcaaagaagcaaacaccacccagactttcttcttagtttgccattatcacatctgtactcatcatgcacatgaaacttttggttatgtacaactcaaaggtagaaggaagaccttaaggtatgttgtcatagtaattgtgaaatggatttggcactggtatttgatattttctgacttctagcatcactctgaaggcacatgataaagctcgagctttatcgatggtcggacgatgataacgcgctggaagaagtaatgagtagagagtatgttctttatttcttatttatgtacaaattaagatctcacggacgaatttaacaccgtgcgcagggcgcgcggcaatacactagtacagattaaattttgttgattgtgtgcctcttgaacatgcagttaactgtttcctgagcaatgaatgtaagaaaggttaccagacgttccaatgcagtcaaaagctttttaatatactagcagcattt

SEQ ID NO: 4349 - DNA, 1057 bp, Zea Mays
aaaaagagtattttggaaccagcgctgccaaatcaggaaacgggcacgacgcgggcggggcggggagccaaaatggcgctcccgggcccggcggcgacccgcgcggcggtgaggctctgccggatcgcggcgagcgcttcctcgtatttgccgtctgcggcggccgacggaaggagggagctggagctgccgttcgcgctggtggcggagcgggggatggtggtgggcggccaccgcgggatggggatgaacgcggtgggggcaccgcccggggcgcgcttcggggccgccagggagcgggagaacacgctgctctccttcggccgagccgccgcacatgctgccgtcgccttcgtcgagttcgacgtccaggtcacaaaagatggctgcccaataatcttccatgacgatttcatcctaacacaagggaccggggctgtacatgaaaggcgtgttactgatcttctcttggaagatttcctctcttatgggccacaaagagaatcttgcaaggtctccaagccattacttagacgggcaggagatggtagagtccttaattggactacagaagatgacgattccctttgcacattgcaagaggcctttcaacgtgtcagtcctcgcctgggatttaacattgagctgaagtttgatgacagcattatgtatcacaggaaagaccttcagtgtgctcttaaagctgtattgcaagtacagtcttttcccctacttcgtatagagctcagttgtttttgagcatgctaggaacagaccagtctttttttcatcgttccatcctgatgcagcacagatgatgcgggaactccagagcttgtatcctgtacttttcctaacagaaggagggacatcgaaacaccacgatccaaggaggaactcgtttgacgacgccgtccgggtatgcctagagtacgatctgcacgggatcgtgtcagaagcgagaggcgttctcaagaacccatccgcggtcgccagagcacaagaatctaacctcgcgcttctcacccttccctacaaccggatgcctgtataatct

SEQ ID NO: 4350 - DNA, 1441 bp, Zea Mays
ggaaactgcaaaatttagggtttctttgcatctctcccgtcggctcctcccctcccaagtcccacctcacctctcctcctcgcgaagtatcggcggcggcgagcgcggcaggctagagcctcgttgctgaggaggggagatggcgggtatgggcgatatgccgatgaggcctgcgcggccgggcccgccgatgcagcaccgtggtccgcccccgatggcgcgcctccgccccgaaccaatcgaccgcgagaaggtcagttcttacaccccctcccccccttgctcccggcgtcaggcttctactgtggaatgtgaatcccgcgatgctccttgtggtggattgcgctctcacaagtagctggacactgacgtgcaactccacagcattagacctgtcctctgctgctcagggttttcacaagggttgctggtcaccaccaaaatgaagagtttgcagtgagagggaaggaaccaaaggatgaagttcagatttacacatggaaggatgcgaccctccgcgagctcactgatcttgtgaaagaggttgctcttccagcaagaaaaaggaatgcaaggctttcttttgcatttgtatacccagacaagaatggtcgttttgttgtcagacaggtgggttcgaccttcgcttacggtcatggaagaggcgacgatgccaaaactcttgcagagctcggattccagatcggtgattacttgagcgttgcaatcatgtagacggtgcccgcaccggatgtaattgctgtgatgtcaaaagggctctggttgcaacagtaaggcatgattctctgttagcactaggaactgcaaccagaattgtctgtaataccggtagtatcaaatttacctagacacttcgaacgagcaaggcgtctgtaataccggtacttacctgtggtgcctggagcttccaaatctggatagcgtgggtttttcattgagaatgttaagttggctcgggttcctatgaagtcaaacacaggaaagtttgcatcttggagccagaccagagtttgcatcttggagccagaccagttgggcaaattttgtttcgccatttctaaaatcttgtagccaggctagatttgagataacagtttagataatagttactctaaaattgaactgatggtcgaatttgcaccggagattggtctctttatgaacagtaaaagaacagtacaattataatgcatctgatagaatgcaaaagaaataaatgcatgacttgcaaccatttttcagaggcaaggtaccaacagttttaacgcgattttctcagttacgtaaccatgacatttttttctcatcacgcaaactatcccttccgttccaaattttaatacttttctagatacattccgtttgatacagtatatatctaaatacatagcaaaagcggttgaaattaaaaaaaacaaaa

SEQ ID NO: 4351 - DNA, 4250 bp, Zea Mays
gaggagccgagccccaccccatacatccgcgggaagccgctgcccgcgcgcgcctttgcggtggtggcattcctcgaggcccgagttggccagctctccccgtcgtcgtccgtccctctcctcgtctccgcctccccggactccggcagggagggaggtgaacgggccggggagagagatggggccggactcgtcgcccaagaagttgagcctcaaggagcagcgcgctgcctacctccagtggttcgccctcgccgacgaagacggagatggccgtctgacggggaacgatgcgctcaggttcttcgccatgtccaacctctccaagcccgagctgaagcaggtttgggcgatcgctgattccaaacgccaaggatatcttggattctacgagttcatgactgccatgcagctggtttctctcgcacaagcagggaacgaaatcaatcaagacacccttccaaatgcagatctcgagaagttgcagctccccacaatggatggtctggctaaaaaactaaactctgggagcaaggtcgagtctgctattgttgcatgtcatccatcagaagcacctactatgactgccagctggtttaactccaagtcaggaaagaagattcctttgaaatcagtcacttcaatcgtcgatgggctaaagaaatcgtacattgagaagttgaggcccttggaaaaaacctatcagttccatgacttcgtgtctcccttgctgactagcagcgatttcgatgcgaagccaatggtcatgctgttgggtcaatactccacggggaaaacaacattcataaagcatttactaaaaacaagttatccaggcgctcatattgggccagagcctacaacggacaggtttgttgtcatcacttctggaccagacgaaagatgcattcctggaaacaccatcgccgtccaagctgacatgccatacagtggcctgtcatcgttcggaacagcatttttgtccaagttcgaatgttctcagatgccacatccactgttagagcacgtgaccttcgtggacactccaggagttttatcaggggagaagcagcggacgcagcgcagctacgatttcaccggagtcacgtcgtggtttgcggccaagtgcgacctcatccttctcctgtttgatccgcataagcttgacatcagcgatgagttcaagcgtgtgatcgggtctctccgcgggcatgatgacaagatacgcatagttctcaacaaggccgaccaagttgatgcacagcagctgatgagagtgtacggagcactgctgtggtcgctcgggaaagtcctgaacacaccagaagtcatgcgtgtctacataggttcattcaacgacaagccgatcagggagacagcggctgggccgctgggcatggagctgttccagaaggaacaagatgacttgctctcggacctgaacgacatccccaagaaggcctgcgaccgtcggatcaacgagttcgtgaagcgggcaagggcggctaaagtccacgcgcacataatcagccatctgaagaaagagatgcctgcactgatgggcaaggccaaggctcagcagaagctgctcgacgggctggatcaacagttcgccaaggtccagaaggagctgcacctgccgccaggggacttcccgagcgtggaggagtacagggagctcctgagcgcctacaacttcgacaggttcgagaagctgaggcccaagatggtccagggcgtggacgacatgctggcctacgacatcccggacctcctgaagaagttcaggaacccctacgactgaagccggaaacccactctcttgcctcctcggggaggggtggcagagcttcagcgacggacgaggaggacgtgccggtgcagcagcggttcatctggtcagggaagagaaagatgcggcgccttttcacgactccatctctcttctggattactcagtgctgcagcgtaaactcgcgcgcagttccctgtaaaagctggagcttttctgagcgtgtaggtgcgttggtggaacttgggcccccacccaagatctcacctatctgcactgggctggccggctgtgcccgtcgccaaccaccgtgcttccgccattgcgtcgccgcataaccttggccaagcgtgaacttcatataataccaacttcatataatccgccattactggcaaggcgcatgtcccatgtcgtccgtagaactcgggctgatgacgggtgccactcaacagtcaacacacgggctagggctaattgtatatagaatttcatatactgccagcttcagctttcacagcaaacggaggttttattataaaaaaaaacatcgtgttccaaaccgccggtggtcttccttcctattcaacggctaaaaagtctattggtgtactttgaaaagctgcaggaggaggagagtaaaaaaaaaaaaaaggtggtgcggtgaccgtaggtctggacatgcgtagcgtagccaccggtgccgtgcacgcggtacagcagcagcagcacggacgtgcaccgctgtgtgtcgcttccggacccgtctacgttttacgtggtcataccaaagactccagtcgccaccacagaaatccaaggcgccagccagcacaaggccaaaggccaaaaccaagccggcgggcccgctttccgtcccgtcagattccctcccccgtccgtccgtccgtctctgccccatccctcacccctcctccctactccctaggcagcaaagcagcgagaaagcagctcgcagttcccacccaccaaaccaaactctcctccacaacctcccccgccgcccctcctcttctcggcttctcccctgccttgttcggccccaaaacggcaagagccgacgccagcaaaccctcgggttcgggagggaaggaaggaaggcacgagcagcgcgcctgcctacccgcagctaaccccaaacagcaacgtcgtagccgacgagagcctccgccacctacccaccaactcccgcccgtcgcctccgcttgggttctcgtcgagcagttggtgggcacctaccgcatccagagagagagtgagccactgagccagggcggcaagggggagatgaagaagctgtaccagggcggcaaggggcggcgggtgcacccggcgccggctgacgcatcggcagccgtggcgctgccggccgccgtgctggccctggcgtccgcgctgacggccgaggagcaggaggtgctggcctacctcctgtcctgcggcggcggcggcggccggcaccaccacggccgccgccgcggggcccacccgccggagatgggctgcgcctgcttcggctgctacaagagcttctgggcgcgctgggacgcgtcgcccaaccgccacctcatccaccgcatcatcgacgccgtcgaggaggagggcggggcggggggcccgcgccgccctccccggcgccggcgccgcggtggtggcggtggtggtggccgccgcggcggcggcgacgctgccgacgaggacgccgcggagacgggccccggcgtggaccacgacaacctcccggcgtgcgacggcggctccgggatggacagcgagggcggtggcagcgccgagaagagcacggtggggaggctggtgcgcttcatcggggagaaggtttggggcgcctggaactgatcgggctgtggcccaccgccgccgctcgccggttcttgtagattaggggaaggggaccaccagcaaggactgcgtggtctcgtcaaggtcagtactcatcagtgccagtagtggctgttttgatcagggagcgcctcctgctccacgccctttttcctcttattgcttttgtttaatcatggcggatttgttgcactctgatgatgagtgatgacgagcatgccaggattggaggagggtggattatcccatccaatttctcacctctcttctccccctcccctcagcccccctgtaccatatttttgctcctttcgttcggtagtccagttcaacaatgaacttgcaagagaactctcgtcaacattcaatgtgccctgattcatatgcgttgaatgtcgtcagcatttgattcttcctgtcacgagtgcggactgtgatgtttgcgcgaagctttgcacaaaggttagcatcaagctatgcctgcctcgttgtccacgtctgctgcctgcctgcctgtgccaattgccaagggagggaagaggaaagcatagcatcggtgcaaaggcgttgttttttc

SEQ ID NO: 4352 - DNA, 1333 bp, Zea Mays
gtcgaagcagagcccgccccttcccgcgccgttctttttggttcccctgtccccgccgctgccgaaaaaccgccgatggaggtcgtcgccgccgcgaagcagaaggcgaagaagcatatacacctcttctactgctccgaatgcgaggagctcgctctcaaggtcgccgccagctccgacgtcatcgagctccagtctatcaactggcggagcttcgacgacgggttcccgaacctgttcatcaacaaggcccacgacatccgggggcagcacgtggcgttcctggcctccttcagctcgccggcggtcatattcgagcaggtctccgtcatcttcgcgctgcccaagctcttcatcgcctcgttcacgctcgtgctgcccttcttccccacgggctccttcgagcgcgtcgaggaggagggcgacgtcgccaccgccttcaccctcgcgcacatcctctccatgatccccaagtcgcgcggcgggcccaccagcgtcgtcatctacgacatccacgccctccaggagaggttctacttcggggacgacgtcctgccatgcttcgagacggggatcccgctcctgctgcagcgcctccgccagctcccggacgcagagaatatcaccattgcctttccagatgatggagcgtggaagcggttccacaagctgttgcagcactttccaatgatagtctgtaacaaggttcgtgaaggtgacaagagaatagttcgtataaaggaaggaaatcctgaaggccgtcatgttgttattgttgatgatttagtgcaatctgggggaactcttagagaatgccagaaagttctagcttcacatggcgcttcaaaagcgaccagctcgcttacttctggatcacggactcatgcccgcacacaataaaagccatcgggcaaagacctccgtttgaggttctgagccttgctggctcgattgctgacgctcttcagatatgagcgcgtacactgactggtagacggggggcttgaaccgtgggatgcccgtcagatcgagaacttgtaccgtgagatgagctgctcctgctttttttccctaaatgtaggagtttgttccggttccttgaaaaaagcaaataatgtggagcaagttttaagtacctgaaggttccacaaacagcgctgtgaattgatgataaaatcaggcattgggatactcacatctgtgtgtacttactgtcgatgctcgcttccgtttgaagttcgcgagaccagtgcttctttcctgagtcctgaccctatgttggagtaccgttgccgtgcattcaacagaggccagtgcttctttcctgtgtcaa

SEQ ID NO: 4353 - DNA, 2412 bp, Zea Mays
gattcgccccagtttctctgaaacgaagtagacagccaccgtcttcccgggccacggcgatcatcaccgccgcggcgccgcccatatcgacagcagagccgctcgcccagtagcctcacctcgcccgcgcttgtggcggccatggaggactacccagaggagctgcggacgccgccggtgtcgctcgtgtcaatcgtggggtgcccagagctgcacccctcgatctcggcggcactcagctcccagcagccgcccatgaatactctggccctccccgacttcgccaaggtctccatcctggcccgcagcggtaagccccgcgaccctctcgcaccgccgcacccccccgcgggaatcctcaagaaggactggctccttaaacaccgcacccgtgccccggccgccgtcgccgcgctgttccgtgctgaccaggtctccgacgatcctgcccagtggctcaaggcctgctccgatctcgaaaacctcaagtatgttgcgttgttgatcccaaattgacttcgcgcggtcagagatttagttacgagtcttaagatgctaatgtacaacttatcaaccacttgggaactaggaagcaccacccacactttattggcagcagctagtagtataaccgaagttggcggcaagtgatttttgtttgtcgcacaggtctgcaattcagaggaaaaacactaaattattggtggtccttgtgcaggctcaagctagtgatgagttaagtgaggatgtaacggttgccctgaggaaacgtgcggaaatcgattccaatcacttggttgtgttggttgagcacgatgaagcagaatggaacagatctctgaacaaattgaagagtgtgtttgcggagttatgtgtagcattctataaagaggaagggctaaggataaaggctcgcattgagaaattttttttgcttctgtcgagctgagcatccggtactgcttcaaggttgctatttatgcggagtttagaagggattggccagaagcattgaagttctatgaggaaggtgttcgtgttttgcgtgagatgattggaacttcgacaaggttgcctccaacccaacgcctagttgagataaaagcagttgccgagcaatttcactttaagatatcgaccttgctacttcatgctgggaaagcggtagaagcaatcacatggttccgtaagcatatcagaagctatgcacgggttcttggaacaccagaagttgcttttcttcactgggaatggtttagccggcagttcctcgtctttggtgagttgatagaaacaacatctacaactattccagatacattatctcctagatttggcactgcagactatggattgactgagtgggaatttcagccagcatactactatcagttagcggcaacttacttgagagagaagaggtatgccatcgaatgttcatcatcaatggctaatcttacaacagaagttaatggagtacctgagtcagtaatgccttctgtatatgttggccaatatgtgcgcttgtttgagcaaggagatacagttagtatactacccctttctgatactgaatacaccagctatgctttgtcagaagctgaaagatttcaagattcttatgagataatagcactgttcagaaaagcttatgaatcatttcagagcctaggtgctacaagaatcgcttctgtctgtagcggtggaatggccatggaatattatgcagctggggattttagcaatgcaaaacagctttttgataatgttgctggtctgtaccgcaaagagggttggaccactttgctctgggagaacctaggatacttgagagagtgctcaatgaaacttaattccccaaaggattttatcagttattccctagagatggctgcattaccattattttctcgtagtgaagaggaaaatcgagaaaacaaaattaagagtgggcctgcaggttcccctaccatttccaggagagagaatatacagcaggaagttattaatgttttggaaagaaatcagtcatcagagggaaccgatgatggatttaataatgcgatggaagaagttactcaccttgatattgatcagataagttcgctaagaatggtacttactacgtctgttgcttttcttgatcaatctgtaaaacctggttcacctttgcttgtcagcgtgtcactcttatctcatcttccttctccagttgtggttgatcagttggaggttcaattcaatcaatctgactgtaactttgtgatacatagtagacaggaagattctcctcctttctattcaaatttgcatgaccaagttgttcaagatacttctcttacactcttcaccaatagatggatgcggttgacacatgaagcaaaatcaggtaccgacccctctgcatctgcc

SEQ ID NO: 4354 - DNA, 4125 bp, Zea Mays
gattcgccccagtttctctgaaacgaagtagacagccaccgtcttcccgggccacggcgatcatcaccgccgcggcgccgcccatatcgacagcagagccgctcgcccagtagcctcacctcgcccgcgcttgtggcggccatggaggactacccagaggagctgcggacgccgccggtgtcgctcgtgtcaatcgtggggtgcccagagctgcacccctcgatctcggcggcactcagctcccagcagccgcccatgaatactctggccctccccgacttcgccaaggtctccatcctggcccgcagcggtaagccccgcgaccctctcgcaccgccgcacccccccgcgggaatcctcaagaaggactggctccttaaacaccgcacccgtgccccggccgccgtcgccgcgctgttccgtgctgaccaggtctccgacgatcctgcccagtggctcaaggcctgctccgatctcgaaaacctcaagtctgcaattcagaggaaaaacactaaattattggtggtccttgtgcaggctcaagctagtgatgagttaagtgaggatgtaacggttgccctgaggaaacgtgcggaaatcgattccaatcacttggttgtgttggttgagcacgatgaagcagaatggaacagatctctgaacaaattgaagagtgtgtttgcggagttatgtgtagcattctataaagaggaagggctaaggataaaggctcgcattgagaaattttttttgcttctgtcgagctgagcatccggtactgcttcaaggttgctatttatgcggagtttagaagggattggccagaagcattgaagttctatgaggaaggtgttcgtgttttgcgtgagatgattggaacttcgacaaggttgcctccaacccaacgcctagttgagataaaagcagttgccgagcaatttcactttaagatatcgaccttgctacttcatgctgggaaagcggtagaagcaatcacatggttccgtaagcatatcagaagctatgcacgggttcttggaacaccagaagttgcttttcttcactgggaatggtttagccggcagttcctcgtctttggtgagttgatagaaacaacatctacaactattccagatacattatctcctagatttggcactgcagactatggattgactgagtgggaatttcagccagcatactactatcagttagcggcaacttacttgagagagaagaggtatgccatcgaatgttcatcatcaatggctaatcttacaacagaagttaatggagtacctgagtcagtaatgccttctgtatatgttggccaatatgtgcgcttgtttgagcaaggagatacagttagtatactacccctttctgatactgaatacaccagctatgctttgtcagaagctgaaagatttcaagattcttatgagataatagcactgttcagaaaagcttatgaatcatttcagagcctaggtgctacaagaatcgcttctgtctgtagcggtggaatggccatggaatattatgcagctggggattttagcaatgcaaaacagctttttgataatgttgctggtctgtaccgcaaagagggttggaccactttgctctgggagaacctaggatacttgagagagtgctcaatgaaacttaattccccaaaggattttatcagttattccctagagatggctgcattaccattattttctcgtagtgaagaggaaaatcgagaaaacaaaattaagagtgggcctgcaggttcccctaccatttccaggagagagaatatacagcaggaagttattaatgttttggaaagaaatcagtcatcagagggaaccgatgatggatttaataatgcgatggaagaagttactcaccttgatattgatcagataagttcgctaagaatggtacttactacgtctgttgcttttcttgatcaatctgtaaaacctggttcacctttgcttgtcagcgtgtcactcttatctcatcttccttctccagttgtggttgatcagttggaggttcaattcaatcaatctgactgtaactttgtgatacatagtagacaggaagattctcctcctttctattcaaatttgcatgaccaagttgttcaagatacttctcttacactcttcaccaatagatggatgcggttgacacatgaagcaaaatcaggacagagtggaaaactagaatgtttgtctgtgaaggcgacaataaaaaaaatgccttgtgatttgctgccacgctgaaagccctgcttccatggaagacttcccattatggaaatttgagaaccaagtggagacattgcccacaagggaccctctgctcttgccttttctggacagaaacttattcaagttgaagagccagatgctcaagttgaccttgtcttaaattctgctggcccagctttagttggagaattatttactgtaccggtgagcatagagtcaaaagagcatgcagtccattctggtgagctgaaaattaacctcgttgatgccagaggtggtggtatgttgttgagtccaagggaagcggaagattctgaaagtcaccatgttgaacttcttggtgtctcaactgtgtccgaggacaaagagtcgaaggaagaggccgatagcataagaaatatccagtattcatttggggttatatctgttcccacattgggtgtgggtgattcctggtcgtgcaaactagaaatcaaacggcatcgagcaaaatcagtcatgctttatgtttcacttatagtgtgtttggtttgaggaataaagtgattcatcttcttctcactcctcacttttttatttggtttgtggaatataatgggttgatccatcaccacctcattcctcataagctaataattagtatatacatgtggagtgggttgattccaccaaaattgatggaatgaacttatgatgcatcactttatgaagcatagactgactctacaaaccaaacacaccattagttactccctaggttcaagtgaagaagaagcatcgcaccggcttaacgtccatagaagcatgcgaattgaagggcagaccccccttattagttagccaccagtttttgagaccatttaggcgagaaccgttgttgctatatcagggatcaggtcctcaggaagtgatgatgaaaaatgttctcttgctatgaatgagtctaacgtgcttattgtgactgctagaaactgcactgacgtgcctttgcatttgcattcgatgaccattcaacctgatggatccgccgccgcttgttgtgggcgtggagtgccctccctacgccgtccttgggatccctttcaccgtctatttgaaggttcacaattcaacgtcttttgcttcaggaaatcaagtactccctcgtcgatccccagaatttcgttttctctggtgctcacagtcacgccttctccatcctgccaaaatcagagcacactgttagccataagcttgtgcctcttggttccggctctcagcagttaccaaggatcacggtgacttcggtgcggtattctgccgcgttgactccttcagcctcggcagcgaccgtctttgtgtaacccggccagtgagcctaaattcaacttggaaactagccgtgcccgtgcagtatcggatgagatcgtgagttgagacgacctgagcaacctgaagtctccactctcctgacacttgttttagctcggcccgggctgcatgccatgcgagataagggtacaacaacatactacacaggacaggaggaggataggctgttgtaaatcaccatcccaccagtcaggaggataggctgcatgcttcgtgatggcagggccatggaggagaaaaccaacgcgtccttgactccttgagcaagtagcccgtcgcgttcatccggcggcgcgctccatgccgatccgtctcggcgtcgcatacggcatatgccagtcgccttcgcgtcggtctatataccggggaaattcgcgttatcttcatccccactttgttcgcctcgccgcatcttcgcatcgacgggccgccttgtctcaatagcgcgccgctggggactggggtagtggggtggggtata

SEQ ID NO: 4355 - DNA, 2865 bp, Zea Mays
acggcccatcacccatcacgtatcgctccctccctcggccctcgatcgtacggcgcgagcgttgcgctccacgccttcctcttcctcgtctggcatcgcgaaccgccgcaccccacccacccgcccacaggccacagcccacccccttctccaggtctctccccggcggcggcgggtgcggttctccggccatcaccgtgcgcaccaggaaaaactatgaggaggtacagccccccttatcgcagcccccccaggaggggatatggtggcagaggaagaagcccccctcctcccaggaggggatatggaggacgcaaggagggtagtggaagccttttggtccgcaacatcccattaagtgtcagagcggaggatcttcgagttccttttgaaaggtttggccctgttcgggatgtttacattccaaaggactattactctgggatcccactacgtactggcgcttctagagggtctctgttggacatgaccaaaccatctcaaccatagttattaaggcggtaaggcgaccgacccccttttacctttcatcgggtaaagtgtaaggtgaggcaacacctcatttatatagatataaatataaataaaaaatagaccaaatattatatatatcaataattcaaagttaataagcaatctagcacaattgtaaagtctattaggcccatttcgacatagtagaagagagaaataggaaaacagaaaaagaaaaaagcccacaaccagctgtccagcccaacacactagttttatgataaacctaccgccagcctcagccgctctccactctcagctgccagcgcagctgtcctctctccctctcccctgcgccgccgccgcacttctaccggagcccttcgcgctgctagcctcagccactctcctatctctccctctctcgcagctctcctcctcctctcccccgcgctgccgccgtgcatttcccggagccatgcgcgccgcagagcctcctcacactcacaccttactctcgcgggcaaggtgacaggatgccttatgagtccaagcccgccttacctcttaagcgtcactttagggacgccttaatagccttgatctcaaccgatgttggacatgtccaaacaatctcaaccgatgttgaacaagcttttcttcaattggtgttgtccctagcctatcaacctcttggtcataatcgtcaaactaattttctagaggcatgaattatagaactgacatcctatatttaacaaagtgaacactagtgcatacttcagtttcagtgcaatgtctaatttgcaatgtgtttggtgcgcttaagctctgatgagtctcatgttattttttttgcaatcgacttgcaccatcaattgatatctaacaacatgatggagtatgaacttgtactctgctttcccatagccaattcatcattgcactatgtggattatattttcttaatgattcccagggttgtgttagtttgaagtataagcatactctttgtttctcaaagaatgccttttaacattactaacaattcatttgcttggcaagatagagtcttgtccaatgaagttcttctatgaagacaagatttgatactttgagaaaattaatttcatgaagagaagatgagagacatatatactggctggtacatgagaagataaaagagagtcaagtcaatttcaagtacttttgtgactttttcaaatgttggggaacttgaagcgaacgatttttatgaagatactctttatgaggatcaccttacgtagttgtatacaagaaacttggacactagagcctgggcatcttactgctttttgcaacacttgcttctcttctgatggaatgtttgtaagttgttgactgtgcttcgctgagaaccatagagggcacagtgaatatttgaatttgatgggagcctcgaggatttgcctttgtagagtttgttgatccttacgatgcctctgaagcccagtatcacatgaatcgccaagttttctttggtcgggaaatagctgttgttcttgctgctgagtcacgaaaaaggccagaagaaatgcgcagcagaactagagtaagaggttactctggtcatgaaggtcgccggtcttcttactatggtcggtctcgttctcgctctcctcgctatcggggccgtcctcggtcgagatcatactctcctgctccaaggcgggggaatgactactctgcctctccaaggagacaggaagcccatcgctcatctcctcccaggcgcctgccaaaggagcatgatgaagataagaagcggaggtcctactctcctgccagtagagatgatgctgacaatgtttatgagaagaggtcgcccccagcagacagcgatggatctcctctgcaccgcaggtcccccaaggagtactcgggctcacctcctggatcccgctccaggtccgccgacgattctcctgttgccagtgactgatcgaccgatggatgctacaatatgaatggtatgcgcatgcggtcatcagtcctatgtctttgtcagaccgagctcactaaacttacccccctttgggggtcgatgttgtattgctaagttccgtttgtgctaagtattagcgcatactgctagactgccactgtcgtctgtgctatgcatgcttttgatctcgagtgatgtttgaggaaccagtgatcgtgttgatggtgctgaacattggaacctgcagtacagtgtagcatgatgcttgcttgctgggccacggcccgttcactgggacctgttgcgtttccgtctttcgagtttgattgatgctgctgcgggtgcttttagccgtcctgtgctactactcccttttcgaatta

SEQ ID NO: 4356 - DNA, 3128 bp, Zea Mays
acggcccatcacccatcacgtatcgctccctccctcggccctcgatcgtacggcgcgagcgttgcgctccacgccttcctcttcctcgtctggcatcgcgaaccgccgcaccccacccacccgcccacaggccacagcccacccccttctccaggtctctccccggcggcggcgggtgcggttctccggccatcaccgtgcgcaccaggaaaaactatgaggaggtacagccccccttatcgcagcccccccaggaggggatatggtggcagaggaagaagcccccctcctcccaggaggggatatggaggacgcaaggagggtagtggaagccttttggtccgcaacatcccattaagtgtcagagcggaggatcttcgagttccttttgaaaggtttggccctgttcgggatgtttacattccaaaggactattactctgggtaagttgtactaaatcaccatattctgtgagttatgtcttaattcctcaaaaagatagctattgctgtttctataatgtttggagctttaaatagttggagacctggctagtttttcttggtcataatcaacaacaagaagaacatcaaagctttttatcccaagcaagctgggtatgctagagttaaaaatccaatagaacccacaagtcaaggttcgggcacatggatgggtatatcctatcatctcaagtctcttttcattgcctctttccatgtcaactttggttttcctcttcctctcttctcgttgcttcgtgccttaggatcccactacgtactggcgcttctagagggtctctgttggacatgaccaaaccatctcaaccatagttattaaggcggtaaggcgaccgacccccttttacctttcatcgggtaaagtgtaaggtgaggcaacacctcatttatatagatataaatataaataaaaaatagaccaaatattatatatatcaataattcaaagttaataagcaatctagcacaattgtaaagtctattaggcccatttcgacatagtagaagagagaaataggaaaacagaaaaagaaaaaagcccacaaccagctgtccagcccaacacactagttttatgataaacctaccgccagcctcagccgctctccactctcagctgccagcgcagctgtcctctctccctctcccctgcgccgccgccgcacttctaccggagcccttcgcgctgctagcctcagccactctcctatctctccctctctcgcagctctcctcctcctctcccccgcgctgccgccgtgcatttcccggagccatgcgcgccgcagagcctcctcacactcacaccttactctcgcgggcaaggtgacaggatgccttatgagtccaagcccgccttacctcttaagcgtcactttagggacgccttaatagccttgatctcaaccgatgttggacatgtccaaacaatctcaaccgatgttgaacaagcttttcttcaattggtgttgtccctagcctatcaacctcttggtcataatcgtcaaactaattttctagaggcatgaattatagaactgacatcctatatttaacaaagtgaacactagtgcatacttcagtttcagtgcaatgtctaatttgcaatgtgtttggtgcgcttaagctctgatgagtctcatgttattttttttgcaatcgacttgcaccatcaattgatatctaacaacatgatggagtatgaacttgtactctgctttcccatagccaattcatcattgcactatgtggattatattttcttaatgattcccagggttgtgttagtttgaagtataagcatactctttgtttctcaaagaatgccttttaacattactaacaattcatttgcttggcaagatagagtcttgtccaatgaagttcttctatgaagacaagatttgatactttgagaaaattaatttcatgaagagaagatgagagacatatatactggctggtacatgagaagataaaagagagtcaagtcaatttcaagtacttttgtgactttttcaaatgttggggaacttgaagcgaacgatttttatgaagatactctttatgaggatcaccttacgtagttgtatacaagaaacttggacactagagcctgggcatcttactgctttttgcaacacttgcttctcttctgatggaatgtttggagcctcgaggatttgcctttgtagagtttgttgatccttacgatgcctctgaagcccagtatcacatgaatcgccaagttttctttggtcgggaaatagctgttgttcttgctgctgagtcacgaaaaaggccagaagaaatgcgcagcagaactagagtaagaggttactctggtcatgaaggtcgccggtcttcttactatggtcggtctcgttctcgctctcctcgctatcggggccgtcctcggtcgagatcatactctcctgctccaaggcgggggaatgactactctgcctctccaaggagacaggaagcccatcgctcatctcctcccaggcgcctgccaaaggagcatgatgaagataagaagcggaggtcctactctcctgccagtagagatgatgctgacaatgtttatgagaagaggtcgcccccagcagacagcgatggatctcctctgcaccgcaggtcccccaaggagtactcgggctcacctcctggatcccgctccaggtccgccgacgattctcctgttgccagtgactgatcgaccgatggatgctacaatatgaatggtatgcgcatgcggtcatcagtcctatgtctttgtcagaccgagctcactaaacttacccccctttgggggtcgatgttgtattgctaagttccgtttgtgctaagtattagcgcatactgctagactgccactgtcgtctgtgctatgcatgcttttgatctcgagtgatgtttgaggaaccagtgatcgtgttgatggtgctgaacattggaacctgcagtacagtgtagcatgatgcttgcttgctgggccacggcccgttcactgggacctgttgcgtttccgtctttcgagtttgattgatgctgctgcgggtgcttttagccgtcctgtgctactactcccttttcgaatta

SEQ ID NO: 4357 - DNA, 1760 bp, Zea Mays
gcatacagaaactcatccatgactaaagcaaactaacaagaactaccacaatgctagctaactagcagggaggcccgaaatgggggcggtgagcaaagacaactttgcaccagccatctctcaaagctctttgcaaaaaagacagtaaagttctctctgtgttggactcgatggggctctcatccaaaccactccaccgctgcccgatacctgttgcggatgatccaaatgttgttgtcataccaaagaggactcccaacacaattgtgaagaagttggcatatataactgttgacaaacaggataaagatccctcaccgctgtttggaggacgtcaaaactggaaacagagggaggagagctttaaactgaactctaccatgaaggttcactgcggatttatgaaaaatagtggtgcagatatggatatcattgatgtcaagtacatacagaaatgcaaattcgtggttgcctctggtattttcgatggttacgacatccctcaccagccatccaatatcagccgccggtctcagaagctgttctgcttcctgatggtggtggacgaagtatctcttgattttatccaaaagaacaccaccgtcaagatcgacagcgctggagggaaatgggttggcatatggcgacttctaacagtgcaccgcctcccattcgacgaacctagaaggaacgggaaaatacccaagatcttgacgcacagactattccctcaagcttggtatagcatttggattgacgggaaaatggagctcatagttgatccgctgcttattctcgagaggtacctctggcgtggaaaatacacattcgcggtggctgtccacaagcatcataggagcatctacgaggagggcgacgcgatcaagcgacggaagcgctacgcccgccctttggttgatcttcagatgaagatgtactattacgaggggatggagccttggagcccgaagaaaaagatgcctggcgatgtgccggagggagccgtgctgatccgggaacacacagcgacgaccaacctgttcagctgcctctggttcaacgaggcacacgagggagcactcgtctaaggtggagtgggccaaaacggtcgacgagatcgtggagaaggggctgagggagagtagaggagggttggggctgtggactccgtaccctgcggacctcagctccgtggaactccctgctgtaagaagaacttcgccggcaggataaggctaggctgtcaaagaccacaaagctcccagcctagcctgccgatcctgtgatctttgattcgttcatggttgtacagagtagaactccactgtttgtttgttttttttggcgtagattctgtaggctgacgcttggagtttgttgcttccagttctgtacaacactcatctacggaggtagcacagaaggatttctcacaaaagaaaaatcatgactcgtcaggtctagtatagggatatcaaaacagcattagaagtcgtcacacacaaaacaaccatagcacctgaaaatgatcagcgccaacgcatcatgcacttccttaattttaatgaatcgtttgcctttcccctgatacaatcacatcacatcagcattctgtgacctaccaaatgttcctacaccagaatcacaggacgcgcgtttcctttacatttacgtctggcgcctgacgtgtggggccacaccatagccgcagctggccccacggccctacacgtgagtcagccagttgcagctatgttcac

SEQ ID NO: 4358 - DNA, 2075 bp, Zea Mays
ctgctattgaggtttgtgttgtgcggcatgattgatgtattatagtgtcaaatccgttctgttctatttagctgcattatcatggtacttgagtaacatttgagctattagttgagctgggtatcattggagtcatatctggtagggacctttatattgcttaattattaagttaattttttctctagaagggtaattccttattctccttgagttattggcaaatggtatacctgctaagattgataaaacttatgtcaagtattattaatttcttgcttgttgtttgtactcagtactcagtggagataacaccaaataaagccagtatactttccaaggttcgttttacaaattggttatggctttggaacatatacatgtattgatagttcatgaaacaagtgttttccaacttgtcctgtccagatcctatctgttacagtgaggtccattcagaaagatgctgaggaaaagaaagcttcatttaatcctcgaccatacttccgattgtttataaattggctctatgatcttactactaccgatggtcaccatgatagttctaattttcaggtacacatcgttagatatgtgtggtttaatacttttattgtgacatctgtgatataatataacaatattgattggtgataggttttgactgcatttgcaaatgcattccacatgctacaacccttgagagttcctgcctggagctttgcttggcttgagctggtgagtcacaggagcttcatgccaaaactgctgatgtgcaattcacagaaaggttggccattttttcagcgactgcttgttgctcttctcaagttcatggaaccatatctgagaaatgctgaactcccagaggcgatggaccttttatacaagggaactatgcgagttctgcttgtactactgcatgactttcctgaatttctttgtgattatcacttcagtttctgcgatgtgattccttcaagttgcattcaaatgcgcaatgtcattcttagtgcttttccacgtaacatgagactgccagacccttctacccctaatctaaagattgatttgttggctgaaatttcaatagcaccacgaatcatgtcggatgttgatggtgcccttaaatcaaagcagttgaagactgaggttgatgaatatctcaagaggccggaaggctcttcctttttaagtgacctgaaccaaaaattgctgctgcctcagaatgaagcaagtgttgctgggacacgctacaacgtgcctctgatcaattcacttgttttttatgttggcatccaagctgtgcaacaactgcaactgaacaaggctaatccgtctgcatcagtacagcagattaaccatatatctccgatggacattttccagattggaacagctaccgatatattcaggagtcttataacaagtttggatacagagggccgctaccttctgttgaatgcaatcgctaaccaactgcgctatccaaatagccatacacactactactccttcatcactctgtatctattttccgaggctacccaggaaattacccaggagcaaatcacaagggttcttctggagcgtctcatagtgaaccgcccccatccttgggggttacttattactttcattgaattgataaagaatccgcgttacaacttttggagccggtcttttacacactgtgcacctgagatagagaaactgttcgagtcggtggcaaggtcatgtggcgcaaaagttgtggacgaaggaatcagcgtgcaggatggcagccactaaagccatctgctttgttcaagtgttgtttttgtgctatttcttctctggcactggaaattttctgtgcttgtacagatcgtctgtatagtaaagctgttagtcacacgtgtcggtgcactgccaaaccttagcaggtgcctgggagaatgcttttgtttgtatgaattttagtcagcaatatggatggtttgcaatatcgctcgctgctacttcgcgccagtacaacagatccaggtttcattgaagaaaatgcctcatccataactgtaacctaactctctctc

SEQ ID NO: 4359 - DNA, 2511 bp, Zea Mays
  misc_feature (1)..(1): n is a, c, g, or t
ngatctattttacctgaacttttgaatactggggatgctttggagagataccaacaggttgcccaaaagctggaagccttgattgctaatgatggcaaagatgtggaaattcagtctgttattatggaagttcctgatatcttgcgtaggtgtgttagccgtgatgaggctgcattagcagtagcacaaaaggttttcaagagtttgtacgataacacatcaaataccacttatgtctcctggcttctagcaaccttagttgcaatacgagatgtctgcaagcttgttgtcaaagagttaacaagttgggtaatatattcagatgaagagaagaagtttaacattgatatcatttttggccttattcgttcggagttgctgaatattggggagtacaatgttcatttggcaaagttaattgatgggggaagaaataaggttgcaacggagtttgcaatgtcccttgtccaagcattgtttgctcatgatcctgttggcttcacagagtttcagaatgttcttgatgcactatcgaagcatacaaagagaccaggttcacctgaatcgttgcaacaattgattgaaatcgcaaggaataatgtgagcaccactactggttttgttgctgtgaaggatgaaaaggtcaaactgccgaaggataaaaaggttttagctacccgggcaaacaaggaggaaaacactgctaatgaaattacactagttgatccaaatcaggtggcagtcctgttttctgaatggtgtcagatgtgtaatcatgtaagtgctagtgatgcggcatacactcgttttgtcacacagttgcagcaagatggtctgctgaagggggatgatatctctgaacgcttcttccgtattctcacggaacttgctgttacacactctctagtctccgagcagatcgttgctcctggtggatcatctcagcaatcaccacagcaacctcacatttcatatttctccattgattcatatgcaaagcttgtggttatggttctcaagtactcagtggagataacaccaaataaagccagtatactttccaagatcctatctgttacagtgaggtccattcagaaagatgctgaggaaaagaaagcttcatttaatcctcgaccatacttccgattgtttataaattggctctatgatcttactactaccgatggtcaccatgatagttctaattttcagctttgcttggcttgagctggtgagtcacaggagcttcatgccaaaactgctgatgtgcaattcacagaaaggttggccattttttcagcgactgcttgttgctcttctcaagttcatggaaccatatctgagaaatgctgaactcccagaggcgatggaccttttatacaagggaactatgcgagttctgcttgtactactgcatgactttcctgaatttctttgtgattatcacttcagtttctgcgatgtgattccttcaagttgcattcaaatgcgcaatgtcattcttagtgcttttccacgtaacatgagactgccagacccttctacccctaatctaaagattgatttgttggctgaaatttcaatagcaccacgaatcatgtcggatgttgatggtgcccttaaatcaaagcagttgaagactgaggttgatgaatatctcaagaatgaagcaagtgttgctgggacacgctacaacgtgcctctgatcaattcacttgttttttatgttggcatccaagctgtgcaacaactgcaactgaacaaggctaatccgtctgcatcagtacagcagattaaccatatatctccgatggacattttccagattggaacagctaccgatatattcaggagtcttataacaagtttggatacagagggccgctaccttctgttgaatgcaatcgctaaccaactgcgctatccaaatagccatacacactactactccttcatcactctgtatctattttccgaggctacccaggaaattacccaggagcaaatcacaagggttcttctggagcgtctcatagtgaaccgcccccatccttgggggttacttattactttcattgaattgataaagaatccgcgttacaacttttggagccggtcttttacacactgtgcacctgagatagagaaactgttcgagtcggtggcaaggtcatgtggcgcaaaagttgtggacgaaggaatcagcgtgcaggatggcagccactaaagccatctgctttgttcaagtgttgtttttgtgctatttcttctctggcactggaaattttctgtgcttgtacagatcgtctgtatagtaaagctgttagtcacacgtgtcggtgcactgccaaaccttagcaggtgcctgggagaatgcttttgtttgtatgaattttagtcagcaatatggatggtttgcaatatcgctcgctgctacttcgcgccagtacaacagatccaggtttcattgaagaaaatgcctcatccataactgtaacctaactctctctc

SEQ ID NO: 4360 - DNA, 1576 bp, Zea Mays
agctcactccggacacacttacaagatatagatctatgcaagagtgagagaaaaagccggcttagccgttcgctgcagctagtttgcagctgctttcacagcggcctggctggccgaaagggccgtgcgggaagccaaccaggccaccgccgccaaagcgcggggaagtccgacgaacgaagcagtacaagcgaacgaacctaggcaggaccggttcgctgtctcgtcccgacctcgccgcccgccctcccgcacgcctgcccatggaggcgctgtggaagcaggcctccaggctcaaggaccaggtcgctcggcagggtgtgttcaagcagtttggctatgggaattctgataatgcatttacagatgaatcagaggttaaaatgcatcagagattggaaaagctttacttatcgactcgtgctgctaaacattttcaaagagacattgttcggggcatggagggctatatagtcacaggatccaaacaagtcgaaatagggaataaattgtctgacgacagccaaaaatatggtgctgaaaacacatgtacaagtggtgatactttatccaaagctgctacatacttcgggaaggcacgctcacagatggaaaaggagcgcggcaacatgttgaatgcatttggcacacaggtggcagagccactgcgggcaatggtaatgggtgtgcacctttagaggatgcaagacatctggcccagagatatgacagaacgaggcaagaagctgaagcacaggctgtcgaagtatcaagacggcagaatagggtgagggagtcagctgggaatggagatatgatatcgaaattggaagccgctgagtacaagcttgaagaactgaagtcaaacatggtggcattagggaaggaagctatctcagcaatgtcagcagttgagactcagcagcaatggttgaccttacaacgtctcattgcactggttgaggctgagagaggttaccatcagagagttctggagatacttgaccagttggaaaaagaaatggtgtctgagcgccaaaaaattgaagcacccctgactccagcagctgacaattacatgccaccaccaccaccatcttatgatgaagttaacggagcgtttgcatccacttctgttaatgaatcagtccaatctgtcaatttcttccttggagaggcccttgattccttcaaagctgaaagtgagtttgagcttaccttgtcagctggtgacattgtaattgtccgaaagatttcaagcaatggttgggcagaaggtgaatgcaagggcaaagcaggatggtttcctcatgcttatatcgaaaggcgagaacatgttctagcaagcaaagttccacatatcttttaggagtttttggctggtacatcatttctattgttgggagctggaatagtatccatgttttcattttctcttacgtcgcgtatgtacttaccggctgtcatgtgcataattaaactttacttccttattttagtctggagaagattttggatgtaacatatatttgagggaccaattggacactggttgcctcgatattgtgaaatagtt

SEQ ID NO: 4361 - DNA, 556 bp, Zea Mays
atataggcaaggatgtggagggtttagtttgtacaacctggcatggtcacaacagatcttcttatgtctggtgcaactacaaaacaagcaaaaattttcatcaatatattagctgaacctcctgatgtggttgcagactaccttgttccaaacgtcagagaaatccctaccaagcaatccatgaagccaacctacattcgtttcctcacaggcttgaaggcctactcaagaattttttctagacttgcttttggtgctaggagaaacaagtatgttactgaagattagttatgctgccagcttccaactgaagagattaggaacaattcttttcattaagcgtcacttacttttctcataagatgggatgtattacagatgtcatctcatgagaacagtgatatactcttctgtacagtagtagcaatttttttagtaaatgcataggaaaactgtgcatcaatatatcaagaagaatatagaaataaggtctaaaatagaccacaacatgataaccacctcacctcacgaatatacaaaagagtccatctaaaaa

SEQ ID NO: 4362 - DNA, 1064 bp, Zea Mays
tgtagacgctggcttcaaacaaagaaaacggtataggatatgcattggcaaggaaatttctggaggctggtgataacgttataatctgctcgagatcagctcaaaaggtagaatctgtggtcggtgacttgaaggaggagtacggagagcaacatgtggaactgtctgtgatgttagaaatggaaaggatgtaaaggcacttgtggagtttgcacgtgacaaacttaagcatattgatatatggatcaacaatgctggatcaaatgcatatacatacaaaccactagtggagacctctgatgaggctctcatggaaatcatcaccactaacacccttggattgatgatatgttgtcgtgaggcaataaatatgatgaggaaccaacctcgaggtggtcacatattcaaccttgatggtgctggttctgatggaaggccaactccaagatttgctgcatatggtgcaacaaagagaagtgttgtgcatcttacgaagtcacttcagatgaatgaagtgaataatgtgatggtgcacaatctatcgcctggcatggtcacaacagatcttcttatgtctggtgcaactacaaaacaagcaaaaattttcatcaatatattagctgaacctcctgatgtggttgcagactaccttgttccaaacgtcagagaaatccctaccaagcaatccatgaagccaacctacattcgtttcctcacaggcttgaaggcctactcaagaattttttctagacttgcttttggtgctaggagaaacaagtatgttactgaagattagttatgctgccagcttccaactgaagagattaggaacaattcttttcattaagcgtcacttacttttctcataagatgggatgtattacagatgtcatctcatgagaacagtgatatactcttctgtacagtagtagcaatttttttagtaaatgcataggaaaactgtgcatcaatatatcaagaagaatatagaaataaggtctaaaatagaccacaacatgataaccacctcacctcacgaatatacaaaagagtccatctaaaaa

SEQ ID NO: 4363 - DNA, 2630 bp, Zea Mays
ttcccgcccaaagcctcctctttattcccttcttcccgccatcccccgaacacttcgccgcccccctcccgcctcccgctgttctctgcctcccacccccacgccgccgtcccatcaccgccgctgggatgaagaaccctgacttcgccgcagacaaagcgctcgccaaggacttcctgtccaatttcaccggccctcacggcgagcccaagtacctgaacatcctgcaagatgtcgcgaacaggaagatacgcgcggtccagatcgagctggacgacctattccactataaggatgtcgacgaggagttcttgcagcgtgtcaccgagaacacgcggcgctacatcggcatcttcgcggaggccatggacgagatcatgccggagcccacagaggcgtacaccgtcgacgaggaccaggacatcctgatgacgcagcgtgtggatgagggggccgacggcggcgcggacggcacggacccgctacagaaaatgccaccagagatcaaacggttctttgaggtttacatcaaggcattctcaaaggtgactccactcaccattcggcaagtgaaggcatccaacattggtcagcttgtgaaaatatctgggattgttactcgctgctcggatgtgaagcccttgatgcaggttgctgtttatacatgtgaagaatgtggcttcgagatataccaggaagtgactgctagagtgtttatgcccctcattgaatgtccatctcaacgatgcaagctgaacaaagcgaagggaaatctaatccttcaactgcgtgcgtcaaagtttttgaaatttcaggagcttcaagagttagcagagcacgtaccaaagggccacattcctcgtgctctgactgttcatctaagaggagagctgactagaaaggttgcacctggagatgtggttgagatgtcgggtatttttctccctatgccatactacgggtttagagcgatgcgcgcaggattagttgctgatacttacttggaagcaatgtctgtcacccacttcaagaaaaaatatgaggagtatgatctaaaaggtgatgaacaagaacaaattgaccgattggctgaggacggtgatatctacagtaagctggcaaggtccttggcacctgaaatatttggccatgaagatgtcaaaaaggcactgctgttactacttgttggtgcaccccatcggaagctcgcagatggcatgaagatcagaggagacctgcatatatgcatgatgggagatcctggtgttgcaaagagtcaacttctgaagcatattatcaatgttgcaccaagaggagtgtacaccactggacgtgggagcagtggtgttggacttaccgctgcagtccagaaagatccagtaacaaatgagtttgtcctcgaaggtggagcactggtactggcagatatgggcatttgtgctatagatgagtttgacaagatggaagagtcagacaggacagcgattcatgaggtaatggagcagcaaacagttagcattgccaaggctggcatcaccacctctcttaatgcgagaactgcaattctggctgctgcaaatccagcatggggaaggtatgatatgaggagaaccccagcagaaaatataaatctacctccagctcttctgtctcgtttcgacctcctttggttaatcctggatcgtgcagacatggaaactgatcttgaaatggcaagacacgttgttcatgtgcatcaaaatcttgaatcaccagcgctggggttcacaccacttgagccatctgtactcagagcatacatatctgctgctagaagagtcattccttctgttcctagagagctcgaggaatacattgcaactgcatattccagcatccgccaagaggaggcgaagtcaaatgcaccaacctcctacacaactatcagaacacttttgagcatactccgtatctctattgccttggcaagactgaggttctcagaaactgtggctcagagcgatgtcgacgaagcactgcgactgatgcaaatgtccaagtactcattatactcagatgaccgccagcggtctggccttgatgcaatatctgacatatattccatcctgagagacgaagctgctaggacgagcagcatggatgtgagatacgctcacgctcttaacttgatctccagaaagggatacagcgaggctcaattgaaggaatgcttggaggaatacgcttccctgaatgtgtggcagatccatccaagcacatttgacatccacttcattgatgcctgatgcagaagccgatgccgatcacctaacatttcatcatgatccaaggatttgaagaccttcgactgaagcctaacaagatttaaaagttttctagtgatagtgaacgacagcccatttcttgatggcaatgatgtaatgctgagaagcctatctcaattgcactagtagaaacaatctcaattgtactagaagaaccattcttgtatgacttgtgagtagcttgtttttatatttgctgacatttttccacacttgatagtgaagtagatgtaacttgcgtgtttcttgtttgcttgttataaatcaatacgacacaaagtagatcaaatatagagaatatacata

SEQ ID NO: 4364 - DNA, 3696 bp, Zea Mays
gagttgtctgttgcctcaccacccctctgtccctgcttccttctgctcccgcaacgggtggcctccgttccccgaccccgcccgactctcccacacatctccggcgctctcttcgagtcctcctgcagtcccgccgccttctcatcgctaccaaaattgcaaagccggactggaactcgcgtcgcgcgcaggggcatggacccggacgacgaaccagcggcgcagcggaaagccgtcgacttgcacctgccgcgcgacacggagcctgcctcctcgcccgcgtgcacccgccgcgccgcgccgcgcgtgctcagctactgtgacgtccctttcgcctccgcctcggcgcagcgctgcgcatcattcccgcagcgccacggagagctggcgcacgcccgctcggcctccttcgcagcctggatcgaaggcggctcggcgtcggcgccggcggcggcactcgagcgggccatgtcgcagtacggcggtgcggacggcgcgctgccagagttcgtcggcgccggcggtggcgagggcatcttccgcgtgccgctccgcgcggcgatgcacccggcgcgcccgccgccgctcgaggtgcggccccacccgctgcgggagacacaggcgggcgcctttctgaggacgctggcctgcgacccgcggcgacggcagctgtgggcgggcgccgagtccggggttcgagtgtggggcctccacgaggtgttccgtgggtggtggccgggcgccgggccgcggcgccgcggtgacgaggaggccgcgccgttcagagagtccgtgccggtcccgcccgcgctctgcgccgctgtcgacggcgctaacgggatggtgtggacggggcacagggacggcaggatcagggcgtggcgcatggaccacgccgcgcccgccggaggatactccgccggcagtgcgcccatgttcaaggaggccctctcgtggcaggcgtacagtcgcacgccggtgctcgccatcgtcgtcacgttggatgctaagactagggaacttttaaaagtatttggcatcgatggacaagtcgacttagctcgtcctgaggccccagtaatgcccgaacaattcatagaggaagagattaaagtaaaacccacaaaaagggagaggccgcaaggttctttcacattttttcagaaatctaggaatgccttgatgggcgcagctgatgctgtacgcagagttgcaacaaaagggacatttgtcgaagataatcggcgaactgaagcagtggctcaagcaatgaatgggacaatttggtctggttgcacagatggttcaattattgtttgggatggaaatgggaatagactgcgagaatttcattaccatagttcttctgttcgatgcataaagacactcggagacaaggtttgggtgggctatgcaagtggcactattcaagttgtcgatgtcgaaggtaaccttcaggcaggatggattggtcatagctgcccagtcatagacatggcaattagtgattcttacattttttctttggcacatcatggtggtattcgaggatggcctctaagttcccctagctccctagatgatattctatgctatgagttggctagcagggaactgttatacacaaggctagagaaccttaaaatactggttgggacttggaatgttgcacaagagaaagcttctcctgaagcactaaggtcatggttgggtggtgcattttttgatgttgggctggtggtggttggtttgcaagaggtcgagatgggtgctggagttcttgccatggcagctgccaaagaaagtgtagggcttgaaggcagtgccaatgggcagtggtggatagacagtattggcaaaacacttgatgagggaatatccttccacagagttggttcaaggcagttggcaggactacttattgctgcatgggcaacgaatgaccttaggccacatgttggtgatgttgatactgctgcagtgccatgtggctttgggcgtgctattggcaacaagggtggcgtcggattaagaataagagtctttggtcgcaggatatgttttgtaaacaatcattttgctgcacatcaagagaatgttagccgccgcaatgctgattttgaccgcatttatcggacaatgactttcaccaaacctcagggatctgcagcttctgctacagctgtccaattgcataaagcagctaatgaaaatcaagcagatgaaggtaggcctgatctggcagaagctgatatggttatcttccttggtgatttgaactaccgacttgatggcatcacctatgatgaagcaagggacatggtctcccagaggagctttgactggcttagagaaagggatcaacttcgagcggaaatgaaggcgggaaatgtgtttcagggaatgcgtgaaggcccaatcagatttcctccaacctacaagttccagagacaccagtcgggtctctcagggtatgattcaggcgagaagaagagaatacctgcttggtgcgacaggatactgtatcgagatagccgtcctgtaccaatagctgaatgctcattagagtgccctgtcgtcgctgcaatcacagcgtacgaatcttgcatggatgtcacagacagtgaccataaacccgtgagatgtacattcagcgtcgatattgcaagagtagacgagctgataaggaggcaagagtttggaaaaataatcgaatctaacaaaaaggttcgctctttgcttcgagagctccgttctgttccggacaccgtcgtcaacgcgaacaacattacattggaaaatcaccaagaagatgtcatcctccggataactaataactgtgaaaccagcaaggccgcttttgaaatcctgtgtgaaggccagacagtcagaaagcagggcggaacccaatctgaggagctgctcccaagggcgtcctttggcttcccactttggcttgaggtccaaccatcgatgggtctcatcggcccaggagaaacagcggaagtcgtcgtgcgccacgacgacttcctgacgcaggaagagtacgtcgacggagcacagcggaaccggtggcgcgaggccacccgagacctggaggtcgtgctctcggtgacagtcacgggcagctccagctcctcggccgaggccgtcgcgcacagggtcaccgtccggcactgctgcccggcgcctccggctcccctgcccgccaaccggcgctctgccgctgcctcgcctcgtgacgacgttgccgcgtcggataaccagtcgaaccacctgcaccgttccgatctcgccagcttcggtagctcggaggtgcgtgacctgtgcgggggcttgtgaaagcgagtttcgctgcctttgcttcatcgtcctgcattcctgctccttacatgtgcgtcgtcctgccgttctttgcgtgtcgaatcaaaaagcgagagagaaagaaagagagaggaaaaaaaaggaagaaagaagagagtgcaattgttgtaattacctgtagtaggtaaaattttcaagctaaccttttttttttgaccttcttaagttaagtagtagatgtggcattgaaattgtgttggtgcaaagtggagtgagtgtatggttgtatgtatagtaatggaggttgtatgcttgtatagtctattgattggacgatgctttgctcctactgcaatacagcgcaacgagaac

SEQ ID NO: 4365 - DNA, 3702 bp, Zea Mays
gagttgtctgttgcctcaccacccctctgtccctgcttccttctgctcccgcaacgggtggcctccgttccccgaccccgcccgactctcccacacatctccggcgctctcttcgagtcctcctgcagtcccgccgccttctcatcgctaccaaaattgcaaagccggactggaactcgcgtcgcgcgcaggggcatggacccggacgacgaaccagcggcgcagcggaaagccgtcgacttgcacctgccgcgcgacacggagcctgcctcctcgcccgcgtgcacccgccgcgccgcgccgcgcgtgctcagctactgtgacgtccctttcgcctccgcctcggcgcagcgctgcgcatcattcccgcagcgccacggagagctggcgcacgcccgctcggcctccttcgcagcctggatcgaaggcggctcggcgtcggcgccggcggcggcactcgagcgggccatgtcgcagtacggcggtgcggacggcgcgctgccagagttcgtcggcgccggcggtggcgagggcatcttccgcgtgccgctccgcgcggcgatgcacccggcgcgcccgccgccgctcgaggtgcggccccacccgctgcgggagacacaggcgggcgcctttctgaggacgctggcctgcgacccgcggcgacggcagctgtgggcgggcgccgagtccggggttcgagtgtggggcctccacgaggtgttccgtgggtggtggccgggcgccgggccgcggcgccgcggtgacgaggaggccgcgccgttcagagagtccgtgccggtcccgcccgcgctctgcgccgctgtcgacggcgctaacgggatggtgtggacggggcacagggacggcaggatcagggcgtggcgcatggaccacgccgcgcccgccggaggatactccgccggcagtgcgcccatgttcaaggaggccctctcgtggcaggcgtacagtcgcacgccggtgctcgccatcgtcgtcacgttggatgctaagactagggaacttttaaaagtatttggcatcgatggacaagtcgacttagctcgtcctgaggccccagtaatgcccgaacaattcatagaggaagagattaaagtaaaacccacaaaaagggagaggccgcaaggttctttcacattttttcagaaatctaggaatgccttgatgggcgcagctgatgctgtacgcagagttgcaacaaaagggacatttgtcgaagataatcggcgaactgaagcagtggctcaagcaatgaatgggacaatttggtctggttgcacagatggttcaattattgtttgggatggaaatgggaatagactgcgagaatttcattaccatagttcttctgttcgatgcataaagacactcggagacaaggtttgggtgggctatgcaagtggcactattcaagttgtcgatgtcgaaggtaaccttcaggcaggatggattggtcatagctgcccagtcatagacatggcaattagtgattcttacattttttctttggcacatcatggtggtattcgaggatggcctctaagttcccctagctccctagatgatattctatgctatgagttggctagcagggaactgttatacacaaggctagagaaccttaaaatactggttgggacttggaatgttgcacaagagaaagcttctcctgaagcactaaggtcatggttgggtggtgcattttttgatgttgggctggtggtggttggtttgcaagaggtcgagatgggtgctggagttcttgccatggcagctgccaaagaaagtgtagggcttgaaggcagtgccaatgggcagtggtggatagacagtattggcaaaacacttgatgagggaatatccttccacagagttggttcaaggcagttggcaggactacttattgctgcatgggcaacgaatgaccttaggccacatgttggtgatgttgatactgctgcagtgccatgtggctttgggcgtgctattggcaacaagggtggcgtcggattaagaataagagtctttggtcgcaggatatgttttgtaaacaatcattttgctgcacatcaagagaatgttagccgccgcaatgctgattttgaccgcatttatcggacaatgactttcaccaaacctcagggatctgcagcttctgctacagctgtccaattgcataaagcagtgagtgctaatgaaaatcaagcagatgaaggtaggcctgatctggcagaagctgatatggttatcttccttggtgatttgaactaccgacttgatggcatcacctatgatgaagcaagggacatggtctcccagaggagctttgactggcttagagaaagggatcaacttcgagcggaaatgaaggcgggaaatgtgtttcagggaatgcgtgaaggcccaatcagatttcctccaacctacaagttccagagacaccagtcgggtctctcagggtatgattcaggcgagaagaagagaatacctgcttggtgcgacaggatactgtatcgagatagccgtcctgtaccaatagctgaatgctcattagagtgccctgtcgtcgctgcaatcacagcgtacgaatcttgcatggatgtcacagacagtgaccataaacccgtgagatgtacattcagcgtcgatattgcaagagtagacgagctgataaggaggcaagagtttggaaaaataatcgaatctaacaaaaaggttcgctctttgcttcgagagctccgttctgttccggacaccgtcgtcaacgcgaacaacattacattggaaaatcaccaagaagatgtcatcctccggataactaataactgtgaaaccagcaaggccgcttttgaaatcctgtgtgaaggccagacagtcagaaagcagggcggaacccaatctgaggagctgctcccaagggcgtcctttggcttcccactttggcttgaggtccaaccatcgatgggtctcatcggcccaggagaaacagcggaagtcgtcgtgcgccacgacgacttcctgacgcaggaagagtacgtcgacggagcacagcggaaccggtggcgcgaggccacccgagacctggaggtcgtgctctcggtgacagtcacgggcagctccagctcctcggccgaggccgtcgcgcacagggtcaccgtccggcactgctgcccggcgcctccggctcccctgcccgccaaccggcgctctgccgctgcctcgcctcgtgacgacgttgccgcgtcggataaccagtcgaaccacctgcaccgttccgatctcgccagcttcggtagctcggaggtgcgtgacctgtgcgggggcttgtgaaagcgagtttcgctgcctttgcttcatcgtcctgcattcctgctccttacatgtgcgtcgtcctgccgttctttgcgtgtcgaatcaaaaagcgagagagaaagaaagagagaggaaaaaaaaggaagaaagaagagagtgcaattgttgtaattacctgtagtaggtaaaattttcaagctaaccttttttttttgaccttcttaagttaagtagtagatgtggcattgaaattgtgttggtgcaaagtggagtgagtgtatggttgtatgtatagtaatggaggttgtatgcttgtatagtctattgattggacgatgctttgctcctactgcaatacagcgcaacgagaac

SEQ ID NO: 4366 - DNA, 3377 bp, Zea Mays
gagacggctgtactgtactgatcactcctggcctctgcgaaggaaagaagaggtgggggaggctggtttggtggcctgtaccgatttgcagcagctgatggcggcgcctctgctcccctcttccgtctccgtgctcctctcgctccacatcgcgctgctgctggtcctctgctccagccaggtaggagattcctgctcctcagtgcgggactgcggcacgggcctctactgcggcaactgccccgccgcaggcaggaccaagctctcctgcatcagggacctagccatccagcccacctccattgggctacctttcaacaggtactcatggctcgtcacccacaattccttttccatcctcggggagccgtcgcgcactggggttgagagggtcacgttctacaaccaggaggactccgtcaccaaccaattgaggaatggtgtcaggggattgatgcttgatatgtatgacttcaacgatgatgtatggctctgccactccctgcaagggcaatgctataacttcactgctttcgtaccagcagttgacacactaaaagaggtggaagcatttctctccgagaatcccacagagatcataacaatatttattgaggattatgttcattcaccgatgggactgagcaaggtctttactgctgctgacttgatgaagtattggtatccaatctcggaaatgccaactagtggcaaggactggccaagtgtcacagatatggttgcaaaaaaccgcaggttgctggtgtttacttctgatgcttcaaaggaggctagtgaaggaatagcttaccaatggagctacttgctagagaatgaacctggagatccagggattgtgcctggttcttgtccaaacaggaaggaatcgcagccactgaactcaaggccggcatctctatttctgcaaaattacttccccacgatccccgtgcagaacgaagcatgtaaagagaattctgggctaccacaaatggcccaggcttgttatgccgcagctgggaataggatcccgaacttcatagctgtgaatttctacatgcgaagcgacggtggtggtgttttcgatgttcaagacagaatcaatggccgcaccttatgtgggtgtgacaccattgctgcttgccaggctctagttttcatatatctggacctttttcccacctactgtatagctgaaagtaacatcagcttttgttgtgagcttgctttctctattgggatgacgatatatgcatgcgtgttgcacctagaccgaaattttgttcacatcaatggaaaccgcgtcttctctgtgccctctactgacgggtgggtcaccacgggtcccggactcggttggacacagggtccagcactccagcagccagccgtccaggcaccaggctcatccagtgttcgagtcctcgtcgacttcgctttcccgattcctaaccccgcaggccgcaggctcgcatcgccaagcatcttccgcgtctcttcggagacatctagtaaaagcatcttccgctactccgccctccgcctcccccgtctgcttcgcaatccgatccggcgaccggcggccatggatcctgcgccgcagacgcacccgatcctctcttacgtgctctcccgcatccccaacctctccatgaccaagacccccaccgccgagttcgacatcgagcagccgcctgtgcacaccccgtccccgcggacgccgtcctccgcgggagagttcgagctcgtcgagcgcatgccggggctgcgccacccgtccgtgctccgcgccatgacccgcgccgtcgccgacgtctccgccgcgcgctccgcgctgcaggtgctcggcccgcgccccgaccacgagctcgtcgactcctcccgcgccatagtggccgccgccgaggccggggattcgcggatccccgcgggcgacgtcgaggcgtgccgcgcggtggtgcgcctcgatgagacccacgacgcctacgaggccctgctgcacgaggccgagtccaggctcgagagggtgtaccgctccgcgatggaggggacggacctggatgacgaggcggcggagagcgtcaaggatcaagggccggtcgcggggcctgagggcggggacgcggcggtgggggaggaggtggtggcggtgctcaagcaggccgaggagggcaagccggtggacagcgtgcgcctcgtggatcgccagcttcgccatctgcccgaggcgttcgggaggatcctggggctccgtgtgctcgacgtctcccgcaaccagcttgaggttattccagatgctataggaggacttggtcatcttgaagagctttttcttactgccaatgatttggtatctctacctgataccattggactgctatccaatctgaagattttgaatgtatcaagtaataggcttagggcactgccagatagcatctccaagtgcaggtcgctagttgagcttaatgtgagctataatggtcttacttatctgccaaccaacattggttatgacttggtaaatctgcgaaaactctggattcatatgaacaaattgcgttctcttccatcatctgtctgtgagatgagatcgttgtatctcctggatgcccattttaatgaactatgcggtctaccatctctcttcgggaaacttagcggccttgaaattctcaaccttagcagcaacttcagtgatttgaaagagcttcctccctcgtttggtgacttgctaaatctgcgtgagcttgacctaagcaacaaccagattcatgctctccctgacacttttggtcggctggataaactggagaagcttaacctagagcagaaccctctagtcatgccaccagaggacattgtgaacaagggcgtggatgcagtaaaagagtacatgtcaaagaggtggctggacatattgctcgaggaagaacaaaggcgcattgcggcagagaccccagaaatgtcatcgactcctaaagcttggctgactcgcagcgtctcctgggtcacggacgtttctgagagtttggcagggtacctaggtgggaacaagtcagagaaagatgcatatctggaccagcagttttgatactttatgtttcttttgcctaatgtgcattcgccccatgtatacacaaataacgtttaccaaaaatcttcattacagatgtgttcctggtgagtataccgtacggttttgcttaggaaatggatgtgttcctaatgggtctgtcgtacggttttaccgtggtccattgaataatagtatctcacagcacttgagagtacactcaagataaacattgttcagagatcgacctgtcttctggtatttggctttcgcccttcgctgtgaatttttgttccatgta

SEQ ID NO: 4367 - DNA, 1145 bp, Zea Mays
atgtctcgtgtgaatggagtcactgacgccttgagcatcggtccctccgcagggtacattctattcttagtaattgtgcatattttactattttttactgcttatgatcgttcatatacactcttagccatccaaaaggttactcttttatgctccgcttgcaaggcgccaaggacggacggaggcgacgactcgcaaggtagctctgctcgggcgaggcagcagcagcacgcagcagtactccgttcagaatcaggagagaagacgttgttctccgggcactcgagtcgaagtcctgacgagatggacggcaatgcgaggtcggcggcaacgaatcagaagaagcccgtcgtcgcggacgacgacctcgtggagctgctgtggcacaacgggagcgtcgtcgcgcagccccaggcgcaccagaggccggcgcccacctacgaccccgaccgcccgggcaccagcggcctcaccggcgaagagaccgccgcgtggttcccggacaccctcgacgacgcgctggagaaggacctgtacacgcagctctggtacagcaccatcgccgacgccgccccgcagcacgagggcacgctcccgggccctacctcgcagccttcgccttcgccgcccgttgggagcagcggcgtcgagtcgagctgggctggcgacatctgctcgaccttctgcggaagcaaccaggtgctcaggacgccggcaaggatcagggggaaggacgcggcattgcagtcggagttgccgagcaataccggcgcgcacgacggcacatcgtcatccggcgggtctggaagcaactatgggggattcgggctgcccagtgacagcgtccatgtacagaagaggaaggggaggtgtagagacgactcagatagtccgagtgaggatgccgagtgtgaggaggcaagtgaggaaacgaaaccatcaaggcgatatgggacgaaacgccggactcgtgcagctgaagttcacaatctttcagagaggagaagaagggaccggatcaatgaaaagatgcgcgcattgcaagagctcatcccgcattgcaacaagactgacaaagcgtcgatattagacgagacgattgagtatctgaagtccctccaaatgcaagttcagatatgtttcag

SEQ ID NO: 4368 - DNA, 3255 bp, Zea Mays
ctccaatgagcatcatgcagaaagtgacatctatgatgttgttgaaagtcagagggaaacacaagatgggcagcttccaagaacacattcagttccagataccacatggactaaagcgaaatcaagcatgccaattggtgtgatttttcagtatatatggtatcagatgcgaagtaattatgattatgtttgctattgctgttttattctggttttcatgtggaattttagtttgttatccatggcctaccttggggcacttttcttatatgctctttgcgtgaactatggcccaagttacttgttttgggtcatcattctgatctacaccgagagctcgatcactgccaaagatggtgaatgggttccggtaacagaattcagctttcttagtgcaaggaacaacattgaagagaaacactgtgtagcttacagttggagagagaagctaaaaagtttgcccttgcctgtttttgatctcataaggatgattgttagaggcttatctagatactggatgtcattaacacatggagctgaatctcctccatattttgtgcaagttacaatggaggtaagccattggccagaagatggaatccagccagagaggatagagtctgccataaatagggtgcttgctattgctcatgaagaaagatgtcaggcaaacttgccttcctcttgccactgttgtagtaaagtccggattcaaagtattgaaaaaagcaaagaaaattgtaatatggctcttgctgtactagaagttgtttatgctgctcctgtagagtgccaatctaagggatggcacaaatctctcactccagcagctgatgtagaaagagagattcatgaatcacagaaagcaggattttttgaagaaataaattttccttacccgatcgtctcggtgattggtgggggtaaaagagagatcgatctttatgcatattattttggcgccgacttggcagttttcttccttgttgcaatgttctatcaatctatcctaaaaaataagagtgaattcttggaagtttaccagctggaggatcagttcccaaaagaatttgttttcatccttatggttctctttttcttgatagtggttgaccgcattatatatctttggtcctttgctaccggcaaagttgttttctatctttttaaccttgtgcttttcacgtattctgtcactgaatatgcttggggaacggagctagctcacagggatattggaggacttgtactacgtgcaatctaccttacaaaatcaatttccctagcactgcaagctttacagatcagatatggtattcctaacaaaagcaacctatataggcagttcttgactagcaaagttactcaagtgaattacttgggcttccgtctgtatcgtgctttaccattcttgtatgaattgcggtgtgtacttgattggtcttgcacaaccacatctttaacaatgtatgattggctgaagttggaggacatatatgcaagcttgtttcttgtgaaatgtgatacacttttgaacagagctaatcatcgtcagggagaaaaacaaacaaaaacgacgaaattctgcagtgggatatgcttattctttgtacttatttgtgttatttgggctcctatgttgatttatagtagtggtaaccctacaaatattgccaatcccattgttgatgtaagtgttaagattgatataaaggcacttggtgggagattaaacttgtttaagactactgcttgtgaaaaaataccttggaagtacttgaaggcctatgatgatgttgatcctctagattaccttggggcatacaatgtggatgacattcagctgatttgctgccagcctgatgcatcaacaatgtggttgatacctcctccagtccaaaacagattcatccagtcccttgaggagagagagatgctttttggaaagatggaacttattttaaattgggattttctcagagctagaccaaaagggaaggaattagtgcgatatgaatcccctattgaacactgcccgagtgtagatgatgttaaacgagtgcttaatggaactgcaaacagcttcagtataattgatgcttacccaaggtactttcgagttactggatcaggtgaagtccggcgattagaagcagcgatagattcagtaagtggcgaattgctattaaataatggcactccttggtggtcattctatgatacaaacccatcagatttggcaggctgtcaagggctgaatggtcccatggctatagttgtttctgaggagacacctcagggcattattggcgaaacactcagtaaatttagcatatggagtttatatattacttttgttctagctgttgcgagatttattaggcttcagtgctcagacttgagaatgagaataccatatgagaaccttccgtcatgtgacaggaatgttggaggatttctgatatgaggtctaacctcgtggataaagatatcatttgattctccgaattggtcatttggtttctcaatcctccatttcccacttgcattctggcaaaatcatgagtaaaacttctcgttgttgccactactgttgggcactactcatcagtgttctaataaagtggttgtgcttgaggcaatcttttggagggatcaatggagcatgatgggaaaaaattctatgcatcccggatgcaaacgcactcgtttgtagcccctcatatccaccacctggaggcctacaaaaatagatcgaaatttacaacttaaccccttggctacttgacatctgtgaaggaatatatgcagcaagagctgaaggagagttagaagtggaagaagttctgtattggacattggtaaacatctatagatcaccacatatgctgcttgaatacacaaagcctgactagggcacccgttctgctaaggaagccattctgcaaaaaaattccatgtaatgtagtaatgtacaagtagaacacttctttcctttgaggtcacaacgaagctaacttaatcctctcccccccttgtgtcaggacaaaaaacgtgcaaataggctttgtagttgtagttcgtttttgctaacatgtatacggttgaccattatttttggagaagtatacatcaaagtttcattgtgaaagttatctcatgctactaaaatgtgttaagaaagttgcgaatgaagatgtaatccatgtcatcctaatcaaaatgtcttcagatatatcttgcattgtcttcagc

SEQ ID NO: 4369 - DNA, 2534 bp, Zea Mays
agcgctaccaattggcacctcctgctgccgcgccaccatgctctatgctcacctccaccttcgccgcccctgctccccgttcgcctactgcccctacagcaagctatccgtttccatcccaaccctcaaccctctgccacgcgggccgctttctcgccgcgcctgcgcctgcgcccaccggtacctacgacacgtcgcgtcaccggcggatgaggaagaggctgggtacggggagggcagcgtggagggtgatgatctgggacccgcgtcagcggcggcagtggcagcgaccatccgccgggcctccagcgcgtcgcccgtgcggttcaggtgcgtgcttggagaggcagtggaggaaccgcgcggcgaggagggcttggccgacccaagccccgactttcgccggctctgtgcggagcagcttgagattttccgagtgctcatctcccgtgacgccgtactctctgtgtacgtgagacctgctggcagttatattatggatcagctggaactgcgccgagttgctttatatcctggaattaataatctttctgaaaaagatacccctgtcctagtttgtaatttttctatatcttctggactacgagcagcagaagcttttctagtaaaacaacagatggaagtcataagagaatttggggctatagttcttccaatggtgaaacacccctttgttgttgggttccttgtcgtagagcttccagaattacatggtggacgtgctatgaactcttatactgctgatactgagttaccacctaacacatttatggataaatcatctgatgtaactccacatactgcgtgggatattcaaacttatggtgatcaggcaaagggttattctcagcttgttaatgaatggaagaatagtgcccttatgatttctcgaactctggcaatggcttatgttatggatcagaaagcatatctgcttcaacaaacttcctggcaaaataatgttagaatgagtggcttagtggaacagatttggggccccctctctagcattcgtgctcttgcaaagatgttatcctttcacacaaagagaaatcccctatgatattattgaagatatgctcacccaaggtgatcacatgaaagatgctctgcaacaaattcaagatgctgtatatctgactaaggcaaacatagttagaagcaatgaggagactttaaagacaattcagagatcaccacatccttcaagaactttatcagattataaatcagtacctgggaatgattcacagaagttggatccagttttagccctgagttctgatgggtatgacatggtgatgcctatgccacctctatggctggcacctcttcaacaccaatatgatagaccatgtgatctctgtgatgtgctgaaggatttagttgcaggagcattaccacttgcttataagcagcagcgcacattagatttaacagaaatttcacatccacttcatgttgctgttgaggaatctgctttaagaaaagccttgagtaatctgattgagggagcgctcctacgtacacagcatggtggagtagttcaaatatgtgcagtcgaagcacctgcaggaggcgctctcgtggtcatcgatgatgatgggcctgatatgcaatacatgactcagatgcgctccctggccccatttggatcagaccttgcagatggtatgctcgaagataacatgacgtggaacttcatcgcgggattaacggtcgcacgtgagctacttgaggaatatggatgcgtcctgcgtgtgatatcacctcgaaggactgatgcggttataggcaccggagggagtcgtgttgagatatggttgccatcttttcagacacaagcagccaagactagtcaagaagtgtagtttacatctgaggaagcgaggcatgcttcgttttcccgtacgttttgaaatctgtagatattggcttaccggaatgttactgtaccagtaacatctcatatgttgaatttgcaaaattacaggacgtgcgcaaatgattgtgatggtgatgttgcattgctgatgctccttttgctacttcatttctacttccattgtctcattgctgatgctccttttacaatataaatggtcgaatatgtgtgtgtgttttcttcatcctgcattcctgctgatccaaaccaactgacacctcaccattgcaaacccaccatcagaagctatcaacaaacaaaaacgccatcatctgaccattagcagccaaatccccattcagcaaaaccatgtcttggtcgtttcttggcgtcagacgctttgttcccttgtcagctgcgttcaccgtccgacgtggacgctctgctcggtgggtgatccaggagagaagggcacgaacacgtgaccgccaaacataggccgcatcagcgcgtcatcgaccttgcgccagtagtagtgcaccgtgtgagtcggcttgctgaggaggctggacggcctcacaatatgtgccatggttcgagcctgcatgcttgtcaggaaaggtgagag

SEQ ID NO: 4370 - DNA, 2993 bp, Zea Mays
tggcacacgggcacgcacgagagacatggcgacggaagaggagctgccggaggcggcggccgcgcctgcgccagcaggtggaggaggcggggacgacgcggagatgcccgatgccgccgtgccgtcgggctcccactcggactcgtccgactccgactccgacgacgaagccgccactgccgccgccgagctccgcatccaggccctagagaaaaccctacaggagcagccactggactacgagacccacgtgcagtatatccagtgcctgaggaaggcaggcaacattgagaagcttcgcgtggcaagggaagagatgaacaagtactttcctctaaccccgaagatgtggcaggagtgggccaaggacgagatctcattgagctcgagtgaggaatcttttggtgacattgaaaagatctacgggcatggggtgcaggaatacctgtccatcaagttatggcgggattaccttgattatgttgaagagcatgatcattcagtgtctcagtgtacaccttctggcctctccaagatgagaaatttgtttgaaagtgctattaccgcaggtgggctccatgttactgagggcagcaagctatgggcagcctatagagaatatgagatggccattttgatcaccatcgctgatgccaatgatgaggagagggaaaagcaagttcagcgtatacgcatgctattccaccgccagttatctgttcctttggctgatatggaatctacacttgctgagtataagagctgggaggctgagcaggggaatgcaaatgatcctggtgcagattttgatggtgtcccctcaaatgttgtatctgcttacaaaaaggccaatgatatgtacaatgaaaggaagcaatacgaggatcaactaagcaatgcaggcacatttgaagaagtacatcaaatttgaggaggcttctggtgaccctgctcgtgttcaagttctgtatgagcgagctgtttcagagcttcctgtttcaagtgatatatggatgggatatacaagttacctggatagaaccctgaaggtgccttctgtagtcagaagtgtttattacagagccacaagaaattgtacatgggttggtgagttatgggtccattatttgttgtctttggagcgtattcgtgcttctgaagaagagctgcagcatgtatttgaacgggcaatacaatgtaccttttcaaccatacaagagtatttcaatatttatcttactcgagttcatggtttaagacggaggatttctgatggcttggattttcaactgattaggcagacattaacgaatttctctcatctcaactgagtaccaaggagttactgcgcttatatgcttattgggccaaactagagcttagtctcggcaaagatctttctgcagctcgtggagtttgggaaaacgcgatcaagaaaagtgggtctgtttttgaagtttgggagcagtacattttaatggagataaaaatggaccatgtacatgaggcgagatccctttataagcgttgttatagcaaaagatttgctgggtctggatcagaggagatatgctactcatggataagatttgaagaggagaatggcaccttggatgattatgatcttgctgtaaagaaggttacccctcggctaaaggagcttatgacattcaagtctcaagaggaggctaaagttgaggcttaccctaacctcaatgataattctaatgcaaatgattcctctcagaaaagaaaaccaagtaacaataaacagcagccccctgctaagaaaagaaaagagaatccaccaaaaagtaccatgccatcagatgaccaaggatcaaatgtgcaaagtgggcacagtggtgctgttactgatgtagaagtcggaggggccagcagggagaaggtcatggcatctatcgagatgaaagtggacagtgacagccgaacagggaaatcaagttcaaatgaaccaaagccatccttttataatgacaactgtacagtttttgtgtcaaatattgacttgaaagcaaatgaggatgatctcaggcgattcttctctgatattggtggtgccacagcaataagattgctgagggacagattcaccaaaaaatcaagggggttggcctatgtggactttttagacaacaagcatcttgaggcagctattaagaaaaacaagcagaagctgcttggaaagaaagtgagtatcgcgcgatcagatccaagcaagggtaagaagagccgtgaagcaggtcaaacaagccaggataatttacctccgagtggtggtgatgatgcaaaagcaacaggatccagtggaccagacaatgaagtacccaagggtgatgcaaaaaccatagggaagaataccctttttgcaccacgagctctggttaaacctcttggatggacaaacaaggatgagaagaaaccagatgttgcaggggagttgaaatcaaatgaggagttccgaaatctgttactaaagaagtgatatcagttggcaggtgtggatctccatgccccaatccagtgccaagatttgtggtgccttcatctctatgttagaatgatggacctgtagtagcagcttgaactggggatctacaaccgttatgtcttaccccgatgtagacatgaatatttctttctgctagggagattatacaagccatgccgaattgcagggtggtgaaggtgaaaacgggacgttgcgttcgagcagaaaaaccctgcccatgtgaaaagaaaacactgaccttataatatgtgctcactttctttttgaaccatacgtacgcattgctggtgaaacatcactgcatctcaaaaatgtgtaatctactctacgcggcttgattggagatgcagatttatttgattgtacgttgggaccttttggaccttgcaactgcatatgttgagaggctaacatcttttcagagcggcagcccaacgacactttgcatacacgttttaaa

SEQ ID NO: 4371 - DNA, 1771 bp, Zea Mays
actgccccatggcccattgcttacgcataactgcggcggggacacgcgacgctaccgacttcgccgccgcctccttccttccgcccgtcgagtcgaccgaccgattgttcgcgggtcgcggcctccctcctagtcagatccactcaatcccaagaggccaagtccaaaccctacccaccacccttctcaaccagcgatgatggcagcggagccctcgccgtcggttccctccaccgccgctgacgccctggaaaccctcgccctcgactcatcctcgtcgtccgccgccgctaccgcctccacttccaccgaccccctcctccggccacctacctccccgaccgccgccgcgagcgacgacccattcgtcatcgacgacttcgacgaggacgacttctccaccgccccggcgcccaacgtcgcccgccagccgcgcgctgcgcgtggtgatgcggcgtccccagtgttcgccaaaatcaccgtatcggatcccaagaagcacgcggagcccagcggcgggggtgccgccggtgtgatcccggggtccggtagctacttctcttacctcatcaccacccgtcttgcgggcggcggcggggaggtccgcgtgcggcggcgcttccgcgacgtggtgaccctcgcggaccgccttgccgcagcccaccgtggcctcttcgtcccggcccgacccgacaagagcgtcctcgaggggcaggtcatgcagcgccacgacttcgtgagccagcggtgcgctgcgctccagcgctacctccgccgccttgccgtgcaccccatcgtcggccacagccctgacctccgcacgttcctcacggagcctggtgccgtccctgcctttcagggtgagcccccgcggtactggactaccacgctgaatgctgctgctccgctggtgccaacgaaagctaggagggacttgtttgggatgtttaagggtctcaagcagacggtggtgaatggactggttgcaacaaagcctccacctgtggagcaggagacagacacagagttcctggcgcacaaggccaggtttgatgacttacagcagcagcttaccataacatcacagcaggcggaagcgcttgttaaagcccaagatgatcttagagaaactacaggtcacttgggaatgacattgattaagctggcaaaatttgaaagagagcaggcaacatgtaattccctaagaagacgtgctggtgaaatccataattttgcaaattctgttttaaagatgagcaggtcacagataaaattaaactctgaaatggtgaaacacctgggcagtatccatgaatacttggagatgatgatatcagttcatcatgcattcacagatcgctctaatgctttatattacgtgcaaagtctgtcagcagatttgttttccttgcacaccagggcagggggacttgaatcttcatcagcaagagatatggggcatgagtggtcaacatatcagaaggtagaggggttgaaagaagcaataagatctgcggaagcagccaaaagtgatgccgttagagaatatgaaagcattaaggaaaacaacatgattgaaataaaaagatttgacaaggaaagacgtcatgatttcattgagatgctgaaaggttttgtggtaactcaggtgtcttattcagaccattttgctaatatgtggacaaaggtaacagaggaaacagaagtatatgccaacaggagcaactgatgttgcctgcgggagagtctaagaggtttggtgttgtcaagt

SEQ ID NO: 4372 - DNA, 1778 bp, Zea Mays
agtctttgctttatatagtagagagaaccattgctatggagtaaatattcatattcattgttattaagattggagtttctactgaatttgcatggcagattgtctcactgttggcgtccagatatatcaaagtggtctgtattttttgtgttgactgtgcaagatatgtgctactttgcgtagacgggactggtggtgggcagtcgcattgcatctgttcggactgttgcaatccatactccatatagacaaaatactgtagaggtcgtagcaagctgcagcgaacatgctctttctaactgtattctgttatgttctgaaaatcatactacctctgcaagtaatgtaattaatctggggcacattgatagacctgatttgcttaatatttgatgaaagatgcaaattggcacaggtttgcagcaggacttgctttcttgcaatattgtgctttgctaggttttggttacgctgggattggacagcatctgaattggagggtatcgtgctaaggcggaagcgcttgttaaagcccaagatgatcttagagaaactacaggtcacttgggaatgacattgattaagctggcaaaatttgaaagagagcaggcaacatgtaattccctaagaagacgtgctggtgaaatccataattttgcaaattctgttttaaagatgagcaggtcacagataaaattaaactctgaaatggtgaaacacctgggcagtatccatgaatacttggagatgatgatatcagttcatcatgcattcacagatcgctctaatgctttatattacgtgcaaagtctgtcagcagatttgttttccttgcacaccagggcagggggacttgaatcttcatcagcaagagatatggggcatgagtggtcaacatatcagaaggtagaggggttgaaagaagcaataagatctgcggaagcagccaaaagtgatgccgttagagaatatgaaagcattaaggaaaacaacatgattgaaataaaaagatttgacaaggaaagacgtcatgatttcattgagatgctgaaaggttttgtggtaactcaggtgtcttattcagaccattttgctaatatgtggacaaagtttgattatctttgtaggagggtattgttcaacaatctgctcaagttacatgagtacactgtctatacccgtactgcgttgcatcgccttctcgaactccggagagggagagagggcggagaaagcataggattcgaggttgtcacgctcgacggtagaactggacccctttcctcacgcaaggtttctaggtgagcgacaacatgaaccccagtgacttggtgaagctgattgagattctggacccttcaaacaaacctggaaggatcaccataattacaaggatgggggaagagaacatgagagtgaagttgcctcatctcatccgtgttgttcgcaatgctggattgattgtcacatggattactgatcctatgcatggaaacaccatcaaggccccttgtggcctgaagactcgtccattcgactcaattctggctgaagtgcgcgcattcttcgacgtgcatgatcaagaaggaagtcacccaggaggcatccaccttgaaatgactgggcagaacgtgaccgagtgcattggtggatcaaggactgtgaccttcgatgacctgagcgaccgctaccacacccactgtgacccaaggctgaacgcctcccagtccctggagctcgcctttgaagcgtcccggtcctctaggactcaaatgtga

SEQ ID NO: 4373 - DNA, 2415 bp, Zea Mays
ctccgactccgactccgagggcggtgcgagtgaccttgcccttgtttggattggacgacgactgggtccgcgagctgccagcgcggtctcccaccactatccctctctcccctctccgtttgtctccatcctttctacctcggctgctgcgttgcgtgtggcgctgtgcttgggcagacgtgggcaccatgcctgggtgacttggtgtagcactgtagctgtggcatggagctgaggaagacgacgacgggggagagaagaatgctccccgggtgctaacttggccgccgctgctcaggggacgagtcgagggggagaagaggaaagtccagtttcttcagcttcttggttggatgcaggaccagaagatgtgcagatggagatggtgagctacctcggcgagctggtccagaagcaggagatgaccatcaatatagcagggagtgcatcagagatcctcatcaaaatggtgtgcagtggtaatacggcaattcgaaaggcgaccctcgatgtcctggttcagatctcgtcccaccaccccaacgccaagacgcttgtggatgctggtgccgtccctgtcatggtagaggagctcttcatacgaaagattgatgatgagcccatgggctctaagacagaggctgccgcggtgctcgccaacatcgtcgagtctggcttggatccagaggccatcaccgtgaacaaggaaggccacgtcatcacgtccaagtactcggtatacaacttcgctcacatgctcaagtgctccatgcctgacaccctcaacctaagcattgtgcgcgtgctgctcgcgctgaccgctctccccaagcctctcgccacggtggtctcggtcatgaaggagcaagacagtggacagacggtgattgagctgatgggctcgctgacagagtcgcttgtcatcgccgcaatgaggctgcttattgcgttgtccccgcagatggggcacaccattgccgagaagctgtgcaaggccccggggcagccagggaggcttgtcaagagcattggcctgcacgggcggatcatggagcggcacgccatgtcagctactctcctggcgaagctgccgtaccagcacatcgctctgaacctggcgctgatcaaccagggcgcgatggttaccgtgctagccaagatagaggagatgcagcgcggcgagacgcgggcaagccgccatgcgaaggcgtatatggagggcctcatgggtgtgctggtccggctaacgacgacgctgtatgacccggacgtgctcttggcggccatggatcacaacctcacgtcggtgctcacagatctcgtgcggtccgcaggcagcgacgaggtccagcggctcgccgcgattggtctcgagaacctcagcagccagtcgcccaacctttcccagcccccgaccgaggagcggcgcccgaagaagaagaacatcctccggcgcctgcgcgaggcgcacgcggggcgggtgcacgacaaccggaggccgccggcgcacagccgggtttgcccggtgcaccgtggggtgtgttccccgtccaccacgttctgcctggtggaggctggcgcggtggagggcctcttgtgcgtcctggagagcagcgagaacgggcgcgtggtggaggccgcgctcggtgcgctgtgcacgctcatggacgacgcggtggacgtgacgagcggcgtggccgtgctcgcggagcacgacgcggcgcggcacgtgcttcgcgcgctgcggcagcaccgtgacgacgggcggagagggggcggcggcgctgccgcaggcgagacggtcactcggaggtgtttctgggcggtggagaggttcctggctcacggcagcgagcggtgcgtgagggaggtcaccagcgatcgggcgctgccgagcctgctggtgggcgccttccacaagggcgacgccgccaccaagcaggtggccgagagcgtgctccggtgcctgcaccgcatgccggattactccgcgacctacgaatccgtcgaactgtaaccaacacatgacgcgcacgactgcgcatgtcttgcctctcttttatcaagcttcgtctcttggttatgtttgtaaaattggtttttgtgtgtaacatgggttgatgtattgtttggtgtagctaaaggaaaatagaaaaggaaaaactgaagatgcagttatgtatgcaagtataaccaaagtttatagcaagggaagatactagtcttttgattcttcttactatttttttgtgtgtgtgttcagtagttcttttttagggaccgtgttcaattcagtaggttttgacaagagtgcctcctaaaatcagtctccagataatttgttttgtaattttgatgtttcgtttgacatgcctctctagccttttctcgacacgactactagcaagtattccc

SEQ ID NO: 4374 - DNA, 2628 bp, Zea Mays
ctccgactccgactccgagggcggtgcgagtgaccttgcccttgtttggattggacgacgactgggtccgcgagctgccagcgcggtctcccaccactatccctctctcccctctccgtttgtctccatcctttctacctcggctgctgcgttgcgtgtggcgctgtgcttgggcagacgtgggcaccatgcctgggtgacttggtgtagcactgtagctgtggcatggagctgaggaagacgacgacgggggagagaagaatgctccccgggtgctaacttggccgccgctgctcaggggacgagtcgagggggagaagaggaaagtccagtttcttcagcttcttggttggatgcagagctttcgaagtcagagttgctgttggagaacattggatcaactgctgggagcatactgatcctcaccacgatgaagtttaatagctcatctgatcctattgctgccgagaaggctggagaagtcctcgagaacctggagaaatgccccaagaatatcaagtacatggctgaaagtggctacttggatcctctgcaaaggcacctagttgaaggaccagaagatgtgcagatggagatggtgagctacctcggcgagctggtccagaagcaggagatgaccatcaatatagcagggagtgcatcagagatcctcatcaaaatggtgtgcagtggtaatacggcaattcgaaaggcgaccctcgatgtcctggttcagatctcgtcccaccaccccaacgccaagacgcttgtggatgctggtgccgtccctgtcatggtagaggagctcttcatacgaaagattgatgatgagcccatgggctctaagacagaggctgccgcggtgctcgccaacatcgtcgagtctggcttggatccagaggccatcaccgtgaacaaggaaggccacgtcatcacgtccaagtactcggtatacaacttcgctcacatgctcaagtgctccatgcctgacaccctcaacctaagcattgtgcgcgtgctgctcgcgctgaccgctctccccaagcctctcgccacggtggtctcggtcatgaaggagcaagacagtggacagacggtgattgagctgatgggctcgctgacagagtcgcttgtcatcgccgcaatgaggctgcttattgcgttgtccccgcagatggggcacaccattgccgagaagctgtgcaaggccccggggcagccagggaggcttgtcaagagcattggcctgcacgggcggatcatggagcggcacgccatgtcagctactctcctggcgaagctgccgtaccagcacatcgctctgaacctggcgctgatcaaccagggcgcgatggttaccgtgctagccaagatagaggagatgcagcgcggcgagacgcgggcaagccgccatgcgaaggcgtatatggagggcctcatgggtgtgctggtccggctaacgacgacgctgtatgacccggacgtgctcttggcggccatggatcacaacctcacgtcggtgctcacagatctcgtgcggtccgcaggcagcgacgaggtccagcggctcgccgcgattggtctcgagaacctcagcagccagtcgcccaacctttcccagcccccgaccgaggagcggcgcccgaagaagaagaacatcctccggcgcctgcgcgaggcgcacgcggggcgggtgcacgacaaccggaggccgccggcgcacagccgggtttgcccggtgcaccgtggggtgtgttccccgtccaccacgttctgcctggtggaggctggcgcggtggagggcctcttgtgcgtcctggagagcagcgagaacgggcgcgtggtggaggccgcgctcggtgcgctgtgcacgctcatggacgacgcggtggacgtgacgagcggcgtggccgtgctcgcggagcacgacgcggcgcggcacgtgcttcgcgcgctgcggcagcaccgtgacgacgggcggagagggggcggcggcgctgccgcaggcgagacggtcactcggaggtgtttctgggcggtggagaggttcctggctcacggcagcgagcggtgcgtgagggaggtcaccagcgatcgggcgctgccgagcctgctggtgggcgccttccacaagggcgacgccgccaccaagcaggtggccgagagcgtgctccggtgcctgcaccgcatgccggattactccgcgacctacgaatccgtcgaactgtaaccaacacatgacgcgcacgactgcgcatgtcttgcctctcttttatcaagcttcgtctcttggttatgtttgtaaaattggtttttgtgtgtaacatgggttgatgtattgtttggtgtagctaaaggaaaatagaaaaggaaaaactgaagatgcagttatgtatgcaagtataaccaaagtttatagcaagggaagatactagtcttttgattcttcttactatttttttgtgtgtgtgttcagtagttcttttttagggaccgtgttcaattcagtaggttttgacaagagtgcctcctaaaatcagtctccagataatttgttttgtaattttgatgtttcgtttgacatgcctctctagccttttctcgacacgactactagcaagtattccc

SEQ ID NO: 4375 - DNA, 2615 bp, Zea Mays
gcttgaactcatttgcaattgcgaacgcttcttctcccagtcccagcacgcccaaccccgtcgccgccttctcgaaccttccgaagatgagccccccggccccggccgccgcggcggcggcggcgccgcgaacggtcgcctcggcggtgctccgcgtccagatggcgctcctcgacggcgccgcggtgtccagcgaggccctcatccacgcggccgcctccgcgctcctctcccgcgccgactacgacgacgtcgtcaccgagcgcaccatctcggacgtctgcggcaaccccgcgtgccccaaccctctctcctcctcctccgccgccgccacggggccccgcttccacatcgccctcagcgagcaccgcgtctacgacctcgaggaggcgcgcaagttctgctccgagcgctgcctcgtcgcctccaaggccttggccgcctcgctcccgcacgaccggccctacggggtcccgctcgaccgcctcgccgcggtcgtcgcgctcgttgagggcgccgccgcaggggacgggagcgggttagggttccagggactggatgggaatgggaaggtggaggacgggggaaggaaggtggagatcaaggagaagcaggtcgccggggctggcgaggtcttgctgcaggactgggttgggccctccgatgccattgagggttatgtgccgcgccatgaccgcagtgctcatggacaaaagccacaggttcagcagaacgaaggtgctggacctgaactgtccagaactgagaatgtggattatggtgctgctgctcctggtgaagatggcatgacaagttcaccttcattggttaaaacacacgtgagctccgaagtaatagttgagagaatgggcagcctggttcttggtgagaatacaaggacgcctagaaagaagaaaactaaaactccatcaaagatgttagagcaagaggaagataacagtatgctgtcatcttgcatatctgattccattgccaagcagcttgaggatgtagttttggaagagagaaaaggcagtcagaaaaataaaatgagtaaagcatcatcaagagcacagaagggtaagtctacaaaaaggcctgcttcgacaaacatggaggaaaatgctatgaatcagtataactacttgtcaagttctgtattggtagacaatcacccctcatcatctcaatcttcagaaaaagattcaacacaggcttactctgaacaactgtgtgaagaattcagtgaagcagtgaacattggaaatgatgagacaagtgatgaaaagatgagacctgcatggaagtcttcgttgaaagttgccgggtctaagagcagtaggcagtctgttacatgggcagatgagaatggaagtgtcctagaaacaagcaaagcatatgaaagcccttcaagtagtataaaacgacctgaggaaggcatagacaattcactaaggcgtgcatctgctgaagcgtgtgctgcagcacttgttgaggcagcagaagctatttcttcaggcacagcagaagcagaagatgcagtttcaaatgctggaatcatcattctgcctgacatgcttaaccagcaagaacatgacaatggcaaaaacagtggcggagatgatgaccctgagatagatagggatgttatcaagtggcctaagaaacctgtacttctggatacagacttgtttgaagttgatgattcttggcatgacatgcctccagaaggttttagtctaactctgtctgctttcgggacgatgtgggccgcgctattcggatggatatccagttcgtctttggcctatgtgtatgggcttgaaaggggttcagtggaggagttgttgattgccaatgggagggaatgtcctgagaagacagttctgaaggatgggctctcattggagattagaagagctctagattcttgcgtttgtaacgccgtgccagtactcatatcaaacttgaggttgcagataccggtttcaaaactggagattactctggtttagcttgatgctggtggctgacagttatatcggcggtaacacatgatgaaactacaccgtgtctgtaccagggctacttgattgacacaatgtcgtttgttgacgccctgccttctctgcgatcgaggcagtggcaggctgtggttctggtaatgcttgacgcgctctctgtgcaccagcttcccgcccttgctccagtcttttcgaattcgaagcttgtgcaaaagatgttgaacgctgctcaggttagcagagaggagtatgactccatggtggacctgtttctaccgtttggaagatccgtccaggcgatcacgcccatgtaaacgagaagccgtgtgaatctgcattccggaagctgcgtgaatcgtagggtctgatctgatatttagttttacacaagtcgctgtctagaacgagccatgtatgtatgattgattggttatctattgagcaagatgcgctctggcaatttgtggaagctgaaatacttgcgaccatgacgcctgcctgtcagtttgcgatattctttcaggttgtgagaaattgatttgctgtcgttctcagctaaaacaacaccagtctattaaaaaacatataaaa

SEQ ID NO: 4376 - DNA, 2323 bp, Zea Mays
gacgaagtggggcgcctagcttcttactagttttttttttccttgcgcaaagcttgcacttgctgagagagagggagagagaaatccagagataaaggcgcttcattcattccctctcctgctttctctctccaacccatccgtcctctctctccacacataaaaaccaacgaagcgggcgagtgatcaggcagaggcagcaggcaggaaataaatttgaagaaagctagacctctgatcagcaggagctcatgggcgccatgatggcctccataaccagcgagctcctcttcttccttcccttcatcctgctggccctcctcgccttgtacaccaccaccgtcgccaaatgccacggcacccacccgtggcgccgtcagaagaagaagcggcccaacctgcccccgggcgcccgcggatggcccttggtcggcgaaactttcggctacctccgcgcccacccggccacctccgtgggccgcttcatggagcggcatgtcgcacggtacgggaagatataccggtcgagcctgttcggggagcggacggtggtgtcggcggacgcggggctgaaccgctacatcctgcagaacgaggggcggctgttcgagtgcagctacccgcgcagcatcggcggcatcctgggcaagtggtccatgctggtgctcgtgggcgacgcgcaccgcgagatgcgcgctatctcgctcaacttcctcagctccgtccgcctccgcgccgtgctgctccccgaggtggagcgccacaccctgctggtcctccgctcgtggccgccctccgacggcaccttctccgcccagcacgaagccaagaaggatcgccgctaacaaccggtgccccggccgggataacaaccggtgatgggcgcgcggccggccggatgacgagtgcagttcacgtttaacctgatggcgaagaacataatgagcatggaccccggcgaggaggagacggagcggctgcggctggagtacatcaccttcatgaagggcgtcgtgtcagcgccgctcaacttcccgggcacggcctactggaaggcgctcaagtcgcgcgcgtccatacttggagtgatagagaggaagatggaggacaggcttgagaagatgagcagggagaagtcaagcgtggaggaggacgaccttcttggatgggccctgaagcaatccaacctgtccaaggaacagatcctggacctcttgctgagcctgctcttcgcggggcacgagacttcgtccatggcgctcgccctcgccatcttcttcctcgaagggtgccctaaggccgtgcaagaactccgggaggagcatctcctgattgctaggagacaaaggctaaggggggcgtccaaattgagctgggaagactacaaggaaatggttttcacgcagtgtgttataaacgagacattgcggctcggcaacgtggtcaggttcctgcaccggaaggtcatccgagatgtacactacaatgggtacgacataccgcgggggtggaaaatcctgccggttctagcggcggtgcacctggactcgtcgctgtacgaggaccccagccggttcaacccttggagatggaagagcaacaacgcgccaagcagcttcatgccgtacggcggcgggccgcggctgtgcgccgggtcggagctggccaagctggagatggccatcttcctgcaccacctggtgctcaacttccggtgggagctggcggagccggaccaggccttcgtctaccctttcgtcgacttccccaagggcctcccgatcagggtccagcgggtcgccgacgaccaaggccatcgtagcgttttgaccgagagcacaagaggctgagagggaggaggcagttcaatttttcgttgcattttgagggctgtggtctcgtgttttatgtagattgtgattattattattatacatactaaaacaagatagaagcacgtatagacagagcaaagaggaggatggtccaaaagtgtttggggtagataaaatgtgtactcactagggttgtaataaggccggtccatggcccatgtcaagtaatactagagatatatagaatatagtggatatccaacatgtcttttttccttgtcttaaaaccatgtccagcagttcatctatatgttcatttaaaatactttttacactataaaatacactcttcatagaatagagttttaatatagatatgaagatagtggagataacaattgcgtccatgtaacatgagtaatgttattagacgttaactaaaaatatcactagaagcacattccaatgaaagagccgaaaaaagaaaa

SEQ ID NO: 4377 - DNA, 3777 bp, Zea Mays
tttagtcaatcgttatgaactctcttctaatcgctcacttcattggtcgtgttgtaccaagacatatttgtatggagtaaacaataacatcagttagccaaatcaaaaaatatattatacagagagtagagacaatcaataaaaaatcttaaattttttgatggatagtttacgcacggacaaccgattagtatgatatatataaaccgcatcaaagcacagacacgaccaactggacagtgatatgatgttgccaagaccaaaaacccacctaaacctctccggcgtctgtcttccacagtgggacacataaaccatgcgcggtcgcatggacctcctcccgcgcctcctcctccgccgccacgtccaccgccgcgccaaaccagcgtccccatcgccccctccccttccccccaacccgccgcgcccgccgcagaagcccgagcccgtctccatccacggggaaacgtggcacgacagctatgcttggatgggcgcgctctccgacgccgccgccatgcgccacatggacctacacatggaggctgaggagaagtacgccgaggcctgcctcgccgcttgcggcgctgaccgcctcgcccggaagctccagctcgagatggcctcctgccttgcctcggactcgtgcacgccgcccgtccgctggggcccttggctgtactaccgacgagcggacgagggcaagcaataccccgtgctctgccgccgctccgccgcgctccatagcgaattcgtctcgtacagtgacccctccgcaggtttcgacttcacggctgggaagcgcatcgagcagaaattggtggattacaacaaggaggccgagcggttcggaggatactcatatgaggagctgtctgaagtatctccagatcacaggttcattgcatacacaatcattggtttatattgttacaaatgaggaaagaagaccatataggttgttttgtagcatgattggatccaacaaggatgccattctcatgttggaagaacctgatgagaatatttttctaaatatcagacatacgaaggattttcgatatataacgttaaatgtcttttcagatactcactcaaaggtgtatttaataaatgcttctaatcccctttcccaaatgacgcttgtatgggaaggggaatcccaagttcattgcattgttgaacatcatcgtggtcacctttatttgtttacagatgctgcaagagaaggtgtccctgttgattcacattatataatgcagtctgttgtggaatcttctgggccaaacagttggaagaatgttttagttgaggaacctggtgtcattcttgaagatgttgatttttgtgatactcatatggtgctaactctgagacaaggcagaaaactcagactttgttcagttaaattgcctctaactgaagatatcaaagtacctactcatctatcagatttgcgtccaattgacctgcctctccccagtgatgtgtgtcagattgtatctgggccgaattatgattattattcctcaacaatgcgtttcacgatttcatcacctgtgatgcctgatgctgttgttgactacaacttgctgaacggacagtgcaaatagtccaacaacaaacatgcttcatgagcgaacaccgagcactatatggggcttcttttgctgcaaatatgggcaggcaatcctcagataaagcagatttttcaaatgatgattttgttggttgtgcttggaatgagctctctgaatactatgcttgtgaatactatgatgttccatcaaaagatggtgttttggttccattaactttagtatactcgcggaagcacaagcaagatggaaatccaggattacttcatggacatggtgcttacggtgaaattctggataaacgttggcgcagtgaattaaaaactctactggatcgtggttgggtgattgcatatgctgatgttaggggtggtggaggttatggtaagaagtggcaccaagatggttcacgtaccaaaaaaatgaattctgtatatgattttgtttcttgtggagaatttcttcttgaaaaggctatcatacaagaaaataagcttgctggatggggatatagtgctggaggacttctggtggcctcggcaattaattgtcgtccagatttgtttcgtgctgctgttttaaaggtccctttcttggatgtttgcaacacccttctccatcctattgtacctcttacagccattgattatgaagagtttgggtatcccgtggattatgaggaattccttgcaatcaggaagtattctccttatgataacatccagaaggatgttccttacccagctctgtttgtgacgtcatcattcaatacaaggtttggtgtatgggaggcagcaaaatgggttgcaaaagtccgtgaatttactcaatatgatccagagaggccggtaattctcaacctgacaacagatgttgtagaggagagcaagtatttgcagaccagagaattatcattggagaccgctttcctcattaaaatggtctgcagtgtgtgaacaacatgtgtcttattattctgaatcaaaccctgttggtcaaatatgggaagctgaggcaacaatgtcagtcctctccatcctaggcacctgagctatttaatcgattaattggagctttatgagcttttgcagaattcatgaagaatttgtatgtccatatttcctaaatcatgaggtatctccagatgacatggttttatgccactacttacaatagtggcttgtgcctagtggtattatgctcatttgtgagtgagtccagatatcccgtggaacaagtccacaaacatacggttatagagcctctacattatactgcaatgaaatgttgataccctccatgatagtaaaagttgcctttgtatttggaagcatccaacttaatactatttaatagtatccgagcatgcaccgctccagagtcagaacagaacacaaagccagcttcttgttacaattgtagggatcatcagttgtatgcaggaccatccgattcttactgatattttgtcagtatggggatatgttgcaaatgtaccgcagtcgtgtaagcacgatatgtttgaagattcggttggaaaatattcatcctatgcaagtgaatctatggtacagatacgactgctcaatgttttgatgctcatgtctttaagttgcaaattgaggttgacacattcctagggcactgctcagaacaggaggtcatttgaattccagattaccttcgttctttatatatgctggcttgcaccggatttgtagcatggcatcattgtgacatgacctcaatggctatcggcagcacctgttagttttgtaacatgattacacaagaaagtcgtagcacctgttagtttttcaacatgctaacgatcacgcttaaacaagaaaatcgtagagtttgagtctactgtacgtgggttttgcttggctgtaagttcatttgatcttttactgtcgcagtcttcagggtcaacgagcgtaacttgactacatgagcggcctcatctcacgtactggtttttggcttcttggtctgggcgggttagctgccagcatttgtcattgttcaaccgccgtcaaaaaaggtttaccgtcggtccatcgcgagaaccgaactgatggaattggaaccggcaggaacttggcccgaaactgttcatatttcgacaaaagagcatcttcaataggtcataaaaatatatcttctaatatctgac

SEQ ID NO: 4378 - DNA, 898 bp, Zea Mays
catcggcgccccagctgctagacctggcctccatgccaggattgttagcccctgctcccgtcgatacctcggtccttcgccatgggggagcccgctcccgccggtgcccgggtcggtcgccaagatccccgccctttgccctgcccgtcccttagctccagcccccgctcttgctagcaatagccctcgccccaaagccccactcgcttgcagtcacggaatggagagtattttcatcatgtccaagcatacgttttccagagcagcctcattggtgagatcatcagttgttttgagaagaagggcttcaatctcaagattctagtgttgctggtccatggaccatagtccatttctccaacacaacagccattgtctcagatagataaccttctacagacatcttatgatcaaggggacaaatgagatcatgccaactctactccatgtactgctggtgtcacaggattaatatacaatgaagatgttgattcttcttggagttgcacgaatgaaccttgtgattgtgattagttacttcaaagcatttttttggtcttaatgcatggatgggagagtgtcggatgcttcttcagatactatttcttggtccgtcaaatctgcttgacccaaatgaaagtttttctcaaatgtggcaaaaataattgtctcatcaattgtcagcgcgcctgcttccagcaaagtttcagagaagatggaatgtaacacaatttttggtggccgcataagtgtggagacttgattcatatatacttagttaggctcatattagtgcaaacagctgatacagttttcattagtatttagtatggcttagagtacacttatgtatgagttatttgacatgtttattatgagaatattgatggtacttatt

SEQ ID NO: 4379 - DNA, 1509 bp, Zea Mays
ctgagcctctgagtgaccccgaacctaggcgacggccgacgaggcttccgcggtctgctcgggactccgcacccgtccgcgccgcatctgcctccaggcgattcggctcccggcctccgcgtccgcacagatcgcgccgcctcgccacgccgccgcctcccgactgcccatctgccgcggccgcgcccaccgcccgactgcccgtctgccgcagccgcgcccaccgcccatcgccctctgctcccggccacacctgagcggccgagcccgacaagcggccgcgacattgccacactcctccgcgacaaacagtaggacaccgcacgcatcacgacatcagggcttcgattccaggctggctccaccactggaaatggcggcactggtgccggagtgggctaccaaggagccctgcctcatggggatcgatgaggctggccgtggccctgtcctcggtcctatggtgtatggatgtgtgtactgcgcgtgctcttacaataacactcttgcgactctcaaattcgcagattcaaagacgttgaaggaagaacaaagagaggagctatttgaaagtttaaaggccaatagctctattgggtgggaagtggatgtcatatgcccaaaggatctatctgctaaaatgttaaaaaggtcgaaagttaatctgaatgaaatatcacataactctgccatgggtcttgttagaaaagttcttgacatgggagttctactggcagaagtatatgtagatacagtgggagatcctgaaaagtacagaaccaagctgacagaaaagtttccaggggtcaaatttgtggttgccaaaaaagctgatagcctttaccctgttgttagtggagcaagtatagctgcaaaggtcactagggacagagcgttgcgaaactgggtgtttgatgaaacagctctgagtctgcacatgagaactggatcaggatatccaggagaccctgatactaagcaatggttagaagatcacaagcatccggtatttggcttcccaactttggttcgtttcagttggggaacttggagtctgatgaagttgatgaagaagggactgacaatggaggtgccaagcgacaagtcaagctttcaagcctaggcttcactggtttcaaaaggaaaaccgaggatatcgaatcaagcggaaaaggtcgttgcaaattcttccaggctcgcaaacttgagttggtcaggaagtttcagtgatgtgtcctaatttggtagtacgtacttatatttgtggtagctggagtgtttggtttagtttgttgtagagcctaatttgaaactggtctaaattggatgttgagattggaatgggaagataatgattttccccacattgctacttctgccatttcctacgtgccgcagtagttactggatgctactgcgagtttatttgctaaactcgctttactgtttctttgcaatattgacggacgtttatttggaggatattgtcttattgactattgagtcacc

SEQ ID NO: 4380 - DNA, 1514 bp, Zea Mays
cggcgttgaactgtagcggaagaccgatccattttcacaaatttctcctgtggaaatggccagtggcggagcccttcggcagcccattggcccaggtctgctctgagcctctgagtgaccccgaacctaggcgacggccgacgaggcttccgcggtctgctcgggactccgcacccgtccgcgccgcatctgcctccaggcgattcggctcccggcctccgcgtccgcacagatcgcgccgcctcgccacgccgccgcctcccgactgcccatctgccgcggccgcgcccaccgcccgactgcccgtctgccgcagccgcgcccaccgcccatcgccctctgctcccggccacacctgagcggccgagcccgacaagcggccgcgacattgccacactcctccgcgacaaacagtaggacaccgcacgcatcacgacatcagggctggctccaccactggaaatggcggcactggtgccggagtgggctaccaaggagccctgcctcatggggatcgatgaggctggccgtggccctgtcctcggtcctatggtgtatggatgtgtgtactgcgcgtgctcttacaataacactcttgcgactctcaaattcgcagattcaaagacgttgaaggaagaacaaagagaggagctatttgaaagtttaaaggccaatagctctattgggtgggaagtggatgtcatatgcccaaaggatctatctgctaaaatgttaaaaaggtcgaaagttaatctgaatgaaatatcacataactctgccatgggtcttgttagaaaagttcttgacatgggagttctactggcagaagtatatgtagatacagtgggagatcctgaaaagtacagaaccaagctgacagaaaagtttccaggggtcaaatttgtggttgccaaaaaagctgatagcctttaccctgttgttagtggagcaagtatagctgcaaaggtcactagggacagagcgttgcgaaactgggtgtttgatgaaacagctctgagtctgcacatgagaactggatcaggatatccaggagggagtctgatgaagttgatgaagaagggactgacaatggaggtgccaagcgacaagtcaagctttcaagcctaggcttcactggtttcaaaaggaaaaccgaggatatcgaatcaagcggaaaaggtcgttgcaaattcttccaggctcgcaaacttgagttggtcaggaagtttcagtgatgtgtcctaatttggtagtacgtacttatatttgtggtagctggagtgtttggtttagtttgttgtagagcctaatttgaaactggtctaaattggatgttgagattggaatgggaagataatgattttccccacattgctacttctgccatttcctacgtgccgcagtagttactggatgctactgcgagtttatttgctaaactcgctttactgtttctttgcaatattgacggacgtttatttggaggatattgtcttattgactattgagtcacc

SEQ ID NO: 4381 - DNA, 2772 bp, Zea Mays
cgcacgctgccgtcgaccgctagttgaccttcccttccctcagaaccctaacgagcggtgagccgcctctctcgagcgcctaccactctgccccctgcgccgcctgcggcctgcccccaactcccgcaccatcgcgaagtcctcgacgtctaggtcgccattccagtaccttctagaatatcaggatcgccagcgccgccgcatcgggcggccctgtggcccatggacaagctccgcgtccaccgctgcaccggcgacgcggtcgagtggtccccctctcccatcgtcgcgctcgccgcctctccctgcgcctcccaggtcgccgccgcgcgtgaagacggctcgctcgagctctggctcgtctccccgggctccgtcggctggcacaaccagctcactatacaaggcaacgccgcgtcgagggtcacatcactggtgtgggggcggagaggtggagtgaccggccggctgctctcgtccagcattgatgggtcggtgtccgaatgggatctctttcacctgcagcaaaagactgttctagatactgttggagttccaatctggcaaatggccatcgaacctttggatgatgctaaaaatactgaaaataatagctcagagtttgctgtcaatggtcatacaaaccaaaatgactccagcgattctgactttagtaacattgatgatggtgacaactctgaggatgaagatggttctaccaacacaagatcttcatatcatgggaatgatttccagcgaatggctcttgcatgtgatgatggttctgtacgattgtttaacgtgcctgattcaggtgcattgacttactatagatttcttcccagagtgagcgggcggtctctcagcgtgacatggagtagtaacgccaaatttgtattttctggcagcagtgatggtttaatcagatgctgggattcaacatctttccatgaaatgtatcgtattactgctggattaggaggggctggtacctcacctgaactttgcatctggacactattgtttctgaggtgtggaactattgttagtggagatagtaccgggagtgtacagttttgggatagccgccatggaacacttctgcaagctcactcctatcataaaggcgacgtgaatgcactaacaactgtgcctggtgagaacagggtattttccgcagggtccgatggccaggtaattttatacaaaatatcaaaagatgaatttggtgctactaaaaatgtggtcaaagagcaagttcacaaatgggtctatgtgggatatgtgagagctcacactcatgatgtaagggcactgaccatggctgtacctatctgtagagaagatacatcacctgaggaaaaggtggtgaagattcgccggcgtgaaaaacatgaatttagttaccacaaatgggctcatcttggtgttccaatgcttatatctggtggtgatgacaccaagctgtttgcatattcagcaagagagtttactcagtttgcacctcataatttctgccctgcacctcaacgccctttgataaagatggctagggatagcacagtcaatggagattctgtaatgcttgtccagtctccaaactggttggatattttacttgtgacagttcagaacaaattgacgactccaagtacatcatcatctagaggagatgctacagtccgacaacttgctcgtttgaaaagcaaggggtccagaaaaatcatttctagtgctgcctctgccaatggaacacttttggcctattcagatggtgtgagaccctgcctctttgcactaaggcataagggtggaaagaagtatacccttgacaaattagagctaccaaaaggattgccctgttctcagagtatggcgtttacggttgattcgtccaatttgatacttgcgggacgtaatggaaaaatatacatcattgacattgcaacaagagaaatttcaaatgtatttcaccctacaagaaaggcagatggagcaaaaatctcaagagaatcacctataacgaagatgttcctaagtgcagatgggcaatggctggctgcagttaactgctatggcgatatttatgtatttaatcttgaggtgcaaaggcaacactggttcatatcccgaatgaacggtggttctgttacatctggtggattttgccccaaaaacaacacacttgtgataactacatctaaaaatgaggtgtatgtatttgatgtggaagcaaaacaattaggcgaatggtccaagcgatatacacaccagttgcccagaagtttccaggaattccctggagaggtcattggcttatcatttcctccgcaaagctcatcgtcagttgttgtatacagtaccagggctatgtgcaacatcgatttcggattgccagttgttgaggatgttggcttgccaaatggatcaggtgcaccagcagagaaggcagacgcaaaaaagagtaaaaaaacaaggcagaagcgtaaggcccgtgatgaagagtctacagaggagaaaaggaacaacttcaacttctttgcgtttaaagaaccagtgctctttgttgggcatctacaggacagttcaattttaatggtagagaagcgatggatggatgttgttgaaggtttcagcgcaccagttgacagacatatatatggcacatgattcttgctaacatcggcctttggcgctcgtgacaagcaaaccattgtttttgtttttttttctcaagaaaaaaataatagtaggaaaaaaacagtaaaacta

SEQ ID NO: 4382 - DNA, 1554 bp, Zea Mays
ctgaagctgggtagctcctgctcctatcccggctgctggcgcgccgtggttttgtgctcttgtggacacactggcctccacccatccctctcacgtctctggccatccgcagccaaggcgcgcggcccatcgtcgatttatagccacaccatggccaggaagtgctcccactgtggcaactacggccacaactccaggacctgcggactaggactaggactaggacacagagaaataatgctctgcgaaggtggcgacgacaataatggccgcagcggcctaaggctcttcggagtgcaggtccgtatcggcggcggcggtggcgcagggtcggcgtccatgaagaagagctacagcatggactgcctgcagctcgcggctcctcatgcttgttcgtccctcgtctcgtccccgtcgtcgtcgtcgttgtgctcgtcctcgtccccgtcgtcgctgctgctgtcgattgatgatgggttgcagagaggggcggccgatggatacctgtctgatggacctcatggcagagctgtgcaggagaggaagaaagctgatgtttctaaacaaaaacaatactctggatatataccgacgacgccaggagttccatggagcgaggaggagcacaggcagttccttgccggcctggacaagctgggcaagggcgactggcgaggcatcgccaggagctacgtgccgacgaggaccccgacgcaggtcgccagccacgcgcagaagttcttcctccggcagagcagcatggggaagaagaagcgccggtccagcctcttcgacatggtgccgatctgcgagaacagtgcgagcatctccgatccgctggacgtggcacgccatggcgtcgcctcggcagactccgagagggcggccgtggacgtggacctgatgaattcgacgacggagggtgacgacggcaggagcagggacgtcgtgtcgtcggcgtcaggtgcagggaccgcactgcggttcccggcagcggcagctcagacggagccgctgcatccttcgtcatcgcatggccatgggcgcggccaccactgctctccgttggacctggagctgggcatgtccctgcccgccccatccgtcggaacgtgatggagatgaggcgaggccgaggccgtgcgtgactgctgtctccctcagctgtgtgtgtcagccagatggagatgatgcgctagccaatacagtactgttcgtgatcgtgaaaacggtgtgcaaacactagcacagcggcactaaactaggatgtcgctcctcgcaccatattgtgtactgtaaccacgttgatccacatcatctctatctcttcaccaccgttggatcataggctgtcagtttcatctatccgtccatgtgtcatactcattcacgatgcggtggcttaatgatccagcagtaatttttcttctttcgtgacttaagggtatatacggtggtatttaatgtagaggcttttgatgtatttaaaggggtatttgcaaaaaaattatggagccgtctctgcatgaagaaacgcatctgtctcgtaagtca

SEQ ID NO: 4383 - DNA, 2034 bp, Zea Mays
ttaccactaaagtccaagctacacgatccagaaatgggcacagcaagtaataccactttttgtgtggtttcccatcccataacatgtccacatcgacagccaagcatcatgacacatagaagcatatttatagtgggctctcccgtaagtttcattgcctgaccctgaagctgggtagctcctgctcctatcccggctgctggcgcgccgtggttttgtgctcttgtggacacactggcctccacccatccctctcacgtctctggccatccgcagccaaggcgcgcggcccatcgtcgatttatagccacaccatggccaggaagtgctcccactgtggcaactacggccacaactccaggacctgcggactaggactaggactaggacacagagaaataatgctctgcgaaggtggcgacgacaataatggccgcagcggcctaaggctcttcggagtgcaggtccgtatcggcggcggcggtggcgcagggtcggcgtccatgaagaagagctacagcatggactgcctgcagctcgcggctcctcatgcttgttcgtccctcgtctcgtccccgtcgtcgtcgtcgttgtgctcgtcctcgtccccgtcgtcgctgctgctgtcgattgatgatgggttgcagagaggggcggccgatggatacctgtctgatggacctcatggcagagctgtgcaggagaggaagaaaggtacgtcaagaaatttttttcccttcctgatgaaaagacaaaagaggaagatttgttctttggaaattcagaaacttcaccttacacgaatttcttttcttattggtaatacgtactgtccatcagtcgtctgacctaaaaaaaaagttgcattatgctctacttttttttggcctaaaaaaagagagtaatatagctttatcttccactgatgctgcaacccttcaactgcaagtaacaatgaagcagctgagactgagagatactagtgcttccctgcacattattgagtccttgttgggttggtcggtagcagctgatgtttctaaacaaaaacaatactctggatatataccgacgacgccaggagttccatggagcgaggaggagcacaggcagttccttgccggcctggacaagctgggcaagggcgactggcgaggcatcgccaggagctacgtgccgacgaggaccccgacgcaggtcgccagccacgcgcagaagttcttcctccggcagagcagcatggggaagaagaagcgccggtccagcctcttcgacatggtgccgatctgcgagaacagtgcgagcatctccgatccgctggacgtggcacgccatggcgtcgcctcggcagactccgagagggcggccgtggacgtggacctgatgaattcgacgacggagggtgacgacggcaggagcagggacgtcgtgtcgtcggcgtcaggtgcagggaccgcactgcggttcccggcagcggcagctcagacggagccgctgcatccttcgtcatcgcatggccatgggcgcggccaccactgctctccgttggacctggagctgggcatgtccctgcccgccccatccgtcggaacgtgatggagatgaggcgaggccgaggccgtgcgtgactgctgtctccctcagctgtgtgtgtcagccagatggagatgatgcgctagccaatacagtactgttcgtgatcgtgaaaacggtgtgcaaacactagcacagcggcactaaactaggatgtcgctcctcgcaccatattgtgtactgtaaccacgttgatccacatcatctctatctcttcaccaccgttggatcataggctgtcagtttcatctatccgtccatgtgtcatactcattcacgatgcggtggcttaatgatccagcagtaatttttcttctttcgtgacttaagggtatatacggtggtatttaatgtagaggcttttgatgtatttaaaggggtatttgcaaaaaaattatggagccgtctctgcatgaagaaacgcatctgtctcgtaagtca

SEQ ID NO: 4384 - DNA, 1661 bp, Zea Mays
cccaaccacatggtagtttaatcccctactagtctcggagagtcgctccgaggaatgggagtcgtgccccaccggcggcagcagcaccggtgacgccggcacgcctaaatgcgtcgtcccctcgcctctgcggccctccgcctccgcttcttctcttccacctcccctgcccgccttctctcgccctgcccattccttctatcccgccgtgacgacgacggcggccgcgaggcctcctcgtcgccgctgcccccgctcccgccttctggctcggctttctccccacgcccgctcctcttctctgcatcagctgccgcgggcctcttcagcctccatggcgggtggtggaggcaggctcttcctcctgcagcgtcgcggcccctcggctccgtctctgacgcagctcccgtccggctcaccatctcccgcagttattctctgcgtgtggccaagggcaagaagaaagcacattttgacgatgaacacagtttggagtgtggatttcaacttcaagtcatgttatgctagctgagcttgtgcattctgttgcagactttgctaaccaggctcttcttgcttatggtttgagcagctcaagacgtgctccagatgctctacacccctatggttattctaaggaaagatttgtatggtctctcatatctgcagttggaatattttgcttgggttccggtgctacaattgtgcatggagttcaaaatttatggaattctcatcctccagagaatattcactgggctgcattagtgattggtgggtccttcctaattgaaggtgcttcactgcttgttgctataaaggctgttaggaaaggtgcagaagcagagggaatgagtatctgggactatatctggcgtggtcatgatccaacttccgttgctgttatgactgaagatggtgctgctgttacaggccttgctattgctgcagcatctttggtagctgttcaaatgacaggaaatgctatgtatgatccaattggctcaatcattgttggcaatttactggggatggttgctatttttctcattcagaggaataggcatgctttaattggccgggccattgatgatcatgacatgcaacgagtccttgaatttctgaagtctgatccggttgtagatgctctttatgattgcaaaagtgaggtgattgggccaggtttttttagattcaaggctgaaattgatttcaatggagttgttctggtacaaaattatttggaaaggactggacgtgggagttgggcaaaacagttccgggaagctgcaatgtccaaggatgatacggaattgctaagggtcatggccaactacggggaggatgtagttgaagctctgggatatgaagtggatcggctggagtctgagatccaaaagcttgtgcctgggattaaacatgttgacatcgaggcacacaatcccgaaggacttgctcttagagcagaagttttgtagattacctgtgtacattgcatttgattaacactgttgctggtcgctgccagtttgatttgggtccaccaccattcgataagattgtcttccattggcaatgtaagaatcagatggctgttgttgcgtagcgaggcggtttttttatttggaagaagacgtggtcgcgcctgacatggaaggctt

SEQ ID NO: 4385 - DNA, 1676 bp, Zea Mays
ctcggagagtcgctccgaggaatgggagtcgtgccccaccggcggcagcagcaccggtgacgccggcacgcctaaatgcgtcgtcccctcgcctctgcggccctccgcctccgcttcttctcttccacctcccctgcccgccttctctcgccctgcccattccttctatcccgccgtgacgacgacggcggccgcgaggcctcctcgtcgccgctgcccccgctcccgccttctggctcggctttctccccacgcccgctcctcttctctgcatcagctgccgcgggcctcttcagcctccatggcgggtggtggaggcaggctcttcctcctgcagcgtcgcggcccctcggctccgtctctgacgcagctcccgtccggctcaccatctcccgcagttattctctgcgtgtggccaagggcaagaagaaagcacattttgacgatgaacacagccatcgagcggttaacatggcactatggtgcaacttcctcgttttctccctaaagtttggagtgtggatttcaacttcaagtcatgttatgctagctgagcttgtgcattctgttgcagactttgctaaccaggctcttcttgcttatggtttgagcagctcaagacgtgctccagatgctctacacccctatggttattctaaggaaagatttgtatggtctctcatatctgcagttggaatattttgcttgggttccggtgctacaattgtgcatggagttcaaaatttatggaattctcatcctccagagaatattcactgggctgcattagtgattggtgggtccttcctaattgaaggtgcttcactgcttgttgctataaaggctgttaggaaaggtgcagaagcagagggaatgagtatctgggactatatctggcgtggtcatgatccaacttccgttgctgttatgactgaagatggtgctgctgttacaggccttgctattgctgcagcatctttggtagctgttcaaatgacaggaaatgctatgtatgatccaattggctcaatcattgttggcaatttactggggatggttgctatttttctcattcagaggaataggcatgctttaattggccgggccattgatgatcatgacatgcaacgagtccttgaatttctgaagtctgatccgatgctctttatgattgcaaaagtgaggtgattgggccaggtttttttagattcaaggctgaaattgatttcaatggagttgttctggtacaaaattatttggaaaggactggacgtgggagttgggcaaaacagttccgggaagctgcaatgtccaaggatgatacggaattgctaagggtcatggccaactacggggaggatgtagttgaagctctgggatatgaagtggatcggctggagtctgagatccaaaagcttgtgcctgggattaaacatgttgacatcgaggcacacaatcccgaaggacttgctcttagagcagaagttttgtagattacctgtgtacattgcatttgattaacactgttgctggtcgctgccagtttgatttgggtccaccaccattcgataagattgtcttccattggcaatgtaagaatcagatggctgttgttgcgtagcgaggcggtttttttatttggaagaagacgtggtcgcgcctgacatggaaggctt

SEQ ID NO: 4386 - DNA, 1904 bp, Zea Mays
aaccacatggtagtttaatcccctactagtctcggagagtcgctccgaggaatgggagtcgtgccccaccggcggcagcagcaccggtgacgccggcacgcctaaatgcgtcgtcccctcgcctctgcggccctccgcctccgcttcttctcttccacctcccctgcccgccttctctcgccctgcccattccttctatcccgccgtgacgacgacggcggccgcgaggcctcctcgtcgccgctgcccccgctcccgccttctggctcggctttctccccacgcccgctcctcttctctgcatcagctgccgcgggcctcttcagcctccatggcgggtggtggaggcaggctcttcctcctgcagcgtcgcggcccctcggctccgtctctgacgcagctcccgtccggctcaccatctcccgcagttattctctgcgtgtggccaagggcaagaagaaagcacattttgacgatgaacacagccatcgagcggttaacatggcactatggtgcaacttcctcgttttctccctaaagtttggagtgtggatttcaacttcaagtcatgttatgctagctgagcttgtgcattctgttgcagactttgctaaccaggctcttcttgcttatggtttgagcagctcaagacgtgctccagatgctctacacccctatggttattctaaggaaagatttgtatggtctctcatatctgcagttggaatattttgcttgggttccggtgctacaattgtgcatggagttcaaaatttatggaattctcatcctccagagaatattcactgggctgcattagtgattggtgggtccttcctaattgaaggtgcttcactgcttgttgctataaaggctgttaggaaaggtgcagaagcagagggaatgagtatctgggactatatctggcgtggtcatgatccaacttccgttgctgttatgactgaagatggtgctgctgttacaggccttgctattgctgcagcatctttggtagctgttcaaatgacaggaaatgctatgtatgatccaattggctcaatcattgttggcaatttactggggatggttgctatttttctcattcagaggaataggcatgctttaattggccgggccattgatgatcatgacatgcaacgagtccttgaatttctgaagtctgatccggttgtagatgctctttatgattgcaaaagtgaggtgattgggccaggtttttttagattcaaggctgaaattgatttcaatggagttgttctggtacaaaattatttggaaaggactggacgtgggagttgggcaaaacagaatgatgtcaaggaagcatattacgtcctagtttcatcttgttataaaagggcagacctggtgcagttgtgagagctatctcatggagccggtcacggacttgaagtagcctccgtgcatttgcgagaagaaggctttcctcaggtcatgaattcgaagcagctttacttgtagaggaaggtttggctcagttccgggaagctgcaatgtccaaggatgatacggaattgctaagggtcatggccaactacggggaggatgtagttgaagctctgggatatgaagtggatcggctggagtctgagatccaaaagcttgtgcctgggattaaacatgttgacatcgaggcacacaatcccgaaggacttgctcttagagcagaagttttgtagattacctgtgtacattgcatttgattaacactgttgctggtcgctgccagtttgatttgggtccaccaccattcgataagattgtcttccattggcaatgtaagaatcagatggctgttgttgcgtagcgaggcggtttttttatttggaagaagacgtggtcgcgcctgacatggaaggctt

SEQ ID NO: 4387 - DNA, 2403 bp, Zea Mays
ctgactccacagtccacaccaccaccacacccaggcttccacttgccgccgcgcccgcgcctccccctcattttctccccctccactgctttgcgcctacgcatcgccgccccgcctctagtcctctgtcctcctcttcctactgtaaaccacctcgtccctatccgcggcaaccgttcaccgcgccgcgaggcctgctgatccgaccgaccttccaccgtcatggctcccctgcgccgcgcgtctcgcctccttcgatcagccgtctgccggctgaggtctccagcgccggctcgggccttctccagcgccgcggcgaccgagacgggtgccgtgatcgccgccgctgccgtggcggtggccagctccgggctcgggctgtggctgaaaccgccgtcgcttgccgactccggcgaggcgcccggcgaccagatctcggtcgcctgtgccggcgccacggaggcgcgggaggagaaggggtggttcctgttcgcagactcatttcgtagaagggtcttcttcaactacgagaagaggatacggcttctcagtcctcctgagaagatttttgagtactttgcgtctgtgaggaatcgagaaggggaagtttacatgttgcctgctgacttgatgagagcagtagtccctgtttttcctccatcagagtccacggtagttcgtgaaggaagattaaggggggagcggagccctggagaattgcactgtgctccatcagagttctttatgcagttcgacacaaataatgatggcctcatctcctttgctgagtacattttttttgtgacattgctcagcattcatgagtcaaatttcactgtggccttcaaaatgttcgacattgaccacagtgggtgagttcttatcctaccgttgctctaagtcttcagaataggttccccgaccctgctgaaacacatctgttgaccagaattttctcaacctgtacacttctatttggttttgataaacgattaaaataaatttgatgttttgagaggaaatttagttcttcaagtcctgtttgcttcagtttgaaatttcttttcctgtgtaaacatatgttgtttagtaatgctgataaaggtatgtcgttctgtactcatgcataaacaagaggacagttaatatggtcttgtttgtgttgtattgttgtttacctgtgatcattgcatgcagttaatttatctcgccaagaaaaaagacctgctcgttatgagcatgttcaatcatctgacttgtttgttgatgggtgatagacagagaagagtttaagaaaataatggcactgatgcggtcctttaacagacaagggtcgactcataaggatggtttacgtattggacttaaagttggcaagcctgtggaaaatggtggggtggtcgagtacttctttgggagtgatgggaatgaacctctacactttgacaagttttctaaaattttgaaggaattgcatgatgagattattcaactggagttcagtcattatgatgtcaaatcgtctaaaacaataccagcaaaggattttgcattgtccatggttgcttctgctgacatgaaccatatcaacaagctgcttgatagagttgatagtttggtcaaggagccagatctgaaggacatacgcatcacctttgaggagtttaaggcatttgctgatttgcgacgaagattggagccactgtcgatggctatctttgcttacggtaaattgaatgggttattgacgaaggaggatctaaaacgtgcagcgcaacatgtttgcggggtcgacttaacagatagagtagtagacatcattttccatgtgttcgacacaaatcaggatgggaacttgagcccagaagagttcttaagagcgttacaaagaagagaaactgatattcgtgaaccaacaataccaggtccattggggttcttgtcttgctggttcagtggtaggaagtgttcttcactaaaacatgtggttatctgattgagcccctatttgatcctcacggcgcagaaggtaatcaccaagcagtgcattgctgatcgttacaacggacttcactgtatgtcgtcttggtggccgaagcttgactagcagtaacagctctaattgtaaatcgtgtcttctgtagccctaggactgagtgatatacatcgttattctcacgtgtaaattaaaccccatatggccatatggcttcaatatatgaaacattgtcatttagctttatttttagttgaaaacgtgactcacttttgccggaaccgtagcgttagagtgccaaacagaccaaccaggtagcaggcaacaatcagccactaacgtcaagacaaaagatttgtagtttttctttcttttttgcgagctgtgtgaatctctcttataaaacc

SEQ ID NO: 4388 - DNA, 2071 bp, Zea Mays
tcgtcagcaatcctaatccaaaccgccgcggccacggccgcagccttccatagttctgtcagaaattccccttctcatccctgatccctccaactcccaccccaatacatcctgccgacgccatcagccggcgggacgcacacacgaggtcgaccttcgaaccctagtccttggccgagccgccttgcgggatcgtccccgccgcgcggcagctctgcctcgacccttttagtctccgtccgacaccgcttggatcagagatggaatcaccacccctcacagctgaagcaattgcttttaccgagaaaaagatggacatgactttggaggatataatcaagatgtcaaagaaaaagaatcctggaggcaagaacccccctaggcagccgatcaaaaagcgtccattccagaatgccaacactaataaagggaatggcaaggttcaacggtttatggaatctagatcaaccattagacaaggtgttcttgcacagagaaggtcaaatcttggtggaagtcagtttgctgctacaaagcaggctgcaaagaaggctgctgctatgccaatgcgcagcggggctgtctattggaagaagcctagtgcaagtaccttagtgcagaggaggtcagtaggtgatgcttttcaaaataccaagctcttagaagcgatatgcaaccaaagaaaaggccgagaagctcaagtgaagcgattcagtgcagacgaacaggggaagcagacagataactcaagctgtttagtgcagacaggcagctcaagcaggagtcggaattggatgatgaatcggattagggagggagagatcaaaggaggggaagagatagggaggcgggggccggggagggagatgagagggtggtcaggaggattacctggtggtggtggtggccggtggcaattcgtgagggttggcggcgcgcaaccgctgacggtggcagcggcgcgtctagggttgctgtgctcgtgtgcgggagcgggagtcaccaagtatagcgaaggccatacaggtaagttgtccgctcttcaaagtatactacttatccccaggtaacccgtgtatccgctttttaaattaaatttctacttattccgatatgtataggatatgtatccgagctgtatcgctatccgatacggatacgagctctttgggaagtatcctggtatcataggcatcaatgtagcgactttcctgatttgttgcgcttcccttctttgctccatacacctctaacaatacttttttcttgatatgttttaatgtatagttttctcacataatccatcttctggtatctccatgtcactttataaccattcatagtactttcaggaccgtgatgaatgctatacttgggtccatttttatttttagaagtcaaggagtcgcagaaccatgcagcaccaaggacgatggatgcactctttgcacggatgaaggcgcaacgcatgaggaccgcaccacagcagcaggcaaatcctgcctctggacgtgatttcaaccagcagcgacgtgttcagcagcagcagaggcgaggtagagcatatggtggccgtgttgtcggcaaccaatgagcatatttggtgcatcgaagccccttctcttcactggtcttaaggaccttgagggctagtttgggaactctatgtttctctattttctcaagtgaaaatgagctaatttttcttgggaaaatgaggttttcaaactagccttgaatgaaaggacgccgggggaaaatctaacttgactttctttgttggatgaaaggatgtggacagaatatgaagcgaattttgtgtgactctagttgtctgcttctgttcagcatgtacactgacctacggaaattacttgctagattttgatgtcatgtttattgagttgatttggttcgtctcttcaacagaactaggagtattcgccttttaccatatgtataaaattttaaatacctttactgtgaggtagacaagctgaatttatcatagtcctttcgttttaaaattatatctatactgtgtatagatacatagtgtatggtagaacct

SEQ ID NO: 4389 - DNA, 2259 bp, Zea Mays
tcgtcagcaatcctaatccaaaccgccgcggccacggccgcagccttccatagttctgtcagaaattccccttctcatccctgatccctccaactcccaccccaatacatcctgccgacgccatcagccggcgggacgcacacacgaggtcgaccttcgaaccctagtccttggccgagccgccttgcgggatcgtccccgccgcgcggcagctctgcctcgacccttttagtctccgtccgacaccgcttggatcagagatggaatcaccacccctcacagctgaagcaattgcttttaccgagaaaaagatggacatgactttggaggatataatcaagatgtcaaagaaaaagaatcctggaggcaagaacccccctaggcagccgatcaaaaagcgtccattccagaatgccaacactaataaagggaatggcaaggttcaacggtttatggaatctagatcaaccattagacaaggtgttcttgcacagagaaggtcaaatcttggtggaagtcagtttgctgctacaaagcaggctgcaaagaaggctgctgctatgccaatgcgcagcggggctgtctattggaagaagcctagtgcaagtaccttagtgcagaggaggtcagtaggtgatgcttttcaaaataccaaggaccatgggggtgaacactgaaggacttggaggaggccccaatctccttcatggtgtccttggctgcagtgcctagaaacattctctgagaagggctgtaagttaggttgcacatgtgagggacctccaggttaggttgttttcaaaagatcatattttggtgagcatgaatagtgcaaccgcgtcagctcttagaagcgatatgcaaccaaagaaaaggccgagaagctcaagtgaagcgattcagtgcagacgaacaggggaagcagacagataactcaagctgtttagtgcagacaggcagctcaagcaggagtcggaattggatgatgaatcggattagggagggagagatcaaaggaggggaagagatagggaggcgggggccggggagggagatgagagggtggtcaggaggattacctggtggtggtggtggccggtggcaattcgtgagggttggcggcgcgcaaccgctgacggtggcagcggcgcgtctagggttgctgtgctcgtgtgcgggagcgggagtcaccaagtatagcgaaggccatacaggtaagttgtccgctcttcaaagtatactacttatccccaggtaacccgtgtatccgctttttaaattaaatttctacttattccgatatgtataggatatgtatccgagctgtatcgctatccgatacggatacgagctctttgggaagtatcctggtatcataggcatcaatgtagcgactttcctgatttgttgcgcttcccttctttgctccatacacctctaacaatacttttttcttgatatgttttaatgtatagttttctcacataatccatcttctggtatctccatgtcactttataaccattcatagtactttcaggaccgtgatgaatgctatacttgggtccatttttatttttagaagtcaaggagtcgcagaaccatgcagcaccaaggacgatggatgcactctttgcacggatgaaggcgcaacgcatgaggaccgcaccacagcagcaggcaaatcctgcctctggacgtgatttcaaccagcagcgacgtgttcagcagcagcagaggcgaggtagagcatatggtggccgtgttgtcggcaaccaatgagcatatttggtgcatcgaagccccttctcttcactggtcttaaggaccttgagggctagtttgggaactctatgtttctctattttctcaagtgaaaatgagctaatttttcttgggaaaatgaggttttcaaactagccttgaatgaaaggacgccgggggaaaatctaacttgactttctttgttggatgaaaggatgtggacagaatatgaagcgaattttgtgtgactctagttgtctgcttctgttcagcatgtacactgacctacggaaattacttgctagattttgatgtcatgtttattgagttgatttggttcgtctcttcaacagaactaggagtattcgccttttaccatatgtataaaattttaaatacctttactgtgaggtagacaagctgaatttatcatagtcctttcgttttaaaattatatctatactgtgtatagatacatagtgtatggtagaacct

SEQ ID NO: 4390 - DNA, 2648 bp, Zea Mays
aacggaccctctctcctcgtcagcaatcctaatccaaaccgccgcggccacggccgcagccttccatagttctgtcagaaattccccttctcatccctgatccctccaactcccaccccaatacatcctgccgacgccatcagccggcgggacgcacacacgaggtcgaccttcgaaccctagtccttggccgagccgccttgcgggatcgtccccgccgcgcggcagctctgcctcgacccttttagtctccgtccgacaccgcttggatcagagatggaatcaccacccctcacagctgaagcaattgcttttaccgagaaaaagatggacatgactttggaggatataatcaagatgtcaaagaaaaagaatcctggaggcaagaacccccctaggcagccgatcaaaaagcgtccattccagaatgccaacactaataaagggaatggcaaggttcaacggtttatggaatctagatcaaccattagacaaggtgttcttgcacagagaaggtcaaatcttggtggaagtcagtttgctgctacaaagcaggctgcaaagaaggctgctgctatgccaatgcgcagcggggctgtctattggaagaagcctaggtaaacaatggttatcttattgcttatgagaaagtttactgcattcaaggagttgttaaatttattgtgtcatgcaccttgggttatattggctgagaatgattgtgatgctggtgtttgcatggaactgccttgacttctctggttatacacagttacacacatgttattaaagaacaatgaacttcatattcctgttctgcaaggcttgttttcttggttgaactgctacaaatacatggtgaatataacatatgagccttaaagcttcattgaaagttatggcatttccctttattctggttgagctggtcaaatttgtgaacctgctgggacaccctggatatgtatctgctgttggctgacatttttctatgcaattcagcagtattcatggtgtaatctatagctgctggatgagtgctatttttggacaccagtgtctgaggtttacgttagtgttatttgtcaactatggttggaaggaccgaaggagatgtgataatgactagcatctcatgccactggtgactgatcatccagatacagggatgctacatgcctgagttggaattggtttttactactggctccttggctgtgctcagtgtttgtttgaatgatgaatgcaatgtgaatctagggtagtgatgctatagcaggacaattgtatgcctccaaggagtacattttgcttctgcctcctattaaagttggctgtatccataacagcattctatcataaagttgttcactagtttccacagatattgcttgcttgcatttctactggatgagaataaatcgtgttatcttgcgatttatctgactatatgctgagctgtatggatgctttcttttcaaggtcaactgttggaatttattttcatgatttcttatgtcttgttgatcctggatcagtggtcactaattacatgacttgagtttatcagttcaatcaatcaataagtggtgttaacttgggaaatttttgaaccatgtgtgttgaaattttggtggaaataaacagtctagactctagaatgttgggggccttggaaaccaagaggatgcactagatattttcagtgactactttatcatttctgtttgattttatttcgaagcatggtatgtacttcctgactccccttgagaagtgagaattgtatccttgttttgatggggcatggtgagtttgctcagaaaacagtattgatcctggttctccattgtttatgattcatggtacttgagcactcctgctcatgtgagatactaatgtttttattttgatacagtgcaagtaccttagtgcagaggaggtcagtaggtgatgcttttcaaaataccaaggtcaaggagtcgcagaaccatgcagcaccaaggacgatggatgcactctttgcacggatgaaggcgcaacgcatgaggaccgcaccacagcagcaggcaaatcctgcctctggacgtgatttcaaccagcagcgacgtgttcagcagcagcagaggcgaggtagagcatatggtggccgtgttgtcggcaaccaatgagcatatttggtgcatcgaagccccttctcttcactggtcttaaggaccttgagggctagtttgggaactctatgtttctctattttctcaagtgaaaatgagctaatttttcttgggaaaatgaggttttcaaactagccttgaatgaaaggacgccgggggaaaatctaacttgactttctttgttggatgaaaggatgtggacagaatatgaagcgaattttgtgtgactctagttgtctgcttctgttcagcatgtacactgacctacggaaattacttgctagattttgatgtcatgtttattgagttgatttggttcgtctcttcaacagaactaggagtattcgccttttaccatatgtataaaattttaaatacctttactgtgaggtagacaagctgaatttatcatagtcctttcgttttaaaattatatctatactgtgtatagatacatagtgtatggtagaacct

SEQ ID NO: 4391 - DNA, 1997 bp, Zea Mays
aagtttgaaaatagggctaaattcgtaattatgaataaagagtaattgcggtcgtggttccggattccccgccgccgccgcaagaccggagccctaattccaagcggtaaacgatgaggccgcacgcggtgggtatgggtggcggtggcgtggggaggcggaaggcgggggccgccgccgccgcggctagccgggagtggttggtggtgccggcgtcgggcccggcgcgggtggaggaagcagggaagcacgcggtgatggcgcgtacggggcttcccgcgcgcgatctcagggtgctcgacccgttactctcgtacccgtccacgatcctgggccgcgagcgcgccatcgtggtcaacttggagcgcgtcaaagctctgatcacagccgcggaggtgctgcttcctaacaccaaggatcccgccttcgcgcgcttcgttcgcgacctccagacccgcgtcctcgcatcttcgtctgaccaggcagctgaactcactgacatggaaggtgaatcacctattgttgcttcaccatttcctgtaccaagttcatccaaagggcatgaaatggagatgactaagaagactgctgctgttgtgcctgaaatgactagcagcagcagtatgcccaatttagctgttgcaaaagatggaaataccaaggttttgcctttcgaatttcgagctcttgaagtgtgccttgaatcagcctgcagatctttggaagaggaaacttctactctggagctagaggcatatccagcattagatgagctgacatcaaagatcagcacattaaaccttgaacgagttaggcaaatcaagagtcgtctggttgcgatatctggtcgagtacagaaggtgagggatgagcttgagcatttactggatgatgaaatggatatggctgaaatgtacttgacagagaagcttactcaacaagaaatcagtgaggcttcatctagagctgaggttgatgatgcatctcttacagaagacgatagggatgaagattatagaagtgaaccagatggaagcaatggtagtgttataggttataagcccaatattgaagagctagagatgcttctagaggcttactttgtgcaaattgatggcacacttaacaagctatcacataagattatatcaatataatgttggacgacaagcagaatcagctgctgcagatgggagttatgctgtcaactgctactgtcgtcatcactgctggagtggctgtagttggtctttttggtatgaatattggcatatcactttacgcagacccaacaaccgaggaggaaactcgagcagcaaataggaaattttgggaaactactttcgggaccgttgctggctgcgtgattttgtacatcatagccatgggttggggaaagagaagtggattactgcaatgatgcggaagcatgactgcatgagtgttctgtacccagtgaatactgggttcacaaaaatctccaaaatgagagattattgtattggcatgctgctcgatcatactgctgccagaaaatacgcctcgttccactatgctggaaaagaaacatcttgtgtaccgctagtagctgctaatgcgtgaagtatattttacaatctgttgcccatcgtctgtcatggcaactcagcagttttgtacctgtttaccatgctaggtgctgtttttgctcttgttattgtgatcattcctgtaactgtatctagcggcctgtaatatgtatgccgctgattggttgagtgcctcccgcagtcccgcgtgcaggcctcccgcgcgcctggctcatcagcgattgtcatccgcgccatctccacacgcccagacgggtagtgaaaaaaatgcctagcctgcacacccgcatgctggccagcattctcatatctaagcaactaattagaatctcgtgcttggtcaaagcacgctggagcctcgttatctctatgcaagcaaccaatcacgtactatatgtacttgctctg

SEQ ID NO: 4392 - DNA, 2018 bp, Zea Mays
aagtttgaaaatagggctaaattcgtaattatgaataaagagtaattgcggtcgtggttccggattccccgccgccgccgcaagaccggagccctaattccaagcggtaaacgatgaggccgcacgcggtgggtatgggtggcggtggcgtggggaggcggaaggcgggggccgccgccgccgcggctagccgggagtggttggtggtgccggcgtcgggcccggcgcgggtggaggaagcagggaagcacgcggtgatggcgcgtacggggcttcccgcgcgcgatctcagggtgctcgacccgttactctcgtacccgtccacgatcctgggccgcgagcgcgccatcgtggtcaacttggagcgcgtcaaagctctgatcacagccgcggaggtgctgcttcctaacaccaaggatcccgccttcgcgcgcttcgttcgcgacctccagacccgcgtcctcgcatcttcgtctgaccagctgaactcactgacatggaaggtgaatcacctattgttgcttcaccatttcctgtaccaagttcatccaaagggcatgaaatggagatgactaagaagactgctgctgttgtgcctgaaatgactagcagcagcagtatgcccaatttagctgttgcaaaagatggaaataccaaggttttgcctttcgaatttcgagctcttgaagtgtgccttgaatcagcctgcagatctttggaagaggaaacttctactctggagctagaggcatatccagcattagatgagctgacatcaaagatcagcacattaaaccttgaacgagttaggcaaatcaagagtcgtctggttgcgatatctggtcgagtacagaaggtgagggatgagcttgagcatttactggatgatgaaatggatatggctgaaatgtacttgacagagaagcttactcaacaagaaatcagtgaggcttcatctagagctgaggttgatgatgcatctcttacagaagacgatagggatgaagattatagaagtgaaccagatggaagcaatggtagtgttataggttataagcccaatattgaagagctagagatgcttctagaggcttactttgtgcaaattgatggcacacttaacaagctatcacatctgagggagtacgtcgatgacacagaagattatatcaatataatgttggacgacaagcagaatcagctgctgcagatgggagttatgctgtcaactgctactgtcgtcatcactgctggagtggctgtagttggtctttttggtatgaatattggcatatcactttacgcagacccaacaaccgaggaggaaactcgagcagcaaataggaaattttgggaaactactttcgggaccgttgctggctgcgtgattttgtacatcatagccatgggttggggaaagagaagtggattactgcaatgatgcggaagcatgactgcatgagtgttctgtacccagtgaatactgggttcacaaaaatctccaaaatgagagattattgtattggcatgctgctcgatcatactgctgccagaaaatacgcctcgttccactatgctggaaaagaaacatcttgtgtaccgctagtagctgctaatgcgtgaagtatattttacaatctgttgcccatcgtctgtcatggcaactcagcagttttgtacctgtttaccatgctaggtgctgtttttgctcttgttattgtgatcattcctgtaactgtatctagcggcctgtaatatgtatgccgctgattggttgagtgcctcccgcagtcccgcgtgcaggcctcccgcgcgcctggctcatcagcgattgtcatccgcgccatctccacacgcccagacgggtagtgaaaaaaatgcctagcctgcacacccgcatgctggccagcattctcatatctaagcaactaattagaatctcgtgcttggtcaaagcacgctggagcctcgttatctctatgcaagcaaccaatcacgtactatatgtacttgctctg

SEQ ID NO: 4393 - DNA, 2218 bp, Zea Mays
atgttcgtcctgcgaatccagtccgtcgacttccccgacgccgccgtggcagcagtcgccgccgacgaagtcggcaccagcagcggcggcgttaccacctctcgtccgctctccagccaccctcccccctctaccaccacatcgtccatacttactctcgagctccccggcgcaaaccccgtcgcgcccagccgaagccctaggatcctccacacccgcggcgtcatccacctctaccactcgtcgtcctccacttccacctcctcctcctacgcctcggcggtcgcagccacctcttcctcctcatccgggccggccaccccgcagcccgcctccgactcgcacctgcccctatgtcgcggcacgcgcctcctggtgctcgccgttccgacgcgcgtttcgccggaggactttgttcgcttctgcggcccccacctcgagtgtgcagccgacattcgtttcatcagggatgatggagtggaggaccggtacagcgttctagtggagtttgaggaccagagtagcgctgaatggttctacgccgatctcaatggctggaggttctcaacctctgaggtgtcttatcttcttaattgaattctagtttattcgctgatcatatttgagatcgttgctaaattggcgattaactctcgtttccatggtgtagagtgaggtgtgccatgttctgtttatagctgctgtgcagtatacaccttcctcagaggttgccacaactccaccggctggatccactgaacttccaatgtgtcctgtttgcattggtgaacttactgttttgtatttttttttgtattttggggcctctgcaatacaatttatagtcatatgtacgtgtcaccatggtgtcacatttgaattcaatttgtgatctccgttgaagagatttaggcacctctgttctatcctggccatagttttaactttaaataccattctgtttgatgcaacagcaacccttcatctattattttcacttttcatattttgttggttgtttaagttgtctgccttgtttctggtacacctaactattttctgccatcttaatatgttaatttgtcagaaagattggatcaggacatcagtgggattttggcaactacttgtgatcactctttccgttgctcatgtgtttcagtgtggaccaattcatcctgtccggtatgccagttttgtcagaagcagtctgaaaattctacatgttctgtttgccaaaccactggaaacctctggatatgtgtgatatgtggttttgttggatgcggacggtatcaagaaggacatgcgaaacagcactggaaagatactcagcattgctattcgctagatttggaaacacaacgtgtttgggactatgttggtgacagttttgtacatcggctgaatcaatccaagagtgacgcaaagcatgctaagttcaaatcaaaaagtaaatattctggggatgaatgtgtaaactgctcgtgcaatgatgactctgatatgggtggagctatgttcagcagcaaagctgaaacaattgtggacgagtacaatcgtctcctggcaagccaacttgaaactcagagagagtattatgagggcctgttgtctgaggctaaaagaaacaaggagcaccagatttctgaagctgctgataaagctatgaacgaaaaactcactaggagccaagacatgtggcgccagacactaagagatatagaggaaagggaaagagcacagttgaagtcgaaggacgaaatgattctcgatctggaagaacagataaaggatttcaaattttccatcaaactgcagaagtcaatagagaagaacgatggtgtcaagggtggtacgctggttccactccctacggtttcagattctggaggcaagggtaaaaggtcatcaagaacaagcaagaggaggaattagtatcctttgctgagtagcaattagtcttgactggaacagacgtatacgaaccttattggcatgtatttactagcctgttatgatgaactacagcgtgatgtttgatttgtcacgaaaattagtacgatcataaactgcttcgaagatttgaacttggatactacatgtggaaaatacaatctaaatcgaagtacagccagttatttcgtaaccacatatagccaaatcttgaagcgtttcatgtcaaacggtggaattagagatagatccctgcacctaa

SEQ ID NO: 4394 - DNA, 1376 bp, Zea Mays
aagcgcagcaggctgctgggccaaatgtcaaacaacatgctgctgggccaaatggcaaacacaccctaaaagaccgcgggtggctgatcaacggtttccagtagcagcagcacaactgcacgacccctcgccggccatggaggcctccgccaccggcgccgcggatccgcacttcccgatttacatctcctcggacgaggaagacgggcacgcctatttcatcgagtcctatagccccgaggaggtccagattcagcagaccattcttctctccctgtatacctctcgcgcccagacggccgccgcctgctccgcttcctcctcttaccctactggtgcctcctccacccctaaggccggtacctcctccacccctaaggaaactcctatcgatcacaaaagaaagcgcaagcttaaactagaagacgacacgaacgactccaaaatgaagcggtccacgcgcaaccgcttcaactgcgccatctgcttcgagatggttctggctgcggagaagtttgttgtgagtcactgccctcacgcgttctgcaacagttgcatcggaaggtatgtcgccggcaaggtagccgacaacgtagccgtgatcgggtgccctgaccccgcgtgtgagacggggtttattgagatggatctgtgtcgggatatcatcccgcctgaactatttgaccggtggagtgtcgtgctgtgcgaggagctactgggtgatgataagttctactgtccgttcaaggattgctcggcactgttactaaatgatgattcggcgaagatcagggaaacagagtgtccccactgtcacaggctgttctgtgctcgctgccatgtgccatggcacgatgggatcgagtgcaaggaatttaggaagcttggggatgacgagaagggggagaatgatttgatgcttaagaaacttgctgacaaggagaaatggcagaggtgccccaagtgcaggatgtatgtttcgcgaaaatctgggtgcttgttaataaattgcagtacttctgttaccattgtgctgcaccaatggatagggaaactcactattgtgagaattgcaagcactagagaagtagattaaggtctttttagataatgagtaggtaaagctcttagttaacaatgcaggctccgtgcgcagtcgtaggtgatacctaagtagaattttatccccttttagtggaagtaagttccacctttctgccatcgtgatattgttgagctatagagttgatgtgctgaagttatccttaaagcatcctgcattcctgcatcatgaactccctccgtcttgtaatataatgctttacaaaatattttaagataacttgagagaatatccaaatgacgcatatacccat

SEQ ID NO: 4395 - DNA, 1457 bp, Zea Mays
atttacctattgccattcgtaggatagggccctagcgcgattagaagggacacgagcaaccgatgctgccgcagcctcacactcaaccaatatttctcctgtatacaaagaaaaagaaatcttccatacatcagactttgactcgcttctatctcgcgcaagccgagaagaaaggagcccgtctacgcgagagatgggcggctacgagaacggcgagtcgacggcggccgcggcgcttgctgacggtggtgtgattctgggcgtggacggcggcaccaccaacaccgtttgcgtctgcctgccggctgcaatgacgccgccggagtctccggccaccgtacccgtgcttgcacgcgccgtcgccggctgctcaaaccgcaattccgtcggagaaaatgctgccttggaaactctcgagcaggtcatgacacaggctctagcattggccaacacagatcgttcagctgtccgagcagtttgtttagccgtatcaggagtgaaccatccttcagatcagctgaggatgctggaatggatccgggatctgttcccagacaatgcaaaaaattatgtagaaaatgatgcagtggcggccctggctagtggtacaatgggaaagctgcatggttgtgtgttaattgcgggcactggatgcattgcttatggagttacagaagatggaaaagtagcaagagcagctggtgctgggcctgttttgggcgactggggtaggtggacatatgcggatccatcttgggctcgtattgcagcacttgtaccagttgtggtatcttctgctgaagatggtgatgaagtagctaacaaaatcttgcatgattcagtccaagagttggctgacactgttatagcggttgttcagcgtcttagattgtgtggcgaagatggaaaggacatgtttccacttgttttggttggaggggtccttgaaggaaataaaaagtgggatatcagtggtgaggtcataaaatgtatttccaaggtcttcccgggcactgatcctatttggcctgaggtggaaccagcaatcggtgctgccttgctagcctggagccatcaccacaaagggttgaaattggagaatggaagttgattcccagcatttaagggtgtcaattgtacattgaggagttggcgagccaaaggggtattggtcccaatgatacattcatcggcatgaaggcttttcgttcccagcaaaaagaataaatcgtggatgggtgcaaacatgcggtgtggatagaacatatttctgatgtaagtaggtagtaagaattgttcaaatattcctctgattctaactctcggtgattgttgtatgtgttctgtttgtgtttggaggtagtaacatgtatctgtctaccatggataattgatcgtcaaatgttcagatctttttttacatacattgtgcttggcctctataaactttagttggc

SEQ ID NO: 4396 - DNA, 2417 bp, Zea Mays
cttcactgccctccccttctcctagctgatccctgctgcagcactaaagcttagctttgagagcttctcccttgtttgcagcgttgctaagtgctaacacccttctctctcccctcctgtctgctcttcctgtcggtgcccactgctgctgttcagctgatacagtcttaagctcagttactgccgccggtttccagcaaaggctctcgcagcgcacttgtgcctgaaccttcaggcctgtggcaggagagtgtggggaagcagcacaagaagaaacagtggaatcagaggggaagcaaagctccaagagggggagccgtcttcagcccgctcccagcagcctcgctcgcggtcgtccgccgctcgatcgagctcgcaaccggcggccagcctcctcctcctttggcatgccttcggcggcattacaccttggcacgtcggtggaggccggcggcggcttccaaggcaccggtgccatggcgccgtccgcgcgcctcctcacccccaaaggcgccggcgctgcggccgggcccgcgcaggcgcagagtcgtcgggaggaaacggccaacggcgggggcgctggccctgaccttgccgcactccggcccaccaccaccaccaacaggccgcgcgggaaagcccaggccgggaagcccagcaggcgggcgccgatctggaacctgaaggccgccgtcttcgcctccgtcgtcctcaacgtaggcctcctcgtccagcactacgtcagtagcacggctccgtcgcaccaccaccaccgccaggggcatcaggcctgcccgatgcatctagatgctggcgccagccgcgacagaagggggaggcaggaggatccgctgtccgtgcccaaggccggggcgccgtcgacgggcaagccggcggtgacgccggactcggtgatcaatctcgatcagtgagtactcagtactcagttcaaagctttcctgcttttcttgctgccgcgcgcgtttgcatgccagctcgtttgttccccagcggcgacccaaccatgttcgaggagttctggcgggggacgggggccgccgccgagatcgtcatcccggggtggcagaccatgagctacttctccgacgtgggcaacgtgtgctggttcctggagccgggcctggaccaggaggtgcggcgggtgcaccggctggtcggcaacgccgccgtggacgggtaccacgtcgtcgtcggcaccggctccacgcagctcttcatggccgcgctgtacgcgctgtcgccgcccgcgggagccggcgccggcgctgcgcccatgagcgtggtgtccacggcgccctactactcgtcctaccctgccgtcacggatttcctccggtcggggctcttccgctgggccggcgacgccagctcgttcaggggcgacacctacatcgagctggtgtgctcgccgaacaaccccgacggcgccatccgcgaggccgtcctgtcctccgccggctccggcgtggcggtccacgacctggcgtactactggccgcagtacacagccatcaccaaacgggccgaccacgacgtcatgctcttcaccgtgtccaagagcacaggccacgccgggacgcggatcgggtgggcgctggtgaaggaccgcgacgtcgcgaggaagatggccaagttcatcgagctcaacacgatcggcgtctccaaggactcgcagctgcgcgccgccaaggtcctcagggcggtctccgacgcctacgagctcccggaggcgggagatgcccgccgccgccgcctgttcgactacggccggcgcaagatggtggagcgctggcgcatgctgcgtggagcggccgccgcctccggcatcttcagcctgtccgaggagacctcggccttgtgcaacttcaccaaagagatggcggtcactaaccctgcgttcgcgtggctgcgctgcgacagggaggacgtggaggactgcgcgggcttcctgcgcgcccacaggatactgacgcggagcggggaccagttcggagcggacccgaggtacgtccgggtcagcatgctcgacagggacgacgcctacgacatatttgtgaagcgtctctcgtctctgcgatgaagacggcaggctactcacggtcacggagatgggcctagttggagaggagggtcgatgccacccggccggccggcgtcggcatgccggcccgtcgcccgtcggactgtgggagcatgcatgagtagggcagcagcgttcagtaggaagaagcgcaggaggagcgacgatttgttttgcctttcctgctgtatgttttgcggtgttccggatgtcgcatcgtctcaaaggtttcttttggtttcttgctaattgctacgtgagactgaactgttgtaacaaaaagtcaacataaattggactgacgacgagaaccgca

SEQ ID NO: 4397 - DNA, 1214 bp, Zea Mays
acttgtcaggttcgcagcttgtcaaccggcccgccgcaactcgagtactcgccacgcgcgccacgccgcgcgccgccgctcccttcccgagccccgactccgtccggagtgctgcaacctgcgccgctgcccaccggactcctcttccccttccgcctcggcttcccgatccccttcccgtcccgagccctgccgaaattcgaatcgcccgcctcccgagccctcgcccccccgcgccgccgatgccctccaagcggccgtccccgcacgccatggacgaagccgcctccgccaccgccgccgccgccgccgccaccgcgcgcctccgtccctccaccccgcgctccaagaagcgcacctcccgctccaagtcccgcggccgccgccgctccccgaaccctaaccctagctcccgccgcgagggctccgcggaccacgcctccgccgcgccctcccgcaagagcgaccgcaagcccaagccgcgctccttcccggactccgccacgctcgccacggccatggcctcggtctccgccgccgccgccgcggccccgtcgtccggcgcggggcgtggcagcgcgggcgccgtccagaagctctggagcgaggccgacgagatcgcgctgctcacgggcgctgccgccttcaaggaccgcaccggcattgcgccgcgcctcccggacatgggcgagctgttcgactccatcagggactccctcgcaccgcatctcgaccaggccaaggtgtactacaagctcaagcgcctcaagagcaagttccagcactccgtgccgggtgactccagcaccgcgcacgagcaccggctgcgcgacctgggcgcagccctctggggcgccgagctcacgcgccctgaagagaacgctgccgaggaggccgccgatgcagacgacattgacgggaatagggagggggccgtgaagcttcctatggttaaggaggtgcttggagagtactggaggctgaacgggcagaccatgtcaggtgtgtcactggagaaggggttggcgctgcttgggtcgcaggaggctagtgacaccgaggtcaaatggaggcgacagcttgaggcagatatgcgcatgcagatgcgccgccatgatctggaaaaggaggtctatggcctgctcatcgatgccatcaaaggcctagggccttaacttgggcgtcgcctaggcctaggcgtccaagcggagctc

SEQ ID NO: 4398 - DNA, 1624 bp, Zea Mays
ctttggaagtggaacagcgcgagcgacacgggggcatgccgacggagctgccgcgacgaaacgcacgaagaaaccgtaccgttgtcacttgtcaggttcgcagcttgtcaaccggcccgccgcaactcgagtactcgccacgcgcgccacgccgcgcgccgccgctcccttcccgagccccgactccgtccggagtgctgcaacctgcgccgctgcccaccggactcctcttccccttccgcctcggcttcccgatccccttcccgtcccgagccctgccgaaattcgaatcgcccgcctcccgagccctcgcccccccgcgccgccgatgccctccaagcggccgtccccgcacgccatggacgaagccgcctccgccaccgccgccgccgccgccgccaccgcgcgcctccgtccctccaccccgcgctccaagaagcgcacctcccgctccaagtcccgcggccgccgccgctccccgaaccctaaccctagctcccgccgcgagggctccgcggaccacgcctccgccgcgccctcccgcaagagcgaccgcaagcccaagccgcgctccttcccggactccgccacgctcgccacggccatggcctcggtctccgccgccgccgccgcggccccgtcgtccggcgcggggcgtggcagcgcgggcgccgtccagaagctctggagcgaggccgacgagatcgcgctgctcacgggcgctgccgccttcaaggaccgcaccggcattgcgccgcgcctcccggacatgggcgagctgttcgactccatcagggactccctcgcaccgcatctcgaccaggccaaggtgtactacaagctcaagcgcctcaagagcaagttccagcactccgtgccgggtgactccagcaccgcgcacgagcaccggctgcgcgacctgggcgcagccctctggggcgccgagctcacgcgccctgaagagaacgctgccgaggaggccgccgatgcagacgacattgacgggaatagggagggggccgtgaagcttcctatggttaaggaggtgcttggagagtactggaggctgaacgggcagaccatgtcaggtgtgtcactggagaaggggttggcgctgcttgggtcgcaggaggctagtgacaccgaggtcaaatggaggcgacagcttgaggcagatatgcgcatgcagatgcgccgccatgatctggaaaaggaggtctatggcctgctcatcgatgccatcaaaggcctagggccttaacttggttgatggagtacatagctggatacataggtgggatgttattttgtaggctgatcaacgcgacctcttggttgctgactgacaaacctaacacggtgtgaggtgatgtaggggggtttgcacgaatcagtggtctcaatttatgtctagttcttgaactattcaatgattgtctaagtcgcttaggtctggagatgttcatttcactaatgtatcagcttggtctgtgatcagacagccttcatactaacgctacattttctgtaaatcattcgccaagtattattgcgatgatgatgatgctgtgtttcagaatggtcaacgaggccgactgtttaactgagctgaatgttatttgag

SEQ ID NO: 4399 - DNA, 3215 bp, Zea Mays
cacttgagcagcaactacagtcaaccttcaagagataaccttagcacgttaacggcggcggcggtgagaaaaggcgggggagggggactggaggtgaaaggcggctgctttcgctgtctccccaccacccgcgcacagtggcggcgctgacggtggcaggaaaggaaagtggcgatcacaccaaactcacatacagatggagatggcagagaccttgcatgtattgcccgatgatggcaatggaagtgctgcagttcagactgagccttattgccatgaagacgccattgaggacatggaatctttcttggatgaagtaaacgacagggttcatgtttcaggaattgtgactggtgctatcatcaaggggatcctaagtgatgtgcggcaagaagctgctagccaaattgctctcaaggatgcagagatatcatcactgaaccagaagctgcagcagccagtaaatggcagcttgagtttatctgagggacgggataaaagacatgatgagttttatagtctccgccagcagcttgactccatttccaagtcactgttgaattctgaatgggggctatcgggatcacagcataactttgaagattcagaaaatgccagcaagcagcaggacaaagaaaattcctctagaaatggtgtagcaaagaccattcatcctggagactctaaagaagaagtttttggtgatccgaaactcttggatcacatggataaggttgctttgatagcccatttcaataaatcaatgaatgagatgaaaaggcagcatgattcagttctgtaccagaggacggaagagatattcaaactgaagcgtgaaatcctgaagaaggatggatcaaacccttttcatttacgaaataacaaagaacttgagcaaacaaggaagaaaattgaggaagtcatctcaaagttggatgtgctcctcctggagaataaaagagcctctgtccgtatcaagtcaaatgcaattcctggtcaacaagataagaacaatgtattaggttctgaaatcgagcaactagaaagcggtgcaagtaataatgaagactaccattgctctattccaactcactcatcacattttgcatccagagaggcagatcatgaactgaatattgtaaggcctcaatttgacgttgaagatgccagaattgcagccacctttagagaagaaatagaaaggattatcataaaagagttcattagtgaaataaacatagaattgcatggttatgagattgagggtggtatgaagcaggaagtttgctcaataattcacaatgaggctattgctagagcaatgtcaaacattgattctttgttgttgaagtacgaggagaaaaagggtcatgctgaagaggaatctctacataagcaaaagattgaaaaactgaaactaattgtggattccttcactgaagtattgagtgaaaaggagaaatttgtatcacagattggattggaagcgatgcagactcgcgtggagtcaatgtgttgtgaacttgatttgttaagggacaaagtggcaaagcaagattcctacctatctgaaaagaacagggaatttgatgccattatgtgcaggttggagcaagctcagcagcatgttcaacacaatgatgttaccttggttgagctgaatgatagacttagaaccatttcaaactctctaaaagacctagagaaacagaatcaagctctacattatgccatggaagaaaaagagaagatgctaacatctgctgtttccaaagacaatgatatgagagaattcatggaaaatcttgttaaatctatcaaagattttgaaattgtcatgatgaatcagcaggctgttgttgcaaataaagtcgatcatcatgaatcaaggttctgtttattaaaagaacaatgtaaacaccttgcaaaagaaggcaatcttttaagaaagaaggccttacgatacaaagagatatctgagacaagagactctaatcttcagaaagctgaacttgaggtggatttgcttggtgatgaggttgaggccttaacggatcttcttgcaaaaatctatactgcacttgatcactattctccagtactgcaacactacaccggcgtaagttttgtttttatgcttcgggcatgattcttatgttttctgttgtttctcttcgtgcctaatctaagaagtattgctgtattgtccataaagtgccctctgacctgtttgttgtttgtctttaatataacttatcctcattattctaggtatatccttttttttatcaagatctttcagtaaaagaaatttgtgaagtgacctaacataaatttttaacaagattgatgttaggtttttcttccaatattaatttgttgcgtgacatgagatattaggtattcgcatgtcttgtctaaccacaggttccatgttatgccagatgctaccgtatgtcataatcactagcaattgcattgcgctcacccaattcgcatggtttcgtgtatgatatttttgttctgtattaactgtactaatatcttttttgcaggttatggagaccttgagcatgattaagaagcacattagcatggcgaagtaaaatgcttctggtcggcttgacactgtagaattgtaggtttgacagcaggcttccagtggtttgacataagtttgtagaattgtagatggcagcaagcttttgtttccgactcaaggactaggtgattacccccttttgcaggcagagtagtggtcttggtagcttttgagcactctgtaaatgacccaacccaaccgtagctattagttcttgtgcttggcttttgatgctatggcctatgggctttgccacctgctatgctgggttgcaaaggtgaactcttgtaacattggtagccgagaggatgttagagaagctgagttttcatgtggatctttattttttcctggcacaatggtagataaatctacactatagcctggcgttcaggctttgtagtgatcatgcgtgccaccaaagtaacatttacattgaaatgcaagtaggctgtaatgcagacgattcagaatctgcactatcctgattggatgaacggacgacctcggttaccaggattcatgtaatttcaaacaactatgtgcaagctcatcccttcaatgtaataatacattgaagagaatttggtcccttcaacgtttgatgcccacg

SEQ ID NO: 4400 - DNA, 1488 bp, Zea Mays
ctactcgacgtgctcgtattggtataatcccagagccacaggcacgaacgagtacgggatcccgggaagattcacgcccggcgccacctttccgtagcgccacgaggccacgaccacgagtattttaagcgtggccggcgaccgttccgcgggaagaccgcgcaagatgatgcagggcgcggcggcgggggggacctctgtctccggagcctcttgggctcgggccacgcgcggccgcgcggccgtcctcgcctcgcgccacgtcggcgtgggcgcctcctcctccgactactactacaaccacttcgggccccgcggcgccaccgccgccccgctcctccgcgcccgcgggggcgggcggctcaggcctctgccgctgctgtccggcagcggaaagaatggggaggtcgccaaggccgcggcggcggcggcatcggtgccggcggacgacgcgagtgccgccgcggtgacgacagacggcggtggcattgcggccacggcgcagctgggcgccatgatcgtcgcgtggtacctgctcaacatctacttcaacatctacaacaagcaggttctcggcgcgctgccgttgccgctgccgtacaccatcacagccttccagctcgcgttcggctccctgctcatcttcctcatgtgggccaccaggctccacccggcgcccaggctctccgctgcgcaggttccttcccttccggtgctgggctcgctcgtgccgatcgttggcggcgtcgccttggcgtcattcaccgaagtttctttcaactggaccgggttttggagcgccatggcgtccaatctgaccaaccaatcgaggaacgtcctcagcaagaaactccttgccggtgacaaggatgttatggatgacataaatctcttctcggtgatcactgtgctgtcgtttctgctgtcctgccctctgatgatctttgccgaaggcatcaagttcaccccaggatacctccagagcacgggcctgaacctccaagagctgtgcgtgagagcagcgctcgcaggtctgtgcttccatggctatcagaagctctcgtacttgatcttgtcgagagtgtcgccagtgacacactccgtcgccaactgcgtaaagcgtgtggttgtgatcgtctcctccgttctgttcttcagcacacctatttcgcctgtcaatgcactaggaactggtgctgcattagcaggtgttttcctttactcgaggttgacaagaaccaagaagccaaaggatgcataagcaaggataaaacagattacaggtttttgagggcacagccgactgcaagattcacgaatgaatatatattctcgagcctcacgtgagcatctccaacatgtcatgcaaagcactttacactgtagattacattttttatagattgcactttttgtaaagtgaagtttaaaataaagagcatagagtcaatctgacatgggctaatatagtccaaactccaaatggca

SEQ ID NO: 4401 - DNA, 2854 bp, Zea Mays
atcaaatataaatagcatcgtctcactttttttcccaactagtgtgtgatctgtgtgtgagtgtgagattggttcaaattcctatttgaattttagcctttttttactatttaaacatgggagcaggctacccattagtaggtggtaccgtggtagtcagcggtcagcacagccttccctaactatctcgtcaatcgtcagctgcactgcaatctgtggtcgcaacgcaacgtcccccgtcgtggccgcgtgctatcttcctcctccctccctccttgccgcacgcgtcaaaccttgcaaagagagttcggtcgacggcgccagccggcgatggcagcgccgcgccaccgccagggccacattgcgcagtgccttggcaggatcctcgcctgccgcggcagcgccaccgccgccgtcgctgccggcccaggcggccgacggctcaccggcgcggagttcgtcgacggcgtgcggagcctggccgctggcctcgccgaccgcggggtgcgccctggccacgtcgtcgccgccgtcgccctcaacagcgtcgagtacgtgcagctgttcctcgccgtcacctacgccggagccatcatcgcccctctcaactaccgctggagcttcgaggaggcggcgcaggcggtggagctcgtgcggccgacggcgttcgccttcgacggcgcgttcagctcctgggcgcttcggctgatggagggcgacaggttcccatccatcggcctctacctcctcctgggcgatccttgcaggaccggccgcgctgctgcaggttctgtacccattaccgacgtcacggggagcctcggcggagctacggcagcggcggcgatggagcccgtgtcggctccagacgacattgctctaatatgcttcacatccggaaccacggggcggcccaagggcgtagcgataagccacacgtccttgatcatccagtccctcgccaagatcgccattgtcggctacggcgaggacgatgtacgtacggtttcaggaccccaacaagcactatcgcatacagtttccatgccatgttagcgactctttacgcagttcaggactcaagagaaccaaaagttgtatgacttccagaatttcgcatccctctctctactcttcggcccctgcaggtttacctgcacacagcgcctctgtgccacatcggaggggtctcgtcgtgcatggcagtcctgatggccggaggctgccacgtcctggcgccgaagttcgacgccaggtcggcgttcgccgccatccaggagcacggagtgacctgcttcatcaccgtccccgcgatcatggctgacctgctgtcctacgctcggaaagaggagatggcgccgggctgcgggaggacgacggtgaccaagattctgaacggcggcggcgggctgccgctccacctcgtaaacgcagcctcgcaatcctttcctcgggctgctattttctcagcttacgggatgaccgaggcctgctcgtctctgacgttcatggccctcaccacgccaaagcttcaagagccggagccggagccggagacccaaccgtgcggccaccacggaggtgtctgcgtcggcaaaccggcgccgcacgttgagatacggatcggcatggatgacgacggcaccaccgccggttcttcgccgaccgggaacgtcttgaccagaggcttgcacaccatggttggctactgggcaaacggcaaggcggactcatccgagtgtgacaggaacggatggcttgacaccggagacactgggtgggtggacgaggagggtaatctgtggctcttgggaaggcacaagggccgcatcaagaccggaggcgaaaatgtttacccggaagaggttgaatcggtgctgtcccagcaccccggagtggcgagagctgtggtggtcggcgtgccggatagccgtctcggggagagagtcgttgcgtgtgtcagcgtcaaggacggctggaactgggtggatgcgagagctgagcacgagcaccgaggcggaggcgaggaggtgtctcctcagatcctccatggccactgcaggacgaaagaactgagcagatttaaggtgccaaggtcttattaccagtggaggcagccatttccggtgaccacgacggggaagatcagaagggaggagctgaagagggaactcctggcagcaattcgactgcccagcaacctgtagctttttgaggcgatgatctgtttttggaccaaatcttggttcagttcgactccgattgaagtcttctgttttttttggtctgtaggtgcttttagcttttacctggttggagtttaagatgcgaaaaaaagagcgtttgattattggaaacctgtaacatccatgacttttcttcaccttgacaaaagaagtcgagtcaatggcaagtcccatgaaattcagagcatccgattcttggagaactgaaaattgttgacgccttttcagagcgccaatcactcaagaagaaccggcggcggtgctctctggtcagccgcggacggtccgcggcctggggctggatggtccgcgacctggtgtgaggcggcggtgctccctggtcagacgcggacggtccgcggcacaggaccggacggtccgcgacctggtgcagcaggagcccgggttccctgcctgacggctggacggtccgcgcgtgcgcaggggcggcagaggatcgctggcggcgcctgaatctcgctcccgggagggaccccgtcggggaggagagatcctaggagttgtctaagctcgggccggccgacctagactcccctaatcgacgtagagtcgaggagaggcagagaatttgaggattggaatactaa

SEQ ID NO: 4402 - DNA, 1474 bp, Zea Mays
aagagaggtaactgaacgaagcatccggtgtgtgccctcgtcatccgccgccgccgccatgccgggcttcgctcagcgtctcgcgggcatcccgtggcggagcatcgcgaggcaaggcctctcccgcgtgttcctggtggcgaaggcctactgcgtgatccacgtcgtcaacgaccacctctgctcggtgaccttagtgcggggcgccagcatgctgccgtccctgaacctggcgggcgacgcggtggcggtggacagggtcagcgtgaggctcggccgggtcgcgccgggggacatcgtgctgatgatctcccccgaggacccgcgcaagtcggtcgtcaagcgcgtcgtcgggatgcaaggggactccgtcacctaccttgtcgaccccggcaaaagcgactcctcctccagaaccgtcgtggtaccgcaagatcatgtctgggtgcagggtgacaatatctttgcttctaacgattcgaggcaatttggagctgtgccttatgggctgattacagggaagatcttttgccgggtttggccgccggagagtttcggcgcaattgatgacgcaaccaagcagtcttaacgctgaggaggagccgaggagagcacatggacccatattgtttgctcgcgcccagagattctataatagccaactgcagggggggcccttccttgagctcgagagctttcgacgacctaccgcagcgcatttctacagcgaagcaaagagcgtgtcccgtgtttttatagttttggtgtgtgacaagttctgaaacccaaatcggcacaggtttcgagacagtttttttttttttggtgctagtgccaacctgggtttgggtttgcaactacactacaacttcacatgcttattccaaacatttgaactgatttgtcagtcctcgttttgcagaagggtgtgtttgtttgtttatccatgtccatgtcaaaacacacgacgattattgttcagcatgtccatgtcaaaacatacatcgatcttgaggttattatgccatactatatatatagcactgtaataaagtcatccatccggcctctacgtcgacgcggcggcggcggtggcgctgggctccggtgctgctgccgccgctagctgaaaccgatggtgctgctgctgctgcagcagcagcgacgacttgcactgggcgcacatgcagatctgctgggtggtgcagaagccgccgacgtagcccttgtcctggcagcgggcgatgcagagcagtggcgcgtcgcggcactccgggacgatgctgcggaacagcgggcacatgcccttgccgtctgagggtgacggcaaaataaggaaggagaacatgatcagtagtagggcatcagttgcagccatgacgaccaccttggaagaagccatggcactggttgtagcttccgcttccgatctgcaggcgaacgaatgaatcggtttcaggctttcagctgtgct

SEQ ID NO: 4403 - DNA, 3157 bp, Zea Mays
agcccccccctcgtacctgatattcgttccacacgtatgatgttgagctggaggatgggctcctaaagaatacccaagcagtccttcggagtcgggactagacatgaagtccatgctccaggtttggggcatcttctgctgtgtgtgttcctgtgcacttggacaaaatacttctgcgcggcccagtgtcgtgaacgttggagctctcttcacgttccactcgacgattgggagagccgccaaggtggccatcgctgctgcggtcaatgacatcaacagagatccaagcgttcttcaggggacgaagctggttgttcagatgcaagataccaactacagcggtttcatcagcattgttcaagccttgcaattcatggagaaagacacgatcgcgatcatcgggccacagtcttcagtcgttgcgcacgtcatatcccacgtcgcaaatgaactccagcgaccagttccagatggcttccgtggctgcgatagttgattactacgggtggaagatggtgacagccgtgtacatcgatgacgactacggaagaaacggcgtgtcctccttagacgacgagcttgccaagaggagactgaagatcctgtacaaagctgcgatcaggccaggggcaagaaagagcgagatggccgccgtgctggtcaaggctgcgatgatggagtcccgggttttcgtgctgcacgcgcgtgacgattctggaatcgacgtgttctcgctggcgtacaatctgagcatgacatccggtggatacgtgtggatcgcgacagattggctcaccgcgtgcctcgactcagctcctcgtcttggaactggattactgaacacgatgcagggtgttctcacgttgcgtcagcacacggagaacaccagtaggaagaaggcgttggtttcgcgatggagtgaagtggcgaaggaggaggaggaggaggacggcggcagcttgcccaatacctatggcctctatgcttatgacactgtctggatgcttgcccatgggttggatgcgtttttcaacagtggcggaaacatttccttctctccagaccccagactgcgtgcggttgtaggaggagctctgaatctggacgcactgagcgtcttcgacgaggggacgctgttgctagaaagaatccgcaacgtgagtttcatgggtgcgactggccctgtaaagttggactcagatggtaaccttatccagcctgcatatgacattgtaaacgtagtagggtctggtttgaggacgattggctattggtccaactactctgggctgtccgttgtgtcccctgagactctgtacaagaaaccattcaatgtcagtgcaaaccaggagctccacgctgccatctggccaggcgagactgtaacgaggccccggggatgggtgttccctaacaacgggaatgagctgaggattggagttcccgacagggtaagctaccgtcagtttatatcagtagacaatcaaactggaacggtgggaggtttctgcatcgatgtgtttgctgctgcgataaacctgctgcagtacccagtcacatataggtttgtgccttttggcaatggccgtgagaatccaagctacacggaacttatcggtcgaattctgacgaatgaatttgatgctgttgttggggatgtagctattgtcacgaatcggacaaaagttgttgatttcacccagccatacgttgcttctggcctcgtcatacttaccgccgtcaagacacagagctcggatgcatgggctttcctgcagccgtttaccatcagaatgtggtctgtgacaggggtgttctttctggtcgtaggagcagtgatttggttgctcgagcacagaatcaacgacgacttccgtggtcctccagcgaagcaggttattactgttttctggttcagtttctcaactctgttctttgcccacagagaggacacgaggagcacgctgggccgcgtcgtggtcatcatctggctgttcgtagtcctgatcatccagtccagctacaccgcgagcctgacctccatcctcaccgtgcagcagctgacgtccccgatcaagggcatcgacagcctgatcgccagcgacgagcccatcgggttccaggttgggtccttcgcggagagctacctggtgcacgagctgggcgtctccccgtccaggctcaaggcgctcggcaccccggacgagtacaagaacgcgctagagctcgggcctcgcaagggaggcgtcgtggccatcgtcgacgagcgcccgtacgtcgaggtcttcctggtgcagcacgacaagttcgccatcgtgggcgcggagttcaccaagagcggctggggcttcgcgttcccgcgtgactcgcctctggccgtggacctgtcgacggcgatcctggcgctgtcggagaacggcgacctgcagaggatccacgacaagtggctgtcgaacgggccgtcgccccagtccacgaccgacctggagccggaacggctgcgggtgcagagcttctcggcgctgttcctcctctgcggcgcggcgtgcctcgcggcgctggccatccacggctgcatcctggcccggcagtactccctccacgtggcgtcccagccgccggacgcggtggccacgggggccgacggcgccatccgccgctccagccgcagcagcatccggtcgttcctgtccttcgcggaccgccgggaggcgcagtgcccgagggggagctgcaaggaccccgccgcggcgctgggagggtcctccagcagcggcgtcagcagcttcacgtcaagcaacgccagcgtatcgaggtagccgcgtccgatggaccggcatacgcacggcacgatacgtcgatgcctcagcacagatagtccacactactgtacgtgcgcgtaggccgtagatgccggcgtgtaaatggtcgtatcgtagagacattgattcgattttgctaccgtctggggtccatggtgcagtgaatttggatccccgtgtgctgaggaattgtatacgtacgagtaaagcagcgcgcatggggggcaggcgggcagggcagtttcgcggccttgcagttgcagcacacgttgcggagattaatgtccgatcctaggcatttgattaaagaacactaccagcctgcgtacataaac

SEQ ID NO: 4404 - DNA, 3310 bp, Zea Mays
agccagacgaagttaaacatgtatgtcagtgaggcgtgcagcttccagagccagcagggttcttctcgttcgcaagggctaccgctagtcgctaccggcccctcacaagtcacatctaccccgtgcagcctctgataggaagcaactggccaactgccaactaagctgctccagaacaatagcgcacgtatgatgttgagctggaggatgggctcctaaagaatacccaagcagtccttcggagtcgggactagacatgaagtccatgctccaggtttggggcatcttctgctgtgtgtgttcctgtgcacttggacaaaatacttctgcgcggcccagtgtcgtgaacgttggagctctcttcacgttccactcgacgattgggagagccgccaaggtggccatcgctgctgcggtcaatgacatcaacagagatccaagcgttcttcaggggacgaagctggttgttcagatgcaagataccaactacagcggtttcatcagcattgttcaagccttgcaattcatggagaaagacacgatcgcgatcatcgggccacagtcttcagtcgttgcgcacgtcatatcccacgtcgcaaatgaactccagcgaccagttccagatggcttccgtggctgcgatagttgattactacgggtggaagatggtgacagccgtgtacatcgatgacgactacggaagaaacggcgtgtcctccttagacgacgagcttgccaagaggagactgaagatcctgtacaaagctgcgatcaggccaggggcaagaaagagcgagatggccgccgtgctggtcaaggctgcgatgatggagtcccgggttttcgtgctgcacgcgcgtgacgattctggaatcgacgtgttctcgctggcgtacaatctgagcatgacatccggtggatacgtgtggatcgcgacagattggctcaccgcgtgcctcgactcagctcctcgtcttggaactggattactgaacacgatgcagggtgttctcacgttgcgtcagcacacggagaacaccagtaggaagaaggcgttggtttcgcgatggagtgaagtggcgaaggaggaggaggaggaggacggcggcagcttgcccaatacctatggcctctatgcttatgacactgtctggatgcttgcccatgggttggatgcgtttttcaacagtggcggaaacatttccttctctccagaccccagactgcgtgcggttgtaggaggagctctgaatctggacgcactgagcgtcttcgacgaggggacgctgttgctagaaagaatccgcaacgtgagtttcatgggtgcgactggccctgtaaagttggactcagatggtaaccttatccagcctgcatatgacattgtaaacgtagtagggtctggtttgaggacgattggctattggtccaactactctgggctgtccgttgtgtcccctgagactctgtacaagaaaccattcaatgtcagtgcaaaccaggagctccacgctgccatctggccaggcgagactgtaacgaggccccggggatgggtgttccctaacaacgggaatgagctgaggattggagttcccgacagggtaagctaccgtcagtttatatcagtagacaatcaaactggaacggtgggaggtttctgcatcgatgtgtttgctgctgcgataaacctgctgcagtacccagtcacatataggtttgtgccttttggcaatggccgtgagaatccaagctacacggaacttatcggtcgaattctgacgaatgaatttgatgctgttgttggggatgtagctattgtcacgaatcggacaaaagttgttgatttcacccagccatacgttgcttctggcctcgtcatacttaccgccgtcaagacacagagctcggatgcatgggctttcctgcagccgtttaccatcagaatgtggtctgtgacaggggtgttctttctggtcgtaggagcagtgatttggttgctcgagcacagaatcaacgacgacttccgtggtcctccagcgaagcaggttattactgttttctggttcagtttctcaactctgttctttgcccacagagaggacacgaggagcacgctgggccgcgtcgtggtcatcatctggctgttcgtagtcctgatcatccagtccagctacaccgcgagcctgacctccatcctcaccgtgcagcagctgacgtccccgatcaagggcatcgacagcctgatcgccagcgacgagcccatcgggttccaggttgggtccttcgcggagagctacctggtgcacgagctgggcgtctccccgtccaggctcaaggcgctcggcaccccggacgagtacaagaacgcgctagagctcgggcctcgcaagggaggcgtcgtggccatcgtcgacgagcgcccgtacgtcgaggtcttcctggtgcagcacgacaagttcgccatcgtgggcgcggagttcaccaagagcggctggggcttcgcgttcccgcgtgactcgcctctggccgtggacctgtcgacggcgatcctggcgctgtcggagaacggcgacctgcagaggatccacgacaagtggctgtcgaacgggccgtcgccccagtccacgaccgacctggagccggaacggctgcgggtgcagagcttctcggcgctgttcctcctctgcggcgcggcgtgcctcgcggcgctggccatccacggctgcatcctggcccggcagtactccctccacgtggcgtcccagccgccggacgcggtggccacgggggccgacggcgccatccgccgctccagccgcagcagcatccggtcgttcctgtccttcgcggaccgccgggaggcgcagtgcccgagggggagctgcaaggaccccgccgcggcgctgggagggtcctccagcagcggcgtcagcagcttcacgtcaagcaacgccagcgtatcgaggtagccgcgtccgatggaccggcatacgcacggcacgatacgtcgatgcctcagcacagatagtccacactactgtacgtgcgcgtaggccgtagatgccggcgtgtaaatggtcgtatcgtagagacattgattcgattttgctaccgtctggggtccatggtgcagtgaatttggatccccgtgtgctgaggaattgtatacgtacgagtaaagcagcgcgcatggggggcaggcgggcagggcagtttcgcggccttgcagttgcagcacacgttgcggagattaatgtccgatcctaggcatttgattaaagaacactaccagcctgcgtacataaac

SEQ ID NO: 4405 - DNA, 3409 bp, Zea Mays
gagcaaccatgcctcaacccacaacaagacagcgctgaaagggtagacgagggttcccgggacaattatttgcggatcatgcatgctccacgcttttggatttaccctgttgttttctccaaacacgtatgatgttgagctggaggatgggctcctaaagaatacccaagcagtccttcggagtcgggactagacatgaagtccatgctccaggtttggggcatcttctgctgtgtgtgttcctgtgcacttggacaaaatacttctgcgcggcccagtgtcgtgaacgttggagctctcttcacgttccactcgacgattgggagagccgccaaggtggccatcgctgctgcggtcaatgacatcaacagagatccaagcgttcttcaggggacgaagctggttgttcagatgcaagataccaactacagcggtttcatcagcattgttcaagccttgcaattcatggagaaagacacgatcgcgatcatcgggccacagtcttcagtcgttgcgcacgtcatatcccacgtcgcaaatgaactccaggtgcctctgatgtccttcgctgcaaccgatccgactctgacaccgcttcagtatcctttctttgtgcgcactgtccacagcgaccagttccagatggcttccgtggctgcgatagttgattactacgggtggaagatggtgacagccgtgtacatcgatgacgactacggaagaaacggcgtgtcctccttagacgacgagcttgccaagaggagactgaagatcctgtacaaagctgcgatcaggccaggggcaagaaagagcgagatggccgccgtgctggtcaaggctgcgatgatggagtcccgggttttcgtgctgcacgcgcgtgacgattctggaatcgacgtgttctcgctggcgtacaatctgagcatgacatccggtggatacgtgtggatcgcgacagattggctcaccgcgtgcctcgactcagctcctcgtcttggaactggattactgaacacgatgcagggtgttctcacgttgcgtcagcacacggagaacaccagtaggaagaaggcgttggtttcgcgatggagtgaagtggcgaaggaggaggaggaggaggacggcggcagcttgcccaatacctatggcctctatgcttatgacactgtctggatgcttgcccatgggttggatgcgtttttcaacagtggcggaaacatttccttctctccagaccccagactgcgtgcggttgtaggaggagctctgaatctggacgcactgagcgtcttcgacgaggggacgctgttgctagaaagaatccgcaacgtgagtttcatgggtgcgactggccctgtaaagttggactcagatggtaaccttatccagcctgcatatgacattgtaaacgtagtagggtctggtttgaggacgattggctattggtccaactactctgggctgtccgttgtgtcccctgagactctgtacaagaaaccattcaatgtcagtgcaaaccaggagctccacgctgccatctggccaggcgagactgtaacgaggccccggggatgggtgttccctaacaacgggaatgagctgaggattggagttcccgacagggtaagctaccgtcagtttatatcagtagacaatcaaactggaacggtgggaggtttctgcatcgatgtgtttgctgctgcgataaacctgctgcagtacccagtcacatataggtttgtgccttttggcaatggccgtgagaatccaagctacacggaacttatcggtcgaattctgacgaatgaatttgatgctgttgttggggatgtagctattgtcacgaatcggacaaaagttgttgatttcacccagccatacgttgcttctggcctcgtcatacttaccgccgtcaagacacagagctcggatgcatgggctttcctgcagccgtttaccatcagaatgtggtctgtgacaggggtgttctttctggtcgtaggagcagtgatttggttgctcgagcacagaatcaacgacgacttccgtggtcctccagcgaagcaggttattactgttttctggttcagtttctcaactctgttctttgcccacagagaggacacgaggagcacgctgggccgcgtcgtggtcatcatctggctgttcgtagtcctgatcatccagtccagctacaccgcgagcctgacctccatcctcaccgtgcagcagctgacgtccccgatcaagggcatcgacagcctgatcgccagcgacgagcccatcgggttccaggttgggtccttcgcggagagctacctggtgcacgagctgggcgtctccccgtccaggctcaaggcgctcggcaccccggacgagtacaagaacgcgctagagctcgggcctcgcaagggaggcgtcgtggccatcgtcgacgagcgcccgtacgtcgaggtcttcctggtgcagcacgacaagttcgccatcgtgggcgcggagttcaccaagagcggctggggcttcgtgagtccgtcgcgattcaccttcacctctcatgcatacgttacgtttttctttgggcttctgataactgttttggtcaggcgttcccgcgtgactcgcctctggccgtggacctgtcgacggcgatcctggcgctgtcggagaacggcgacctgcagaggatccacgacaagtggctgtcgaacgggccgtcgccccagtccacgaccgacctggagccggaacggctgcgggtgcagagcttctcggcgctgttcctcctctgcggcgcggcgtgcctcgcggcgctggccatccacggctgcatcctggcccggcagtactccctccacgtggcgtcccagccgccggacgcggtggccacgggggccgacggcgccatccgccgctccagccgcagcagcatccggtcgttcctgtccttcgcggaccgccgggaggcgcagtgcccgagggggagctgcaaggaccccgccgcggcgctgggagggtcctccagcagcggcgtcagcagcttcacgtcaagcaacgccagcgtatcgaggtagccgcgtccgatggaccggcatacgcacggcacgatacgtcgatgcctcagcacagatagtccacactactgtacgtgcgcgtaggccgtagatgccggcgtgtaaatggtcgtatcgtagagacattgattcgattttgctaccgtctggggtccatggtgcagtgaatttggatccccgtgtgctgaggaattgtatacgtacgagtaaagcagcgcgcatggggggcaggcgggcagggcagtttcgcggccttgcagttgcagcacacgttgcggagattaatgtccgatcctaggcatttgattaaagaacactaccagcctgcgtacataaac

SEQ ID NO: 4406 - DNA, 4354 bp, Zea Mays
gccccctcccacctcgtccccgtccccggccccggccccggccccgcatctctctctcgccctgccgtctccggagtctggagctgctctcacaaccccacacgcgcgcactcgaccccgacccccgacctcgtccaccacccgcttggcgcgcgcgcagtccttacagatttcctcgcccggggtggcggtgaggcctcgcaccgatgagctcggggaccgtcgcggcctcggaccctgggggtggcgagacgaagctggtggcgggagatgacgtcacaatatcggaagctgcgggcgatatgcctgcgttcgccgccgatttgaaagtggaggagaaggctacgttgacgatggatgtggctcatgaaaggggagatatggcggtgagcgacccactctacgcgactgagtcggctgggatggttggtaccgaagggcacggagatgagcccgtggaggacgtggatgcggtgaacggagaggacggtggcgaggaggggacgcaagaagcaggagctggtggtctgctgactgagacggagaggaagccggttctagtggtagatgtgcctgctgctgctggttctgccgctcctgaacatgctgaagccgaatccaacaaagtcgaagaaaatcatgtaaatgcggagcctgggagaaagaataatgaaagtgatcatggtgtagtgccttctgataaggaaatacagaacaatgtgcctggtgacatggaggaaagctccgaggaacatgaaggtgatggagcacctgtagttgaccagcccaataacacatctgaaatgctcccacaaacaggagagcagtttcctgacagtggaaatagcccagacagcaacttagaggctgctagtctggggaatgttgatcagggtgctagataccgcctcccacctcttgataaaggcaggtttcaagttgctgatcttgtctggggtaaagtgaaaagtcatccttggtggcctggtgaaatttttgatccaacagatgcatctgaattggcgctgaagcatcggaaaaagggcagccacttggtagcttattttggtgacagtacttttgcatggtgcgatgaatcccagttgaagccttttgtaacaaattattcacaaatggagaagcagagcagttcagatggctttgttgggtcagttaataatgcacttgaagaactgtcaaggcgggtactgtcaggtttgagctgctcttgtttggcagaagagcttgctgataatggtatgtcatatacggttgataatgctgggctcaaggatggagttacttgttctgcagttaatcggcctgagatcttgaactgtttcagtccagaaaaccttcttaattatattaaggagttagctctatttcctggccagggaggtgatctattggagttagtgatagcgtgttctcaacttacatctttctatcgatctaagggatgtcctgaacttgcatcatttcaaactagtgatgcgtgggttgaggatgatctggatggtatagacactttgtccacccagaatgtaatggtggaggaacctgtgattaacgaagtgcagcctactcaagataagcccaaaaggggcagggggagacctcggaaacaaaaggctggtcatgaccaggtggtgatggagaaaaggagcacatctaatcaggtcaatgatactagctacaatgagaagaaaagaaacctcaaatcatttgaagattcagagaagtcatcagctccaactggtggtggttctttcaagattggtgagtgtattcggcgagctgcaagccagctgacaggatcttcatctattatgaaggctcagaatgaaccaacagtctataataacgctgctgaaggagagaatggggaatttgatgtctctagtgatgatgctggtgatgaacttactgtggagaaacgagcaaaaaggaggcgtctgcacataaatcacgctgcagatcccagggaattactgtcacaactatgcttggttgcaacagagccaatgaatggatatagtttctcagcaatgataatcggttacttcaacgattacagaaactatattgtttctactactactgaagcaaacattgttgataaaggtacatctagaagagggaggaagagaaaagaagttataccttctcctgaggtagagacaacggatcatatgcaggactcgtattggtccggattgagcttgtataatcacccagttcatgacctaaaaagagagagtccgactacaaggccaagacggaaacggagatcctcaagacatgcatatatacctttgtcggaacttggggagccggttcctaaaaaacagatacaagtgatggaaagatctatcatccatgtcgatgagaagatggttgatgagttgaagcccactgcacttgttttgacctttggcaggtcagcgtctattccttcagaactggatcttgttaagatgttcagtctctatggtccactgaaagaaagggggacaaaagtacatagggaaacaaatactgttaaggttgtcttcaagaaacgtgtcgatgctgaaagggcttttagtgctgcaggcaagtatagcacttttggaccttcgcttcgaagttaccgtcttgtcagtatgccactttctccagagacacaatcagcaaataatcctgaaaatcatggcttggagattccaggtttgaatatgtccgaagctcctaaggattccatggaagttgacctggtgcagaaaacagataaagtaaaagttacaggagaactgtcatctgaagaagttgagactgtaaggcaaacatgtctagtggaagctgcagacagtacatttgtcagtgaagttgacaggcttgagaaagcaggaaatattgatgctgagctaattgtccatgtgaatcagattggggaaggtgcagaagctgcatctgtatctgaagagtcatctcagcaagtgggtgacattgagcaagcttacactcaaaaggcagcgtcagtcagtgatctacccacagagatagaaaccttacattctgatgctataataaaagagttgcctcagaaggctccagataatatgcaaactgatatagccacggccccaaaacagagtcacaatccaggagataatgctgtatttgaagctgtcactgaagtgccaagtactgcacaagatcatagtgaggatgatgttggggatgaagttccagaagagcacactgtatttcctgtgttacaaagtcaaacccctggtgagaagctagtggggcaatctgaaactgaacaaaaagtgggacctgaagatccaaagtcacaagctgaaaatttgactgttgaacctgtcgtacaaggtgcagtcgagcaagtagaaattgaactggaatccaaaactactgttgaagtgtcatgcgaacaaggctatagtattgagcagactgttaacatggaagctgtaattgaagcatcaggtggacaacttgaggtgggaagacgaatttcagaagatgaatctatggctgatgcaaatattgagcactctatggtcatggttgatgaaactgtggaggcaaaagtagtaccactcgaggagagtacagagaataatgctgctaccataggagtagttgaggagacagctgaaggtgaaactaaggaggaagcaccagacgagaaggggaaaatagaaaataatgaagatgctgacaaattagctggagagaccagggcaggtgaaattacagttgaggcaccagatgagaaaacagaaattaaagcagatgctgacacaccagctggtgagaccaaagaatgtgaaattacagtagaggcaccagatgagaaaatagcaaacaaaggtattgttgaaccaataatcagggagataactgaagatcaaactgcagctggagaaccagatgaagaagctacaacaactgaggaaacggtagaggatgttaaggtgctagatgataagtctacagcagatgggaaacctgtagagaatgccacagtcgcgacaaatgaggattcaacaacagttgagaatactctgaaggatgcaatggttgcgccaccaggtacaaataccaccaacgccgaagaaactgctctgggtgccacagttaaagcactagatgaggatgctctagcagtggagaagactatagaggatacctcggttgaggcatcagatgtacaagcaggcaggtgcaatgccgagttaaaggtgaagcgtgaagaaaggaaggaaagtttatgtatatatgtacaatgccgatgtgacgaacacttgaagaagaaagaaacgaactactctctttgggttta

SEQ ID NO: 4407 - DNA, 4742 bp, Zea Mays
cccgtccccggccccggccccggccccgcatctctctctcgccctgccgtctccggagtctggagctgctctcacaaccccacacgcgcgcactcgaccccgacccccgacctcgtccaccacccgcttggcgcgcgcgcagtccttacagatttcctcgcccggggtggcggtgaggcctcgcaccgatgagctcggggaccgtcgcggcctcggaccctgggggtggcgagacgaagctggtggcgggagatgacgtcacaatatcggaagctgcgggcgatatgcctgcgttcgccgccgatttgaaagtggaggagaaggctacgttgacgatggatgtggctcatgaaaggggagatatggcggtgagcgacccactctacgcgactgagtcggctgggatggttggtaccgaagggcacggagatgagcccgtggaggacgtggatgcggtgaacggagaggacggtggcgaggaggggacgcaagaagcaggagctggtggtctgctgactgagacggagaggaagccggttctagtggtagatgtgcctgctgctgctggttctgccgctcctgaacatgctgaagccgaatccaacaaagtcgaagaaaatcatgtaaatgcggagcctgggagaaagaataatgaaagtgatcatggtgtagtgccttctgataaggaaatacagaacaatgtgcctggtgacatggaggaaagctccgaggaacatgaaggtgatggagcacctgtagttgaccagcccaataacacatctgaaatgctcccacaaacaggagagcagtttcctgacagtggaaatagcccagacagcaacttagaggctgctagtctggggaatgttgatcagggtgctagataccgcctcccacctcttgataaaggcaggtttcaagttgctgatcttgtctggggtaaagtgaaaagtcatccttggtggcctggtgaaatttttgatccaacagatgcatctgaattggcgctgaagcatcggaaaaagggcagccacttggtagcttattttggtgacagtacttttgcatggtgcgatgaatcccagttgaagccttttgtaacaaattattcacaaatggagaagcagagcagttcagatggctttgttgggtcagttaataatgcacttgaagaactgtcaaggcgggtactgtcaggtttgagctgctcttgtttggcagaagagcttgctgataatggtatgtcatatacggttgataatgctgggctcaaggatggagttacttgttctgcagttaatcggcctgagatcttgaactgtttcagtccagaaaaccttcttaattatattaaggagttagctctatttcctggccagggaggtgatctattggagttagtgatagcgtgttctcaacttacatctttctatcgatctaagggatgtcctgaacttgcatcatttcaaactagtgatgcgtgggttgaggatgatctggatggtatagacactttgtccacccagaatgtaatggtggaggaacctgtgattaacgaagtgcagcctactcaagataagcccaaaaggggcagggggagacctcggaaacaaaaggctggtcatgaccaggtggtgatggagaaaaggagcacatctaatcaggtcaatgatactagctacaatgagaagaaaagaaacctcaaatcatttgaagattcagagaagtcatcagctccaactggtggtggttctttcaagattggtgagtgtattcggcgagctgcaagccagctgacaggatcttcatctattatgaaggctcagaatgaaccaacagtctataataacgctgctgaaggagagaatggggaatttgatgtctctagtgatgatgctggtgatgaacttactgtggagaaacgagcaaaaaggaggcgtctgcacataaatcacgctgcagatcccagggaattactgtcacaactatgcttggttgcaacagagccaatgaatggatatagtttctcagcaatgataatcggttacttcaacgattacagaaactatattgtttctactactactgaagcaaacattgttgataaaggtacatctagaagagggaggaagagaaaagaagttataccttctcctgaggtagagacaacggatcatatgcaggactcgtattggtccggattgagcttgtataatcacccagttcatgacctaaaaagagagagtccgactacaaggccaagacggaaacggagatcctcaagacatgcatatatacctttgtcggaacttggggagccggttcctaaaaaacagatacaagtgatggaaagatctatcatccatgtcgatgagaagatggttgatgagttgaagcccactgcacttgttttgacctttggcaggtcagcgtctattccttcagaactggatcttgttaagatgttcagtctctatggtccactgaaagaaagggggacaaaagtacatagggaaacaaatactgttaaggttgtcttcaagaaacgtgtcgatgctgaaagggcttttagtgctgcaggcaagtatagcacttttggaccttcgcttcgaagttaccgtcttgtcagtatgccactttctccagagacacaatcagcaaataatcctgaaaatcatggcttggagattccaggtttgaatatgtccgaagctcctaaggattccatggaagttgacctggtgcagaaaacagataaagtaaaagttacaggagaactgtcatctgaagaagttgagactgtaaggcaaacatgtctagtggaagctgcagacagtacatttgtcagtgaagttgacaggcttgagaaagcaggaaatattgatgctgagctaattgtccatgtgaatcagattggggaaggtgcagaagctgcatctgtatctgaagagtcatctcagcaagtgggtgacattgagcaagcttacactcaaaaggcagcgtcagtcagtgatctacccacagagatagaaaccttacattctgatgctataataaaagagttgcctcagaaggctccagataatatgcaaactgatatagccacggccccaaaacagagtcacaatccaggagataatgctgtatttgaagctgtcactgaagtgccaagtactgcacaagatcatagtgaggatgatgttggggatgaagttccagaagagcacactgtatttcctgtgttacaaagtcaaacccctggtgagaagctagtggggcaatctgaaactgaacaaaaagtgggacctgaagatccaaagtcacaagctgaaaatttgactgttgaacctgtcgtacaaggtgcagtcgagcaagtagaaattgaactggaatccaaaactactgttgaagtgtcatgcgaacaaggctatagtattgagcagactgttaacatggaagctgtaattgaagcatcaggtggacaacttgaggtgggaagacgaatttcagaagatgaatctatggctgatgcaaatattgagcactctatggtcatggttgatgaaactgtggaggcaaaagtagtaccactcgaggagagtacagagaataatgctgctaccataggagtagttgaggagacagctgaaggtgaaactaaggaggaagcaccagacgagaaggggaaaatagaaaataatgaagatgctgacaaattagctggagagaccagggcaggtgaaattacagttgaggcaccagatgagaaaacagaaattaaagcagatgctgacacaccagctggtgagaccaaagaatgtgaaattacagtagaggcaccagatgagaaaatagcaaacaaaggtattgttgaaccaataatcagggagataactgaagatcaaactgcagctggagaaccagatgaagaagctacaacaactgaggaaacggtagaggatgttaaggtgctagatgataagtctacagcagatgggaaacctgtagagaatgccacagtcgcgacaaatgaggattcaacaacagttgagaatactctgaaggatgcaatggttgcgccaccaggtacaaataccaccaacgccgaagaaactgctctgggtgccacagttaaagcactagatgaggatgctctagcagtggagaagactatagaggatacctcggttgaggcatcagatgtacaagcaggcaggtgcaagtgagtaaaccagcttatcgaaccttgcgttcctgtcagtttctgttgatatcgacgtagtttgctcaactgattctctcatctagaactttagatgatgtgttctgtatagaaaacctgaaactactttagcatcataaggccattaggtattgacaactagggcatctatatccttctcccccttttttgctctataaacttcacctagttgtattgggcgcgtacgtgttggtgttgtcataaacacaatttcctcctatatgtcagttcaatgctcaggtgatcagtgactgagtgaaagccttgaatcaatagggggaaggcatgttcattactacatttaacggttaggcttgcgagtctttagattatctacttggatcaaatgattcttgtatcatttgccatttgtaaccaactgtgttctggaatccttttatcatattacgtagaatatttagataattctatcttctcattggtcatcgagaagtctgcaaaccgtttagcatttttt

SEQ ID NO: 4408 - DNA, 2012 bp, Zea Mays
tataactgatcaaaataagctagtggtagcagtgggaggtgtaacagcacttgctgcagggatatacaccacaagggagggtgcaagagtagtctggggctatgttgatcgtattcttggtcagccatcactgataagggagtcatcacgggggaaatatccctggtctggttccctatcacgtgctacaagtaccctgactagcaaattgaagagtggaagcaacctagggaaggacgggaatgggtttggtgatgttattctaaatccttctctccagaagagagtgaagcagcttgctaatgccacagccaatacgaaacttcatcaagctcctttcaggaacatgcttttctatgggcctcctggcacagggaaaaccatggcagcacgagaactagctcgcaattctgtatgtttcattcatagaccatatctatgtcagcattaataaaaccgtctgaaatacggctgccccaataaatgttgccaccatttgcagggattagattatgcactaatgactggtggagatgttgcaccattaggatcacaagcagtcaccaagatccatcagttgtttgactgggcgaagaaatctaacaggggtttgctcctcttcatagatgaagcagatgctttcttgtgcgaacgaaacaaaacttacatgagcgaagctcaaaggagtgccctgaacgctctcctcttccgcacaggcgaccagtccaaggacatcgtccttgcgcttgccaccaacaggcctggcgatctcgactcggccgtcgccgaccgtatcgacgaggtcctggaattccccctgcccggggaagacgagcggttcaagctcctgaagctatacctggacaagtacgtcatcagagccggcgacaagcgcgagaagagctggctccgtttcttccgccgccagccccagaagatcgtggtgaagggcgtcaccgacgacctgatccgcgaggcggcggccaagacccagggcttctccggacgagagatagccaagatgatggccagcgtccaggcggctgtctacgggagcaaggactgcgagctaacccctggcctgttccgtgaggtcgtggactacaaggtcgctgagcaccagcaacggagaagattagccggtgaggagccaaagcaggatgcctaggttgaccctttttttttattcattcacccccgttttgccttcccgggatagatagcttcatcagacaacacagcctagctacacaatgtgcaggcgacgcccaactaaaagctcaatcagacaacagagccacggctcccagagacgtcggcacgtcgcaccagtcaagcagcgctaggatgttgtgcttaggcagttaggcgcactcgcggaggggactgcaggccgtgacctagcaccgctgctgtcaggctcgagccgcagccctggcaagtccgtcctcaccctcgtgctctgctgactgaagacatacagcaaaaccaataagggaacagtagtctgctgttaaggaagggaatgtcgaacttcaggcatacagcaagactaggctgttagtcggcaaggtttgttgtttgcacaacattagattcttctattcaaggcagattgctaatatgatcaaacacttagcctgcaacgcaagaaagattgcaagtatggtctgcatttgatactgaaaacaccttgtccttttatcctcctatcgtagaatccatcagtcaattaactaagaccaattaggcaacaggtttgcaccgtgtgatatacctttgctacaacggaaatgacacttcaagcatcgattaactaattctgtaccacaagaaagtctcataagactttgttcgtttacaccaattcagttctggattagcatgaattggaattaaattcatgtcacaattcatgtcccaaataatctaagtctacttaattttttttatttggttaaactcatcatcgaatataacccaagggtttaggattttttaaaactatgtaa

SEQ ID NO: 4409 - DNA, 1841 bp, Zea Mays
cattaacgtcgtcagccgtaacaaacacagcggggggaacgggcaaggcacctggcggtggtggcctcttgctgtggtgggcgagacgagcgcggcgcggggcggagcggaggcaaggcaagaggggaaggaaaccccaccaaggaccaagcagaagcaggcgagcgtggcagttcaggtccagtctccactctccactccagtacactccacaccatcaccgccgccgccgccgccgtgacgagggggcagagggcagtgatagagcagagcagagagggctagggcggggagacgaggccgagagatccccaggaccccggtggcgagatgggcattcgcagagctcgccggttcctcttcctggccacctccgtcttcggcctcttccagtgccgcggggacctctcggcctccgactgcgccgcctgcgtctcccgcgccatgtcctcctggcccggcgtctgcggcgcctccgtcgccgcgcgggtccagctcgccggctgcctcgcgctctacgaggtgtccggcttcccccaggtctccggcgtccagatgctcttcaagacctgcggcaccggcagcggcggcggcggcggcgacttcgagatgcgcagggacaccgccttctccgcgctcgagggcggcgtcgccaccagctccggcggcttcgtcgccaccagctaccaggccgtctacgccatggcgcagtgcgagggcgacctctccacgggggactgcagccagtgcgtcacccaggccgtgcagcacgtcgaggtcgagtgcggcggcgcgccctccggccaggtctacctcgacaagtgctacatcagctacagctactacccccacggcgtgccccacggcggcggcaccggagcagacagcaaagactgtagccattgtgctcgggggagccgtaggcctgggtttcgtggtcatctgcttgcttttcgccaggagcctggtcaagaagaaggatggtgattactgatgggagggagagcacggaaggagaatgtggacaaagacattgtgggggcatggtatggcattttgatggtagggttgtgtattttgtttcttcaaggtggtgagtggaatacagagggggtgttttttggctcttcttcctctggattggtctaaacgaacaagccctgagggtgccatcccccccatgatggcagagagaggaaaagaggtggcaagctgctgttcaggaaagaagctgtccacttctggggctattttgattctcagctgaaattggtagacgagctcggggctgtcgtcttagcctctcctgcttagggttctaggagtacattgattctcttgtatttttttgacccccgccaaatgaaaaatacctgttaggtctaggctaaacgtacttagtctcctgtttaaggttgcaggagcgggttgggtgtctatttggttggtctgttatggaagacgaacttccagatgctctgggaccagattttaactctagggtttggaagtagtcggtgctaccgccattggttaactggtcgctagcctttctgtatggacattgctgacctggtaaccacacagctgtgctgtgcagctgttctcttcgtttgacctgttgcggctgttcgtcgtacgtttctgaatgcttgcctgaatgtctgctctagcgaccagcaggaacgtgtcaaacttttgtgatggctacggcatgctgcattgttgtcgctagaaaaagttgtcatgacgtcagatgagaattgggtatacctgttgacatatagcatagaagcaggcagtcagatgggttggtctggatgtgaaaaggagcttcagat

SEQ ID NO: 4410 - DNA, 1938 bp, Zea Mays
tcgtcgtcttcggttcgtctcttctgttgctgggctcgtcgcgagggtagcagaggccagatgagggacagagcaagcgagagaagctgaagaaacaatttgttttttttctttcttatcgaaacagcacagaccagtgaaagagggagcgaattagcgaaaagaagaagacaatataaaaaataaataaataaataactacaccgaatgcagcgagcgaggtggaggtgggggaaaaagggcgaggtgacaccgtgacagagagaaggcgagggagggatcacgaggtgtgcttcctcctccgcccaatcctgcccaaccaaatccgccagcgccgcctcctttacactcccacctctgtcccggagcaaaaaaaggagggagaggctcgcttcttggatcgcggggtcacgggacgcgcgccgcgggccggtacgctgctgctggcggactgctcgacccttgcctaccagctgctgcctgctgctgcttccttggctggcgccggcgagagacggaggcgaggcgaggcgaggcgacgacgatggaccgggcggcgctcaccgtgggcccggggatggacatgcccataatgcacgacggcgaccgctacgagctcgtccgcgacatcggctccggcaacttcggcgtcgcgcgcctcatgcgcaaccgcgccgacggccagctcgtcgccgtcaagtacatcgagcgaggcgagaagattgacgagaacgtgcagcgggagatcatcaaccaccgctccctgcgccaccccaacatcatccgcttcaaggaggtcatcctcaccccgacgcacctcgccatcgtcatggagtacgcctccggcggggagctcttcgagcgcatctgcaacgctggcaggttcagcgaggacgaggcgcgtttctttttccagcaactcatatcaggggtcagctactgccattccatgcaagtatgccatcgcgacttgaagctagagaacaccctgttggacgggagcaccgcgcctcgcctcaagatatgtgattttggctactcaaagtcatcagttctacactcgcagccgaaatctacagtgggaactcctgcatacattgctcctgaggttcttctgaagaaggaatacgatggaaaggtcgctgatgtgtggtcatgtggagtaacgctgtacgtgatgctgaggatcaccatccctgagataaggaaccatccatggttcttgaagaacctgccagctgacctaatggatgacagcacgatgagcaagcagtacgaggagcctgagcaaccgatgcagagcatggatgagatcatgcagatcctggctgaggcgaccattccagcagctggtccccatggactcaatcagttcctgaacgacggccttgacctcgacgatgacatggacgacctggactcagataccgatcttgacctggaaagcagtggggaaatcgtgtatgctatttgacagcagcgaggcaatgcgtatcatcagtcgtgctcagatcgtttgttgcgccgcaggttaccgagataattagagagacaggggggaggtatctgctggagatgctgctcgtgtctgatgccgtgatgcccccctttttttcatcctgttatgtttggctgttgtttggttgtggtgcacctccagtgttttacaacagtttggcccttcggaattggttgtgctagaacctcgtccatctgagaagaccctttgtttttgcatccccagctaagagagtgaagtacttgtataattatactgtttgtgtcatatgtatttggtgtaggaaaataaagaaactccattgcccgttcttgttccttccgtgtctcacgaattttttcagaaccctctcaattttagtgtctttttggctgctgtatctcacggctgaatcaccaaggcacaatattttaaacgac

SEQ ID NO: 4411 - DNA, 1588 bp, Zea Mays
gcctttttcctgggaaacgtcgcgtggaattcaactgccggccttttcctatgaaattcagacacgaccacgcacggagcatttggaagtcatcctcgcccagtcgccccaccaccgcctccgtcgacgtcgtcctcgcctccgccgcgctcgcctcaccgccaccgccaccacggccttcctcgtctcatctccgccgtggcctcgccctcgatacgctactgacggggtgcccctcgccgtcgacacgtgacctccgtcatttgcatctcagctccaagatctactccagatcgggtgcatgcatgcagctgctggcctgtagctggcagtggtgactggcaggctgatctggttggacatggagagcgggctgctcttggcaccaggattggcaccatcaccggcacgcttgtctccaatctccatcgatataattgactgcattcggcttggttgtgcttgttttcagggtgaagacaagaagtgacccagcaatttccattttcttgttcaggatggcaatggccacatcatcatcttaccctccaccacctcccttttaccgactgtacaaaaattttgagcaggatccttcatccgcaccagaacctccaccaccaattgatggaccattcaaagctttgggtgttgattacacaggagatgttgtgattccaagcttggagagtcataatgtccgtcagctttatccaaagggccccaatattgacttcaaaaaggagctaaggaccctcaacagagagcttcaattgcatattttggagctggcagatattttagttgagagaccatctcaatatgctcgtagggtggaagatatcacactcatattcaagaacttgcatcatcttctcaattccctacgacctcatcaggcaagagccacattgattcacatgcttgagagccaaattcagcgccgcaaggaagcaattgaagatataaagcagaggagagtggaagcgcagaagctgcttgcggaatcactgcatatcttggatgcaagccaagctaactaggctgacgccgagttggctggttcaagactggttcttcttagttaagagagtgttagcagcttcgagcctgccttcagctacatgttgggttactttgttgtggaagtatagattgtgagattgatgcctcgtggctaaacttagggggtgtttgaatgcactagaactaatagttagttagctaaaaattattagttagattagctagctaacaaataactagctaactattaactactttaccaaaaatagctaatagctaaactattagctagagtgtttggacgtttcaactaattttagccactaactattagttttagtgcattcaaacacttccttaatcgaaaggttctctatgctactcccttcattccaaattattagttttattttttttaatgcattattatgcacctagatgtatactatgtgtagatacataataaaagctaagtattcagaaaaattaaaataacttacagtatgatttaaaatagaggaaataatatattacagtattatctagaggaagagtttgcctt

SEQ ID NO: 4412 - DNA, 1414 bp, Zea Mays
cttaagcatacgttttactaaatgaagatctctatgtttctgcagttgtgtagttagatacaaatgtatatctgataaaaaagaagcgcactggtgttcgcgtggatattgggtgcacaaactgcagggctgattctacttgcaaagaagactgtgaatgcaggggtctttctatgagttgttccaagaattgtcgctgctcagatctatgtacaaacaggccattccgcaaggataagaaaattaaaattgtgaagacaaagcgatgtggatggggtgctgttgcgttggagccattggagagaggtgattttgtaatcgagtatgttggtgaagtcattgatgatgcgacatgtgaacaaaggctttgggatataagacggcgtggtgacaaaaacttctacatgtgtgaaatcagcaaagattttacaatagatgcgacatttaaaggcaatgtgtcacgttttctaaatcacagttgtgagcccaactgtaaactcgaaaaatggcaggttgatggtgagacaagagttggtgtctttgcctctcgttccatcgaagttggagagcccttaacttatgattacaggtttgtgcattttggagagaaagtgaagtgccattgcgaagcagtgaactgccagggatacctgggcagccaaataaagaacccaattcaaagcattcttgccactgtagcaccgcaagtgcagttgcgagagtattcgcccatgcaccacgaagctccaagattgaagccaataaatcacttgttaccctggaccaactgtatagaggtctcttttaacctgagaagcaaaaggaaaattgaccggctatgctgggcccgcaagaagaagagaacatccctcgtgccatcttcaacaagcatgccagcatcgccgagtgaagttcctgccgcggatttctaactgcccttcgttgaagagcaagcctgccctgtataataatttcatggtacattctttacatgcattggttggaaacgattctttcacattgctcatcaatggtgttgtaacctgcaacattctttatttggtttcatagggcattcagtcagtttacgggtggtagtttgtcggaacatgtacccaatttttctgatgaaacaaatgtttgagcttcatgtaatgttggctgctgttttttttatgcgagataatgttatgaaactggatagtccctgtaaacatggcttaaaacatgacagaattattttcttttaggagaatgctaccccttttattttatgtacaaggaattgataaaaagagcagaggtcctagcggcctaggcgtgcgagagcctagagcgcatatctaatcatcagtttaatataaaggcgattaacgaagacacggaacttactgtcctgtcttgattgagttct

SEQ ID NO: 4413 - DNA, 2368 bp, Zea Mays
ctttcacagcttcgctctctcaattctgttgagcgagtcctcttcccctccggttcacgtcttcgttacatttccacggctcccaccagcgtgagtgcgtgaccagccccaatgccctccaaaccctagtccacagctcctgtaccctggcggccatgccggatctgagcaccagctacctccctcccttccctgaactgtccctcgatgcgggggccctcgccgtcgaccacgcggggaatgctgcagccgccgcctcggccgatgcggcgtccgcgtacgcgtcttcgtctgcctctgtgggcagcggcgtagacgacctcgttattccagcggaatgccggtggaagggccatgtccgcaccttcgacatggcgggcgcgggcgctgtcaccacttgccccgccgcgcggcgtggcggcgggaagaagctgtcactgattccgtcactcgagccggcacggacgcaggcttcagcatcggctccgacgctcgaggaacgcgtgagcgagtgggcggctaagaaggcagcggccggcgttccgactcatcactgcgtgctgcctttcctcaccggggcgccaatggcggtcgaatgtcgtttgtgctccaagattatttatgttggagaagaaataaaatgttcagttaaaaagtgtccacaaatgttccatctcaaatgtgttgcggaagatacttcaaactttaccgttgaaagcttcaggtgccctcaacatgggtgtatggtttgtaagcaaaagatgttcttttggcgctgcggacgttgtacagttgcagcacatacgaaatgtgcaccatggccagtggttcacctaaaaaatgatcaaggaagtgcaatttgctggaggcatccttctgactggctgctgcaaaataaggaagtattttgccggctacctcttccatatgttaatgaagacttaaatattgattcaatcatcagggattatgctgaggctgtttataagccacccccctatacatctatcaggcgcaatgtatatctgataaaaaagaagcgcactggtgttcgcgtggatattgggtgcacaaactgcagggctgattctacttgcaaagaagactgtgaatgcaggggtctttctatgagttgttccaagaattgtcgctgctcagatctatgtacaaacaggccattccgcaaggataagaaaattaaaattgtgaagacaaagcgatgtggatggggtgctgttgcgttggagccattggagagaggtgattttgtaatcgagtatgttggtgaagtcattgatgatgcgacatgtgaacaaaggctttgggatataagacggcgtggtgacaaaaacttctacatgtgtgaaatcagcaaagattttacaatagatgcgacatttaaaggcaatgtgtcacgttttctaaatcacagttgtgagcccaactgtaaactcgaaaaatggcaggttgatggtgagacaagagttggtgtctttgcctctcgttccatcgaagttggagagcccttaacttatgattacaggtttgtgcattttggagagaaagtgaagtgccattgcgaagcagtgaactgccagggatacctgggcagccaaataaagaacccaattcaaagcattcttgccactgtagcaccgcaagtgcagttgcgagagtattcgcccatgcaccacgaagctccaagattgaagccaataaatcacttgttaccctggaccaactgtatagaggtctcttttaacctgagaagcaaaaggaaaattgaccggctatgctgggcccgcaagaagaagagaacatccctcgtgccatcttcaacaagcatgccagcatcgccgagtgaagttcctgccgcggatttctaactgcccttcgttgaagagcaagcctgccctgtataataatttcatggtacattctttacatgcattggttggaaacgattctttcacattgctcatcaatggtgttgtaacctgcaacattctttatttggtttcatagggcattcagtcagtttacgggtggtagtttgtcggaacatgtacccaatttttctgatgaaacaaatgtttgagcttcatgtaatgttggctgctgttttttttatgcgagataatgttatgaaactggatagtccctgtaaacatggcttaaaacatgacagaattattttcttttaggagaatgctaccccttttattttatgtacaaggaattgataaaaagagcagaggtcctagcggcctaggcgtgcgagagcctagagcgcatatctaatcatcagtttaatataaaggcgattaacgaagacacggaacttactgtcctgtcttgattgagttct

SEQ ID NO: 4414 - DNA, 1186 bp, Zea Mays
ctcgtaccggattaaaaaacgtgcttcagctgggctttcggggttacatcaatatttctcttcctccacttcccatcctgttcgtgactcgtgatttcgccgccggaaagccgagggagagggagcgagatggggttcgtcggcgacacgatggagtcaatccgctccatgcagatccgccaattgctcacgcagatcatcagcctcggtatgattgttacctctgcattaatcatatggaaggggttgatagttttcacagggagcgagtcaccagttgtagtggttctctctggtagcatggaacctggatttaaaaggggtgatatcctgtttttgcatatgagcaaagatcctattcgcacaggagaaatagttgttttcaatatcgatggccgtgaaattccaattgtccaccgtgtaattaaggtccatgaacgtcaggacactgcagaagtggacatcctcaccaaaggtgacaataattttggggatgaccgactattatatgcacatgggcagctttggctccagcaacatcacattatgggacgtgctgtgggctaccttccatatgttggctggattacaattatcatgactgagaaaccatttattaagtacctgctgattggtgcactgggcttgctggtcataacgtcgaaagattagagtgtcaaacttcgcgcagtatagattttgctcttatggtgcaacatcagagctttccaggaaaccccctaggctagctatttgcaatgaaaaaatctgcgcaccaggacaaatttgggatagacgattgttgcttttgtttcatcttattacaaacgggcacacgtcaagccggcaacaggttccggtaatgtgctatgaacaagcaattaaaacggagattgatagggtgtgtttggttaggtttttggctttggtttcggcttggacttctctcccctaaaatccaaaagtcaaacaaaggactggatttagggagctgttttctctgaaagtcatttttctcacaatgtaaaacagaaagcatctatagacctaattttagcagcttttggatggaactatgaaaatatatatggaagaatttttaatagattttagtggtttttatcaaatttgttagctttttagcagctcacagcatacattttttcacatctaatgttattttttt

SEQ ID NO: 4415 - DNA, 2379 bp, Zea Mays
ctcccggctcgcggcactgcaaccgcagtggtcaaacgtgggaaattgaagcggaggaagatagagagaaaaagaggagacgagagagggagagagatgctgcaggtggaggaggcgctggcggcggtgctgtccgcggcggcgggccacgcggagccgcacgccgtgccgctgcagggcgcgctcgggctcgtcctcgcggaggacgtctgcgcgcccgatccgctccctcccttccgcgcctccatcaaggacggatacgccgtcgtggcctccgatgggccaggggagtatcctgtggtcacggagtcgagggcgggcgacgacgccctcggagtggttgtcgtccccggcacggtcgcctacgtcaccaccggagggccggttcccgatggcgccgatgccgtcgtgcaggtggaggacaccgagcagctccctggcggagcggatgggtccaagagggttaggattcttgcgcgggcctcccaaagacaggacatccgcagtgtgggatgtgacatagagaaggattcgattgtgctcaagtctggtgagcatataggtcctgcagaaattgggctacttgcaacagtgggtgtaaccactgtcaaggtgtaccctcggccaacaatcgctgtattctccacaggggatgagctagtgcagccagccactgccaccctcagccgtggtcagattcgtgattccaatcgagccatgcttctagcttgtgctattcagcagaaatgcaaagtggttgacctagagatcttgtcaaaccttgcctggcaaagatgggtaaaattcactttgagaagatccagatgaaaccaggaaagccgttaacctttgctgagatcaccacacaagacacgccaaagccatctaaaacagttcttgcatttggtttgcctggaaatccagtgagctgtattgtttgctttaatctttttgttgttcctgcaatccgtcttctctctggctggtcaaaccctcatctgcaaagagtgcatgtgcgcatatcacatcctttaagagcagacccacatcgtacagagtttcaccgtgcagcaattagatgggtgcttgatgatggatctggtcgacctggttttgttgctgagagtactggccatcaggctagtagccgtcttcttagtatgaaatctgctaatgccctgctggaaataccatccactggacaaatattggcagctgggacatctatccaagccatacttatttcagacataataacttcttcagataaactgcctactccttcaaatccgtatccatctcgtggtccttctgcaaaaagtatttccgcagatgtatctcagattgcatctccacaggatgctgaagttaaagtcgcaattctgactgtaagtgacactgtttcatcaggtgctggccctgataggagtggcccaagagctgtatctgtagtgaattcttcatcagagaaactgggtggtgcaactgtggttgccactgcagttgttcctgatgaagtggacaagatcaagggcattctggtacaatggagtgatattgaccatgttaacctcattctgacattaggtgggactggcttcacacccagagatgtcacaccggaagcaacaaaaatggtgatacagaaagaagcgcctggtctcacatttgttatgcttcaagaaagtttgaagattacaccattcgcaatgctatcccgggccacagctggaatcagaggatcaacacttatcatcaacatgcctggcaacccaaatgctgtggcagaatgcctggaagcactcctcccagcgctcaagcacgccctgaagcagatcaagggtgacaagagggagaagcaccctcgccacactccacatgccgcagcggcgcctgtggaccagtgggagcggagcttcagagccgcatcatctggtagtggtgggtgctcatgtgatccctgaggagccctgatcgactgtgaaataccaaaagagtggaaccaaatacgagacagtaggagagctctgtgtcctccgtgctccattgcattgcctgcgtgcctgcgtccagttcgatgttgaagttttgatcttgttctttggtatgttatatggagatgcgggagtccttgattgttacttgctcacgaacttctttcactgtgctacaaataatgtataatatgtaatctcattgactggccgtttgatgttttgtcatggtctaatagaggagccgcagtaatttgagtggcgtttgtccatgatagtctgacctcgtttttttttgtttggtttgtagaatgaaacgacctgtagatcgatcatcattctaatcctcaaatgttaataattaatacgagtacgaggaatagat

SEQ ID NO: 4416 - DNA, 2477 bp, Zea Mays
ccggctcgcggcactgcaaccgcagtggtcaaacgtgggaaattgaagcggaggaagatagagagaaaaagaggagacgagagagggagagagatgctgcaggtggaggaggcgctggcggcggtgctgtccgcggcggcgggccacgcggagccgcacgccgtgccgctgcagggcgcgctcgggctcgtcctcgcggaggacgtctgcgcgcccgatccgctccctcccttccgcgcctccatcaaggacggatacgccgtcgtggcctccgatgggccaggggagtatcctgtggtcacggagtcgagggcgggcgacgacgccctcggagtggttgtcgtccccggcacggtcgcctacgtcaccaccggagggccggttcccgatggcgccgatgccgtcgtgcaggtggaggacaccgagcagctccctggcggagcggatgggtccaagagggttaggattcttgcgcgggcctcccaaagacaggacatccgcagtgtgggatgtgacatagagaaggattcgattgtgctcaagtctggtgagcatataggtcctgcagaaattgggctacttgcaacagtgggtgtaaccactgtcaaggtgtaccctcggccaacaatcgctgtattctccacaggggatgagctagtgcagccagccactgccaccctcagccgtgattcgtgattccaatcgagccatgcttctagcttgtgctattcagcagaaatgcaaagtggttgacctaggtattgcagaggacactgaagaaagtctcaaggagcatatggatgcagctttgcgttctaatgctgatataatcattacttctggtggtgtttccatgggcgacagagatcttgtcaaaccttgcctggcaaagatgggtaaaattcactttgagaagatccagatgaaaccaggaaagccgttaacctttgctgagatcaccacacaagacacgccaaagccatctaaaacagttcttgcatttggtttgcctggaaatccagtgagctgtattgtttgctttaatctttttgttgttcctgcaatccgtcttctctctggctggtcaaaccctcatctgcaaagagtgcatgtgcgcatatcacatcctttaagagcagacccacatcgtacagagtttcaccgtgcagcaattagatgggtgcttgatgatggatctggtcgacctggttttgttgctgagagtactggccatcaggctagtagccgtcttcttagtatgaaatctgctaatgccctgctggaaataccatccactggacaaatattggcagctgggacatctatccaagccatacttatttcagacataataacttcttcagataaactgcctactccttcaaatccgtatccatctcgtggtccttctgcaaaaagtatttccgcagatgtatctcagattgcatctccacaggatgctgaagttaaagtcgcaattctgactgtaagtgacactgtttcatcaggtgctggccctgataggagtggcccaagagctgtatctgtagtgaattcttcatcagagaaactgggtggtgcaactgtggttgccactgcagttgttcctgatgaagtggacaagatcaagggcattctggtacaatggagtgatattgaccatgttaacctcattctgacattaggtgggactggcttcacacccagagatgtcacaccggaagcaacaaaaatggtgatacagaaagaagcgcctggtctcacatttgttatgcttcaagaaagtttgaagattacaccattcgcaatgctatcccgggccacagctggaatcagaggatcaacacttatcatcaacatgcctggcaacccaaatgctgtggcagaatgcctggaagcactcctcccagcgctcaagcacgccctgaagcagatcaagggtgacaagagggagaagcaccctcgccacactccacatgccgcagcggcgcctgtggaccagtgggagcggagcttcagagccgcatcatctggtagtggtgggtgctcatgtgatccctgaggagccctgatcgactgtgaaataccaaaagagtggaaccaaatacgagacagtaggagagctctgtgtcctccgtgctccattgcattgcctgcgtgcctgcgtccagttcgatgttgaagttttgatcttgttctttggtatgttatatggagatgcgggagtccttgattgttacttgctcacgaacttctttcactgtgctacaaataatgtataatatgtaatctcattgactggccgtttgatgttttgtcatggtctaatagaggagccgcagtaatttgagtggcgtttgtccatgatagtctgacctcgtttttttttgtttggtttgtagaatgaaacgacctgtagatcgatcatcattctaatcctcaaatgttaataattaatacgagtacgaggaatagat

SEQ ID NO: 4417 - DNA, 2478 bp, Zea Mays
gctcgcggcactgcaaccgcagtggtcaaacgtgggaaattgaagcggaggaagatagagagaaaaagaggagacgagagagggagagagatgctgcaggtggaggaggcgctggcggcggtgctgtccgcggcggcgggccacgcggagccgcacgccgtgccgctgcagggcgcgctcgggctcgtcctcgcggaggacgtctgcgcgcccgatccgctccctcccttccgcgcctccatcaaggacggatacgccgtcgtggcctccgatgggccaggggagtatcctgtggtcacggagtcgagggcgggcgacgacgccctcggagtggttgtcgtccccggcacggtcgcctacgtcaccaccggagggccggttcccgatggcgccgatgccgtcgtgcaggtggaggacaccgagcagctccctggcggagcggatgggtccaagagggttaggattcttgcgcgggcctcccaaagacaggacatccgcagtgtgggatgtgacatagagaaggattcgattgtgctcaagtctggtgagcatataggtcctgcagaaattgggctacttgcaacagtgggtgtaaccactgtcaaggtgtaccctcggccaacaatcgctgtattctccacaggggatgagctagtgcagccagccactgccaccctcagccgtgaggacactgaagaaagtctcaaggagcatatggatgcagctttgcgttctaatgctgatataatcattacttctggtggtgtttccatgggcgacagagatcttgtcaaaccttgcctggcaaagatgggtaaaattcactttgagaagatccagatgaaaccaggaaagccgttaacctttgctgagatcaccacacaagacacgccaaagccatctaaaacagttcttgcatttggtttgcctggaaatccagtgagctgtattgtttgctttaatctttttgttgttcctgcaatccgtcttctctctggctggtcaaaccctcatctgcaaaggtagtaatcctcattgttacaatgttgtcagttttgttctcaccttacactattcaacgtattccttataactctataaccagagtgcatgtgcgcatatcacatcctttaagagcagacccacatcgtacagagtttcaccgtgcagcaattagatgggtgcttgatgatggatctggtcgacctggttttgttgctgagagtactggccatcaggctagtagccgtcttcttagtatgaaatctgctaatgccctgctggaaataccatccactggacaaatattggcagctgggacatctatccaagccatacttatttcagacataataacttcttcagataaactgcctactccttcaaatccgtatccatctcgtggtccttctgcaaaaagtatttccgcagatgtatctcagattgcatctccacaggatgctgaagttaaagtcgcaattctgactgtaagtgacactgtttcatcaggtgctggccctgataggagtggcccaagagctgtatctgtagtgaattcttcatcagagaaactgggtggtgcaactgtggttgccactgcagttgttcctgatgaagtggacaagatcaagggcattctggtacaatggagtgatattgaccatgttaacctcattctgacattaggtgggactggcttcacacccagagatgtcacaccggaagcaacaaaaatggtgatacagaaagaagcgcctggtctcacatttgttatgcttcaagaaagtttgaagattacaccattcgcaatgctatcccgggccacagctggaatcagaggatcaacacttatcatcaacatgcctggcaacccaaatgctgtggcagaatgcctggaagcactcctcccagcgctcaagcacgccctgaagcagatcaagggtgacaagagggagaagcaccctcgccacactccacatgccgcagcggcgcctgtggaccagtgggagcggagcttcagagccgcatcatctggtagtggtgggtgctcatgtgatccctgaggagccctgatcgactgtgaaataccaaaagagtggaaccaaatacgagacagtaggagagctctgtgtcctccgtgctccattgcattgcctgcgtgcctgcgtccagttcgatgttgaagttttgatcttgttctttggtatgttatatggagatgcgggagtccttgattgttacttgctcacgaacttctttcactgtgctacaaataatgtataatatgtaatctcattgactggccgtttgatgttttgtcatggtctaatagaggagccgcagtaatttgagtggcgtttgtccatgatagtctgacctcgtttttttttgtttggtttgtagaatgaaacgacctgtagatcgatcatcattctaatcctcaaatgttaataattaatacgagtacgaggaatagat

SEQ ID NO: 4418 - DNA, 1432 bp, Zea Mays
cattgccacactaccctcttcgatctcttcttcaatctcatctgctgctgtgatctcccttgggcacacctcgctgactgtgcgacatcagtttgatactgaataggtcgcagagcggctggaaaagttcaagacaacaattttcactcagatgagcatgcttgccatcaagcatggagcaataaaccttggccagggctttccgaattttgatggcccagactttgtgaaagaggccgcaattcaagctatcaatgctgggaagaatcagtacgcaagagggtttggtgtgcctgaactgaactcggctatcgctgaaaggttcctgaaggacagtggattgcaagttgaccctgacaaggaagtcactgttacatctggatgcactgaggcaatagctgcaaccatactaggtctgatcaatcctggcgacgaggtgatactgttcgccccattctacgattcatacgaggctacactgtcgatggccggtgccaacgtgaaggccattaccctccgcgctccagatttcgcggtcccgcttgaggagctggaggctgcagtctccaaggacacgaaagcgataatgataaacacgccgcacaacccaaccgggaaaatgttcaccagggaggagctcgaatccatcgccgccctctgcaaggaaaacgacgttttgctgttctcagatgaggtctatgacaagctggtgtttgaggctgaccacatatccatggcttctatcccgggcatgtacgagaggacggtgaccatgaactctctggggaagacgttctctcttacaggatggaagatcgggtgggcaatcgcgccgccgcacctgacatggggcctcaggcaggcgcactcgttcctgacgttcgccacctgcacaccgatgcaggcggcggccgcggcggctctgagggcaccggacagctactacgacgagctgaagagggactacagcgcgaagaaggctatcctgctggaaggactcgaagccgcagggttcatcgtctacccatcgagtgggacatactacatcatggtcgaccacaccccgttcggtttcgacagcgacgtagagttctgcgagtacttgatccgcgaagtcggcgtctgcgctataccgcccagcgtgttctacctcgaccccgaagagggaaagaaattggtgaggttcaccttcagcaaggacgaaggcacgctgcgggccgcggtcgagaggttgaaggcgaagctcaggaggaaatgaatgaaggggggattacatgtttgtggctggtgattgttgaataatctgtgctgggtttcaactgcgcccggatgcctatggcgatggatcaggatacctgccggctgccgctacacttttgtaacctatggagcaatttgtgtcaaaaaaccatggcatagaaagaaaaaaaaa

SEQ ID NO: 4419 - DNA, 2242 bp, Zea Mays
cacgtttcggcgtcctcgtcgccttcctgggaaatctccagctactgcccactgccccttcccttcagtccctttccccgggctgtggcactagtactagcaccagcatctcttcaggtctccaccaagcgcagacaccgcagcagcggcagcggcacgatctggtgacccccccgccgcgtcaagcctgctcctccggtgatcgccggactggcggggtaggaaccagcggagcgcagcccgcctccttccgctgtgtctgacagcagcagatcctcgatggagatggatggggttctgcaagccgcggatgccaaggattgggtttacaagggggaaggcgccgcgaatcttatcctcagctacaccggctcgtcgccctccatgcttggcaaggtactgcggctcaagaagattctaaaaaacaagtcgcagcgggcaccaagttgtattgtattctcaagtcatgagcaactcctgtggggccatatcccagaactggttgagtcggtcaaacaagattgcttggctcaagcctatgcagtgcatgttatgagccaacacctgggtgccaatcatgtcgatggtggggtccgtgtacgtgtttctagggattttctggagcttgtcgaaaagaatgttcttagcagccgtcctgctgggagagtaaatgcaagttcaattgataacactgctgatgccgctcttctgatagcagaccactctttattttctggcaatcctaagggtagcagctgcatagctgtagagataaaggccaaatgtgggtttctgccatcatcagaatatatatcagaagataatactatcaagaaacaagtaacgagatataagatgcatcagcacctcaaattttatcagggttgattcccaatacattcttgcacacatttcagatatcgaagactagtgagtacaatcctcttgatctattttctgggtcaaaagagagaatatgcatggccatcaagtcccttttctcaactcctcagaacaacttaaggatttttgtcaatggatctttagcttttggtggcatgggaggtggtgcagatagtgttcatcctgctgacactcttaagtgtcttgaagatctcagcaagattagtggcctaaaactccctgacttcactgagctcctgtcagagacaatttttaggtctgaggtattaggcaacctgttggccactcaaaagttggatgatcatgacattgaaggggtaattcatctgtactacaacataatttctcagccttgtttagtctgcaaaaacctaactgatgtagagctattgcggaagtacactttcttgcattctcttccgttggacaaaagcctgaagatcgttagggacttcctcatttctgctaccgcaaaggactgtagcctgatgatcagctttcggccaagagagaatggtagtacagattctgagtatgattcagtgtttcttgaatcagtgaagcgaacctatgagtacaaggcatatttccttgatctggatgtgaaacctctggataagatggagcattattttaaactggatcagaggatagtcaatttctacacaagaaatgggggaggtcttgccatctccaaagggcagtaataccaaagacacttcgaggatttatacatctggagaagggtgcatcagggagtgttggttgttgttcctgctgcttggtgctgctgttgtaacttcatgagtacagtcccaaggttgggaggctcgacccttaacgcctggaaagggcacagggagctgtgttgtccgtcagtcgctgttgtaactcaaactagtgcatacaccgtggcttgtcacggtaatttccgaagatgtccaacgttagttgagacaaccgaactgcttaccgtggcaatcactcattgtaacatcaagttgaaaatgagggctgaagtttccctcacaggctaccatatgtcagatatgtcctttgtaccactaataagtgcccctggggtcatgtatgaatgtatctcaatttgctattgcagaaatgtttggtgaaactttcatcctcccatgctttgagcaaagctaacctaacttctttgaatctgttgggcttattccagcaaatcctggctgacggatggacctgcgatgctgtctgctttggctgtgatggctacagcctacgggcacaagcgcctgtcggctgtcgccctccagccgctgttcttgtctcatgaaga

SEQ ID NO: 4420 - DNA, 876 bp, Zea Mays
gtatgccttcctttttctgggagatttgaacgcgccttcacttgcttggatctgcgtcgtggggactgcctatgatgtgtccattaatgacgactcttggccaacagaagtgtttgagcttgtcactggagagaaatcgaagacattggaaaggcttgaccctggtgccactgcttcacacacatatgtcctggagaccaaaacacagggcaggttccagggttcaccagctatcattacataccgtgttcccacaaagacagctcttcaggaggcatactcaactcccatcttcccactggatattctcgctgagagacctccagagaagaagtttgaatgggctaagaggcttgtgatgaaatacgggtcacttgtgtctgttgtctcttttgttggactgtttatctaccttgtcgcgagcccgtcgaagagcagctcaaaggcaagcaagaagagacgctgatctacttataggtcgcagttgacggtgtagctggtggttttgcctggaggaactcttggtagtttgagctgtgcgaaagcttttaagtttacatttactcaccactccatgaacggcaacgaagtattcatcagttagaaaagtgcacctataattttggttgcttataactttctatttgtcagagatttaactcgaaggacctgtaactaggaaagttaattttgcttggaagaacattttgatatgatcgttgttcctgtgcttcgtgcgtggtgccgtgaaattgagaggaaccatttggtgggacgttttcagctgacaatggtcatgacattgcaactgccgttaatctgaaccatgcatgttgaagatcacatatttaatagttaggccctgtttgggagcgc

SEQ ID NO: 4421 - DNA, 890 bp, Zea Mays
ttgtagtagtctgccgatctggcttgttgcttgtcgtagtttcgtttgctcctgggatctgatctgactcgtatgcggactgcctatgatgtgtccattaatgacgactcttggccaacagaagtgtttgagcttgtcactggagagaaatcgaagacattggaaaggcttgaccctggtgccactgcttcacacacatatgtcctggagaccaaaacacagggcaggttccagggttcaccagctatcattacataccgtgttcccacaaagacagctcttcaggaggcatactcaactcccatcttcccactggatattctcgctgagagacctccagagaagaagtttgaatgggctaagaggcttgtgatgaaatacgggtcacttgtgtctgttgtctcttttgttggactgtttatctaccttgtcgcgagcccgtcgaagagcagctcaaaggcaagcaagaagagacgctgatctacttataggtcgcagttgacggtgtagctggtggttttgcctggaggaactcttggtagtttgagctgtgcgaaagcttttaagtttacatttactcaccactccatgaacggcaacgaagtattcatcagttagaaaagtgcacctataattttggttgcttataactttctatttgtcagagatttaactcgaaggacctgtaactaggaaagttaattttgcttggaagaacattttgatatgatcgttgttcctgtgcttcgtgcgtggtgccgtgaaattgagaggaaccatttggtgggacgttttcagctgacaatggtcatgacattgcaactgccgttaatctgaaccatgcatgttgaagatcacatatttaatagttaggccctgtttgggagcgc

SEQ ID NO: 4422 - DNA, 1466 bp, Zea Mays
aaacaaaaaaaaaaagccaaagccgctcctccaggctccacgcactcgcacgcgcgctgacgaggcgaggcggctgcgggtgggtcccacgtgcagcctcacgagccgcgtcacgcccccggatggggtgcctgttcttcccagacgaggagagcgagggagcgagacgagatccattcccaacttcagctgcgcctcgactcgtagcccgaaccctagccaccaagccggaggcgagagagcagccatggcgcggtgcctcgcgctcgtcgccctcctcgtactcggcctcgccgccgccgcctccgcggccgacgcgcccttcgtcgtcgcgcacaagaaaatttcgctctcccgccccaagccgggcgtcgagcgcgtcgctgtctccctcgacctctacaaccagggatccgcgactgcctatgatgtgtccattaatgacgactcttggccaacagaagtgtttgagcttgtcactggagagaaatcgaagacattggaaaggcttgaccctggtgccactgcttcacacacatatgtcctggagaccaaaacacagggcaggttccagggttcaccagctatcattacataccgtgttcccacaaagacagctcttcaggtcccccccaccccactttatctctactgttaaatgtcttcaagtcgtccaattaatcgcgattagtcgtccaagttggtttggaccaatcacgattaatcgccctagtcggtcagcaagaacgaccagcaagtcgtccgacttgaaaacattgctactgtacataatttagtagtgtttcttgtattgtccaacccacggtgtttcgctaaatcaatgctttgtacatgttgaaggaggcatactcaactcccatcttcccactggatattctcgctgagagacctccagagaagaagtttgaatgggctaagaggcttgtgatgaaatacgggtcacttgtgtctgttgtctcttttgttggactgtttatctaccttgtcgcgagcccgtcgaagagcagctcaaaggcaagcaagaagagacgctgatctacttataggtcgcagttgacggtgtagctggtggttttgcctggaggaactcttggtagtttgagctgtgcgaaagcttttaagtttacatttactcaccactccatgaacggcaacgaagtattcatcagttagaaaagtgcacctataattttggttgcttataactttctatttgtcagagatttaactcgaaggacctgtaactaggaaagttaattttgcttggaagaacattttgatatgatcgttgttcctgtgcttcgtgcgtggtgccgtgaaattgagaggaaccatttggtgggacgttttcagctgacaatggtcatgacattgcaactgccgttaatctgaaccatgcatgttgaagatcacatatttaatagttaggccctgtttgggagcgc

SEQ ID NO: 4423 - DNA, 937 bp, Zea Mays
atcctttcttcctccctcccgttttcgtagcatcccatattcccatgtcatctacccaacccataggccatagctaccggaagatgagagctccagctcctcctgttcccgcgctgctctcccgctgctcctcgcctccctcctcggccccgctccgcctcctcacctcctctcgcacgccggccgccttccgcccgcctccggccgtcgcccgctctgtctccgtctccgtcgatgcgccggcggccgccacggagccggctgtcttgggcgcgccctcctcgatgccgcgccgtcgcctcatcctcctccgccacggggagagcaccgccgggggccgctccactagagacctctaagcaaggctgggagagctgacgcaatcagcgtttctaataaactccaacaaatgggatggataccggagcttatcctctgcagcgacgcaatgcgtacgaaggaaactcttaagatcctgcaagagcatgtccaaggattgtctgaagcagtagtgcacttcatcccaagtttctactccattgcagcaatggatggccaaactgcagagcatttgcagaaggcgatctgtgaatattcgagtgatgagatcttaaccgtgatgtgcatggggcataataaaggatgggaagaagcagcctctatgttttctggtgattcagtagcgctcgagacatgtaacgctgcgttgctggaagctgcaggcaaatcatgggttgaggctttttctgtggctggtctggggggatggaagcttcatggaattgtaaagccatgagttgtaactaaaagctaggtgtaatttctgtagctgtttcttaattcttgttaacttttgtgtagttgtttttacgtgccactgaagagcgtggataaatagatgagatgaatgaattcttccacgagaaaaaaataaaaa

SEQ ID NO: 4424 - DNA, 953 bp, Zea Mays
gtcagctatcctttcttcctccctcccgttttcgtagcatcccatattcccatgtcatctacccaacccataggccatagctaccggaagatgagagctccagctcctcctgttcccgcgctgctctcccgctgctcctcgcctccctcctcggccccgctccgcctcctcacctcctctcgcacgccggccgccttccgcccgcctccggccgtcgcccgctctgtctccgtctccgtcgatgcgccggcggccgccacggagccggctgtcttgggcgcgccctcctcgatgccgcgccgtcgcctcatcctcctccgccacggggagagcaccgccgggggccgctccactagagatcatgacagacctctaagcaaggctgggagagctgacgcaatcagcgtttctaataaactccaacaaatgggatggataccggagcttatcctctgcagcgacgcaatgcgtacgaaggaaactcttaagatcctgcaagagcatgtccaaggattgtctgaagcagtagtgcacttcatcccaagtttctactccattgcagcaatggatggccaaactgcagagcatttgcagaaggcgatctgtgaatattcgagtgatgagatcttaaccgtgagtgcatggggcataataaaggatgggaagaagcagcctctatgttttctggtgattcagtagcgctcgagacatgtaacgctgcgttgctggaagctgcaggcaaatcatgggttgaggctttttctgtggctggtctggggggatggaagcttcatggaattgtaaagccatgagttgtaactaaaagctaggtgtaatttctgtagctgtttcttaattcttgttaacttttgtgtagttgtttttacgtgccactgaagagcgtggataaatagatgagatgaatgaattcttccacgagaaaaaaataaaaa

SEQ ID NO: 4425 - DNA, 980 bp, Zea Mays
caagtaggcgagcaacgtcagctatcctttcttcctccctcccgttttcgtagcatcccatattcccatgtcatctacccaacccataggccatagctaccggaagatgagagctccagctcctcctgttcccgcgctgctctcccgctgctcctcgcctccctcctcggccccgctccgcctcctcacctcctctcgcacgccggccgccttccgcccgcctccggccgtcgcccgctctgtctccgtctccgtcgatgcgccggcggccgccacggagccggctgtcttgggcgcgccctcctcgatgccgcgccgtcgcctcatcctcctccgccacggggagagcaccgccgggggccgctccactagagatcatgacagacctctaagcaaggctgggagagctgacgcaatcagcgtttctaataaactccaacaaatgggatggataccggagcttatcctctgcagcgacgcaatgcgtacgaaggaaactcttaagatcctgcaagagcatgtccaaggattgtctgaagcagtagtgcacttcatcccaagtttctactccattgcagcaatggatggccaaactgcagagcatttgcagaaggcgatctgtgaatattcgagtgatgagatcttaaccgtgataattactcaggtgcatggggcataataaaggatgggaagaagcagcctctatgttttctggtgattcagtagcgctcgagacatgtaacgctgcgttgctggaagctgcaggcaaatcatgggttgaggctttttctgtggctggtctggggggatggaagcttcatggaattgtaaagccatgagttgtaactaaaagctaggtgtaatttctgtagctgtttcttaattcttgttaacttttgtgtagttgtttttacgtgccactgaagagcgtggataaatagatgagatgaatgaattcttccacgagaaaaaaataaaaa

SEQ ID NO: 4426 - DNA, 2825 bp, Zea Mays
aacaaaaaattcggcaccggcaccgcaggcacggcacaccacggccagaccagaccaccagagtgcctccaccctcgaggcctccagtgtccactgcctactcgccccacgccacccaaatcccgtcgggacgacgaagaagccaagccggtgcgccgtataaatctaaccaatcgccatccgcccaccccccaaatcccaccacccttttccccttccaaccctcgggatctctccggcccgccatggaagtgttctactacctcgtgttcggcgcgctcgccgccatcgtggcggcgctggagctcgccaagtccggcaaggaccgcgtcgccacctccccggccttcaactcatttaagaacaactacatcctcgtttactccctcatgatgtctggggactggctgcaggggccctacgtgtactacctctacagccagtacggcttcgacaagggcgacattggccgcctcttcatcgccggcttcggttcctccatgctcttcggcaccatcgtcggatccctcgcggataagcaggggcggaagagggcgtgtgtcacgtactgcatcacctacatcctcagctgcatcaccaagcactctccccagtacaaagttcttatgattgggcgtgtccttggtggcattgccacttcgctgctcttctcagcgtttgagtcgtggctcgtggcagagcacaacaaggtagctgcccagatgcttctctccatgcacggtgacattgatacctcggagatgacacgcttcaactttaatcctaatcaactcatcgttttccccatgaaaacaccttctattagttatgttttggacctgttttgcttttgtctttctgtacatctgttgccggtactgactacataggttgactgaagctaacaaaagataaaatacttgggaggtttgacttctagagtggcagtacactgtataaaatgacttccaaggtatagaaaatcgaacatacctaaattaaaatacagttatggtgataatttttagaggaaggttttgatattagagtgtaatgcattgcaaaacacagtgcataaggaattcaggataactatattgcagtcttcctgtcacttatcagtagtacagctattttcttttgttggatttgaagcccttgtcagcagatctggactatctggtgttcccatgcttgaccagaacaagccagtaactaaaactgtggtccagtccaattatatttttcaggatgatggacgtccttgtcgataattagcacatttatgtaccaatatgtacaagtatcatgagaagtccattgcctgcatgtcaatgcattgcgctgttctttttgcctatatcaacgttgctcttttttatttttctaatgataaagccattgatggctttgttttctcattcccttttgttcttgctgacaatgggcaattttacactgatattgtacagaaaggatttgatccacaatggttgtcgataacattctccaaggctatatttcttggcaatggtctagtggccattgttgctggcctatttgcaaattttcttgctgataacatgggttttggtcctgtggctccatttgatgccgctgcttgcttcctagcaataggaatggcaattatcttatcatcatggggtgagaactacggagattcgtctgacagcaaggacttgataacccagttcaagggtgcagctaaagccattgcttcagacgagaagattgcattgcttggagccatacagtcattgtttgagggatcaatgtatactttcgttttcctgtggactcctgctctgagcccaaaggatgaggaaattcctcacggcttcatatttgctaccttcatgctttcctcgatgctgggtagctcaattgcttctcgtttgttagctaggaagctgaaggttgaaggttatatgcaaatcgtgttttcagtatcagcctttactcttttcctccccgttgtcaccaatttcctagtacctccctccggggagaaaggcggcagcatttcgttaggaggctgcttacagcttcttggtttctgtacctttgagtcatgtgttggtatattttggccatcaatcatgaagatgagatctcaatatattcccgaggaggcaagaagcacaatcatgaatttcttccgtataccgctcaacctgtttgtttgcgtggtactatacaatgtgaatgcattcccaataactgtcatgttcggcatgtgctccattttccttctcatggcagcagtcttgcagaggcgcttaatggctgtctctgatcttcacagatcgacaaaggctgtaatgatgactgcggaagatgagcctctaaacccttagagatcatcataaaaaggaatcggaagttaaaatggccccaatcctcgacttattcccatggggttgctgaataagattgatatctaaaagttgtaacgactgtaacagaacacggtttttactgtgttataggattggtgctagtgcagtttccggttgtcatggtagagaacatgatgtggctcctgactattgtgccacacacggcagagtatagctcggcatagcctccccacgttttccccatgtttttcttctcgtgttttctgataggattgatatttgtattcaagtgaagtatcatatggaaacccgcatcgtccattttggatgcaaacgctgagtaaagtgagaaagggctcattagagaccgactccttttgtctaacgggtcatctttttttaactgaatcatctcatcaaaacgcctttcttttctggttttgt

SEQ ID NO: 4427 - DNA, 2962 bp, Zea Mays
ttttcctgaaaatgcacgcgccttctttgccagaaaatctagggggacagagagagagagagaaacgaaaaggatggatggaggttgctaggcatgcgcgcccgtggcaggtcgggccggtccgggggaaaagcgcttggccgtttgcagcggcgtggagtgggtgggcatcagcggcgtcagcggccgcggcagcggcaggagcagcagcatggtgctggactggactgataggtgggggggagtggcaggggccggcacagcctgctgcccctgcatccctgctcgttggcgtttccctcgatccctcccccctgccgctgccctgccccaacactggctggctgcccaccatccttcctctgcggagctcgcgtgactcccctcgctctcgctttcgcgctgcgtccgcggcggcatcattgggtgtccgtgtctggactggagaccgggtccgtcctccgtcggatagagaggggggcggggccttcgtctttcttggctgctggtttctcgaccactgccgccgcgtcttcctccctcgctgctgctgctgctgctgctgctgctgcggcggtattgcgcgttggagctggccactggtgttcgctcctcttccccccggcttgtttgctgaattcaatctgcggggttgcggccgcgggtgtcgatggggtggtggtggtggtgcctgccggtcgctgctctgctcgccgcgatcctgccgtcgtccgacgccacgctctcccctgccggcatcaactacgaagtggtggccctgatggccatcaagacggagctggaggacccctacaacgtgctcgacaactgggacattaactccgtcgacccctgcagctggaggatggtcacctgctcctccgacggctacgtctccgccttagggctgcctagccagaccttgtccgggaagctatcacccggcatcggcaacctcaccaggctgcaatctgtgctgttgcagaacaatgggatttccggccctattcccggtacgataggaaggctggggatgctgaagactcttgacatgtcagataaccagctcacggggactatcccaagttcgcttggaaagctcaagaacctcaattatttgaagttgaacaataatagcttgtctggagttctgcctgattcacttgccagcattgatggttttgctctcgtagatctttcgtttaacaatctcagcggtccattacccaagatttctgcaagaacctttatcatagctggaaatccaatgatttgtggtaataattctggagataagtgctcttctgtgtcacttgacccactctcttacccaccagatgatctgaaaaccacaacaaggcattggaaagagccatcatattgctacaatatgtggagtaactgttggttcagtagcttttatcgcctttgtagtcggtatacttctttggtggcgtcataggcgaaatcagcagatcttttttgatgttaatgatcaatatgatccagaagtttgtttgggccatctgaagcagtatgctttcaaggagctccgtgcagctactaataattttaactcaaagaacatcttaggtgaaggtggatatggcatagtatacaagggttatttacgtgatggctccgttgttgctgtcaaaaggctcaaggattataatgccgtcggtggggaaattcaattccaaactgaagttgaagtcataagcttggctgttcatcggaatctcctacgtcttattggattctgcactacagagagtgagaggttacttgtttatccatacatgccaaatggaagtgttgcttctcaattgcgggaacatatcaatgccaagccggctctagactggtcaaggaggaagagggtagcgctaggcacagcgaggggtctgctctaccttcacgagcaatgcgacccgaagataatccaccgagacgtgaaggcctccaacgtactcctcgacgagtacttcgaagcgatcgtgggagacttcggactggcgaagctcctggaccacagggagtcccatgtcacgaccgcggtgcgcgggaccgtcgggcatatagcgccggagtacctgtcgaccgggcagtcgtcggagaagaccgacgtgtttgggttcggggttctgctagtcgagctggtcaccggacagaaggcgctggatttcggaagagtcgcgaaccagaagggcggagtgctggactgggtcaagaagctccatcaagagaagcagctaggcgtgatggtggacaaggacctgggcagcagctacgacggggtcgagctggaggaaatggtccagctggctctgctatgcacgcagtaccacccgtcccaccggcccagaatgtccgaggtgatcaggatgctggaaggcgagcccgggctcgcggagagatgggaagcgtcgcagagcaacgtggacacgccgaagtccgtctcgtcggagctcctgcctcccaagtacgtggatttcgccgccgcggacgagtcctcgcttggcctggaagccatggagctgtccgggccaaggtgaccgaccatctggttgccaaggtcggtcatcgcacaggacaggacgcataggaaaacctatggttgtattgcattggagtcggttaggtgtagagagcccccccgacacaagggaaggcgtcaaattttctggtgggttgtaagggtgtgatctttctgtatatagctgtggtggcattcatcgtagtattgtacatacagcagcgctgtgtgaggtgagtcccatccttgttgcggcgcatctacttggtggcaaagagatgagatgaatgagtatatagaaattaaagttctcagtgcagtgcggttggtgcctgtctgagtttttgcttgctgaaggcgtgcgcagcgtagttggcatgcgtcagtttgtttgacgcataagctcatcaaactgtaacaggg

SEQ ID NO: 4428 - DNA, 2493 bp, Zea Mays
ctcttcgtgatctgtcccccacttcactgctgctgctgctgtttctgtttcacccttgggcattgaagatcagtgtgactgagaggggagggtttccagtcagtcatttatgaatcctgaggcctgtgcttactagagggagggcaaggctcgttgggatccgggatgaaggggagaaatgactcggggcacagcaagaggccggttgtgctgtgctgtgtgatgattgtgtgcctatgtctcctcttcttgtatttctcgggctccaatggacaggctgggagcgccgcatttgagtacgggaccaaattctcacggtcacttggatggggcagtgatgatggtgaggatggctctgaagagtccatttttggaaccggggatgcagatgatgtcaagcccaagagctttcctgtgtgtgatgaccggcactctgaactgatcccctgcttggataggaacttgatatatcaaatgaggctgaagctggatttaaacctgatggagcactatgagaggcattgccctccacctgaaaggcgttttaattgcttgattcctccaccacatggctataaggttcctataaaatggccaaaaagtcgtgatgtagtgtggaaagcaaacattccacacactcaccttgcaaaagagaagtcagaccagaactggatggttgaagctggtgaaaagatcaagtttccaggtggtggaacccattttcaccatggagctgacaaatatatatcaaatattgcaaatatgctaaatttcaaggataacaatataaacaatgatgggatgcttcgtacagttcttgatgttggttgtggagttgctagttttggaggatatcttctttcttctaatgtgatagcaatgtctttggcaccaaatgatgtgcatcagaatcagattcagtttgcactcgaaagagggatccctgcatatcttggtgttttgggaacaaaaaggcttccgtacccaagtagatcatttgaactagcccattgttcacgttgtaggatcgattggcttcaaagagatgggattcttctgcttgaactagatagattgctcaggcctggaggttattttgcttactcctctcctgaagcatatgcacaggatgaggaggatctccgaatctggaaagaaatgagtgcccttgtagaaaggatgtgctggaaaatcgcagagaaaagaaaccaaactgttatttgggtgaaacctctggacaatgattgttacaagaggcgagcacatggtacaaagccacctctatgcaaaagtggcaatgatccagattcagtatggggagttccaatggaagcttgcattactccgtatcctgaacaaatgcacagagatgggggaactgggctagctccctggcctgcccgattgacagccccgcctccccgtcttgctgatttgtacattactgctgacacatttgaaaaggacacggaaatgtggcagcaaagagtagaaaactattggagtttgctgggcccaaaggtaaaaccagacactattagaaacatcatggacatgaaggcaaactttgggtcatttgctgctgcactcaaggagaaagacgtatgggtgatgaatgttgtgccacatgatggaccaagcaccctcaagataatctatgatagagggctgataggcagcaatcacgactggtgtgaagccttctcaacctatcctcgaacatacgatcttctccacgcatgggcagtcttttctgaccttgataaaagaggctgcagtgccgaagacctgctccttgaaatggatcgtatcctcaggccgactgggtttgccatcgtgagggacaagggcaccgtcattgagttcatcaagaagtacctccacgcacttcactgggaggcattgactgtcgtggacgctgagcccagcccagaatcagaggagagcgaaatgatcttgataatccggaagaagctgtggctaccaaaagcaggcccgcaggattccggcacgtagttcttctcgtacctgttcctctcccagcacctgcagctcagaagccaggcgcagctgcaccatccaaaatggttcgacacttgtagctcctgagatagagtcagtcatgatttctagccctaccgcccacatgaagataggttgtttacgaggatactgcaagtagtatgtagcaggcttggattaaaaaaaaggcccttttttgtcgcgacagatatggattggtgtttgttatctagtttggttaggaaataaacattctttttcttttaggtgtttcgtgtcctttttttttgaagtctgctatagtctgtagcaagtgtatttggtgttttcttgaaagaactactgcgctcacatttttgggatatgtgctttgccctagagcctcaaggctgcgggtcctcagctcgaaactactcgtgcaaatctcaaccgggagagcacttcaatataaacaggtaattttacagcaca

SEQ ID NO: 4429 - DNA, 2979 bp, Zea Mays
caaccccgtggtggaccagtcctctttcctcagctactgctcaccgccggcaccacgagcgtcaaccgcttcgccgacgcgatctcctccagcccccgctgccgcgatgcaattcctcagcgcctccgcctcagcctcctctctggtgccgccgtccgcgcacctcctccgcctctcgcggccccagcccttcccgcagctcctccgccgccgctccccgcccagacccctcgcgctcacgccccgactgccgctccccctcgtctcgcgaccctcccttctctccaccccacgcgcgcacggcggccacggtcacgggcaccaccacggccatgaccaccatcaccaccacggccacggccacggtcacggtcaccacgaggtggacgtgcacgggggaggcgggggcgcggcggtcatgcgggtggcgcgggcgatcggctgggccaacgtcgccgacgcgctgcgggagcacctccacctctgctgcatctccctcggcctcctcctcatcgccgctgcttgcccgcacgtcgcgctgctcaactcagtcagccgcctgcaggccgctctcatcgccgtcgcctttcctctcgtcggggtttctgcagcgcttgatgctcttgtaaatattgcagacggtagaataaatattcatgtcctcatggctcttgcagcatttgcttctatatttatgggaaatgcattggagggtggcctgcttcttgcaatgtttaatttggctcatattgctgaagagtattttacaagtaagtcaatgtttgacgtgagggaactgaaggaaaatcacccagaatttgctttgttgttagaaacaagtggagaagaatctgtacagttttcaaatctaagttacaccaaggttcctgtgcacgatcttgatgtgggttctcatatcttggttagagctggcgagttcttgtattctttaggctgtgcctgttgatggtgaagtctaccaaggttcatcaactgtcacaattgagcacctaactggtgaaacaaaacctttagaaaggacagttggagatgccataccaggtggcgccaggaacttggaaggaatgatgattgtaaaggtgaccaagtcatgggaggattcaacgctcaacagaattgtccaattgactgaagagggccagctaaacaagccaaagttgcaaagatggcttgatgagtttggggagtactatagcagagttgtggtagccctttctttggttgttgcacttttgggaccattactttttaagtggcctttttttggtaactcaggggttcaatttaccgtggattaggacttatggtggctgcatctccctgtgcattggctgtagctccattggcatatgcaactgcaatcagttctcttgctagtaagggaattttgttgaaaggtggccatgtcttggatgctctttcgtcttgtcagtctattgcttttgataagacaggcacactaacaactgggaagcttatgtgcaaagcaattgagcctatccatggacatttgggtgtgaaaagtggtcgtagtaatccttcttgctgcactccaaactgtgaaagtgaggcattagctgttgctgcagccatggagaaaggaacaacccatcctattggaagggctgttttagaccactctgttggaaaggagcttccagttgtcgctgtagaaagttttgaatgcctacctggtaggggagttgttgctactttgagtggtgtaaaggtaagggaaaatgaaaatgagctatccgaggcatctatcggttctgtggattatatttcttcactatatagatccaatggtgaatcagagcaaataagagcagcagcaaaaagttctgcatatgggcctgaatttgttcaagctgctctatctgttgacaaaaaagttactcttttccactttgaggatgaaccccgctctggtgtttgtgaagttatatccaccttaagagagaaagctaaacttcgcattatgatgctaactggagaccatgaatcaagtgcccagagagttgctaaagctgtttgtattgaagaagtccacttctctttaaagccagaggataaattaaataaagtgaaagcagtttcaagggaaggaggtggaggtttaataatggtcggtgatggtataaatgatgcaccagcccttgcagccgcaacagttggaatggttctagcccaacgtgccagtgcaactgcagtggctgttgcagatgttctgctgttgcaggataatatttgtggggtgccattctgcattgctaaggctcgtcaaacaacttcattggtcaaacaaagtgtagctctggccttaacttgtattgtttttgctgcgcttccttctgtcctgggatttcttcctctttggttgactgtacttcttcacgaaggaggaacccttctagtgtgcttgaactcgatacgagccctgaacactccgacatggtccttggtagatgacatccggaagctcgtcgatagcttaaggaattatttcccatccaagttcaacagctctccctcaagctacaccgcaaacactgctcccttgtagattaccatgtccagcaacggccgtctttggttaaccttgttgtttctgtggcaccgtttgaatttaggcgaggggttctaacctaattttgtaggcgcccgctgtactcttttcaccaccatgtaaagaaagaaacttggcttgaggttgagctgaaggtcaaaggacagtgatgaaacatccagttacgacgtggcgcagaatcaacgtctgtgtctgttgggcccgttcgttatgtggaatacaatacatacaggtgctatacgactgttgagatcagggaagtctaatcgcctgtttcttgcttgcagaagctaggctctgctgctgagattgattgattggtttatactcgttgattgtccgcttgcccagtcagcatcctccgtcag

SEQ ID NO: 4430 - DNA, 1046 bp, Zea Mays
atcttatgtcctgataccattgtcgggaaatggatacgctacacactagcatatctatcacgttcaaccaagataacatgtgaatcacagagaatcaggcaacgcaggggcagaatatttgcacttcctgaggagccggaggttgctcgtgtttggcttccaaggtataactcgcctggattggccatggctagggcatttggagacttttgtctgaaggatcatggtgtaatttctgtgcctgatgtttcctatcaccacataacggaaaaggatgaatttgttgtgctggctaccgatggggtttgggacgtgctatcaaatgatgaagttgttaatactgtcagccgagtcacatctcgggcctctgcagcacgatttttagtcgaatcagctcaccgtgcttggcgaactcggttccccacttctaaagtcgatgattgtgctgctgtctgcctattcctgaacacaaatgaagcaagtgaatcttcgagttccttggccaacaatttggcagatgctgtacaagttagcactgctcagtgctccaaaactatccaggtgagcgcacctatagacggaaacgaggtgtctgttgttgaaacgaggtgatttgcacaatgatggttgaggcgcaaagtgagcttgcatgctgtgcctgtgactgagatctgctgaacgatagtagttgaggcagagagagcgggggcatgaacatgctgtgctgtgcctgtgattggcatttgtggagccaagatatagcacgtcggtgggtttctgcttgctatttttttctggacgcaagtgtggttattatatgcgacattagatttttataggagaaacataaattgtagggtacttgaagttttggctttaaacatttatgttaacaagatatctgtatcattctttagcctcgttgctactcacagaaaaggttctagagcttgttgatcacataattttattctgatggtcataatttcattgcatgcaatgtggatttgtactcgtggcacgtgaaaattcaaaataaaataaag

SEQ ID NO: 4431 - DNA, 974 bp, Zea Mays
gcagtctcaggcacacacaatgacacaacacaagcagggcacagtcacagtgtgagctgagctgagctgggcttgtgcttgtgcttccgcctcctcctccgcggctactaaagggtgccagccagccagccctgtggggcgccggtgcgtgcccaaaacaagcaagcataagcatagaggtgggcatcatagacatggaggatgacgaggacatatgggcaaacaccgccagcagccccagcgcgtccccaccgcagcccgtggcggcgggctcggtctccacctgcagcgccttcatctccacgcagctgagcctcaactcccgcctccacctcctctcctccgccgcggccgggggcgggtcctccccggtccgcggcggcgcctacggcgcggacggtgtccgccaccaccacatggctctcggcggtggcttccgcaatgccgcggcgtcccaggggtccttctttccgtacaacctcgccggcgccggcgccgatgtcgcgcccttcgacggcggccgcggcgtgctcgaggacgacatgtctgtcggcgccgccgcgtccggcacctgggctggcgggggcaccgaccggcggaagaagcgcatgatcaagaaccgcgagtccgccgcgcggtcccgcgcgcgcaagcaggcgtacgtccgcgagctggagacgaaggtgcagctgctgcagcaggagaacgagagcctccgcgtcaagtacgacgagctgcgggagtccgtggaggtggcggtgccgatggtgaggaagaccctgcagaggatgccgtccgcgccgttctgaggacattgaccggagatgagtcgaagcagacaatgtagagcagctgcttccctacaccaggcaggaggcactggaccacagacacgcaaacagagctgcaagtctgcctccccccaagcaccctgctccctccgatctaataactgattttaataaatcaatcca

SEQ ID NO: 4432 - DNA, 1683 bp, Zea Mays
tgtagggctacaattcgcccccttcccgcacaacgcatcccccttcctcctccccgtcgatggtgttgtcttctctctcaccctaggacaagggagacactatcgctcctctgccaacgatgtcgagtgctcccccacacgtacggagttgttccaaagactcctgtacttcccctgcaagcctcggcggtgaccatcatcgatctatggacctcggtgagtggaggtcacggatctactccaccggtgtcgacgaggtttgtttccccgtcctggagaagcgacgacgcaatagatcttcgtgcactgcagagtcgtctcccccaagccgcaaaggaatcactccactccatcctcgttctttgaatcgatctggcttatcattacacgtccatgtgtcattgtgctcacttggatcttactaaagacaaagtatgggctgagaaagttcattggcatttgagtttgcatggctggccttattttggtcgtattttctgatgtgtgttcttcttatcgagcaagtatgaacaagcttcattttttatacatatggaattgcactattacagttctgatgtcatactgaatgcattttcttgaaaaaatgataatatgaatttacaacaacgaatgttcatctcacagtatttacatagatgagaataatgtccatattacctcactatgacatggttaaataaaatttatcacaggaaatgaaactgtcagctatgaaaacccaaagccaactgctggaatacattgccttgtctttgtagtctcctgctagtttatccagcaaacagtttatgcataagggtcttcttttggttaattagggttcttttggtcagttatcatatgatcacttgttgctttattaggatcctgtctggggaatcttcatccttttcacccttcacctgtttttgtttcgaatacaaatttgtatgttttgaatgggattgctaaagtgatattacagttactttctgtcggtttaaagtctgatgataaatggagtgtggagtatggactactaccatttattcctactgcaaaatcatttaaaatggatatagttttggccatgttactacaattgcaacgatggataagttatccctgcttgttctttatgggtatgtgttctagattctagaagattaatgcttgaacccatctaacaatgttgtggctttaaccgatttcaggtgtggatctgatttgtaatggcttattaggatttaggccagattgaagaggactatagtctatagatcatatgctcatttcaacatcaagggcaatttgattcaattaagtctaggatgatgattttcagtacctaggatgaagtttcagagctgccacctaatttcagagctgcaagatttctacagaattggaagactatgctaccaaaaaagctttcctaatttacctaagatgaagttcagtattgtttaggacgagtcatatgtttatgtctttgtgtctccaaaaatatttgtacacgtatcaagtggtgattattttaagtttcgctactctatatattggctattttatttcaatgagaaatggtttgtccattgcaaccgtgtggagtttctcatttttattaatggcaaatgctgatgtatattcatttttgttgaataaatggtttatttcttg

SEQ ID NO: 4433 - DNA, 1694 bp, Zea Mays
ttgtagggctacaattcgcccccttcccgcacaacgcatcccccttcctcctccccgtcgatggtgttgtcttctctctcaccctaggacaagggagacactatcgctcctctgccaacgatgtcgagtgctcccccacacgtacggagttgttccaaagactcctgtacttcccctgcaagcctcggcggtgaccatcatcgatctatggacctcggtgagtggaggtcacggatctactccaccggtgtcgacgaggtttgtttccccgtcctggagaagcgacgacgcaatagatcttcgtgcactgcagagtcgtctcccccaagccgcaaaggaatcactccactccatcctcgttctttgaatcgatctggcttatcattacacgtccatgtgtcattgtgctcacttggatcttactaaagacaaagtatgggctgagaaagttcattggcatttgagtttgcatggctggccttattttggtcgtattttctgatgtgtgttcttcttatcgagcaagtatgaacaagcttcattttttatacatatggaattgcactattacagttctgatgtcatactgaatgcattttcttgaaaaaatgataatatgaatttacaacaacgaatgttcatctcacagtatttacatagatgagaataatgtccatattacctcactatgacatggttaaataaaatttatcacaggaaatgaaactgtcagctatgaaaacccaaagccaactgctggaatacattgccttgtctttgtagtctcctgctagtttatccagcaaacagtttatgcataagggtcttcttttggttaattagggttcttttggtcagttatcatatgatcacttgttgctttattaggatcctgtctggggaatcttcatccttttcacccttcacctgtttttgtttcgaatacaaatttgtatgttttgaatgggattgctaaagtgatattacagttactttctgtcggtttaaagtctgatgataaatggagtgtggagtatggactactaccatttattcctactgcaaaatcatttaaaatggatatagttttggccatgttactacaattgcaacgatggataagttatccctgcttgttctttatgggtatgtgttctagattctagaagattaatgcttgaacccatctaacaatgttgtggctttaaccgatttcaggtgtggatctgatttgtaatggcttattaggatttaggccaggtgtgatctgattgaagaggactatagtctatagatcatatgctcatttcaacatcaagggcaatttgattcaattaagtctaggatgatgattttcagtacctaggatgaagtttcagagctgccacctaatttcagagctgcaagatttctacagaattggaagactatgctaccaaaaaagctttcctaatttacctaagatgaagttcagtattgtttaggacgagtcatatgtttatgtctttgtgtctccaaaaatatttgtacacgtatcaagtggtgattattttaagtttcgctactctatatattggctattttatttcaatgagaaatggtttgtccattgcaaccgtgtggagtttctcatttttattaatggcaaatgctgatgtatattcatttttgttgaataaatggtttatttcttg

SEQ ID NO: 4434 - DNA, 3057 bp, Zea Mays
ctacaattcgcccccttcccgcacaacgcatcccccttcctcctccccgtcgatggtgttgtcttctctctcaccctaggacaagggagacactatcgctcctctgccaacgatgtcgagtgctcccccacacgtacggagttgttccaaagactcctgtacttcccctgcaagcctcggcggtgaccatcatcgatctatggacctcggtgagtggaggtcacggatctactccaccggtgtcgacgaggtttgtttccccgtcctggagaagcgacgacgcaatagatcttcgtgcactgcagagtcgtctcccccaagccgcaaaggaatcactccactccatcctcgttctttgaatcgatctggtaaaccttggcctttcccccaaatcttcccgctgtccttccaccccctcgcctccataaccccacccactgtactgcttttgtttcacttgctttctgttgaatccatgctacatttgactgtgaattcaggaaatcattaagtataatcgaagtcccgttgatttctggttttgtaggacattatgatctgttttcttgatggtacataaactgagtttttatagttgttagatgcttgttgtattcgtttgtttagttcagactgcagaggttcaacaacagcaggcttagggtatgtgttgatcttaactccattttcattagcccattagaagcaatgtgttattttttggttacattattatcttttggccgtgaatggcaccaatacataattagttggtatgcacagacaactttgtaagcctgacttggtgatagctatggtattatgtaatccaccttagtacacaacactagctgttcatgcatttacttatctgtcatgatatactccaattatcctagtacatctaaataatctggtaaggtatattacatcattcatttgagttgtacactaataaacaaatgttatccatgtgtagagccttgtggtgaaatacttgtcacttgtgtccgtcatcttgtttgttggtttgtttatctatctttttgcaagctcgtccaagagccggccaaaagcaagcaagaagagatgttgatttacttataggttgtagttttaggtgtatctggtggttttgccagaggaactcttagtagtttgagctgagtgaaagcttttaagtttacaattactgaccacaccatgaattacaacgacgtgagcatcagttttgaaggtttagcaaactctggcattttctgactttcatgctgtccatcttccaaatgaagcccttttggaggcaaatctagttttatctgctctatgttatgtcaatactgattttgtatatttgtaagtgctgtggcaatactgattagttatgattattgaaaatatataatttaatggatatgatatacatatttatccttctttaagacactctatttttgtgtgagtgcagtggcaaatgttttcggctgttggccatgaatttatttagtattttatttgatctcatgagattagaacatacatctctagaagctttgaaggacattccttagtcgatatgcccaaatgatggttttcttgaccaggtgacatttgctattcaaccattaattactaagtaaccttgaagtataatttatttagtatgctattcagcctttactaagtaatcttgaagtataatttatctgcactgattgatttttgttctgtgctaccagctaaccagggtcattaaaatgtagtgttggccatttttaactatgtcagctcacctagaaaattttccttaaccaagcatcccatatacaacacaatgtcctctagagaaaacatttgaattctttgtcttggaacaatgtctcggtctgcaggtctggttctcaaatacaatcgtcaagtcttgcgagcatttctttgagcctcattctctaccaatgaagcactttcctgtcactagaactgaactatagtcttcatagtttcactacactcaatttgggaattgtatatcataattgtacttttcttttctttttctatatactaaattttcttgtttttattaacacaattgtgaaggcttatcattacacgtccatgtgtcattgtgctcacttggatcttactaaagacaaagtatgggctgagaaagttcattggcatttgagtttgcatggctggccttattttggtcgtattttctgatgtgtgttcttcttatcgagcaagtgtggatctgatttgtaatggcttattaggatttaggccaggtgtgatctggtttgtaaatgaatctctttgccatgcattgagttgttttttctgtgctgtctcatggttacactctattggcattgtacagttcatcagactaggtgcaagtttttttcctgataaaacatcaaaaaggtctaaattacatgtatgattcaggcatgttttcttaattttatgacagtcactgatgttctgaataaaatactactattttgtgacaatcttatagcatggccttcgagttgtgtatgaagtatgaactaccctcttgattaactagtcattactactccaagctactactatcaatttaagtattgtgatcattcatgcagattgaagaggactatagtctatagatcatatgctcatttcaacatcaagggcaatttgattcaattaagtctaggatgatgattttcagtacctaggatgaagtttcagagctgccacctaatttcagagctgcaagatttctacagaattggaagactatgctaccaaaaaagctttcctaatttacctaagatgaagttcagtattgtttaggacgagtcatatgtttatgtctttgtgtctccaaaaatatttgtacacgtatcaagtggtgattattttaagtttcgctactctatatattggctattttatttcaatgagaaatggtttgtccattgcaaccgtgtggagtttctcatttttattaatggcaaatgctgatgtatattcatttttgttgaataaatggtttatttcttg

SEQ ID NO: 4435 - DNA, 1513 bp, Zea Mays
atgtggtgggtgggcaacttgctgctgtcccaacaatttgggggccagcacactgcacgtctttgtgttccagagaagatttcgagtctgcgattgaggcagcggcgtgttgacaggagacggcgggaggcgctcaacaggctcgttgacctgaaaggaatcgttagggtcttctaccgggcccggccgctggttcacacgaacagcttgcatgcccaatcacctgttaccgttgagcaggagaggatcacggtcagggcagccgggatcaaggagttcggcgctgatagggttttcggccaggagtcaacacaaggtctgtacgcctgtctttctttatttcttactcacttgttccagtgtgtggtccatgcagatgatatgtttgaagaagtgaaaccgatcctcaggtctacactcgacggccacaacatatgcatcctcgcgtacggccagaccgggacggggaagacctacacaatggaaggaaccgacagtaataagctcggcgtcatgcctcggacgatccaagagctgttctctcgcgcttcagaggacggctcatgtgcctactctttctctatgagcatgcttgagatctacctggggagtctcagggacttgctggcagcactgaggcagcctctctatagggaacagagtgcaaagcagcggcatgtagcctcagcatactggcaacgaaaggtttgtgggtggcatttagagggtcgtatactcattactgtaatttccaaaacatcaagaaacaatgcactactttacagaagggaaaatcctctctccttgagatgctcttttcgctccttgaaagcaagaaataaccgttcatcagttgtggcacctaaggactactgtgaaacttacatccaatttttgagagataaacggatagttcctgattcagatcctccaagccctaaagatgtggacctattgtatcagtttatagataagagtaaaaggctcatggtagtaactgggcaggaatgagcactaaatctgggattcatgattacaggagtcctaatggtgcatatagtacaggttttaaaccactttctcatcaggagtttgttcgctctattagagcccagaggtggtactgggctaggagctatgctggatggagaaggtttaggagagcacaaccaaatgcagcccattacgctcttgcgtctctagaaaggattggccgtgtcactcaatggttacccaaaatgtggataggttgcatcatcgtgctgagagtaatccacttgagctgcatgggagtgtatatgaggtaatttgtttagaatgtggtacatccatcagccgagaatcattccaggaggaagtgaagaacctaaaaccaaagatctatgttatgccagtgtttgacatgatagagactgtgctggtgaagaagccgtggctctctcttggtctcaagttgtgtttgattgcacgaaccgtctatgttggtaatgcacatgagtctgaactgagttga

SEQ ID NO: 4436 - DNA, 1382 bp, Zea Mays
acgctgtcaatgcataacctgcgttggcattccgcctgctggacttcctcgtgctgtgtctctgtctgtcgctctcgctctcagacgactgggccgccgccgcttggtgctgaggctttcgttggtctcttcggcggcgacgagcacccaccagttctgtagaaatggctgatggtgaggacatccagcctcttgtctgcgacaatggcaccggaatggtcaaggctggttttgctggggacgatgcaccaagggcggttttccctagcattgttggccgtcctcgccacactggtgtcatggtagggatgggacagaaggatgcatatgttggcgatgaggcacagtccaagagaggtattctcacgctcaagtacccgattgagcacggtattgtgagcaactgggatgacatggagaaaatctggcatcatactttctacaacgagcttcgtgttgcaccagaggagcaccctgtgttgctcactgaggctcctttgaacccaaaggccaacagggagaagatgacccaaattatgtttgagactttcaatgttcctgccatgtatgttgcaatccaagcagttctatcactctatgctagtgggcgtactactggtattgttctttgactctggtgatggtgtgagccacactgtgcccatttacgaaggatatgcccttcctcatgccattcttcgtttggatcttgctggtcgggacctcacagactccctcatgaaaatcctgactgagaggggttactccttcacaacctctgccgagcgagaaattgtaagggacatcaaggagaagctggcatatatagcccttgactatgagcaagagttggaaactgccaagaacagctcctcagttgaaaagagctatgagctacctgatggccaagtaatcaccattggtgcagagagattcagatgccctgaggtcctcttccagccatccatgattggtatggaggctgccggaatccatgagacaacatacaattcaatcatgaagtgcgacgtggatatcaggaaggacctctacggcaacattgtgctcagtggaggttcgactatgttcccgggaatcgctgatcgtatgagcaaggagatcacttcccttgcaccaagcagcatgaagatcaaggtcgttgcaccgcctgagaggaagtatagtgtctggataggagggtccatcctagcctcgctgagcactttccaacagatgtggatatctaaggaggagtacgatgagtctggcccggcaattgttcacaggaaatcaaggtcgttgcaccgcctgagaggaagtacagtgtctggataggagggtcgatcctagcctcgctcagcactttccaacaggtatgtatt

SEQ ID NO: 4437 - DNA, 1806 bp, Zea Mays
acgctgtcaatgcataacctgcgttggcattccgcctgctggacttcctcgtgctgtgtctctgtctgtcgctctcgctctcagacgactgggccgccgccgcttggtgctgaggctttcgttggtctcttcggcggcgacgagcacccaccagcagttctgtagaaatggctgatggtgaggacatccagcctcttgtctgcgacaatggcaccggaatggtcaaggctggttttgctggggacgatgcaccaagggcggttttccctagcattgttggccgtcctcgccacactggtgtcatggtagggatgggacagaaggatgcatatgttggcgatgaggcacagtccaagagaggtattctcacgctcaagtacccgattgagcacggtattgtgagcaactgggatgacatggagaaaatctggcatcatactttctacaacgagcttcgtgttgcaccagaggagcaccctgtgttgctcactgaggctcctttgaacccaaaggccaacagggagaagatgacccaaattatgtttgagactttcaatgttcctgccatgtatgttgcaatccaagcagttctatcactctatgctagtgggcgtactactggtattgttctttgactctggtgatggtgtgagccacactgtgcccatttacgaaggatatgcccttcctcatgccattcttcgtttggatcttgctggtcgggacctcacagactccctcatgaaaatcctgactgagaggggttactccttcacaacctctgccgagcgagaaattgtaagggacatcaaggagaagctggcatatatagcccttgactatgagcaagagttggaaactgccaagaacagctcctcagttgaaaagagctatgagctacctgatggccaagtaatcaccattggtgcagagagattcagatgccctgaggtcctcttccagccatccatgattggtatggaggctgccggaatccatgagacaacatacaattcaatcatgaagtgcgacgtggatatcaggaaggacctctacggcaacattgtgctcagtggaggttcgactatgttcccgggaatcgctgatcgtatgagcaaggagatcacttcccttgcaccaagcagcatgaagatcaaggtcgttgcaccgcctgagaggaagtatagtgtctggataggagggtccatcctagcctcgctgagcactttccaacagatgtggatatctaaggaggagtacgatgagtctggcccggcaattgttcacaggaagtgcttctaggcttcgcaagttcctcatcgttgcctagtctcaagttatgtccccttcatttctcaagatacgtgtggcagatttgcatggtacggttcatttatcaaattatgcccaccccctctttgtatgttgtggctccaatccatgtgcgagcacgctgtgtctgtcgtgacacctggttcgtgagatgggttgtcaaacttgattggtttgttgtgcgtggctggaagagctgatagttatatatttggcttggactgtgccgcttgtatgtatctgaattctgaaagcgttgtaatctgagcatccgtgcaaagtatgaatggcccttttatatgggctggattttccggtttctatacaatttggtgtttgtcgactgccaagacttaaaatataaacatgatcgtattgcagatattgaactgtgcaactggagcttatatacaacaatgatagcttggtttggattttcaataagcacaagaaacaaatgttgcatgagttttg

SEQ ID NO: 4438 - DNA, 3570 bp, Zea Mays
ggaatgactaccaagtgccggtagagcggcaggagcacaacgatcctctcctttccgtgggtcccacccacccggcccctgtcgcgtttccgtagttcctgtcctgtccgcgagccgcgtcagcgtcagtgcgtcaccggcctcccgtccgtcgccgccgccgggggcccatccacatccgccgccgcgggcccgtccgtccaccacaacgccgccatccgcggccgaaggcgctcccccgtccgcccgccaccacgccaccgcctcgcccctgtccgctgccgcgccgccgtcagctcggccccgtccgcaaccgtggccccatctacatctgtcgtcaccgccgccctcccatcacacgccgccatccgtccccttcggaagcagtgaagtgcttgcgcatcctctacctctctttgataaaactgggcttgggcccgctccaccacgaaggaacaagggaagggaaaggaagcagcaagcgctccgccgacctccccggtcgccgcaccgcttccctcccacgtcgcagacgccgcgcccgtcgcccgactcggaagaacggtcctggcccggcgctcgctcgcccgccgttagcttgtacccctcctgctcggatccaagaacgattccggtatcgacggcggcggcggtgttcctgttgtcaccggcgcgtttcgtctcttttggggcctgctcccggggttcttgagttgttaatgtcaagtgagaaaccgactgtaccagacattgttttaatcccccaccgtccggttcttttttgcacatgccgttgattcaatagttgtccttcactctgacacccggaggaaaataaaaaggaaaggaaaaataagtgttgaggcagtgaagggcaaaaagatcaaatttacgtttagcgaaggtagctgtgtgagaatttgttaattctgaagttgagtgttaggagagtttgtgagggctgtggaatgtcgaaggtgaagaacaataatggttatcatggagtcactgagccaatctcgctgagtggaccgactgagaaggaccttatgcagacagctgaggttgaaaagtacctttcagatgcaggactctatgagaggcaagatgaggctatcttgcgagaagaggttttaggcaagctggaccagactgtgaaagcttggattaagaaggctactaggatcagcgggtatggggagcaatttgtgcatgaagcaaatgcaaagatctttacatttggttcataccgtcttggggtacatggccctggtgccgacattgacaccctatgtgttggtccaagacatgcaactcgaaacgagtacttcttcagatggcttcatgatatcctagctgagatgccagaagtttctgagttacatccagtaccagatgctcatgtgcctgttctgggattcaaaattaatggggtctcaattgaccttttgtatgctaatcttgctcatgcagtgattcctgaggacctagatctttctcaggactctatactgcataatgtcgatgaacagactgttcgtagtctaaatgggtgtcgagttactgatcaaattctaagattggttccaaacattctgagttttcgcacaaccttaagattcataaggtgttggggaaagcgccgtggggtttactcaaatgttatgggatttctgggtggtataaactgggcaattcttgtgggtcgcatctgtcaattgtacccaaatgcatcaccaagcatgttgatatcccgttttttccgagtctacagcaaatggaagtggcctaatcctgttatgctttgccatattgaggaaggttatcttggtctccctgtttgggatccaagaagaaattacagagacaggggccatcaaatgcctattattacacctgcttacccttgcatgaattcgagctacaatgtatctgttagtactaggtatgtgatggtccaagaattcacgcaagcatttgagatttgtcaggccatagatgaaggaaaagcagactgggatgcattgtttgagccatatccattttttgaatcatataaaaattatctagaagttaatatcacagcgagaaatgaagatgacctcaggaattggaaaggatgggtggaatctcgccttcgcactcttgtattaaagattgagcgttattcacatgagatgatccttgcacacccatatcccaaagatttctcagataaatccaggcccttacatatcttttacttcatgggtctttggagaaaacaaactacccaagctcaagaaactgagcaattcgacatcaggggaattgtaaatgagtttaagaatactatttgtgcatatcaacaccggaaagaaggaatggacattgaagtgtcccatgtaaaaagaaaagaaatccctttgtttgtttttcctggtggagtgcgtccttctcgtacttctagaacaacgcacaagaacagccgtgccattccaacacgtgatgtttcagctgatgatcaagtgggaaacctattgggcgttgccagttgtagtgatgctcaacatgtaccatgtaaaggcagctatatgaaacaaccagaaccagattttgctggaggctttcagttgccaggaagtatttctctgttgccccctagcttacccaataaagtagttctgaatgggtctgctaattttcatgcagaatctattgagagtgaacatccagaacactatcaggaaattcaaaaagggaatgtgcaggcagtgctgcaaacaacttgctgaagttatccccagctattccagccacacctgatgaacttgatgagctgatatcctatcaaactaatcagaaagatgtaaatgctgaaaataacttggagatcggttctgaaaataacttggaacaaatatgcagtctgaggccccaagaatctaataataatctgaagcgtaaagccaatcaagagctcgagccacttgagcttgccgtcccatccactggtgctgcgccgcaatcgacaggaactgccccaagaaaaccactcaggttgaggttaacgactttggggaaaccgaagccagctgaaggaacttcctgaatggaattgcccaggagccaacatacctagagcttgtttttccttgtattgaagcaaggatatgtggaagcgctcggcacatagcctgctttggcactgcgagttgaaacgaaatggaaaacggaggccgcctgacgtaaatgagtgcgattgtaataaattgtatgtagttcatagctgggttggtatcagagttcaccatttcgtttttgctgtagcgaatttcgtttttttaaccaaagtttgactcttatattttttgaatttggaaccaaaatccataaaaaacctgaccgaaattcgcatcttggtcaacagcgagcagcgaaaattggaaatttcaccaaaattcggtgatttccgagaaacgaatccgtggttgggcatagatgtacgcagcggtacattttctcgacgacttagctatgcttgtaattgcaatgatgttcaaacggaagtggatatcgtctttgaagcat

SEQ ID NO: 4439 - DNA, 1259 bp, Zea Mays
gttctcccaatcgcggctaagtctccgcctccagagacagatgtcggcggcgacggaggttgcgccagttcagcaaccgagccatccggcggcggcggggtggctcggcctcggtctgctcttccagatcctgctccggatcatccgctcctcctgggcgcagcttctctccttcgtgcgcctgcgccaccggctcctcccagttaccgcgtcgcctgagctggccttcgtgcagctcccacccgaggcgcctgctgacgcgtcgcctccgccgcttcggcggctcatggtcgtgcttgacttggatgagactttagtttgcgcgtacgagtcatcgagccttccttctactatgcgcacacatgctgttgaggcaggattgcatcgctttgacatggaggaatacagagagcatgtaaaagacctttcttgtttgtccaaagatttccagagaattgtccttgttgacaacaacccatacagtttcttactgcaaccattgaatggaataccatgcgttacgttttcggctggacaacctgttgacgaccagcttatgggaacgatgtttccgcttctcaagcatctcgctctccaaaaagatgtgaggcctgcattgtatgaagcatttcacatgccagagtggttccaaagacaaggaatcccacaaattgaacaggcagtctaggaattgcagctaccacattggacaattgaaagtctcaaaaacctgctactgtacagtagaactcttttagctctcccctaccagcgttattaattcccttgacggagtctcagcagcacaaccaccgtggcatcctgctcgtagccgccaggcgtggcgggagggcgaggttggagtctgcgtgctgcatcaatccaagcagtcgacgcagactggttcgcagcacggcgcaacccattcatggcacgtcacttccctaggagctggaccacttcatcttcatccgtgcatggcctttcatcaatggcaacaacttctattagaggccgagtgaagcacttccagagccgaaccaaacggataacgtttttagttcctctgtagtagtaacagttagcactgttagtagctagttgcattaccattcccgcactccctcttgaaacaaacagcaccatggttgtagtgctcccaaccattatttaggtcaagaaccagaaatccggttgaaaacacagtgcatcagattaaacgacaaaggcaaatctatgaattccattttgctatacca

SEQ ID NO: 4440 - DNA, 1399 bp, Zea Mays
gttctcccaatcgcggctaagtctccgcctccagagacagatgtcggcggcgacggaggttgcgccagttcagcaaccgagccatccggcggcggcggggtggctcggcctcggtctgctcttccagatcctgctccggatcatccgctcctcctgggcgcagcttctctccttcgtgcgcctgcgccaccggctcctcccagttaccgcgtcgcctgagctggccttcgtgcagctcccacccgaggcgcctgctgacgcgtcgcctccgccgcttcggcggctcatggtcgtgcttgacttggatgagactttagtttgcgcgtacgagtcatcgagccttccttctactatgcgcacacatgctgttgaggcaggattgcatcgctttgacatggagtgcgtattgtctgaaaaggatactgagggaaggcagaggataaatcgtgtaactgtctttgagcgtcctggcttacatgagtttttgcagcgaactagcgaatttgctgaccttgttctctttacagctggtttggaagggaatacagagagcatgtaaaagacctttcttgtttgtccaaagatttccagagaattgtccttgttgacaacaacccatacagtttcttactgcaaccattgaatggaataccatgcgttacgttttcggctggacaacctgttgacgaccagcttatgggaacgatgtttccgcttctcaagcatctcgctctccaaaaagatgtgaggcctgcattgtatgaagcatttcacatgccagagtggttccaaagacaaggaatcccacaaattgaacaggcagtctaggaattgcagctaccacattggacaattgaaagtctcaaaaacctgctactgtacagtagaactcttttagctctcccctaccagcgttattaattcccttgacggagtctcagcagcacaaccaccgtggcatcctgctcgtagccgccaggcgtggcgggagggcgaggttggagtctgcgtgctgcatcaatccaagcagtcgacgcagactggttcgcagcacggcgcaacccattcatggcacgtcacttccctaggagctggaccacttcatcttcatccgtgcatggcctttcatcaatggcaacaacttctattagaggccgagtgaagcacttccagagccgaaccaaacggataacgtttttagttcctctgtagtagtaacagttagcactgttagtagctagttgcattaccattcccgcactccctcttgaaacaaacagcaccatggttgtagtgctcccaaccattatttaggtcaagaaccagaaatccggttgaaaacacagtgcatcagattaaacgacaaaggcaaatctatgaattccattttgctatacca

SEQ ID NO: 4441 - DNA, 1898 bp, Zea Mays
gttctcccaatcgcggctaagtctccgcctccagagacagatgtcggcggcgacggaggttgcgccagttcagcaaccgagccatccggcggcggcggggtggctcggcctcggtctgctcttccagatcctgctccggatcatccgctcctcctgggcgcagcttctctccttcgtgcgcctgcgccaccggctcctcccagttaccgcgtcgcctgagctggccttcgtgcagctcccacccgaggcgcctgctgacgcgtcgcctccgccgcttcggcggctcatggtcgtgcttgacttggatgagactttagtttgcgcgtacgagtcatcgagccttccttctactatgcgcacacatgctgttgaggcaggattgcatcgctttgacatggagtgcgtattgtctgaaaaggatactgagggaaggcagaggataaatcgtgtaactgtctttgagcgtcctggcttacatgagtttttgcagcgaactagcgaatttgctgaccttgttctctttacagctggtttggaaggctatgcaaaacctctagttgacaggatagatgctcacaacagattcactcaccgtctctatcggccatcaactgttaatacataagtcgccgttggcatttccataagttattagtgacgggatgttaaattcatgaggtttcctgctcgtaaaaaatcagctactttcagttggaggctaagtctcgagtataaattttccatgtccctagtgattcatcaacagcatattagcatcaaagcactctcaatgcaggccgattggacagattcagttcatccttttttgtttgttgctgatttcgctatcttatgtagttattttcttgttcatgaccagtttatgtgaaccacaaatctggctttactgatgcttccgtgaaccctcatatattatgctggttggaccaaattgttattcagcgagaaagggagtcctttgttgcattagctgagctggttcgatcagtctttgatactgtgtgtttataatttcagggaatacagagagcatgtaaaagacctttcttgtttgtccaaagatttccagagaattgtccttgttgacaacaacccatacagtttcttactgcaaccattgaatggaataccatgcgttacgttttcggctggacaacctgttgacgaccagcttatgggaacgatgtttccgcttctcaagcatctcgctctccaaaaagatgtgaggcctgcattgtatgaagcatttcacatgccagagtggttccaaagacaaggaatcccacaaattgaacaggcagtctaggaattgcagctaccacattggacaattgaaagtctcaaaaacctgctactgtacagtagaactcttttagctctcccctaccagcgttattaattcccttgacggagtctcagcagcacaaccaccgtggcatcctgctcgtagccgccaggcgtggcgggagggcgaggttggagtctgcgtgctgcatcaatccaagcagtcgacgcagactggttcgcagcacggcgcaacccattcatggcacgtcacttccctaggagctggaccacttcatcttcatccgtgcatggcctttcatcaatggcaacaacttctattagaggccgagtgaagcacttccagagccgaaccaaacggataacgtttttagttcctctgtagtagtaacagttagcactgttagtagctagttgcattaccattcccgcactccctcttgaaacaaacagcaccatggttgtagtgctcccaaccattatttaggtcaagaaccagaaatccggttgaaaacacagtgcatcagattaaacgacaaaggcaaatctatgaattccattttgctatacca

SEQ ID NO: 4442 - DNA, 1776 bp, Zea Mays
cccgcggcgccttgcgcacacgcctcccttgcccgccattaactgcctctccctcgctcctctcgctcgctcggctcactccctctccaaagcggcagcctcacgcagtcacgcgctccaccacgccacctccctccacccctcactatatactcactcctgctgttttccgtccatccgcccaccggttcgcagcccgcgcctcaaaaccctagccccgggcggatcgcggggcgcctccgcggtgccagcgacgcggctcgtttgatccgattgttggtcgagccccgccctcgctgccgcgcttcgctccggctgtgcaggtgcagcggcgtgagcaccgagcacactcgcgaatggggaactgctggggtgcgcggatcaaggatgggagccctcaccctggcgcctcaggaatgttctcaaagagtagtggtaaggatgggagtaggcttagcggctgtagtagtcgagcctcttcagcttctatgccaccaagtgcgaagactgaatgtgaaatcctgcgatccgccaatgcctggcactgggattgctgttgctgtgaaaagactcaaccatgagggtttgcaagggcaccgagagtggttggcggaagttaattacctaggtcagttctgtcatcccaaccttgtcaagctgattggatactgcttagaggatgagcaccgactgctagtatacgagttcatgccccgtgggaacatggaaaaccatctgtttaggagaggctcatacttccaacctctgtcatggaaccttagaatgaaggttgcactgggagcagcaaaaggactagcttaccttcatagtgcagaggcaaaagttatttaccgagattttaagacttcgaacatcctccttgacacagattattctgcgaagctttctgattttggattggctaaggatggtcctgtcggtgagaagagccatgtgtccacaagagttatgggaacatatggttatgcagctcctgagtatctttcaacaggtcacctaactgcaaagagcgacatctatagctttggggtagtgcttctggagatgctgtcaggccgccgcgccatcgacaagaaccgcccccagggtgagcacaatctcgtggagtgggctcggccttacctcacacataagcgcaagatattccggatcctggatacgaggctggaaggtcaatacaatctgaacggtgcacaaacaattgctgcccttgctctcgaatgcctatcctacgaagctaagatgaggccgactatggacgctgtggttgctattctagaagagctccagggctctggtgaagccgagaagaagcttcaagaacccaaggccggaaccaaacaggcacctgctgctgtgagtgctagcatgagcagcagccgcaagcctcgccggaaaagtctgggagacacaaaggagactgttggtgttccagatcccaaaccattggcccattctcgttagcaaggaaaagcattgcctggtcaagtcgttagctagactgtagctcgcttgtgaatatgctatggtctgtgtatgtatgttcagagggtaatcgggcttttggcaacagtcttttcgtctttatcatgagctgctcggttcagcctgactggaacctgtatgccgaaacccatggcatcagagagagggggagagagctcatgttccgagtctttaacttatgtcttcgctacacaggctgcatttgttccaggtcatataggatgttcagtaggcacatcaatgtgtcgc

SEQ ID NO: 4443 - DNA, 1525 bp, Zea Mays
catgagctacttgtattcaatgagtcaaagcgcattcaaataatcagaggcgaagctagcaaccaaatcaagatggctcctgacatcgactggggtaaaaatatacgcataatattggatgtcggatgcaaaagcgctggctttggtattgctctactcgagaaagatgtgataacactatctttaggccttacaaatgaccaaacagaccttgcgcaagttgcccttgaacgtggcatccctgcaacagttggcagtctgggatcgcgaagattacccttccctagtggtgcatttgatgctattcactgtggtgaatgcaatataccatggcattctaatggtggaaaacttctcctagagataaatagaattcttcgtccaggaggatacttcatcatctcaagcagaagtgctgacctggagagtgaagaaggaatatcagcttcaatgaccgcactttgttggaatgcaatagcttacaatagtgacgatgtcagcgaggctggagtaaagatatttcagcgaccagtctcaaatgaggtatatgatctgagagcaaaaaaggatcctccattttgcaaggaagagcagaacaaagctagtgcatgatttgcagctgcactggcatctaaaaaggtttgggtcatgaatgttgttcctgtgcatgctgcagacaccctacccataatctacgagcgtggcctgatcggtgtgtatcatgattggtgtgaaccatttagtacatatccaaggtcctatgatcttttacatgctgaccatttattctcacgcctgaagatcagatgtaagcaacctgtctcaattgttgttgagatggaccgtattttgaggcctggaggttgggctatcatccgtgataaactcgagatccttgacccattggagacaatcttgaaatcactgcattgggaaattgtcatgaccttcagaaaggacaaggagggtatcatgtctgtaaagaaaacaacatggcgtccataaactgagctcagattcacaaggctccagcataccattttttgcactatactgctgtcgatttccccggattgtgagacagccattttgtgaatctggggtagatgtacaatatttgttcattcatctcatgacaatatgctcgccgcatctctgtcgggtagtttaagcccagttggatggttggttgtggttagcgttacattgatcaattctttgaagcagcatccaagacgaccagctctagtttcagaaaaagagggcccttcgattccataaacagggttgtacgagatacaagattgtttcttgttgtttaaaaatgtaacaatatagatatatgtaaaggttgtcactgaattaactgcttggtgatgttgtaagttgcaacaatccgtgaagattcaatgcatgaattttcttattgcaaattgtgagcaaacagcaaaagagtttccgatgtatattctgctgtcatttgagaccgttctacacttctgatattaaagttgtaccagaaaaa

SEQ ID NO: 4444 - DNA, 3124 bp, Zea Mays
ccaacatttggggctccggttggctggctgtcacggtgtactcacggggacgccgccggccccttggcaggcgcagataatccccacttctcccagcgaagcagcgcaaagaggacggcgtccaggtatgctgcgggtccctgcgccagccaccgacaataatggcggcaatccacatcggagtccactccccacctccccgaccacccaccgcatcgccagtcgccacgcgacagcgacgccccgcatccccgcggacgccgacggctgggcctaccgcctgcgcctctgggggcggcgggtccagacgccacgcgcactctagaagagttgttgtgcggcgccgggcgcggcggccgttggatcccgtgccgtgccgccgccttcgccccgcccgtcctcggcgcgtcagcgaccccctcattgtggctgcgtgcctgcgtcggccagcccgcttgctttgcccctcgcttcgcttcaaatggtagagccgctgcaggctgagcgaccgcgagcttgacccgggcgcaagtcggctcgcacccagccatgtcggcgcctggattcgatgacccccagcttccgccgctgaggctccgcgcctcgtgcggcggcgcgatcgccagcccacgctcctgctcctcctctgataccttcgtcagcatgccttccacgccctcaggtatgctgaatccgtgcggtctatggtcaccaccacctcgcgcaccgtcggaggcgtcctcgtcggagatggagttcgggacggcccgcgagtacgacaccactgatgcgttcttcactgacaactggctctacgacaaccacctgttacacagcacggagagcgatggcagcgaaggggaggacaagttcattgttggtcctgacgtcagcttgcagcggactgagacgccggagcttggcgatggctgcggtctcagacacgtacatagagactgcaatgcggactctcatgggtgcacacaggcgaagaatgcttgctcttcgccaccttgtggttgttgctataatgaggagttgttgagagattcttgctccgctgtttctgtttatgggaggtatcataccatggaggaccacacggaggggcttgatgagtgtgttgcagaagctttcttgttcagactgaattcgttagttgatgctagcgaacagttagtggatttcaagaaaggagaggacgacggcttgaatcttagtgctctggagaaggaacttcaaatgcttactccgtacttggctgatgaagatgctcttgagagtactggacttgaagatgacgtcagaggaaataccaacctagatgtatgtatggtaacaaacgaggaaaatgctaatggcaaagaatttctaaaagatagctactgcatacttccttctcctgagagtgcagtcccttttgatgtttatggggtggaagacttcaagacagaagatacagatcttcaaaaccctaccgctcgcaaatttcaggaagatccaaaaattgatcctgcactctctaagtttcagcaggagtatgaagtatttgacctgaaaatattccaccggaagaacaggactggctttgaggaaaacaaagaattccctattgtcatggattccgttatagctggaagatatcgtatcaatgagtatcttggttctgctgcattcagcaaggttgtacgggcacacgaccttcgcactggagttgatgtatgccttaaaataattaaaaatgacaaggatttctttgaccagagtttggatgagataaagctcctcaagtttgtcaataagtatgatccagatgatgatcatcatatattgcgtctctatgattatttttactatcagccatattgctcttagggaggtcattcataccaagtgctaaggatccattaagaataaaaggaacatctctttattgtcactgagttactacgggcaaatctttatgagtttcagaaatataaccaggagtctggtgacgaggtgtacttttcactgcccagaatacaggctatagctcgacaatgcttggaggctttggtgtacttgcatcatttaaacatagttcactgtgatctgaaaccagagaatatccttctgaagagctacagcagatgtgaaatcaaagttattgatcttggaagcagctgcttcttgtcagataacttaaacttatatgtccaatcacgttcttaccgatctcctgaggtcatcttgggtttaccatatgatcagaaaattgacatttggtctcttggctgcatcttatctgaactgtacactggtgaagtactctttcctaatgaatcaatgccaatcattcttgctcgtatgattgggataattggtccaattgatatggaaatgcttgcatcaggacaggagacccagaagtacttcacagatgactatgaccttttccacacgaacgaggtaattattggattatatgcaagattaccaacataactttgtttcagtatgcactatagttgacaacaaatcagtgatgttgttcgtgttgattttgaatgatgacctgaaaaccacatgactggagacagatcagttggagtatttgatcccagagaaatcctctttgcggcgccacttgcagtgcccagacaagaaatttgttgactttttgtcttacctgctgcaaataaatcccagaaacagaccaacggccagcgaagcgttgcaacaccgatggctttcgttcaaatatagttcaacggccaatcagactcgttcctgacaagtaggcaacactttctgaagctactggctcctgaaacaacatgtttccttttgcagtaggatttggcttcgtggtttttttaggtcaacacttggcgttgaaaaacctgttttgcaaggtgaatcgatcgtgtatatgcgctggttcatgcatgtaaatatgagaaaagtggttcctttttttttctgtacagttgccatgtactacagtgttgatccaactcatggtatagcaaaatggaattcatagatttgcctttgtcgtttaatctgatgcactgtgttttcaaccggatttctggttcttgacctaaataatggttgggagcactacaaccatggtgct

SEQ ID NO: 4445 - DNA, 2403 bp, Zea Mays
gccgttcacattgtggggaaacgtacggccattcccgttccccgccgcccctcgcctccgctgcacgcgatcgacgatccacagccaccacctctgcgttccccaccggagcatcttcaccaatcaccactgggctggctcccgcgttccccactggatttctgcacccagcgcttcttctgaaatttagaaggcggtggaaccgtcaaatcaaatggagggatcctcttacgcgtcaaggagctacagcgaactagctgccgcagcttccggaggtggaaggacgctgagggtaataccgctgcggcatccgctgggttctctgtcgacgtcttccacgtcgccgtggtggcgggcggtggtgggaagggctcggggcatggggccgcttgattgggcggaggcggccttgccgtgtgtggcgtggacacggaactacagatggaagcaggacctccaggccgacctcgcctcgggcatcaccgttggagtcatgcttgtgccccaggcttggttggctcattcgtttcattagccattctgtaatatctgggttcactacagcttcagccattgttattggtttatcccagataaagtatttcttaggttacaacgtcacaagaagcagcaaaattataccactaattgagagcataattgcaggagctgatgagttctcctggcctccgtttgtgatgggatcaatttttcttgcgattcttctaattatgaaaaatacaggaaaatccaataaaagattgcattttctaagagtttctggtcctcttacggctgttgtgcttggaacaatttttgtgaaaatctttcatccaccagccatatcagtggttggtgaaataccacagggtcttcccaggttctccattcctcaaggatttgagcatctaatgtcacttgtgccaactgctgtactaatcactggtgttgctattttggaatctgttggtattgctaaagctttggcagcgaagaatgggtatgagttggactctaacaaagagttatttggtctgggaatagcaaatatctgtggttcattcttctctgcatatcctgccacaggctccttttctaggtcagcagtgaatcatgaaagtggggcaaaaactgggttatctggaatcataatgggcataatcattggtggtgctctcttatttatgaccccattatttactgatataccccagtgtgcattggctgcaattgtgatttctgctgttactggcctggtagattatgaagaggccatcttcttgtgggctattgataagaaagatttctttttatgggcaatcacatttatcacaacattagtttttggcattgagattggcgtccttgttggggttgcattctcattggcctttgtgattcatgagtcagcaaatccacatatagctgtcttgggccgtttacctggcactactgtgtacaggaatacattgcagtaccctgaggcttatacgtataatgggatagtagtggttcgaattgatgcaccgatctactttgccaacattagctacatcaaagacaggttgcgtgagtatgagctcaatcttccaagttcaaacaagggacttgatgttggaagggtgtattttgtgatcctcgagatgtcccctgttacatatattgattcgagtgctgttcaagctcttaaagacttgcaccaagaatacaaagcacgccatattcagattgccatagctaacccgaaccggcaagtgtaccttctgttgtcaagatcgggcatcattgacttggtaggagctgggtggtgctttgtgcgagtgcatgacgccgtgcaagtgtgcctacagcacgtgcagaattcatcttcaaatgcgttgaagctacccgtgcaggcatcaggcgtgttgaccgattctgtttcgactcctaaaccagagcagcagcatcaaaagcagcacggcctcttcaaggacctatggaaggcacaggacagtaacgcggatgctggtggtgaggtgcagccactgctccggcaaaaccttgtgtaatactcctacaaaatacggagtacttcctgggatggactcacgccctcgctggcctatacatatacgtgtttatttatttgtctatgttgttgttaacatggtatcgtggtgaacaaaagaaactgaacatgccattgttactgtggtgtggcgttttttgtacacttttgatacctaaatggaactcctatgatttgggtctggaaagggtgtgtgaagatgttttgttccaggttttggagttccgctcccagattggcttgacaagcatgttaattccatgaactctcttccacaaaaacagtacagctgattatcagttttatgtttagaatgagaaaatagccctggc

SEQ ID NO: 4446 - DNA, 3143 bp, Zea Mays
gccgttcacattgtggggaaacgtacggccattcccgttccccgccgcccctcgcctccgctgcacgcgatcgacgatccacagccaccacctctgcgttccccaccggagcatcttcaccaatcaccactgggctggctcccgcgttccccactggatttctgcacccagcgcttcttctgaaatttagaaggcggtggaaccgtcaaatcaaatggagggatcctcttacgcgtcaaggagctacagcgaactagctgccgcagcttccggaggtggaaggacgctgagggtaataccgctgcggcatccgctgggttctctgtcgacgtcttccacgtcgccgtggtggcgggcggtggtgggaagggctcggggcatggggccgcttgattgggcggaggcggccttgccgtgtgtggcgtggacacggaactacagatggaagcaggacctccaggccgacctcgcctcgggcatcaccgttggagtcatgcttgtgccccaggcaatgtcatatgcaaagctggctgggctgcacccaatttatgggctctacacaggctttgtcccgttatttatatatgcaatatttggctcgtcacgacaactagcagtaggtccagtggcacttgtttctcttcttgtatccaatgttcttgggggtatagttaattcatctagtaagctgtacacagaattagccatattactggcattcatggttgggatattggagtgcttgatgggactgctaaggcttggttggctcattcgtttcattagccattctgtaatatctgggttcactacagcttcagccattgttattggtttatcccagataaagtatttcttaggttacaacgtcacaagaagcagcaaaattataccactaattgagagcataattgcaggagctgatgagttctcctggcctccgtttgtgatgggatcaatttttcttgcgattcttctaattatgaaaaatacaggaaaatccaataaaagattgcattttctaagagtttctggtcctcttacggctgttgtgcttggaacaatttttgtgaaaatctttcatccaccagccatatcagtggttggtgaaataccacagggtcttcccaggttctccattcctcaaggatttgagcatctaatgtcacttgtgccaactgctgtactaatcactggtgttgctattttggaatctgttggtattgctaaagctttggcagcgaagaatgggtatgagttggactctaacaaagagttatttggtctgggaatagcaaatatctgtggttcattcttctctgcatatcctgccacaggctccttttctaggtcagcagtgaatcatgaaagtggggcaaaaactgggttatctggaatcataatgggcataatcattggtggtgctctcttatttatgaccccattatttactgatataccccagtgtgcattggctgcaattgtgatttctgctgttactggcctggtagattatgaagaggccatcttcttgtgggctattgataagaaagatttctttttatgggcaatcacatttatcacaacattagtttttggcattgagattggcgtccttgttggggttgcattctcattggcctttgtgattcatgagtcagcaaatccacatataggaatagttggctgatttcttcaccaaggcgcagaccagagctcaacatcgcttctctctctccaaactcggtgtgatttacccaccttgagtttttttaggggggggggatgttaggtgtatatctatgtatatcccctttgtataaggggtttagtacatatttaccctttatgtaccggtgtatacatatcagcttagtgcctcatattgaataaagtcttactcttaacatatatatccatcttcattaatggagtgcattttctaattctatggttagtaaccactgaatgggtatattatgaaaatatatttcatggggtatctcatgatactaatttcgtgtcatagatactgttgttattttctataaatttagtcaaacttacaaatgtttgacttaagacaactctagaatttgatttatttctgtaactgtgttaaagattatcaactctttggttgtggctgacctgtccttgtacagctgtcttgggccgtttacctggcactactgtgtacaggaatacattgcagtaccctgaggcttatacgtataatgggatagtagtggttcgaattgatgcaccgatctactttgccaacattagctacatcaaagacaggttgcgtgagtatgagctcaatcttccaagttcaaacaagggacttgatgttggaagggtgtattttgtgatcctcgagatgtcccctgttacatatattgattcgagtgctgttcaagctcttaaagacttgcaccaagaatacaaagcacgccatattcagattgccatagctaacccgaaccggcaagtgtaccttctgttgtcaagatcgggcatcattgacttggtaggagctgggtggtgctttgtgcgagtgcatgacgccgtgcaagtgtgcctacagcacgtgcagaattcatcttcaaatgcgttgaagctacccgtgcaggcatcaggcgtgttgaccgattctgtttcgactcctaaaccagagcagcagcatcaaaagcagcacggcctcttcaaggacctatggaaggcacaggacagtaacgcggatgctggtggtgaggtgcagccactgctccggcaaaaccttgtgtaatactcctacaaaatacggagtacttcctgggatggactcacgccctcgctggcctatacatatacgtgtttatttatttgtctatgttgttgttaacatggtatcgtggtgaacaaaagaaactgaacatgccattgttactgtggtgtggcgttttttgtacacttttgatacctaaatggaactcctatgatttgggtctggaaagggtgtgtgaagatgttttgttccaggttttggagttccgctcccagattggcttgacaagcatgttaattccatgaactctcttccacaaaaacagtacagctgattatcagttttatgtttagaatgagaaaatagccctggc

SEQ ID NO: 4447 - DNA, 3540 bp, Zea Mays
ttagggtatgtcgcggcccacaagtaccacccactagatatgccgcggccttttgagtctaacaggactggcaagtatctggtgacaacgacagactaagagtatcaggctaacgtcaagtagcagacacaagatagcactggaatttctctatcataagagttgctcatgacgaatagcaacaagataggttgactaaccagtaggctcataatgcttccgtagaaaggccacatctgatgtgcaaactcaaactccacaatatcagcaggtagacgatcttccatactaaagccagaatagcactggcacgatcatcctcatccaacaaagtcctataagcatagaacctgaactcacaagaaggcatctgatcatcataatcggcaagtaactccatcttctcatcagttgctggacatggtagatcaccagtgaggaactcccaaagttgcaacgacgcatatatagacgcatgtgtggaacccaatcatgatagttggtgccattgaaaagtactggacatcgcagaatcgaacaccaccggacggtgaacaaaaagatgaggccatagaaacagtcgacaacgagagcgttaaataagaagtggcagacgagttgcaattttttttacctttttttgcttttttaatacggttcggtcttgctaagggcaaaacaaaggaagtcacccacagaaagacatcgatgacagaggtagtcgctcgttcggatttgaagccacacgtgatcgagtttggttgggcaaaacagaggaagtcgcttgtagaaagagaccaacgatagaggaagtcgtctgctcgaacctcgcacgctagtcgaagccacacgattaggaagccgtgacttgccaactggtcaactcactgaagccatgcatgatcgaggaaccttgatccgctccatggtggacgcactgaagctgcacatgattaaaggaagccgcctgttggtcgaagcctcacgatgaagtcgtgacccgtccgctggatggacgcgctggtggctacacgcgctcggactcgctcattggtggacttttgggctggtggctacacacgctctcttgtggaagaagacactcgccatctggaggtatgtaagagctagcagcggatcctcaaagcaaggaaaagaaaaaaaactaaccctagaacctagcccgcttctgttgctcacatggccactgttcgcaccctcgttgttgtgacctctgatcgtcagtggtctatctctcagcttgatgtcaagaatgccttttttaatagtgagttgcgtgaggaggtttagatgtagccaccacttgggtattctgttcctgagggcatggtttgtcgccttcgtcgttctcgttatggccttaagtaggctcctcgtgcttggttctagtgtttcgcttctatggtcattgttgctagtttttctgctagtagtcatgatcctgctttgtgtgcacaagtcatctcattgtagggctcttctcgtttttgttgatgacatgattattacagggaatgatactcattatattgtgaaggcccgtcttagtgagcagtttcttatgtctgatcttggttatcttcggtattttcttgggattgaggtttcctctactcctaagggttttgtatctttcagggaaaatacattcagaggcttcttgatttggcttctcttactaatcaacgcactattgagactctcatggagctcaacgtttgtcttcgtggcattgatagcgaacatcttgtggttcctactcgctatcgtcacaatgttggtagtctggtctacctttgtgttgctcgctctgatatctcgtatcttgtgcatattccgagtcagtttatatctgctcccactcagcttcttacagccccatgcctactgtgatgcgatttggctagtgattcttcgatcgtcggttttttttctgcccattgtgtttttcttggtggttcccttattgcttggaagactaaaaagcagttagcagtttcacgttcaagtacaaaggcatagttgcgtgctacaacttttgcgacgtcaaaggaatagttggctgatttcttcaccaaggcgcagaccagagctcaacatcgcttctctctctccaaactcggtgtgatttacccaccttgagtttttttaggggggggggatgttaggtgtatatctatgtatatcccctttgtataaggggtttagtacatatttaccctttatgtaccggtgtatacatatcagcttagtgcctcatattgaataaagtcttactcttaacatatatatccatcttcattaatggagtgcattttctaattctatggttagtaaccactgaatgggtatattatgaaaatatatttcatggggtatctcatgatactaatttcgtgtcatagatactgttgttattttctataaatttagtcaaacttacaaatgtttgacttaagacaactctagaatttgatttatttctgtaactgtgttaaagattatcaactctttggttgtggctgacctgtccttgtacagctgtcttgggccgtttacctggcactactgtgtacaggaatacattgcagtaccctgaggcttatacgtataatgggatagtagtggttcgaattgatgcaccgatctactttgccaacattagctacatcaaagacaggttgcgtgagtatgagctcaatcttccaagttcaaacaagggacttgatgttggaagggtgtattttgtgatcctcgagatgtcccctgttacatatattgattcgagtgctgttcaagctcttaaagacttgcaccaagaatacaaagcacgccatattcagattgccatagctaacccgaaccggcaagtgtaccttctgttgtcaagatcgggcatcattgacttggtaggagctgggtggtgctttgtgcgagtgcatgacgccgtgcaagtgtgcctacagcacgtgcagaattcatcttcaaatgcgttgaagctacccgtgcaggcatcaggcgtgttgaccgattctgtttcgactcctaaaccagagcagcagcatcaaaagcagcacggcctcttcaaggacctatggaaggcacaggacagtaacgcggatgctggtggtgaggtgcagccactgctccggcaaaaccttgtgtaatactcctacaaaatacggagtacttcctgggatggactcacgccctcgctggcctatacatatacgtgtttatttatttgtctatgttgttgttaacatggtatcgtggtgaacaaaagaaactgaacatgccattgttactgtggtgtggcgttttttgtacacttttgatacctaaatggaactcctatgatttgggtctggaaagggtgtgtgaagatgttttgttccaggttttggagttccgctcccagattggcttgacaagcatgttaattccatgaactctcttccacaaaaacagtacagctgattatcagttttatgtttagaatgagaaaatagccctggc

SEQ ID NO: 4448 - DNA, 4814 bp, Zea Mays
cagcagctcgtccccttccccccacttcttcctcagataaggagaggccccaggccagagaaaaaagcatcgaatttccccccgttaattggcctgagccctcagccgtctaccagcagcagctagaggcagacaagctaggttttactgcttcattgagcacaaagatccgctgacctcttgctcttggtaaaaatccaacctttcttgtattgttttcttcctgggaaaacctccttgtggtgcataaacttcgtagtacactctgccatttctggagaggaagctgagaactactatccatatctggcacgacccttgtcaagaaccatggctgttcacatgccatgaagctgcttgaactggaggcacctaaatgctgtggattgttcctatgcagatgattggatcagtggtttcaggcttcggggggttcgatcagatgttgtatgaataatagcaggattgcttgagagactatagtttgggtactgtttgcttctgtatttactggtacggtttcctactgatctgcggctgcgcaggaaggcattctcttttttgccgtaccatggatgcaccggatgttcaacagagcatgggatataaggagtccaggggtggtatgcctaagtttttccatgcccttggaccagcactcctgatttcaatgggttacattgatctcgggaagtgggtggcagccgttgaagctggttcttgttttggattcgacctggtgttgctggctctccttttcaatttcactgccattgtatgtcagtaccttgctgcttgcattggcactgtcacagggaagaatcttgcagagatatgccaccaagagtacaaccagccaacatgtatattccttggtgttcaagctggattgtctttgttgacgtcagagctgactatgggatatgctttgcaacagtgatggaagggacaataaatgcctgcatagcaggatttgcacttcttagttatgtgcttggcttattggttagccagccacaaattcctctcacgatgaatgtaatattccccaagatcagtggtgagagtgcttactctctgatggcgcttcttggtgcaaacataatggcacacaacttctacattcattcatcagttgtccagggtcagaaaaagtcatctgcagttggtcttggagccttatttcacgaccaccttttttcaatattgttcatttttactggaatctttatggtgaactatgttctaatgaactctgcagcagcggaatctactaatactcttctcattaccttccaagatgttgtagagctaatgaatcagatatttgtaaaccctctggcaccaactatatttttagtggttcttctcttctccagccacatcatctcgctgacatctgctatcggtagccaagtgatttcacaccatttattcggtataaaccttcctctttctggacatcgtctcctactgaaggtttttgccatagttcctactctgtactgggcgaaagttgcaggagctgaagggatataccaattattaattatatgccagattattcaagccatgcttcttccatcttcagtcgtcccactttttcgtgttgcttcatcaagatcaataatgggagcccatagagtgtctttgcatctggagatactggtttttcttgcatttctccttatgctattttcaaatatcatatttgtggcagaaatgctatttggcgacagtgggtggatgaacaatctgaaaggatatactggaagccctgtggtgctcccatataccgttttagttttagttgcacttatatctgtggctttttcactgtacctggctgttacaccattgagatctggaagtcatgaagctgaatcccatgaatggtctgtgcattctcagagagaactcttgaatacttctcaagaaagggaagatgttaaggtggacaatgttacatatgaggaagatcaaagatcagatgttgtcccttctcccagggatgtgcctgacagccatccggaactggccttggactatattgatacttctgacactgctgtagaatctgatcacgactctcaacaatctactgcttatgcatccactgctcctgaaacctgctcctccccgtcgtttactcgcgaggagtcaaaatcagttgttgcagtcaactggccggagcctttggagaaggttcctacttctactgtgatggaggaaagcacagtagaaaatgtggtctctaggatcacgactgaaagagatgttttagtagaaacagatgttgtctcgggcaaggataaggaagatatccgtactttggagtctgagaagtcaattgttgatagcaccccatatgtgtctgatgacggtccgccatcccttactttcagcaggggaaagggctcagatgcaggaaatggcagtggtagtctctcaaggttatctggtttgggccgtgcagcaaggagacagctagctgctactcttgatgagttctgggggcatctgtttgattaccatggtaagctcactcaagaagctagcaccaaaaagtttggtatcttgcttgggatagaccttagaacacctagcacatctgtaagaacggataaacaagctgctgaaatacttaagagcccactggtgagagactcaatgcggggggcagcttttttgtcaagctcagtggacatgatgtcccctaagaatgaaacgtcgaatttggaacttgcatatgggcttcagaggggacctggcatgggattgtcaagctggtctcagggtatgcagctaccaaatacacagctgcagagctcaagcaatagcctacttgagcagagtgcaagattaaactcaaattttagttcatcttattcagacaacaatcagttctaccaacctgcaacaattcatggataccagctcacatcttacctgaaacagatgaatgccagcccaagcctttactctagcatgccgctggacccacaacggcttccaaaatcatctgtgtctgctgtgccaaactatgctgattccatgatgcatgctcgtaatcataacctgcttgcttcactgggtggtactactacacagcttcctgcaacatcccgcgtaggctcaatgatgcctgaaagatcgtattatgatccttccagcgttgatgggaatgaaaacgctggttcacctgcttactcaaaaaagtaccacagctcacctgatatgtctggaataatcgctgcaagtagagctgcactcttgaatgaagcaaagttgggtgctgccattggaccacagtcatacctcagcaggctggcggcagaaagatctcaatatgcaagctcaacagccaggcccgcggctccattagcatttgacgagctttcacctcctaagctccagagtgatatcttctcggcgcagtcaagcatgagaccaagtgctagatccctttgggctaagcaaccatttgagcaattgttcggcatgtcaagtgcagagctcagtaaaggtgacttcaatcttccaggcagatcaggtggcgtggccaaggatgatttctcttataaggaatctgagacgaagcttcttcagtccctcaggctctgcatcatgaagctccttaagctagagggatcagggtggctgttcaagcaaaatggtggttgtgatgaagatctaatcgaccgagtcgctgcagccgagaagctattgatgcaagggactgccgagaatcaactgctgcttcatggtggtgatctccagcaacattcttccgaccaggccggcatccagtacatgcgcacgcttcccaactgcggggaggactgtgtttggcgcgcgtcactcgtcgttagtttcggtgtctggtgtgtccgccgagtgctggacatgtctctggtggaaagcaggccagaactttggggcaagtatacctatgtccttaaccgtcttcaggggatcttggaccctgcgttctccaagcctcggggtgctctgacaatatgcacctgccttcagaaagacaccagagtgcgcaatagcccaccccacagtgggctaacagccatgggcccggtccccacaccgatccggggcgccttcacgaccgcaggcgtggttctggagatgatcaaggacgtggaggctgcggtctcaggccgcaagggcaggagcggcacggcggcgggcgacgtcgccttccccaaggggaaggagaacctggcctccgtgctgaagcggtacaagcggcggctcgccagcaagggccagtagcgcgcgggtgtcagacaggcaggcgatcgcaagcaatgttaggaggagcctgactattgttctccaggggggctgccactggcgccggcctccctgagccctggattttttcgttgcacgacgttcctagggaccggtggttgcccgatggtcgtcttggtcccttccagcaggttttttttttccttccctctttctgttggtttctttttgttggctttgtgatgttttgtaaggggcaactagggtatgtgctcagaaggactcaagatgtacacgcgaagatgtactagtctgctgatgcagcgttgtaaagtccacactctgcaggttaaccctttttggggccgtcaagtgttagtgcgtgccctatgtatgttaatcacccctgcagagaggttgcgaatactgaactactcacagacctgcacctgtcgagatcgtttgtaatatccgacgtcttgttcagaattgttctcactcttttttgcccgttgtgtaatttaccctgaagggacttcaag

SEQ ID NO: 4449 - DNA, 4843 bp, Zea Mays
ctgaagaaatcgaaagagaggaaagctacgcctgagtcggggaacgcctacgaagcagacaagctaggttttactgcttcattgagcacaaagatccgctgacctcttgctcttggtaaaaatccaacctttcttgtattgttttcttcctgggaaaacctccttgtggtgcataaacttcgtagtacactctgccatttctggagaggaagctgagaactactatccatatctggcacgacccttgtcaagaaccatggctgttcacatgccatgaagctgcttgaactggaggcacctaaatgctgtggattgttcctatgcagatgattggatcagtggtttcaggcttcggggggttcgatcagatgttgtatgaataatagcaggattgcttgagagactatagtttgggtactgtttgcttctgtatttactggtacggtttcctactgatctgcggctgcgcaggaaggcattctcttttttgccgtaccatggatgcaccggatgttcaacagagcatgggatataaggagtccaggggtggtatgcctaagtttttccatgcccttggaccagcactcctgatttcaatgggttacattgatctcgggaagtgggtggcagccgttgaagctggttcttgttttggattcgacctggtgttgctggctctccttttcaatttcactgccattgtatgtcagtaccttgctgcttgcattggcactgtcacagggaagaatcttgcagagatatgccaccaagagtacaaccagccaacatgtatattccttggtgttcaagctggattgtctttgttgacgtcagagctgactatgatttttggcatagcactcggattcaacctcctgtttgaatatgatgatctcatcacagggatatgctttgcaacagtggtacctaatctgctaccatatgctatatcccacctgggaaagaagatggaagggacaataaatgcctgcatagcaggatttgcacttcttagttatgtgcttggcttattggttagccagccacaaattcctctcacgatgaatgtaatattccccaagatcagtggtgagagtgcttactctctgatggcgcttcttggtgcaaacataatggcacacaacttctacattcattcatcagttgtccagggtcagaaaaagtcatctgcagttggtcttggagccttatttcacgaccaccttttttcaatattgttcatttttactggaatctttatggtgaactatgttctaatgaactctgcagcagcggaatctactaatactcttctcattaccttccaagatgttgtagagctaatgaatcagatatttgtaaaccctctggcaccaactatatttttagtggttcttctcttctccagccacatcatctcgctgacatctgctatcggtagccaagtgatttcacaccatttattcggtataaaccttcctctttctggacatcgtctcctactgaaggtttttgccatagttcctactctgtactgggcgaaagttgcaggagctgaagggatataccaattattaattatatgccagattattcaagccatgcttcttccatcttcagtcgtcccactttttcgtgttgcttcatcaagatcaataatgggagcccatagagtgtctttgcatctggagatactggtttttcttgcatttctccttatgctattttcaaatatcatatttgtggcagaaatgctatttggcgacagtgggtggatgaacaatctgaaaggatatactggaagccctgtggtgctcccatataccgttttagttttagttgcacttatatctgtggctttttcactgtacctggctgttacaccattgagatctggaagtcatgaagctgaatcccatgaatggtctgtgcattctcagagagaactcttgaatacttctcaagaaagggaagatgttaaggtggacaatgttacatatgaggaagatcaaagatcagatgttgtcccttctcccagggatgtgcctgacagccatccggaactggccttggactatattgatacttctgacactgctgtagaatctgatcacgactctcaacaatctactgcttatgcatccactgctcctgaaacctgctcctccccgtcgtttactcgcgaggagtcaaaatcagttgttgcagtcaactggccggagcctttggagaaggttcctacttctactgtgatggaggaaagcacagtagaaaatgtggtctctaggatcacgactgaaagagatgttttagtagaaacagatgttgtctcgggcaaggataaggaagatatccgtactttggagtctgagaagtcaattgttgatagcaccccatatgtgtctgatgacggtccgccatcccttactttcagcaggggaaagggctcagatgcaggaaatggcagtggtagtctctcaaggttatctggtttgggccgtgcagcaaggagacagctagctgctactcttgatgagttctgggggcatctgtttgattaccatggtaagctcactcaagaagctagcaccaaaaagtttggtatcttgcttgggatagaccttagaacacctagcacatctgtaagaacggataaacaagctgctgaaatacttaagagcccactggtgagagactcaatgcggggggcagcttttttgtcaagctcagtggacatgatgtcccctaagaatgaaacgtcgaatttggaacttgcatatgggcttcagaggggacctggcatgggattgtcaagctggtctcagggtatgcagctaccaaatacacagctgcagagctcaagcaatagcctacttgagcagagtgcaagattaaactcaaattttagttcatcttattcagacaacaatcagttctaccaacctgcaacaattcatggataccagctcacatcttacctgaaacagatgaatgccagcccaagcctttactctagcatgccgctggacccacaacggcttccaaaatcatctgtgtctgctgtgccaaactatgctgattccatgatgcatgctcgtaatcataacctgcttgcttcactgggtggtactactacacagcttcctgcaacatcccgcgtaggctcaatgatgcctgaaagatcgtattatgatccttccagcgttgatgggaatgaaaacgctggttcacctgcttactcaaaaaagtaccacagctcacctgatatgtctggaataatcgctgcaagtagagctgcactcttgaatgaagcaaagttgggtgctgccattggaccacagtcatacctcagcaggctggcggcagaaagatctcaatatgcaagctcaacagccaggcccgcggctccattagcatttgacgagctttcacctcctaagctccagagtgatatcttctcggcgcagtcaagcatgagaccaagtgctagatccctttgggctaagcaaccatttgagcaattgttcggcatgtcaagtgcagagctcagtaaaggtgacttcaatcttccaggcagatcaggtggcgtggccaaggatgatttctcttataaggaatctgagacgaagcttcttcagtccctcaggctctgcatcatgaagctccttaagctagagggatcagggtggctgttcaagcaaaatggtggttgtgatgaagatctaatcgaccgagtcgctgcagccgagaagctattgatgcaagggactgccgagaatcaactgctgcttcatggtggtgatctccagcaacattcttccgaccaggccggcatccagtacatgcgcacgcttcccaactgcggggaggactgtgtttggcgcgcgtcactcgtcgttagtttcggtgtctggtgtgtccgccgagtgctggacatgtctctggtggaaagcaggccagaactttggggcaagtatacctatgtccttaaccgtcttcaggggatcttggaccctgcgttctccaagcctcggggtgctctgacaatatgcacctgccttcagaaagacaccagagtgcgcaatagcccaccccacagtgggctaacagccatgggcccggtccccacaccgatccggggcgccttcacgaccgcaggcgtggttctggagatgatcaaggacgtggaggctgcggtctcaggccgcaagggcaggagcggcacggcggcgggcgacgtcgccttccccaaggggaaggagaacctggcctccgtgctgaagcggtacaagcggcggctcgccagcaagggccagtagcgcgcgggtgtcagacaggcaggcgatcgcaagcaatgttaggaggagcctgactattgttctccaggggggctgccactggcgccggcctccctgagccctggattttttcgttgcacgacgttcctagggaccggtggttgcccgatggtcgtcttggtcccttccagcaggttttttttttccttccctctttctgttggtttctttttgttggctttgtgatgttttgtaaggggcaactagggtatgtgctcagaaggactcaagatgtacacgcgaagatgtactagtctgctgatgcagcgttgtaaagtccacactctgcaggttaaccctttttggggccgtcaagtgttagtgcgtgccctatgtatgttaatcacccctgcagagaggttgcgaatactgaactactcacagacctgcacctgtcgagatcgtttgtaatatccgacgtcttgttcagaattgttctcactcttttttgcccgttgtgtaatttaccctgaagggacttcaag

SEQ ID NO: 4450 - DNA, 998 bp, Zea Mays
agagggaaattagaaatccatcccgatcctatcgtccccaatttcttctgctccacctaaatagatccgtagccgtagcctaggcgcgcacattgcagaaagatcgagcggaaggtcggcagcaggcgcatagatgcaggggtgagggcacgggcggcagcgcttgacgggcgacgagtaaaccctaacgctttgattgcgggcggcgtcgtctgagccagtcccgagtcgatacgctgtcatgcctgtcaatcctcctccgccacctcctgggtcgtcgtctttggctccggcgggggccagctacttcccgctccctttccacctgcagcagcaccagccgccgccgccgcaggtgccgccgcctatggcggcgagcagctatcagcagtatcagcaacagctgcatcaggcccatcagctcttccagcgggacgcgcagaccataacccccgaagcgctgcagagcgtcaaggctgccctcgccaccagcgacgtcctcgaccccgtcgccgccgccaacgccaggctctccgatccctctaccagcaagaagcccatcccccgtcgcgctgccggacaatcctgggaggatcctaccctcactgaatggcccgaaaacgactaccggctgttctgtggagatctaggcaacgaagttaatgatgatgttctctccaaagcattttcacggtttccatccttcaacatggcaagggttgttagagataagaggactggcaaaactaaaggctatggatttgaaagtatgttgggaaccgccctattaaattgcgtaagagtaactggaaggagaggacagatgttgaggctctggaaagacaaaagaatcatgtcaagaggaagcctaaaattcccaagaagactattcttcacaagtagagatacaaaggccctaccgagggtgaatgccagctcatgctattacacattttgctgaggtctgatggatggcttatatgatgtgtatgatgcag

SEQ ID NO: 4451 - DNA, 5429 bp, Zea Mays
atgggccttggttgtccaatatctcagatctggactcgtcatcgccaagataacttaagcatggcaggcgtcatcgtgtcctcctcggcggcacgtacagagaagagccaggagcaagaccgactcacccgtacccgcgtcgacgagcgtcagtcggctcgcggctgcgaccgcgggcgggggcagcaagttggggaggaagaatacggcgaaggtcgggaagacgaacgagacgtccgacgatggcgaaatcgatggtgcgtgcatgatgtgaaacgtcctcgtggacgtgcaatagccactgtgcgagtcggtccggggctggtgtcggacgaatacgggaagggggcacatgctcctacgccctctgccgagaatggggtcgtacggagttggaggcataagggaagagagaaaataagtagaatggcgaccgagatggtggcaactgaggcgaggaccatcattattgtgcggagggggactgggggagctaccgagcacagtgcagaggtcagaccgtcagagggagttgctggtgcagtggtgcgggggagatcatcagatcagaggggtgtctccatggccgacaatgaggggaccctggacgccgtcctcaaggaggccgtcgacttggagaacatcccacttgaggaagtttttgagaatctgagatgcagtcgtggggggctcacttccgagcaggcgcagcaacgcctgcaattatttggccccaacaagctcgaagagaaggaggagagcaaatttctcaagtttctgggattcatgtggaacccactgtcatgggtcatggaggctgcagctatcatggccatcgcactggccaatggtgggggaaagccaccagactggcaggatttcgttggtatcatcacactgctgcttatcaactcaactatcagtttcatagaggaaaataatgctgggaatgctgctgctgcgcttatggcccgccttgcgccgaaagccaaggtgcttcgtgatggccgttgggccgaggaagaggcagccgtccttgtgcctggggatgtaatcagcattaaacttggagatatcatccctgcagatgctcggctccttgatggagatcccttgaagatcgatcagtcttcgctaactggagaatcgttgccagtcaccaaaggtcctggtgatggtgcctactctggttcgactgtcaagcagggtgaaattgaggctgttgtgatagcaactggtgtccacactttctttgggaaggctgcgcatcttgttgactccacgaatcaagttggccatttccagaaggtattgacagccattgggaacttttgtatttgttcaattgctgtggggatgtttgttgagataattgtcatgtaccctatccagcatagggcgtatcgtcctgggattgacaatcttttggtgctacttattggaggcattcccatagcaatgcctacagttttgtctgtgaccatggcaattgggtcccatcgcttggctcaacagggagctataacaaaaagaatgactgcaattgaagagatggctggtatggatgtactttgtagtgacaaaactggaactctgactctgaataaactcacagtggacaagaacctcattgaggtttttgaaagggaagtgactcaagaccaagtaattctgatggctgctagagcctcccgaatagaaaatcaagatgctattgatactgctatagttggcatgctagctgatccaaaagaggcccgtgctggtattcaagaggttcatttccttccatttaatcctaccgacaaaagaactgccttgacatacattgatagtgatgggaagatgtaccgtgttagtaaaggtgcgccagagcagattctcaacctcgtctacaataagttggagatagaacgaagagttcatgctgtaattgacaagtttgctgagcgtggacttagatcacttgctgtagcgtatcaggtagtgccagatggaaggaaagagagtcccggtgggccatggcattttgttgctcttatgccactctttgatcctccaaggcatgacagtgcagaaacaatacgaagggcattgaaccttggtgttagtgtaaaaatgatcacaggtgatcagctagcaattgggaaggaaacaggacgtcgcttaggcatgggtactaacatgtacccttcctctgctttgctgggacagaataaggatgagtctattgctgttttacctgttgacgatttaattgagaaagcggatggttttgctggcgtattccctgagcacaaatatgagattgtaaaacgtctgcaagcacgaaaacacatttgtggaatgactggcgatggagtaaatgatgcccctgccctaaagaaagctgatattggtatagcagttgctgatgccactgatgcagccaggagtgcttctgacattgtcctgacagaacctggcttgagtgtgataattagtgccgttcttaccagccgggcgattttccagaggatgaagaactacactatctatgctgtttccattacaatacgtattgtgctaggatttatgctacttgccctcatatgggagttcgatttcccaccatttatggtacttattattgcaattctaaatgacggtaccataatgaccatatcgaaggatcgagtgaagccttcgcctctaccggacagctggaagctggccgagattttcacaactggaattgtgcttggtggatacctggcagtgatgactgtcatcttcttctgggctgcatataagacaaactttttccctaggatcttccacgttgaaagccttgagaagacagctcaagatgattaccagaaactcgcctctgccgtatatctccaagttagcaccatcagccaagctctcatcttcgtgacgaggtctcgcagctggtcattcgctgagcgcccgggctttctactagtgtttgccttcctggtcgcgcagctgatagctacactggtagctgtatacgcggactgggggttcacttcgatcgaaggcattggatggggctgggctggtgtggtgtggctctacaacctcgtcttctacttcccgctcgacctcctcaagttcctcatccgatacgctctgagtggcaaagcgtgggatcttgtcattgagcaaaggattgcgtttacaaggaagaaggacttcgggaaggaggagagggcgctcaagtgggcacacgcgcagaggacgctccacgggctgcagccaccggatgccaagctgttccctgacagggtgaacgagctgaatcagatggccgaagaggccaaacggagggccgagattgcaaggctgagggagcttcacacgctgaaggggcatgtggagtcggttgtgaagctcaagggcctagacatcgacaccatccagcagtcgtacacagtctgatgaccctggattaagtacatacatgtatatctagttctggcaggtggcagtcgcctgcttgtttgtatttgccatataccataacacatcatgagaactggtagttggtgccgtcggttgtcttcgcgtgctccttgcgatgttattgtgttacgccggtttcaagcaacataggtcacggatcataaatcagatatccgacggatatcaaatccgtgtgtcatctccccgcgtcctggttgccccgcgtcgggcgactcggacgctccccataatccctagtagccgccgccgccccttcgtgggcctctccctgccgcgccgctgcctgagctggccgccggaaggttcggctgcttgcggggagggcggcggcggggcatctccgtctccctctggtggatctgggcgggcacagccgccaaggtcaccgtgagttgctcgtcggcgtggtcggccccggcttcgccccctcgcgactcgggtggctgccaactcccctccctccccatctctttgccttgccgccgccggagctagctggtgggttgctcgcacggctaggggtgaaggcgtcgggcgggtgcttgctgccttgtcgtgcgtccaacccacggtggcggcgtccgcccactcaggcaacgggcctgtggctgggtgcgcgcccgcgaggctagcccggtggcggcgcctgcgtgccgcgacggcaatcgctgctgctcgggggttggaggtgtgcctggactgtgtgctcgcgtacctgatgcgcggagggctggatctggcgcccccagggggagcggcgttggcgcgcggaaggctggatctggcgcgcgaggttggcggcctccgcatgccatccgtcggaggcggcggcaggctggtcccgggctagcgcatgagccggggtggaggtcggcgttggtgcgccggcaggcctgcgcagtcggccggaattgcagtggcgggacctcctctcgtctggggcagcatcggctagtcgatcgggctagcgcagggtggtggtggcggcaggcccaaaatcttcatcatttgtgtggtacgtcggggtaccggcgacggcggaggcagcttgctgtgtctcgaggtttcggccagacgttgtgctgggggctcttgggcgaaagtctcggcgacggtgacgcccatgggcgtcgcttcccctgttaagggcgtcacaccccagtgctatcttccttgggtgaaagctcggtccatcacggacaggtgacggtggcgtcacagtgacgtcactcccttcctgaaggcgtcgcttctgaagttcgtctcggccaggactttgccttcggctgttgcttcgcttctcggtgcctggtatgcgagtggaggtgggggttttgcaacgtgaagtcggagctgctacatcagtggatgtggctcggcaacgataacacgaggcgaacctcccttcttcgtggtccagaatgtttcgaaggtcgggcaaaaaccggaggcagggcagagggtcaagattggaagtcgaagctgctttgtgcctgagcccggcaacgatgacttgttgagacctttcgcttcgggttgtctatctgctttttgtttggttcgcctgttggctgctttggaaagtcggagttgttggatgctctgcatctttgcttgataacgatgacctttagcagttttgtgctctcgtgtggggttgccgctgcctgtgttgtttgggcactctatgtcgacggtgagtgtggtgtcgtgttgatgtcctaatccaaccgacgagttgagttgtatggtgttggcgtgttgatgtctcaatccaaccgcatgttgtttgttgtttagtccggtccggaccacttcttaattaatataatcggcagctctcatgtctggttcgtttcaaaaaaaaaaagtgtgtcaaattgtcatccctagctagacagagtagccatgggctgctatttggagctggtctggcc

SEQ ID NO: 4452 - DNA, 1225 bp, Zea Mays
ctcttatcgcctccgcgctctgatggcctcacaccgcgccacgcagtaaacgaaaagacgggcccactccctcaatcctccgcacgccccttccatggggcagccgcacctcttgccgcagctctccccctccccggtcctctactccctcttctcgccgccggagacgggggccacgccctggcggcggccgctgaaccggggacgggccttccaaccgccgctctcctcgctgcgggagaccaacaaggccacgctccgcaaggccacgcccaacgcccccttccgcctcggggggggcggggggcggcagccccaaggatcgccgccccgccgccgacgacaaggaggacgaggacgagggtcgcggcggcgccggggcactcacagggacgctgatcgcaggagcattactggttggtttcgtaggggggtttggggcggccggttacgtgtacaaggaccagatcaacaccttcctcacgcagttctcggggttccttgacggctatggtccagccggatatgctctgttcgtacttgtatatgcagggttggaggttctcgcaattcccgcaatacctttaaccatgtcagctggtctattatttggtaatgtgactggtacaattattgtttcagtcggtggaacgctagctgcagcggtggccttccttattgctagatactttgccagagagagaattcttaaattggttgaaggaaataagaagtttctggcaattgataaggcaataggtgaaaatgggtttaaggttgttactttgctacgcttgagtcccctgttacctttctcccttgggaactatctatatggccttacttcagtgaagttcttgccgtatgtcttgggcagttggttgggaatgcttccaggttcatgggcttacgtcagtgccggtgcattcgggcgagctttaatccaagatgagtcggaaattggtttgggaggaaacgaacagctatggacactgggcgttggattattgtttacagccattgctgccgcttatgtaacgaggctcgcaaaggacgctgtaaaggagatcgacgactagaatggtaggattctctaggagaaagggccatctggatagtgtactagcctagcacattgtacatcactggcacctttggtgcgataaaatcttatagaaagccagagcaattttatgaggtaatgtgatctcttgttgttgtggtg

SEQ ID NO: 4453 - DNA, 1694 bp, Zea Mays
ccctcaagtaacctcgaactgcatccgccagcaccagcaacagcaatggagcacacgacgacccaacacacggcagccgccggggagcaggagagcccccccacggcgttggccttgagaagcctcgccgactacaccgtcggggccatccccaccctattctatgtccccgacttcatctcccactccgagcaatcacagctcctccaccatatttaccaggcaccggcgcccaagtggaaaaccctcaagaaccggaggctacaaaactggggaggagtggtgcatgagaaggggctcctgccgcaggcctgaagtcagtcaaggctggatgtttgttcgaatattggatagggattcagagaggtttactcccttcaagttagaaaaacaaagaatggtatgtttttgtggtatttttgggtcagtctaggataaagtatttatgatccttctttaattgtttcagttagcagattgtaacattgagaacactattacttgtttttctaccttctgaaaatactgaatctagcacaacagagagattgattttttgagtgcctgctatgccatgatcttattgtaattgatgtctgtaccgaacgcaacagtgatacatttcttgtttggtggctaacatgcctactagttgcatttcagtatgcgtgcttttatacactatactcaagtacatatcaaatttagcatcaaattgagcttcacagcatgtactgctgcagtgccttcatggctaacaaggataaccgacagaatctgccagtggactggtttatttccttctgcaatcaatcacgtgctgataaatgagtatcatcctaaccaagggatcatgccacaccaagatggtcctgcctactaccctgtcgttgctatcatatctcttgcttcacctgtcgtgattaatttcacaccccatcaaaagcttaaagagcagcaggacactgatccacaggacttactggcccatgagttgccttcgccagctgagacagagaacaacggctctggatcacaagaacgtggagccacaaatgaatctgatccttcatcttcatcacttatgctgatgccgtgcagcctgttgatatttaaggatcaggcttatacagactacttgcatggcatacaagatagtgagctacataatctggacaaggtggagaatgtgtctcagtgccaagaactgaagcatctacattcggactctatcctagggggcatgagcatggaagagcatgacacgttccgcaggtccgccacaagagtctcgcttacgtgtcggttggtgctgaaagtccacaaaaagctattcaaaatctagaaattctgattatagcttgtgatttagaatagggctgccattattctttgtaagatatatataggtgttgtgggagttgtttggccagcatggtgtccacaaaacaaaaaaacattttctggtcaaggatcccaaagagctgttgagcccagtttcttagaaatcgaccaggaagcatgggaaaggaacaataaaccattggttatgatgttcgagtaggagatgatgctgttttccgtgcaattcgggttttttcattcgtattcggactgtgtgcagctgcctttcggactctgaaacgggcggctggcaaaccgagtggaagggtctgtatggttttatatctaag

SEQ ID NO: 4454 - DNA, 2270 bp, Zea Mays
acggatccaaattccaaaccgcgcgaacttctgccgctcaaaattccaaatcgtcctgactacccgcgcttcccataatcctatcccgcccgcgcggcccctctcgggattcaaacgccagccgtttgtcctctcaaacccgatcggatctgaccgccctcccaggccgtaacaggatcccgtcggtcatggccgtgataaacgggcgctcgaagcgtgttcgggtgacggcggtgccgcgccctctggagctgcggtcgttcccggccgccggagaggggccgcgcccgctggtcctgctgtcgttcccggccgccggagaggggctgccgccgcgtggtgcgtttcgcgactgtgtacggtcgttcctggctggatccgcggtgccggcggacggcgcgtggcaggtagcctttggagtcgggaacggggtggtcgtggtgatggaggtggtggaagaggacgtcgctaaaactgggatcgagcggatctactgcgatcactgtaccgtcgccggtgcccgacatgcaaatatgtgatctcctctgatgatccggaagattgggactataggcagttggataatccacgtcacttgctgcatggtattgtacatgacaatgggtttggtcaccttgttcggataaatggcagagagggtggctctagtcttctgacggggattcaactgatgggtttctgggattggctctgcagataccttagagtcagaaaggtctccttgatggatgtctctaagaagtatgaaacagattaccggatcttacatgccatcactactggtcattcatggtatggccaatggggattcaaactcaacaaagggagctttggaattacatcagaagaatacttaaaagctatggacaacctttccttaactccattatcacacttcttcccgcactcccgatatcctcgaaaccagctacaagataccatttcattctaccgatctctttcaaagcaacctctcaccacaattcgtgaactgttcctctatgtgctgggccttgccaccagcaagagttcaaatatgcactatggatcaatgcataaggagcactcacatacccatgtgcaagacacatggcctgacgaggaaataaaacgtgcaacagaaattgctataaaggttcttcgtgctgttgagaaaacaaggtgggtgaccatgcgaatcctaaaggcagccatgtaccattcaattggttcaccgcagctagtggactactgcctcaagacccttggtactagaacaattgatggaatgatggttgcagttcgatgcaacagcgatactaacaccctagagtacaggcttatggatgaacccatcgttctgcccaatgtatccatgccaactcaagaccatcttcgccgtgacataaagttcttgcatgatgctctcctccacccacatacaatgcatccatacaaaccggaaaactgttatgagcatggcaagaggtctgccatggtccttttggactgcaagcaattcacaaagcactatgacctggaacaggagttcttgcctcaaaacccatccatgttgcacctgtggtgtcaagtagaggtgttagaccaggttggcgatccaccttgcataccaccagagctcctaactcttccgcagacagcaactgtgtctgatctgaaggtggaggcaaccagaacattccgtggcatctatctaatgttgcattcctttgtagccgatcggcttgttgactgtggaacggcaagtgagtcaactcaactaaagctcttgtttggggcaaatggaactgttcgcgtccaaggcaggtgtgccagtggtgaacgcagggttgggatttaccggatggagagaggcgtggataaatggacagtgcgttgctcttgtggagccaaggatgatgatggtgagaggatgctgtcttgtgactcttgccatgtgtggcagcacactaggtgtgttgggattagtgatttcgatcaggtgcccaagaaatatgtatgtaactcatgtaaattacttaacaagcgtaagagcagaggtcacggaccagtttataacattggcccaagcaaaagattcaagattggcgcaggtggctttagctctaggtgggggatttttttgaggcctccagctgacatgtaaatatcaataaaatgacagtgagtttgtatgagataccggtttgtggatgttaacttgtagagtgcttggtttgagtaataagctagtccatcatcttctcact

SEQ ID NO: 4455 - DNA, 3901 bp, Zea Mays
tctaccctgcggccttgcttctgttctctcgcgtcgttctcccgtgctccccgcgtgcgctctatctgtttctggtggcgacgacttggcggtcgccggctcgccgccgccgccgtgcacagtcctttattttggggaccttcaccggcgacgagcacccaccaggttgcttcacaaaacttacaacatccaggatacaactaataaggattccttcatctttatctggattttgaggaggttgctgagagcccatccagcagggtgtctcagacatactaatggacggggcgcccaagatccttgaaaaatcatcacatgaatgcatgtactcttggtacttcacccgggaagaactcgagaaattttcaccatcaaggaaagatggtattactgaaaacaaggagtcagaaatacggcatttatattgttcatttatccgggacgttgggatcaggctgaagctgtacgaaattacttttgaccctcttaagtgaattgactttgttcaaccttattttagggtgttcttagtttatactactttatattgtggctcataacatgattgtttacattgacctaatctctcatgaacataaattattttcttttttcctctaagacaaaagcttcttttattatacggccaatatgtttgattctgctaccagattgtattattttagcaactttgataagattttctatatgtgctaacatattttttttcacagacctcagatgacactagcaacggcaatcatgctttgccatcgcttctatttacaccagtcccttgccaaaaatggatggcaggtgagacttgagagactattttgttgtggcagtgatggttacttgctgatgtctatgaaaagcgacaagggtgcagagtttccttgccaagcatttgttgataatatgttatccatgtccaacttaacattacagattattcttcaaatcatttgaattatctaatcttctaatactattactattttaattttctaattacatgataattcatcttgatgctactctacctcaagatcacttcgtgattgggcatttcaaaggaatctaaaaaactcagtcagggagggaaataccgtcctccaggtattatataagagaccgaaacatggtcctggccgagaaaatcaccgaacactggccctccatcactagcgggtcgtcaccacccactctgcaacggcccaatcggaggatggcgcgcaggacgtaacccggaagcgtgcggggcacaacgaggggattttttttaaacgaagtccgaaatttgcccccgagagggatcgaatcgggaacctggaggtgctactcggaagccttaaccattacgctagaggccctttcgccatttcaaaggaaactacgtagctacaaatctacaatgttataggaatgcttattttttagaatctactgtgttgcatcttactgttacaacttaatcaagtttgactgtttgacatactttgatggatcatcttgcaaattacatattcaccagtaagttctaagttctatagaaatggcttactttactgcatttcttttcttagttttgtaagatatgtttagttcatatttactagatcacttgtccagaagttatctctctgttatcttgcagcccctagttatgtcaaacactagtaggaattcctgtgttattctgtgttcataatatttattactctgtttgaagtacatgatctgtttgtggtttgctcttgtggaccagtagttcttctggaacatacttttatttccttttactagttttaattgttccttttatcattactttatttcagacaattgcaacagtatgtgtatttctagcgtcaaaagttgaagatactccttgtcccctggactatgtagttagagtatcctatgaaacaatgtataggcgggacactgctgcggctcaaaggatccgccagaaggatgtttttgagaaacagaaagcgctcattttgattggagagagattgcttctgacaacaattcgatttgatttcaacattcagcatccttatagaccacttcttgatgctatgcaaaatcttggcatcaataaaaaagaagtgaagcaagtagcatggaactttgtgaatgactggcttaaaacaacattgtgcctacagtataaaccccagtacatagctgctggttccctttacctggctgcaaggcttcacgatatcaagcttcctttgcatggagcacatgtttggtggcaccaatttggtgttgcaccaaagcctctggaagctgtcattcatcaaatgatggagcttgcggctgtgaacaaatcgaatcctgttcgtcccaatctggttaagccaaaggaaactttatgtgaagctaaactgagcttatctaatagcccagactctgtgttgaatcaatcaagcttgttaataagcagctctagtcctgatattggcgagaccagtgaccaagtgcaggtggattcttgtcaatacttgataagcagccatacgggtgattgtagggtctcatgtcctgacaacagttcgttggatacttctggtaaagctcatgatgaagagagattggatcaggccttaataaccaagcatgacagtgggatgatgccttctactagtaaccagacatcattagatgctactgtaggcactgagagcagtgctgaatatatgaagcaggatgtaagccattgcgatgacttcaatatcagagtcaatgaccaaagcttgaaccaggcgttaagaaatcagcatggtgatgctgtcccattacctgacatggtatcactagatgctaaggtggacaaggaaagtagttggtgtctggaaccattgattgcaaacttcgactgctgcattgacagcgttaatgtggatagcttgtgcactgatcagagattggctgatgttgcttcaggccccacagctgatgtgccatccgtgctgctggccaaggagaattctgatcctttgagtgcaaagctcgaaaatattgatgttgccaggataaaaggtttactgatgaagaggaagagccggagagagatccaaaaccaagccattgcttcagatggcctcagtgaagaagcctggattgagagagagctggagtctgggattgtcacaaaacaagaagccaattgtgccgccatctcagatgagctaagtgatgaagcctggattgagagagagctcgagtcagggattgtgaccggaccaacaaacgagcaggcgatcacttttgatggtttgagtgaaaatgattggatcgagagagagcttgagtctgggatcatcattgagccagcacctgctatcaagaagcggaagctggagtcaagctgttagctctttagctgctgcattcagaggccagattccaagcaggtgaataattacagatggaggtaccctgcgactagggcacatcgaagccaagagatgtcgcatagatgggaggatcaatattttccttttttttatttctttaaccaaacacctcggaatactttggcacgagggttgtgtgtacagtgggatcttcccagtttcttgaattcagaatcacacgaggtttgtgtgtacagtgggatcttcccagtttcttgaattcagaatcatatccactgtatctgttccttgtttgtgtaaatctagcatgcccgaagttcggctttaattagattgtaggtgtaactgtagcagggattgtctcgtgttaagcccgacgaaaaaatgattcagtgtaactgttactggtaaccaaagaaaattagttattcactatagacttattgttaacaaaagaaaagacagttactggtgtacgatgtttataaattgatggcgaa

SEQ ID NO: 4456 - DNA, 1675 bp, Zea Mays
gctcttggtccacggcgacctcctctggccgagcaaaggaagcagacctgttcccacttcctcgcatctaaacccacgtcaccaaccccgaccgaacctcctcctctctctctctctgctccacctccgttcgtccgactccgaccgcagcccaactcctgctgacttcaacatccattcccccgccattcgcgccaggattactccatctctacttctactacttgttgctgatccctcctccccctcccaccaccaccctccgccgccggaccctcatcagccaacaacaataatggcgtcgatccgccggccgcactcgcccgccaagcagcacctgctgcgccaccaccaccccttcgccacgtcctccccgccctcctcgccgctccgccactcctcgacatcctcctccccacgcacccaccaccacctccaccacccgcaccccttcctcttcttcacgcgccgcccgctcccgcgcttcgccgccttcttcctcctcggctccttcctcggcctcctccacttcctctcccacctcccccaccagaccccgcacctccgcccggcgtcctccagccccgccgtcatcccacgccaccagctccccatcgaccgccttaacaaccaccaccaccaccaccacgacgacgacgacgacgaaagcaacagcaagctgctcgtcgtcgtcacgcccacgcgcgcgcgcgccgcgcaggcgtactacctcagccggctgggccacacgctgcgcctcgtccacccgcccctgctctggctcgtcgtcgaggccggcgaccccacgcccgaggccgccgccgcgctgcgggggaccaccgtcatgcaccgctacgtcggctgctgcgacaagctcaacgcatccgcctccgcctccgacgacgcgctccgcttccgcccgcaccagatgaacgccgcgctcgagctcctcgagaaccaccgcatcgacgccattgtctatttcgccgacgaggagggcgtctactccctcgacctcttcaaacgtctgcgccaagtcaggaggttcggcacatggcctgtgccagtgatctccgagaacagaaaggatggtgttggtgtggtgctggaaggccctgtgtgcaaacagaaccaagtcgtgggatggcacacaagcgagcatgccagcaagctccgtagattccatgttgcaatgtcgggtttcgcattcaacagcaccatgctctgggaccccaggctccgctcccatttggcatggaattcaatccggcatccagacacagcgaaacaaggcctccaagcaacaaccacgttcgtggagcagctagtggaggatgagagccagatggaaggcatacccgctgactgctcccaaataatgaactggcatgtgccggctggatctgagaatctcgcctatcccagaggatggcgagttgcggcgaatctggatgtgatcattcctcttaaatagtattcaacagctatgttcatcaaagcaactgactcctttgacaggcatatactatagaaattaagccatgaagttttggcttatatagcgcagaggaatcccaggttgactacattggagaagcagctcttcagaaggggaggaggctttcagccaaactggacaatcgacgaactcagccaaactggacaaaaaagccat

SEQ ID NO: 4457 - DNA, 691 bp, Zea Mays
ctttgcgcaggcagggtagagccggagatcagagatcttgatgcagacaagtccttcggcgtgcagggaacgaggattctctgtgatactgtcagacatgtgccccccagtttcagggatcacgactaaagatggagctatatctttatctgagctccactgagcctgagtctgacgaggatggcgttcttcgacgtggaggcaacctggtagtgaagtttcttgagaatgaggacatatcagggtttggcaaattctgcaaggtgaagttcaagaaagtatcgttgttgagacccaaggcgactcgacctagctcgagggagatctacatgatctgcgaaggtttgcggtagaaaggagggctcttcagaaggcaagcgaagactccaagaagctaggtcagttgagttgccctgaactgggcgctgttagttctagctgctggtgcaggtgctggctgattggcaatgtgatacagctgtttgatgctgatagcctcccagagcaagttaccacaaagctttgtgtgattgaaccatgctagtagttcgtctagatgttacctgtaataattttgttgaactgtgatactagttcgtctaggagaaacaagcatttgacttgagccctttctgagaacctgaaacacccttgctttttatgttgcaaatttccattatttcggccggat

SEQ ID NO: 4458 - DNA, 2906 bp, Zea Mays
  misc_feature (1)..(2): n is a, c, g, or t
nngaattccaagagttggtggaccaagaaggtgccatttttgaaaagtgtgtgaccgctggtggcactactgttgaagatcaagacaaggaaatggagcaatctgcaggtgacgaatcaagagaaaccgaggctgagaatgctgtggaatataacaagaaggtggatcaagaagataccattaacagacaaggtacagctaaggaagacagtggtgtggagccacaagaggagaacgttgtggatccagatcaaggtgtggatgacttttctgtactagatgagggtaatgtggtggcacagtgcaccagtgatcaattgagaacaaccatggaagataatgctgcagagatgcaagaggtggtggagcaagaaggtgccatttttgaaaagggtgtgacctcagatggcattactgttgaagatcaagacaaggaaatggaacaatctgcaggcgatgaatcaagagtgaccaagggtgagaatgctgtgaaagataaaaaggtgtatcaagaagatgccattgacaaacaaggtgcagctgaggatggcagcggtgtgaagtcacaagaggacaacatggtggttccaggtcaatgtacagatggccttcctgtactagatgagggtaatgtggtgccacagtacacaagtgatcaactgagaacaaccacagataacaatgctgcagttgatccagagttggtggagcaagaaggtgttgatagcatagtgggtgcagccaaggttggtattgctgtggaagaatcgcgagaggacatcatggtggaaaagcaagttgaaggtgttcttttacaagatcaagatgaggcagtggagcaatgcaccagtgatcaactgaggacaatcacagatggtaatgatgtggaagatcaagaggtgcacagagagaaggttggtctctctgaagggtacccacagaagcctggtaaactgaactgtcgtttttacatgtcaacagggaggtgctcatatgggtcatcgtgccacttcaatcatccacggctcaaagcaaaactagaagtttcaagtttcccttccgaacaaagaaatcatgaagctgaatttctggaactgaaccgtgttggcctccccattagagaaggagcaaggaagtgtatctattacatgcgtaatggtacatgcagatatggaaagaaatgttgttttaaccatccagagcaagttcttgatgttcaacgccacactgcaacaggatgggatgatactaacttgcaatcttcaccacactcaaagaagtcacctgaacataaaactatggatgacatatcgtctggatctgaggttcttcctccaaacatacttcggatgcttttacctccccagaatgtgccccctagtacaaaagaaaaggaaatcaggataaaaaaggatcctgattgggcttcagcttcagatgattctgatggctgctgctcggccgatagttcagatgggcctttgtgcaagcaggaacatgaggactatcctgagaggcctgaatgccctttccttcttagatttggtaattgtaagtttgcatcatcatgccaatattaccacccaaaagacaaatttccaagtacctaccatccagaagacaaattccaaagtcgataccatcaaaaagaaaaatcaagtcgacaccatccaaaaaaagagccagcactatcaggagaactgatggtttatcctgacagacctagtgaacctgactgccccttctatgtgaaaactgggtcctgtaaatttggggcaaactgtaagtttcatcacccgaaggatataactccaaacatgcagggtccagcaagtccaaaaaggtcggtcgctgcaaaagagcaccacgcagcagctagagcgacattacaagaccagatgtaccagcaacaaaaattccctgagcggcctggccaaccagattgccggtactacatgcaatttgggaaatgtaaatttcaatcagcttgtatattcaatcattcaaaagacatactttcaagtgggtggcatccagcagaatgcccattctacatgaaaactaggacatgccaatttggatcagcttgtgagttttatcacccaaaagatcggtgctcaggcagagggggagtgattgatggtactgactatggacatgattttgccacgaagtcacggaatgttctgcaggaactggcaatatatcctgaaaggcctgatgaacttgagtgttctcactacatgaagcatggctactgtaaatataagatgaactgcaaatttcatcatccaagagatcgtcttccaaagaaatagtctacagtgcaaaacaatattttaggtggccatatgagtgaacggttggacacaatcttaaggaaaaagaagaaaaaggcatctagcactcagtttattactctcttagtgtccttttcttggaccatttgctacaaccactgttgtaactggctgtcgttgatgagtggagcaagtactgatgatgggacagaaatgcaggaaggaagccatagtcttccttttttgaagagctcgattctactcatgtctatgtcgaatttctgccctagtgtcgttagagttctcgtaccagatgcgaactgcctggtggcttcccaactcccgttcattcatatactaccaaacattgctgtgatctagatctagcccgatgcggtgctaacctgagattgtgggttactgtagctcagtatgcagctcaggtacctgcacttgctcaagattgcgataatgatcagattaaaatagcaggccacgcatattctgcaacttgcgacttttacatcgttgttgagtctcctgggttcagcctctttattgtttttgtttgtgtgcgtgaccatgtgtgtcggactgtcggttgtc

SEQ ID NO: 4459 - DNA, 2928 bp, Zea Mays
caggcctccacaacaaagctagggtttgcctcccccaccctcctggcctcctcccgctttccctcatcctcgtgcgaacctcgcgagccaaggaccgctcgtcgtctcttgtctcgccgtcgccatgggtacggagcggaagcggaaggtgagtcttttcgacgtggtcgacgagacctccgtctccggcaagctgggccgcgccgcctccaacggcgccgccgccactgcggcggggaccaatccgtctgtcaaccggtggaacggccggccctacacggcacggtacttcgagatcctcgagaagcgccgcacactgcccgtgtggcagcagaaggaggagttcctccgccgcctccgcgacaaccagaccctcatcctcgtcggcgaaacgggaagcggaaagacaactcagattccacaatttgttcttgagactgaaggcttgggtaaccgttccatggttgcctgcactcagcctcggagggtcgcggcaatgtcagtctccaggcgtgtggcagaggagatggatgttactattggggaagaagtgggttacagtattcggtttgaagattgcagcagccacaaaactgttctcaaatatttgacagatggtatgcttctgagagaagcaatggcagacccacttttagagaagtacaaggtgattgttcttgatgaggctcatgagaggactttggcaacagatgttttgtttgggcttctgaaggaggttctaaaaaatagaccggatttgaagcttgttgttatgagtgctactctcgaagcagagaaattccagggttactttagtgatgcaccgttgatgaaggtgcctgggagacttcatccagttgagatattttacacccaagaaccagagagggactatctagaggctgctatcaggacagttgtgcaaatacatatgtgtgaacctgctggtgatatccttgtattccttactggagaagaggagattgaggacgcatgtcggaaaatcaataaggaaatcaataatatgggagatcaggttggcccagttaaagtcgtgcctttatactctacactgcccccagccatgcagcagaagatttttgaacctgctcctgccccattgaaggaacgaggtcctcctggaaggaaaattgttgtgtccaccaacattgctgaaacatccttaactatagatggcatagtttatgtgatagacccggggttttctaaacagaaagtttacaacccaagaataagggtggaatccctcctggtgtcaccaatttctaaggcaagtgctcatcagagagctggtcgtgctggacgaacgcaacctgggaagtgctttaggctatacacagagaagagctttaatgaggatttgcaaccacagacatacccagaaattcttcggtcgaacctggcaaatacagttcttaccttgaagaaacttggaattgatgatttagtgcattttgactttatggatcctccagcaccagaaactctaatgagggccttagaagttttgaactatttggctgcactagatgatgaaggtaatctaacacagttaggtgagatgatgagtgagtttcccctggatccacaaatgtcaaagatgcttgtcatcagtccaaagtacaactgttcgaatgagatcttatcaatatctgccatgctgtcagtctcgcctctttgcatctgctgactaccgtggacttcgtctgttattaccatattctttctctagcacccaattgcttcctccggcctagggaagctcaaaaggctgctgatgaggccaaggctcgatttggccatattgatggggaccatctgacgcttctgaatgtataccatgcatacaagcaaaacaatgaagatccccagtggtgttatgagaactttatcaattccagagcactcaagtctgcagacaatgtcagacaacagcttgttcgcatcatgactagattcaacctcaagatgtgcagcacggatttcaatagccgtgagtactacgtcaatatcaggaaaaccctgcttgcagggtatttcatgcaggtcgctcacctggaacgaactggacattacctgactgtaaaagataaccaggtcgtccatcttcatccctccaattgcatggaccataagccagagtgggtcatctacaatgaatacgtcttgactaccaggaatttcatccgcacagtcaccgatatccgtggggaatggctaattgatattgcgccgcattactatgacctgagcaatttcccgtcatgtgaggccaagcgtgttcttgagaggctgtataacaagcgggagagggaaagagctgcaaatagaggctgaagttgatacttccacaaacctggtgcttcataattccacagcaggttatcacagatggcggacccgtttgtcatatgcatgatgtcttccacagcctgttgcctagtgtttcatcagcatgatcattatgcagacagcctcgagaaatcccttggcagctcaattagttatgatgcagattaattttgtgccattctccttatttttgtatgcgtaagatatttatattttgcgtttctatgtgattaactggttatccttcggttggaatgaaattccactgattttggtttattagcttagctggggttatgtatgcctataatatgcttacttccggttgcaggaggaagggttgaacgaggttggcaccgaagaaaatttggtgtccctttttatttatagatagatagtttctgtgtggtacgccaaggataaggcgatctgaaattggattgcgtctatctaatgtgtaacaaaatggaaacttttttggtgggtgcaatgtagcacttgcctatctgacacttgtgcacgttcgatctccagctaaacagctatgtgagccgg

SEQ ID NO: 4460 - DNA, 2437 bp, Zea Mays
cgcaactttcacctgtgaataacgttcttgcataatcgcacgggcgaagccttcagaagcacacgttggttgtgtggctcactggcaccgcgccactcagctcagcaacgatgcaaccacctgacaatggcatctctttgcgcgccctcggcgctcctcgaccacccccatcgccgtcggagacgagacgagcacctatacctagccgtataaaggcggcagggcttagacaagctagtgcaggcttcccgggcccctagattctctctcgcgcttccgctttccttctcctggtcctggccatggcccacgaacgggagccgctcctgcagcaacgacagaccggcgtcggcaatgcctgcggtgccaaggactcgtcctcggcgccggcgccgtcggctgccgcgctgccgtcgctggctaggaccgtgctcaagttcctgatgtgggcggtgttcctcacctgggccgcggggatcttcctctacccgaccaagcccgtgcaggccgtgttcaggaagtgggtcgggctcaccagggactccatgttcggcatcgccgggggtattttcctgaccttcagcgcgccaattctgatcattgcgcttctcgcatatgtgtacatctccttcttcccgagtgagcatgtggtggagaaaaggaagctgcgctcactgagtttcaggctctggactttccctgttcttgtagacggcccctttggagttgtctctgcagttgagttcatcggaattgtcttgtttatagtttttgttgtctactcaatgacctattatgccgtggaagctgtgagccttgtctcgaaatttgatatcccatcaatgactgagagtgaattgatactggatgtcattggcctccgtttaggggcggttgggttgttctgcatgctcttcctcttcctgccagtcgcccgaggctcggttctcttacggcttatcgatattccatttgagcatgctacaagataccacgtctggttggggcatctcacgatggctctatttacattgcatggcttgttctatgtgatctcatggtccatgcaagggcgcctccgtgaagaactgagacagtggaaggaaattggagtagcaaacctgcctggtgtgatcagcttggcagccggcctacttatgtgggtgacatcacttcacccagtgaggaagaggttcttcgagctcttcttctacacccaccagctctacgtcgtcttcgtcgtgttcttggcgtttcatgttggtgacttcatcttcagtatttgtgccggagctgtgttcctcttcatgctcgaccgctttttgaggttctggcaatcaagggccaaagtcgacatcatttcagccgcctgccgcccgtgtgggacggtggagctagtattctcaaaaccagcaagcctccactacaatgctttgagtttcatcttcattcaagtgcgcgagctatcgttcttgcagtggcacccgttcagtgtatcttcaagtcccatggatgggagataccacatgtcggttctcataaaagtactcggcacgtggactgaaaaactgaggagcatcatcaccgatgtacaggagaagaacgggggtgactctgagctgcaatgcgggcgcatgacagcctgcgtggaaggcccatatgggcatgaatcaccctaccacttgatgtacgagaatctcgtcttggtcgcaggaggcattggaatatcgccattcttggcgatcttgagcgacataatccacaggatcgaggagggcaagcaatgcatgcccaagaacgtgctggtcctttggtcagttaagaagtccaaggagctttctctgctgtccgccgttgatgcccagaccatcagctcatctgtctcggacaggttgcaactggatatccaggccttcgtgactcaagaaccccatcctcctttggaggatggcatcgtcggggacgaccagaaagtccctggcatgttcgtcaagaacggtacagccatgtctgggctggtcggcaccggggacaacttctgggcggccatgtacttcctggcgtccacgctcggcttcctcctggcgtacgccctggtgcaggtgtactacgtgaagccgcacaacgtggtggcgtggtggtacctgggcctcctgttcatgctgtgcatggttgccggcgtcgctctacccggcgggctcgtggtcctcctgtggcatctgtcggagaagcagaggttggaggacgacaagtgggacgcctctcagtcaccgcgcgccgagcagacaggccccttggctgcggcgggtggtggtgacgacgacgctgctcccagcgtcagcctcgccgccctgcggacgacccggtacggctgccggccgaacttcgaagcgaggccgggcgaattaaacgaccgaccgatttgtttgtggactaa

SEQ ID NO: 4461 - DNA, 779 bp, Zea Mays
cagaaacgcaggcagcccagcccacgccgcgaggaagcctgaggccgagagaggactgagcaagcgtcccgcgagaaactggtgttccggaccaccacgcggatgggctcgggcgacccggcggccgaccccctttcttccttcctccgccaccccggcgcgttctccttctcccgtcgcgtcgccatggcgcgcgacgccaccgccacatccgtgccagcgctccgcccctggatcgttgacctcctcccgctcctcgtcgtcctcctcatcgccgcccacgtcctcgccctcgctcgccacggacgggtccaggcagcccgcgcggagcaagaagcactaaggggacggcgcccgcggccggatgcttgaaaccagtttgttatttcagtcctgcatccttggcttgttgatctccaaccttccaacgtcagatgatggcgtggaaagttcctgaaagaactaggacagggaaccgatcttatccaatggtttgttcagatgttggtgtcaaaagtgacgatagctgaatagctgatatgtggaaggaggcccttttgagcataaatagttttcggttgctggataggtttgacatctctcgacctctccgtgtaaagaacagtagctagacagatgtgccgtttcatatgttgtggcctggtgggcttttgtaattcatgagcagcattttattactgggcaattaagttaacgaggcatactataatgttatgagagagagctatcgaatatcgtctaagagaaataataaggat

SEQ ID NO: 4462 - DNA, 801 bp, Zea Mays
cagaaacgcaggcagcccagcccacgccgcgaggaagcctgaggccgagagaggactgagcaagcgtcccgcgagaaactggtgttccggaccaccacgcggatgggctcgggcgacccggcggccgaccccctttcttccttcctccgccaccccggcgcgttctccttctcccgtcgcgtcgccatggcgcgcgacgccaccgccacatccgtgccagcgctccgcccctggatcgttgacctcctcccgctcctcgtcgtcctcctcatcgccgcccacgtcctcgccctcggttactggatctacaggctcgccacggacgggtccaggcagcccgcgcggagcaagaagcactaaggggacggcgcccgcggccggatgtaaggcttgaaaccagtttgttatttcagtcctgcatccttggcttgttgatctccaaccttccaacgtcagatgatggcgtggaaagttcctgaaagaactaggacagggaaccgatcttatccaatggtttgttcagatgttggtgtcaaaagtgacgatagctgaatagctgatatgtggaaggaggcccttttgagcataaatagttttcggttgctggataggtttgacatctctcgacctctccgtgtaaagaacagtagctagacagatgtgccgtttcatatgttgtggcctggtgggcttttgtaattcatgagcagcattttattactgggcaattaagttaacgaggcatactataatgttatgagagagagctatcgaatatcgtctaagagaaataataaggat

SEQ ID NO: 4463 - DNA, 1927 bp, Zea Mays
gagacgggagacgacaagcgcgcacgtcccaaagccaaactcccagagcgaggaggtggaggacggacgggaggaggagaggagagagcccaccacccgcgaccgcgaccgcgacctaacccggagacctccctaggctagctcccctcccagaccccaggctctcccacccacctttcccctctccctccctcctccccgtcccacgccgccgcacccccgcctggctgcttgggtggcaatcggccgtagaggaggagggtgtaggagcttgatccgggccacctgccccctgcgccgtcgggatgtacgtgccgccgccgcccaccggcggcgccggcgagcagcctagggtttaccaggtctggcggggaagcaacgaattcttcttgcagggaagattcatatttgggcctgatgtgagatctgtgtttctcactatgttcctcatcatcgcaccagtggttgtcttctgtgtgttcgtcgcaaggcatctcataaatgatttccccgatagctggggaatctcagtgatggtagtagtggttgtcttcactgtttatgatttgacgctgcttctttgtacctctggtagagatcctggtataatacctcggaatactcatcctcctgaacctgaatccattgatgggatcaatgatacaggtgttcagactccacaacaatttcgtttgcctcgcacaaaggaagttgttgtaaatgggatcagtgtacgggtaaaatactgtgatacttgcatgttgtaccgaccacctcgatgctcacactgttccatttgcaataactgtgtggaacggtttgatcatcactgtccatgggtcggccagtgcataggactgcgtaattatcggttcttctatatgtttgtatcctcgacaacattgctctgcctacaacatacgagaatttcaggtatcgctatgaccggcgcgataatccatataacagaggtactctgaacaattttctagagatattctgcaccgctatccccccttcgaagaacaatttccgggcaagggtgacagtagagcaagggctgcagcaaacacgctcacagtctaggggtttcatgagccccagcatgggcaagccaaccatcggagagcttgagatgggcaggaagccagtagtaccttgggacgagccaaggacggcagctgatatcagggacttggaagcagggttcgggggcatgtttgacgagaaagagggcagagtagcccacgcatccccagatctgagcagagatctcccagcagagtttgtggaagggcgaactggcatgcactcgaggcagtcaagttgggttcagagaggaggcgatgcgagtgaagcgtcggcgctgcaaatggctactgtccataccgccgaagatagcaaccatgtcccctggagtggcacacgttagcctgacaaaaaggcgggggaaaaaaaaaaggagaggaactacggtgtgtttcggttgtgtctcgaggtgggtgctggtggcgatgtcgtctcgaagtgaactgccatgtgtttattaccacgtgtgccagggcaaggccctggatcattttgtaatccgaaacacaagcttgctgctgtagtctcatctcatgcctggtagatcaccagatccctgctgtggttgttttttttttgtttttggtttggcttgttttgttttgcttgtttgtctgtttgggtgtgtgtttcaacaaaatgaagtagccgacgagcctaagctcccgacaggtctggataatgtatatgtatataactatattattagcaggttgcgacgaatgctgtgcttggtttgccacaacgctgctgtgctttgggtgaaagcacctggaaacttggaattttttttgcaggatatgaagatagggtctgaaaagtgcaagaccacgaatgc

SEQ ID NO: 4464 - DNA, 2204 bp, Zea Mays
ggatcggtcgcatagattatgtggtgcgggattggcgagcgatcgagctgtccctgcctgtgttcttgcctcttgcctcttgcgccttgctagcttgcttgcctccctgctccctcctcctccctcttcctcgtcgcttctctgattcttcctggcctttgccggagcaaggctaggcgcgaggagagggtgctgtgctcagccagaggtcatcggcgctacgcgagcgcactgcctgttgtgctgcactgccggagtatcaggggaaaacgctgaaatcatggaaatcaccttattgcatgatgaatctgatgcaggaagcaccagtttgctaccgccattgttgtcatatggtccaagatcaatggttccaatacaagtaccatcgtcatcagaccttgagagtatcctgtcaccagatccagtctgcagtgatcttcagttgaaagagataaactacaatgctgcagcaatggatgaaagcactgagctccttcacttgattcttggtggcaatgatgaaggatacaataccacaactgaattacaagtttgggatgttctggacttctatgtctcagaaaacttctcggctctccaatttgatagtttgatgggttttacaaatgaagttagtacttcctacaatgattgtatgaatttagttgacatggtagagtggcccgtggctcgtctgtctctagatgatacaccaaaactcagtaacagtgatgatgcggttctggcagacaatgtcacaacggaccctgatgaaacatccttataccttcgtacaaaaccaacagattcagaaactgaaagtagctctgacgcaggagatgttgaaactgaatatctagatcaaaagctactttctagatgtctgcctgatttaatggatgttgactcgcccaaccacttactgaaaacaccagtgagaacaaaacatgtgactcttgtgcttgatttggacggtaagcagtactaacttcacatggaatattacttttgaatgtttcttttaaattcctggtacttttcagtatatgttcactagctactggcatgttattattatgttttagttaatattttatgttatttgcatgtcatgatcaggaatgtgaaattcagttgtaatataaacatttttactccagtattctttgtatgatagtctaacggtttctcatatgcagagactcttgtacattcaacattggatcagtgcgacagtgctgattttaccctagaagttttcttcaatatgaaaaatcacacagtgtatgtgaagaaaaggccttacctgaaagtgtttcttgagaaggttgctcagatgtttgagcttgtcattttcacagctagtcagagaatctatgctgagcaacttatagataaacttgatcctgatggaaaatatatctcacggcgtatttatcgtgaatcttgtatattctctgacggttgctatacaaaggatctgacaatcttggggatcgacttggcgaaagttgcaatagttgacaatactccacaggttttccagttgcaagtggataacggcataccaattaagagctggtttgatgaccccgcagaccaggaattaatcgagttactcccgttcctggagagcctcgtggactcagatgacgtgaggccaataatttcgaaggccttccatgacaaacctgagtagaaatagtcctggagagctggagaggttcactggaattaatccagtgaacctctcgctgaagttagcttcgctccacacggtgcaggccattcttgggaagttaggtataggatcaagattcaccatttatgttatgttagctgttacaaatagcaagcataaactgcggtcgtcgatgaaaatggcttgtgtgtgtatgtcccttcggtgttccgtgtcacagatcattgtacagagacgaacaatagtgctgaataaagtgatctgagtgcaattttgctcatgaggacggctcgagcaggaagccgtgcttctgttcataataacgtgaattatgttaggacgtatgcactaaccagtttaatttaatagaaaaagttagccaatccatttatacactccaacattagtcaatccatttgtacacttcaacattagtcaattcatttatacactccaacattagtcaatccatttatagaaagacgtaaacatggaaataaaa

SEQ ID NO: 4465 - DNA, 6529 bp, Zea Mays
tctccaccccctccgtcctccgatccaaactaccgacgaacgccaccacccgaattcgaaaccctaggcggccgctgtagaacacgtgaggctgtagtgcctcttgttcggtggagccggcccgcggcagccggctatgtcgacggaggacgagaagctcctcaaggaggcgaagaagttgccgtgggacgagaggttgcagcataagaactggaaggtgaggaacgacgcaaacatcgacctcgccgctctatgcgactccatcaccgaccctaaggatgcccgcctccgcgagttcgggccgttgtttaggaagacggttgcagattccaatgcgccggtacaggagaaggcgctcgatgcccttctcgcgttccagcgagctgctgacgccgatgcatcaagatacgcgaaggaggtctgtgattcaatcgtggccaagtgcctcactggccgaccaaagactgtcgagaaagctcaagctgcattcctcctatgggtggaactggaggcatcagaggtcttccttgaagctatggagaaggctgtgaagaacaaagtggctaaagcagttgtacctgctattgatgtgatgtttcaagcactaagcgaatttggaactaaggtagtgccacccaaaaagattctgaagatgctacctgagctgtttgaccatccagaccagaatgtccgggcttcttctaagggtttgacactagagctttgtcggtggattggcaaagaccctgtaaagtctattttatttgagaagatgagagatactatgaaaaaggagttggaagcagagttggcaaatgtgtccggacttgctaagccaactcgaaaaataagatccgaacaagaaaaggaacttgaggaggagtctgtgcccgagacaagcggggctaacacttctgaagaggcagcgacagatgcccctgtggagatcgatgaatatgaccttgttgatcctgtagacattttaaccccactagaaaagtctggattctgggacggtgtgaaagcaacaaaatggtctgagagaagggatgctgtggcagaattaaccaagcttggttcggcaaaaaaaattgctcctggtgattttcatgaaatttgccggacactgaagaagctcatcacagatgttaatttggctgtttcggtggaagctactcaggcaattgggaatttagctagaggtttaagagcccaattttctggaaatgcacgaatgctccttccggttttacttgaaaaattgaaagaaaaaaagccaacaatgacagaagcactatctcaaacacttcaagcgatgcacaagtctggttgttttacacttattgatgtgattgaagatgttcgtgcggcagtaaaaaacaaggtgccccttgttcgttctttaacgctgacctgggttgcattttgcattgaaaccagcaataaagcaactgtactaaagttgcacaaggaatatgttcctatctgcatggagtgcttgaatgatggtactccagaagtacgagatgcatccttttctgttttgactgccattgccaagatggttggtatgaaaccattggaacgatccttggagaaattagatgatgtgaggaaaaagaagttatcagatatgattggttcttccagtgacagtgttttgagttcaggaacagctccaatcacaacatcaggagcagccacatctgctcgcggggttgcagatagcatgtcaatgaagagatctgctgcaagcatgcttagtggaaagaagcctgtccaggcagcggctgctaccaagaaatctggaccgtccaaatccactgcagcaaaaaagacagatggtgggtcacagtctaaggcatcagctgctcttgagattgaagacgttgagccggcagaaatgagtttcgaggaaatagaagagaggttaaagtctgttgtgaaagctgagacaatttcccagctaaagagctctgtctggaaagagcgtcttgaagctattggcgtactcaaacaagaggtggaaaatcttacggaacttgataagtctgctgaacttctgattcgtttgttgtgtgctgtgcctggatggagcgaaaagaatgttcaggtacaacagcaagttatagaggtcaacacctatattgcctcgactgtaaacaaatttccaaagcgatgtgtggttttatgccttcttggcgtaagtgaaagggttgctgatataaaaacacggacctctgcaatgaaatgtctcactgccttctgtgaggcagtgggtcctggatttgtgtttgagaggctttacaaaataatgaaggagcacaagaatcccaaggttcttagtgagggtattctttggatggtctctgctgtggaagactttgggatctccaatttaaagctaaaggacatgattgatttttgcaaagacaccggtcttcagtctagtgctgctgtaacaagaaatgctactataaaattaattgggatgctacataagtttgtgggcccagatattaaaggctttttaagtgatgttaaaccagcacttctaagtgccctcgatactgaatatgagaaaaatccttttgagggtgctgctgctgctgctccgaagagaacagttcgagttctggataccgcatcttctgtatctgctggcttgtttgatgggttgccacgagaagacattagtgctaagataacacctactttactaaaaaatctgggcagtccggactggaaggtacgattggagtccatagatgcagtcaccaaaattgtggaggaggctaataaacgtatccagcctacaggaacagctgacctgttcagtgcacttagaggccgtctttatgacagcaacaaaaatttagtaatggcaaccttgtccactattggtggccttgcatatgctatgggaccttctgttgaaaagtcaagcaagggtattttggcagatgtgctgaagtgtcttggtgacaataagaagcacatgcgagaatgcacattgactgctctagattcatggattgctgcagcccaacttgacaaaatggttccatatattatagtgtctttgggtgatcagaaaacaggttcagaagggcgaaaagatctctttgattggttgtctaagcacgtttctaaaatgagtgatccatctgaggctttgcctttgttgaagccatctgcatcttctttgatggataaatcttctgaagtccgcaaagctgctgaatcctttatgaatgaaattctcaggatctgtggccaagaagtggttggaaggaacttgaaagatttgccatcacctactttggctattgtatcagaaaggctgaaactgtctactgtacatgaaggattttctgaatctgttaagatggtgacaacaagcatgagtttgccatcaaaagctggtttgaagaacaataaacatggtcttaatgatcgtggttctaatgtgggcaaacttgtgtcccaaagaggacttcccgccagggcatctgttactatggtttccacccaagaccctgcacaatcccaagcattatttaacataaaggactcaaacaaggaagagcgggagagacgtgttttggtaagaaaattcaagttcgaagaaccacgtcgtgaacagatagatgaactaaagattgatttgtttaagcatttccgagaagatgtaagcctgcgattatggaactcagactttaagaggcaaatcgatggtattgaattgctacaaaaggcacttccttcaagttggaaagaagtgattgaacttcttgacatattattaaggtggtttgtcttacgcttttgtgaatcgaacacaacatgtttgttgaaggttcttgactttcttcctgagctttttgatattttaaaagaccagtcatacatgttgacagaagctgaagctgcaatttttcttccttgcctcatagagaagtctggtcataacattgaaaaagtcagggaaaaaatgggggagctgataaagcaaatgatcaacatttactctcttcccaaactaattccctatatacttgaggggctccgctccaagaataaccggacaaggatagaatgtgttgatattgttggatatttcattgaccatcatgggaccgagcactgacagcagagcgtgatggtgagattaggaaagctgcccttaatacgcttgcaacagcctacaagaaccttggggatgatgtatggcgatatgttggaaaactctcagatgcccaaagaagcatgctcgatgataggtttaaatggaaggcaagagaaatggataaaaggcgagaaggaaggcctggtgatgcacgagcagctctgaggcgttcagttagggagaatgggtctgatatagcagaacaaagcggagaagtagtgtcccgtccagtggctggatcaatgatctcaagggacttcggatatgcagatgctcatatggataggcacatggtacctaggcagattccaagtacaagtggtcctgtggactggcgcgaagctctcgagatagttgcattaggtttgcctgagcagtccgttgaaggtatgaaagttatatgccatgagctaacacaggcagctgaccctgaaagcacattgcttgaagatcttattaaggaagctgacagattagtgtcatgcttggctgttatggttccgaaaaccttcaattttagcttatctggtgcttcttcaaggtcttgcaaatatgtgttaaacacactcatgcagacatttcagatcaaacgtcttgctcatgctgtgaaggagggtacccttgacaaccttattacggagttacttctttggcttttagatgaaagggttcctcttatggatgatggcagccaattactcaaagcactaaatgttttgatgcttaaaatcttggataatgctgagagaacatcctcgtttgttgtgctgattaatttgctgaggcctttggacccttcaagatggccatcgcctacaccaacggagtctcttgctgtaaaaaatcagaagttttcagacttagttgtcaaatgtttaattaagttgacgaaggttcttcagagtacaatatatgaagttgaccttgatcgaattcttcagagcatccatatttatttacaagaacttgggatggaagaaatacggagaagggctggtgctgatgacaagccattgagaatggtcaaaactgtcttgcatgaacttgtgaagcttcggggaacggcaataaagggtcacctttcaatggttcctatagatgctgaacctcagccaataattctagcatacattgatctcaatctccagacccttgcagccgctagaatgttgacgccatcggggcctatgggtcaaactcactggggtgatgctgcatcgaacaatccaaatccatctactcactcagctgacgcgcaattgaagcaagagcttgctgctattttcaagaaaattggtgacaagcaaacatgtaccattggcctctatgaactgtatcggataactcagctctacccaaaggttgatatatttgctcagcttcagaatgctagtgaagcgtttagaacctatatcagagatggcctagctcaggtggagaagaatgcagcagctggaagaatgccttccagtcttccattatccacgccgcccccaatagcagcaatacccaatccaaaatttgcaccatcccctgttcacacaaaatcaatcggtaaaacagattataacgaagataatgccagtggtgagacacaacccttcagaggtcaaggtgccatcaccgaccaacaaactgatagataccatacctcaggcacgttggatgctcttagggaaaggatgaaaagcattcaagcggcagctataggtcattttgacggtgctcaggctcggccgttggcaagtatgaacggaagtaatatggtgcatgggggaactcgattggacggtgaaccccaacaacgaagtaatataccacccatggatgagcgagctctatctgggctgcaagcacgaatggagagactaaagagtgggtctatggaattacaatagatacgataacaattctgagaaataccaactattgtagttctttgtaaatttgaggcatagtgatggtgttctttgtagataggtatttgaatgtcggaagaactatatggcacggggtcaacatttcgtaacccatgtgtcaagccattcttgcagagcctttggatgcagttttagataagaggtagccaaatgttttccttgttgctactccaagggctaattagtgttgacacattttgccgtactgtattggttttcctgtggtgtacagcaatagaatttttcattctaaattaactggaaatgttacttgtgaaatatatggtttttgaaatgcatatccgtatggtttcacatttatttgattatctgaatgggattttgattggctactgttcttgtcaaaattgaactacagtttagaaagaaatgtgttcac

SEQ ID NO: 4466 - DNA, 2565 bp, Zea Mays
gctggtgccgttcgcttggtgcttcctccctcagcgccgttgtcctttgacccggcgcggcggtgcccaacctcgctgctcgtccgacgcccgtacgtcgcccttcgcgtcctccctccttactccctcgccaagtcgcccgacgatggatctgccgcgaccccaggctccctgttgtcggcgccctgcagacctacgtcctgccccctgctgcatcgatgcgcccaggcccagcgacctgcgcggctgcgccccggcagccggcgccctatggaaaccctccgcttcgtatccccgtgctgccgtgccgccagcctccgtgaggctccacgacatcagtgtccgcggagaggaggatgagcagaaagagatgctgcagcaaatgactgacggagtcagagcaatgctgggctcaataggtgacggtgcgatcaacatttctgcctacgacaccgcatgggttgcccttgttaagagcctggaaggtggcaatggccctcagtttccctccagccttagatggatcgttgagaaccaactaccagatggctcgtggggcgacgaggagttcttcctggtctatgaccgcatgatcaacactctggcctgtgtgattgcacttgagtcgtgggaaatccatgctgacatgtgcgagaaaggtttgtcattcattcgagagaatttgtggaggctagagcacagtggttcagatgactggatggtcgttagtttcgagataaccttcccccagctgctggagatggcaagagacttgggtctcgacgtgccctgcgacgagccatccctgcgagctatctatgcaaggagagacgcaaagctcgcaagaatccctaaagaattactgcacgcttcaccgacaactctgcttctgagcatagagggaatgccgggcttagactgggagagactactgaaactccagtgctccgatggttcgttcatgtcatcgcctgcacccacagcctacgctctcatgcagaccggcgacacgaaatgcctcgagttcctcaatggaatcgtcagcaagtttagcgggggagtgccctttacctaccctgtggatctgttcgagcacttatgggtagtggacaggatagagcggctgggcatagggaggcacttcacaggtgaaatcaaggagtgcctagaatacgtacacaggtactggggcgacgaaggcttgcccgccacgagggacggtccggtctcagatgtcgatgacacggccatggggttccgtcttctccgactgcatggctacgatgtctctccttgtggcctttccaggcgaggatgagctccgacgcgctgaggcatacagccgtgagttcctctgccgcagacgagcctccggggagctcaaagacaagtgggtcatccccaaggacttgcctggcgaggtcgcttacgcactggacgtgccgtggaaagctagcctgccgcgcatcgagacgaggatgtatctggagcagtacggtggtgccgatgacgtgtggattgggaaggtcctgtacaggatgtctctcgtcaacaacgagctcctcctccggacagctcaagccgacttcagaagtttccagagacaatgcaagctcgagtggcatggcctcagaaaatgggccagcaggagaaacctccaagcatacggcgtgacgtcgaacagcacgctgcgatcctacttcttagccgcagccagcatctttgagccagacagagcgacagagcgtctgggatgggctcgcacggcggtgctcgccgaggccgtctcctcctgcctccgagacggtcgttgtagccgtgccgacggcatgctgagggaactgaccagcggcatccacctacgcaacgacgataatccggcagccagcttggtgcatgctctccatgagctcattggcctccttgcattcgacaatgcttcctacaacagccttcttgatgcctggaagcaatggctcgccatgtggaccgcccagggacacgaagggagcgtagcgctgctgctggttcgcacagtggagatatgctccggccggaggcgtagcgcctctgccaccgacgatggccaagcacacagcctctccgagtactcccagctcgagcagctcacgtcctcggtatgcagcaagcttgctgcagcaggcaccggagatggagacgacctttccccggcaagtgtggaggacgcagcagatcgccaccgtgtggatctggagatgcagacgttggctcggtgcgttctccggagccgcagcagtatcgacgcagtgaccaggcagacgtttctccatgtcgcgaggagcttctattacgtcgctcattgctcagctcgaacggttgatgcccacatctccaaggtcttgttcgaggatgtcgtgtagccaccgtttgggcctcgttttgtatctttaaagcagtgtttggttccagccagatttagtctcggccaaatcaaatgtttgaatggtaattacatgtattaaatatagtctaattataaaactaattacatatataaagactaaaagacgagataaatctact

SEQ ID NO: 4467 - DNA, 1673 bp, Zea Mays
cgcgatcggcccaaagtgggtctggactcgcacgagtacccctcgtgcgccgcatgttcaatgttgctcgcttcacctgctctgtcgccgccgaacaccgccgccaggctccccctcctcactgcactgaacgaaaaacggcagcaagccgcccgcccacgcccacgcccacgcccacgccccgcccaccgacccgacaaaaatgccggggatgttggcggcgcagtttacggctctctctctatcccagtcaccttcgccacagtccagcttacgccttgccatccgcccttcgctggcggcgagggcccgctttgtcgctccgcggacagcagcctctgcggccgccgtatccgctaaaccggcggcggtttcgtctcccctaattgaggaccgcactgtcgtccgtatcgggctccccagcaagggccgcatggccgagcaaaccctaagcctcctcaagattccaaatttggaggtttggtttcaaaggcctaaggacattgttcgtaaacttcagtcaggcgatcttgaccttggtgttgtgggttttgacatagttagtgaatatggaaacggcaatgaggatttagtggtcgttcatgatgctcttgagtttggacattgtcgtttgtcccttgcggtacctaaggaaggcatttttgagaacatacatactatggaagatttgctaaagatgactgaatggacagaagaaaggccactacgtgttgttactggatttggatatctaggcaataagttcttaagagagaaaggttttaagcatgttcgttttttatctgccgatggagctcttgagtcatatcctcctatgggtatggctgatgctattgtggatctcgtgagtagcggaacgaccttgcgtgagaataacctaaaggaaattgatggtggagtagttctggaaagccaggccactcttgtagcaagtaggaaatctctgcacaagcgtaaaggtgtgctggaggttactcatgagttgcttgaaagattagaagctcacctaagagcaactgcagaattaatggtcaccgcaaacatgaggggcaacagcgcagaagaagtggcagagagagttcttagccaaacatcaatatggggattgcagggcccgactgtaagtcctgtctatcgcagacgtgatggaaaagttgatgtggaatactatgccattaatgtggttgttccacagaagttgctttacaaatctatccaacaactgagatcaattggtggcagtggagtcttggtaacaaagctgacctacatattcgacgaggagacgccaaggtggcgcaatctcctctcggagctggggttgtaacttgggcgcatggtcaacttcgggtctcttctacaagttcccatatgtactgcaccacattcgtttgtcagtaccgaagcatgtaaacccatatgcagaagtgagaccgtgtggtatctgttttgtacctcttcgcttcaggaaattttggcctgtatcttgaccatctgagatgtattgatagagttgggtaatgctgttgggcgtatgtgtatttcttgtgcggttgtgcctgacttctcttgccggggcactgaataatcggccatgtttgaataaagaaagccggtatggttctcattcatgaccctctgctaaatttgca

SEQ ID NO: 4468 - DNA, 882 bp, Zea Mays
cctcgctctggaaggaaggcccattcgtgctggaggaatcctcgcccaaaatccatagctgtcgcaccaccttccatccttggcagttggcacccccttcggcagcgccccccttctagcccccttccaactttgacgcccgcgtcagacggacaacgcacgatgcaagcccgagacccctccctccccacgccgccacccaccatgccctctccctcccctcacagccgtccctctccccaccccctggccccaccgcactaaacagcagcgacacacccgtccctaccccaaggaatcaagaggtcaatccccctgtgcttcgaccattctggaccgtatgagtaaagattccattgcgaaggaggtggcggaggcgcaatcggtactaacagtggacgccgtgtctgctgtattgtcaaaaacttttcatgcaaaacaaggagcggctcgttcatgtcctgaaggggattacggtcggaatagagaagtgccaagcgacaccactatctcaggaagtgttgattgtatggggagaccacaaccagttgttcctggtggaggcgtttgcagttcataggactctgaattggagcgctagactggaggtcatatagaagacaagccatgttcctcagctggaggattcgacttgcttcaacaaggacaaaggtctcgtcggagataaggagaggatctgcatttgacaccaatatgcggaacctcgtgcccctgcctcttttggctcctccttctgccctgtccgagcgatggtgcccagaaacaaaggtagcccattattggtccgaacaaatatcaatatagccaattaaataatatatgtgtcgttgcaacgcacgagtctgatactagtaactaatt

SEQ ID NO: 4469 - DNA, 1122 bp, Zea Mays
caccttttcgccaccgccccgtcctgaatctcgccccccgccgtggatctcgcgccagccatgctcgccaatctcggctatgcccgccaatttcggctagcccccgttgtaccctcgcttaccctcgcaccctctcacacatgcgcatggaagtagcctcctcgtgttggaataaaggcccccctcgctctggaaggaaggcccattcgtgctggaggaatcctcgcccaaaatccatagctgtcgcaccaccttccatccttggcagttggcacccccttcggcagcgccccccttctagcccccttccaactttgacgcccgcgtcagacggacaacgcacgatgcaagcccgagacccctccctccccacgccgccacccaccatgccctctccctcccctcacagccgtccctctccccaccccctggccccaccgcactaaacagcagcgacacacccgtccctaccccaaggaatcaagaggtcaatccccctgtgcttcgaccattctggaccgtatgagtaaagattccattgcgaaggaggtggcggaggcgcaatcggtactaacagtggacgccgtgtctgctgtattgtcaaaaacttttcatgcaaaacaaggagcggctcgttcatgtcctgaaggggattacggtcggaatagagaagtgccaagcgacaccactatctcaggaagtgttgattgtatggggagaccacaaccagttgttcctggtggaggcgtttgcagttcataggactctgaattggagcgctagactggaggtcatatagaagacaagccatgttcctcagctggaggattcgacttgcttcaacaaggtcatcctggactttctcaaaaagcctaatctgtcggttaatggtagctcgcaataaggacaaaggtctcgtcggagataaggagaggatctgcatttgacaccaatatgcggaacctcgtgcccctgcctcttttggctcctccttctgccctgtccgagcgatggtgcccagaaacaaaggtagcccattattggtccgaacaaatatcaatatagccaattaaataatatatgtgtcgttgcaacgcacgagtctgatactagtaactaatt

SEQ ID NO: 4470 - DNA, 1564 bp, Zea Mays
cgccttcctttgggcgtccgtgcgaaataaatgaagaaggcacatattattccatagatctcggaggaacaaactttagagtgctgaaagttgaagttggtgatgggtctgtggtcactcgccgtaaggtcgagcttcccatccctgaggaattgattaagggagttattcaactttgttgccgtgaccctaaaggagttcgtagaagcagaagatggtaaagacgaacaaagggcacttggtttcacattttctttcccagtcagacaaacatcagtatcttcagggtccttaattaggtggaccaaagggtttttgattgaagatgtggttgggaaagatgtggctcaatgcttaaatgaagctcttgctaggagtggactaaatgtgcgagttactgcactggtgaatgacactgtggggacgttagctctaggtcattatcacgatgaggatacagtggctgctgtgataatcggtgctggcaccaatgcttgctatatcgaacgcactgatgcaattattaaatgtcagggtcttcttacaaactctggtggcatggttgtaaacatggaatggggcaatttctggtcatcacatttgccaagaactccttatgacatctcccttgatgatgagacgcaaaatcgcaatgatcaggggtttgaaaaaatgatatctgggatttatcttggggaaattgcaaggctggtgctgcatcgaatggctctagaatcagatgtctttggtgatgccgctgataatctatccacccccttcacattgagcacaccacttctggctgcaattcgcaaggacgattcaccagatctgagcgaagtcagaaggatattgcaagaccatctgaagataccggacactcctctgaaaactcggaggctagtcgtcaaagtctgcgacatcgtcacccggagagctgcccgcctagccgccgctggcattgttgggatactgaaaaagctgggtcgggatgggagcggcattgcctcaagcgggagaacgcgagggcagctgaggcggacggtggtggcgatcgagggtggcctatatgagggctacccggagttcagggagtacctagatgaagccctggtggagatcttgggggaggaggtggcgcggacggtgacactggaggtgacagtggatgggtctggggccggcgctgccctcctcgccgccgtacattcgtcgaatagacagcaaggttccatatagggagaagggaagatggtgatacagcccctctgtgcaaatgtaaaaagggatattatttgatatctatattcatatatataaaatctggtcttgtgcagagaaatacctgttctcctatctcaagctcttatcactcttctgccttgctcttgtggatgtaggcgttgctgtgtactaggtttacctttttttttcagtgtggaagggaattatgattctttgtaagtccgagttgctgatgaactgatcttgtgaccaaaatggcaaaatgtcatgagtcatgacaagctgagataaccattttttttttctaatgttggacgca

SEQ ID NO: 4471 - DNA, 2178 bp, Zea Mays
aacgggcaaggccagcgccaggccacgctcttccctttcgcttgcccctgcccctctcccctatttctctatttctttccccctctcgcctcgccgcgcctccccttctctctctctcccccctttcccccactactagccgcccctccctcctcctcccttcaacacccccgctcggcgccgcttcgcgccggtctcattcgcccgccattccgccgcgcgccgccgccagggcgccgcgtcccgggcacgcgcgcgtgcggtgcgggcgctggcgcgggcgccaggagagagagggagggaggtagcgaccgcccctgcccccggccccccggggatgctgccgtgatcgccgccgtgcgcctggagccggggggatggggcgggtcgggctcggcgtggcggcgggctgcgcggccgccacgtgcgcgatcgccgccgcgctggtggcgcgccgggcggcggcgcggtcgcggtggcgccgcgccgtcgcgctgctcagggagttcgaggacggctgcgccacgccgccgccgcgcctgcgccaggtcgtcgacgccatggtcgtcgagatgcacgccggcctcgcgtccgacggcggcagcaagctcaagatgctgctcaccttcgtcgacgcgctccccgccggaaatgaagaaggcacatattattccatagatctcggaggaacaaactttagagtgctgaaagttgaagttggtgatgggtctgtggtcactcgccgtaaggtcgagcttcccatccctgaggaattgattaagggtacaattgaggagttattcaactttgttgccgtgaccctaaaggagttcgtagaagcagaagatggtaaagacgaacaaagggcacttggtttcacattttctttcccagtcagacaaacatcagtatcttcagggtccttaattaggtggaccaaagggtttttgattgaagatgtggttgggaaagatgtggctcaatgcttaaatgaagctcttgctaggagtggactaaatgtgaatgacactgtggggacgttagctctaggtcattatcacgatgaggatacagtggctgctgtgataatcggtgctggcaccaatgcttgctatatcgaacgcactgatgcaattattaaatgtcagggtcttcttacaaactctggtggcatggttgtaaacatggaatggggcaatttctggtcatcacatttgccaagaactccttatgacatctcccttgatgatgagacgcaaaatcgcaatgatcaggggtttgaaaaaatgatatctgggatttatcttggggaaattgcaaggctggtgctgcatcgaatggctctagaatcagatgtctttggtgatgccgctgataatctatccacccccttcacattgagcacaccacttctggctgcaattcgcaaggacgattcaccagatctgagcgaagtcagaaggatattgcaagaccatctgaagataccggacactcctctgaaaactcggaggctagtcgtcaaagtctgcgacatcgtcacccggagagctgcccgcctagccgccgctggcattgttgggatactgaaaaagctgggtcgggatgggagcggcattgcctcaagcgggagaacgcgagggcagctgaggcggacggtggtggcgatcgagggtggcctatatgagggctacccggagttcagggagtacctagatgaagccctggtggagatcttgggggaggaggtggcgcggacggtgacactggaggtgacagtggatgggtctggggccggcgctgccctcctcgccgccgtacattcgtcgaatagacagcaaggttccatatagggagaagggaagatggtgatacagcccctctgtgcaaatgtaaaaagggatattatttgatatctatattcatatatataaaatctggtcttgtgcagagaaatacctgttctcctatctcaagctcttatcactcttctgccttgctcttgtggatgtaggcgttgctgtgtactaggtttacctttttttttcagtgtggaagggaattatgattctttgtaagtccgagttgctgatgaactgatcttgtgaccaaaatggcaaaatgtcatgagtcatgacaagctgagataaccattttttttttctaatgttggacgca

SEQ ID NO: 4472 - DNA, 1479 bp, Zea Mays
gcccggcccactgacttctaggaacaaaaagaagaggtgaaaatccatttcctattttcctcacgtattatcctcttgcttgttcgtccggttcttcgccctcgccgcgcgggactaccaatccaaactggcgacgaccctgctgccaccccacagcagatttgaggagcggacgcccgtttaaatggctattggagtcccatccatggagctccaccgctcctcaccgttgctctcgggtggccgaggaggaaatacatgcctacagaagaagcccttctttgtccaagcaaagagactagtggggatggagaaagcaagtacgaggccaggaacacaagagtctggacagacaaagaaaagagcacccctggttcgtggaactgttagcccacctcttccagtaccaggaaacatacctcggcctccttatgtcggcacagaatatgtaccagagatagcaaaagagatacaaatgcatgacaaagagggcattgtccacatgagagctgcttgcgagctcgcggctcgtgttcttgactatgcaggaacgttagtgaaatgcacaagatgatcatcgatgctggagcctatccatcaccacttggatatggtgggtttccaaaaagtgtatgcacctcagtgaatgagtgcatgtgccatggaattcctgattcacgcgagctacaggatggagacataattaacattgatgtcactgtctacttgaatggttatcatggggatacctcaaaaacatttctttgtggagaagtcgatgaagccagtaaacgacttgtgaaggttactgaagagtgcttgctcaggggcatatcaacatgcaaacatggtaccagctttaagaagattggcagaagaataagtgagcatgctgagaggaacggttttggtgttgtggagtgttttgttgggcatggagtcggcagggtatttcactcagaaccaattatctatcaccagaggaacaacagaccgggccagatgattgaagggcagactttcacaatagagccgatcatatcgatggggagcatcgagtgcgacatgtgggacgacggctggactgccgtgacgacggacggcagcttggcggcgcagttcgagcacaccatactgatcaccaggaccggagccgagatcctcaccaagtgctaggaggaaaggaaatcgcatgtgcccgatagccgacggtaggtaatctgtattcgtgaggtggtgaggatgcttgaggtgacctattttgtctcgcaaaatgggcgtgctacagaatagtgaagaaaagggttgagagattgcaaatggcaggtttgggcaaagaggaccaagttctaggcgtccgggacacgactctgtgtctggcgttcccttctgttgtcgacatcccgtggttcagttgaggccatgtctcgtgacgttctcctcccgccagttggcccaccgcttgccgttggcgcgttg

SEQ ID NO: 4473 - DNA, 967 bp, Zea Mays
aattgctctacgtgaacgaagcttctggaaactcgctggcccgatggcatcggaggccgcgattgctcgtgcgcagtgcctccttcgcttccgccgctggtcgccactgccgcttcttcctctcccttcccctcccgctaccacacgagcagcttcctgccgccgcagcgtacgcatggcctcgtcgctgttcaagcagtggctgcggaacctgcagtcggagaagggcgtcctcacctacgggaggctgagcctcacgcgggttctcatccagggcgttgacatgttcgggaaacgggtgggctttctcaagttcaaggctgatatcgtggacgaggaaaccaaaaccaaggtggaagaagagactggtataaagctgaatatagaagacatggttgatcttacggcactgctggaccctgctactggaggtcgaatgctaccatcaccgggtggctgcgacgaagagattggcctgttcctgtacaggggccgcgttgacgaggagaccataagatcgctccaggggaaggaaaccgggctgcgcgaccacggtgagctgatcaagctgcgcgtggttccgtacagcgagctctggcggtcgaccggcgacgcgaaagcactctccgcgatagccctgtacgagatggccaagagggaaggcctgctgccgcagccgacgccgtcggccaacttgtgaagacctgctagcactttaaaacagtggtggccgtcatgcctgtaaaatggaaggaggaacgtcactcgcgaaaccaaatcatatatatctctatctcttcgtttggtataacgcgcttaagcttgtctgtttgtgttatgtatacatatactaataatttaaaaataaaagtataatcgtgtttaaataaatatttcatttaatcctatataatatatagaatgtacgatcaattgactagtaaacatgaacatcgagtttaaagtt

SEQ ID NO: 4474 - DNA, 396 bp, Zea Mays
tttaccttatacaagttttggctttaaacccctttcccctcgcttgccgctgctccgccgtcgccgcgccccgaccagcatcggcgaatacctcccgcgcactcaaccgatggttgtagttgaatgtaatcgattggtgttccctggcaccatctttgtctgagttccgattctggaattgcgggattggttggtcgggtccggtgagcacgctcggggcggcgccggccgatggcggagctggtggggccgcgcgtctacagttgctgcaactgccggaacaacgtctgcctccacgacgacatcctctcaaaggcttttcaggcacttgccaagttgaaaaatctgataagttggtgctcagctaaaggaacaaaatttgcgtgttcaagcccc

SEQ ID NO: 4475 - DNA, 819 bp, Zea Mays
tttaccttatacaagttttggctttaaacccctttcccctcgcttgccgctgctccgccgtcgccgcgccccgaccagcatcggcgaatacctcccgcgcactcaaccgatggtctcactacctacgactgttcccattcccgagctccgattcggggctcgacggttcctggcccctttgtttcttggataaccgatgcaatttttggttctggataggttgtagttgaatgtaatcgattggtgttccctggcaccatctttgtctgagttccgattctggaattgcgggattggttggtcgggtccggtgagcacgctcggggcggcgccggccgatggcggagctggtggggccgcgcgtctacagttgctgcaactgccggaacaacgtctgcctccacgacgacatcctctcaaaggcttttcagttgtgggggcgaaggaggatcggcaactaacgatagggctacacaaggttgctgatatctactgtagtgattgccgtgaggtgttgggctggaagtatgagagagcatatgaagaaacgcagaaatacaaggaaagttcatatttgagaagtcaaagattgtcaaagaaaactggtagtgtccaaattgtgactcagcaaacgttctggtgaagatgaaatgttataatatgcttttggatgtctgcgtccttgtagatagctgtcctccatggattgcagcccggaagtgctttaatgttcttgttgtagtgacaattgtaaagcacacttatttctgttcatttgtgtgaataagatactgcatatggttatttggccttgaaaca

SEQ ID NO: 4476 - DNA, 1847 bp, Zea Mays
tcagagcaattagcctacatctttcgcggattctgtagttttcccagctagagattagcagagcggcatgaataactcaaacacaggtgttgcagtttccgtcatcgaaattaaaggatatacatacatatctctttgttcctgcagcaagctgcaaagagaacgcttgttggtagaacaaagtatatgcccccatgacaccgagtccaagcagcaggctcgagcatgagctggagaagcccccacatccgcatgggctggatgcccatttcatgaggaggcttgtgagccggagctgggaggaatccaggctgctatggcgccttgccttcccggcgctcctgacggaggtgtttcagttctccatcggtttcgtcaccaccgccttcgttgggcacctcggagaggtggagctcgcggctgtcagcgtcgtggagaacatcttggattcctctgcctatggggtcctgtttggcatgggcagcgcgctggacacgctgagcgggcaggccgtcggcgccgggcagctggacaggctgggcacctacacgcagcagtcgtggatcatctgcggcgccaccgcgctggcgctggcgccggcgtacgccttcgccccgcggctcctgcactcgttcctccaccagcccgaccacgtgtcgcgcgccgccgggccgtacgcccgctgggcgatcccgaggctgttcgcgcacgccgtgaacataccgctcctcatgttcttccaggcccagagcaggatctgggccgtggcggccatctccggcgcggtcctcggcgtgcacgccgcgctcacctacgtcgccgtcacgaggctcgggtacggcatgcccggggccgccgtcgccggggacatctcccactggctcgtcgtcgccgcgcagttcgcctacatgaccggcggccgcttccccgacgcgtggaagggcttcaccgtgcgtgcgttcgacaacctcggcgccttcgtcaagctgtcgctcggcttggagttttggtactacaccacgcttctcgtcctcgtgggtctcctcaaacatggcaaactccaaatcgacatcatgtcagtctgcctcaacttcgagttcttgactgtaatggttgcgctgggcttcagcacagcaatcgggattagagtgtccaacgagctgggtgcaaacaggcccaaggaggcaaagtttgcagtgcttgtggcagtatcgacatccatgttcatgggagcagtctttatgtgcgtcgtcctcatctggaggacgagcctgccaaagctcttcagcgacagcgaggaggtgaaacgtggagcttccaagctggggcatctcctcgctctcaccgtatgcgtcagcagcatctggcctgtgctatcaggcgtggccgtaggagctgggtggcaagtgcgtgtggcgttcataaacgtcggttgctactacctagtgggcattccgatgggtatcctgcttgggttcaagctaaaacacggcacaatgggcatatggatgggcatgttgacaggcacgtttctccaaatgtcaatacttctcgccactatcttcacaacaaagtgggataaacaggccgcactggcagaagtgagaatggcggagtggggaggaaagaacgagaacctaacactgacggaaacaacacatacagatgatctgatggctcctgtgcaagagaaaatgttggcgaatgacagccagaagaatgtagaattagtgcgcatagattgatcacagagtatattcatttcagctcgagacagtatttcattgtttactaggatgatagtatgaatctattttttttataaataatctctccgttccaaacta

SEQ ID NO: 4477 - DNA, 1893 bp, Zea Mays
atctttgtggatatatggacggagaaattataggatatcagagcaattagcctacatctttcgcggattctgtagttttcccagctagagattagcagagcggcatgaataactcaaacacaggtgttgcagtttccgtcatcgaaattaaaggatatacatacatatctctttgttcctgcagcaagctgcaaagagaacgcttgttggtagaacaaagtatatgcccccatgacaccgagtccaagcagcaggctcgagcatgagctggagaagcccccacatccgcatgggctggatgcccatttcatgaggaggcttgtgagccggagctgggaggaatccaggctgctatggcgccttgccttcccggcgctcctgacggaggtgtttcagttctccatcggtttcgtcaccaccgccttcgttgggcacctcggagaggtggagctcgcggctgtcagcgtcgtggagaacatcttggattcctctgcctatggggtcctgtttggcatgggcagcgcgctggacacgctgagcgggcaggccgtcggcgccgggcagctggacaggctgggcacctacacgcagcagtcgtggatcatctgcggcgccaccgcgctggcgctggcgccggcgtacgccttcgccccgcggctcctgcactcgttcctccaccagcccgaccacgtgtcgcgcgccgccgggccgtacgcccgctgggcgatcccgaggctgttcgcgcacgccgtgaacataccgctcctcatgttcttccaggcccagagcaggatctgggccgtggcggccatctccggcgcggtcctcggcgtgcacgccgcgctcacctacgtcgccgtcacgaggctcgggtacggcatgcccggggccgccgtcgccggggacatctcccactggctcgtcgtcgccgcgcagttcgcctacatgaccggcggccgcttccccgacgcgtggaagggcttcaccgtgcgtgcgttcgacaacctcggcgccttcgtcaagctgtcgctcgggtccgccgtcatgatctgcttggagttttggtactacaccacgcttctcgtcctcgtgggtctcctcaaacatggcaaactccaaatcgacatcatcctcaacttcgagttcttgactgtaatggttgcgctgggcttcagcacagcaatcgggattagagtgtccaacgagctgggtgcaaacaggcccaaggaggcaaagtttgcagtgcttgtggcagtatcgacatccatgttcatgggagcagtctttatgtgcgtcgtcctcatctggaggacgagcctgccaaagctcttcagcgacagcgaggaggtgaaacgtggagcttccaagctggggcatctcctcgctctcaccgtatgcgtcagcagcatctggcctgtgctatcaggcgtggccgtaggagctgggtggcaagtgcgtgtggcgttcataaacgtcggttgctactacctagtgggcattccgatgggtatcctgcttgggttcaagctaaaacacggcacaatgggcatatggatgggcatgttgacaggcacgtttctccaaatgtcaatacttctcgccactatcttcacaacaaagtgggataaacaggccgcactggcagaagtgagaatggcggagtggggaggaaagaacgagaacctaacactgacggaaacaacacatacagatgatctgatggctcctgtgcaagagaaaatgttggcgaatgacagccagaagaatgtagaattagtgcgcatagattgatcacagagtatattcatttcagctcgagacagtatttcattgtttactaggatgatagtatgaatctattttttttataaataatctctccgttccaaacta

SEQ ID NO: 4478 - DNA, 3107 bp, Zea Mays
caaatatcccaaagacggatccgacacacttccgaattccgatccacccacttcatcaccaaggccgtcgtctctccccacgccggccgaacggatggcggcggcgccgactgcggatgccatggacgtcgacgcgccggctaggacgctgactacctctccggccaccaagttgcgctcccctcacgacctcctggcagagacacgcgcctccatcgagaaagtcgcagcccggatactcgccatcaagaaagacggcgcccccaagtcggagctccgcgagcttgtcactcagatgtctctgcacctcgtcacgctacgccaagtgaacagagagatactgatggaggaggacaaggtcaaggcggagacggaggccgcgaaggcgccggtggactccacgacgctgcagctgcataacctgttgtacgagaagaaccactacgtgaaggccataagagcgtgtcttgactttcagacgaagtatccggggatagagcttgtgcccgaggaggagttccagcgttccgcgcccgcagacatccttgagaagaccctcgctgccgacgcctcccacgacctcatgctcaagcgcctcaactttgagctcgtccagaggaaagagttatgcaagctacatgagaaattaggacaacagaggggcagcttgctggagacaattgctaatcagaaaaagtttctttcaagcctgccatcacatttgaaatcattgaagaaagcatcactgccagtgcagcaacagttggggatgcaacataccaagaaactaaagcagcaccatgctgctgagttacttcctactccgctttatatagcatacactcagctgctagggcagaaagaagcatttggagagaatattgaagtagagatcgcgggaagcacaaaggatgcccaaatatttgctcaacaacaagccaagaaggaaaacagcactctttcaagtggcgacaacagaatggatgatgatgtgattgatgatgaagaagatgctcagagaagaagatcaagatccaaaaagaatgtggtgaaggaagctaataatccagcagtggcctatcaacttcacccacttaaaattatacttcatgtatatgatactgaagattctggtagcaaacgccgtaaactcatcaccctgaggtttgaatacttggcaaagttgaatgttgtttgtgtcggaattgaagattcagagggtctggacagtaatatcttgtccaacctatttccagatgacactggtttagatctgcctcaccagcagggatatgttttgttactacatctgtatctagtatcttcttggggcctctcatttacgtcagctgaaatagtgacttgtcaattttctcagatggctaagatttatgttggggaggttccaaacttcagcgacaaggattcaaggccatacaagtgggcacaacatttaggtggtatcgactttttgcctgaagtgcctccatctgttggggatgattctagcagagcattaaacactgctgatttgtcatctgggcttgctctgtaccgtcagcagaaccgtgcacagactattttgcagaggatccgcttgcggaaagttgcacagatggctcttatgtggcaacttgattatttgacaaagctgaagtggcctcgaatagaacataagaatgcaccatgggcatcacgcaacccactgtgcagtctacatagttggtcattgacaagttatcctgagtcatctcgttctattttgatgctaagtggtgctgcaagcaatgttgacagtgatgtagagagatctgtgacaaactgggaagaaactgagagtatcagggaggatggggagcttccagttgttattcctgctgagaatgagccaaatggttctacaattttgcaacctgaggtgtcagctgagatccggagccattctagaggcttatctcttatatcaaagagtgcaacaccatctaagctaagcatctcacgaagttttggtagaaatgaggacgatcttgatctcttgatgtatagcgacagcgagttggaggaccagccctgcattcttgacgaaactgaaaaagctactagcccgattagagacagattctgggaggagtatgcttccaaggaattcaccatggtcctgagtaaaactatgaagaatggtctaaaagtcatgctggaagccaaggttaagataagtatggagtatcctcttagacctccccttttcagattacgtttgctctcagaaaagtctgaaattttgaagtggcacaatgatcttcgtgcaatggaagctgaggtaaatcttcacatccttcgaagcatacctctatcatatgaggattatatattgactcaccaagttatgtgcctggctatgctgtttgacatgcattttgatgaggaaaacgagaaaagaaaagtcacttcagtgatcgatgttggtctttgcaaacctgttagtggaactatgcttactagatcggttaggggtagagacagaaggcaaactatttattggagaggtgctgattgctcttccagttacttgtagagtatgtgcgatcttgattggtcttggttgagttcagcattgactaccctctggagaaatcatttctgggcattggagaactgcatatataacttaagagctgacacagatccccttgtttatcactactgtgtcttgacagcaatagctgggaagatttctctgtgcccatactgactcgagaaactatttacaatgctgatggtaactacacttttatatgcccaggaagaaaagctataggtgcagttaatcaccacaaggcttttactgcatgaatattgtgctatatgtttcaagaagcctttctgctagttcctattttcttggttgttcaaattggtatcctggatctacccagaacatttccaaccgcagttaaatcctggaagcttgcagcattcttttgcaataaacagagcttgcttacccggatgaagatgttggaggacccagcttttaaccaaccttagttatctcaatcgcctatggttggccgacagctatgagaggctgtcgaagtagaggcaga

SEQ ID NO: 4479 - DNA, 3173 bp, Zea Mays
agaacactagccgtccgatcacaacgacatattatctctccaagctccgtccgccgcaccgtgccacccgcgcggcccgcctgctacaccccatccggccgtccccaagccgggagcggaggcgcaaaaccctccttccgctgctccggcgccatgggcggcgcctccaagctgctctcctccttcctcctcacctcttccccgctccgcctccgacccgctactgccgccgccgccgcgctgttcctatccccgcccgcggcggcctcgcgccgcctgttcctgctctccttaccctccccgcaccgtaccctctacatctcgtccgcttccgcctcccttccgcacggctccagctcggcctgcccgccgccaccgctccgagcgcctttccccgagtggtcccgcctcgtcgaccgacttgccgccaccggatacggctccggcctgcccttttccgctgacgatctcgccctcgtgtccggatgcgtcctgtcggacggggagcaggccgctgtctccacctgcctcgccttcgcgcgcgaccggcctgacctcctgagttcgcttcaaaggaaggacgtggaggtcctggtgggcaatgtggcgccgtctctgttcaaggacggggaggcatcaggacagcggcttcggcgctaccttgctggggaagaaaccgacgtcactgtttcagagagagctggaactgttgatattgttcgatatctgctaagttacatatacggttcttctgacatctgctcagaagacaaggaactcactgatttggccgtgagaaatatcatggttgagttagtgagttttagtgctctttcccagtcttccacttctgtggaattaactcccaaccaaatttgctcgagtcagcatgaacaattttccaggcctccagggcaaaatatcgaaatgaagcgaggtgattggatttgcacaagcttcatgaacttcgcaagaaacgttaggtgccttgagtgcaatgagcagaggccaaagaagatgttgactggtggagagtgggaatgccctcagtgtgatttctataactatgggaggaatatgtcatgcttaaaatgtgattgcaagaggccagcaacaatcccaccgcatcctacatctgttggtgctgatttaggtggtgtggtacagcagcttctcaaggtaacaacaagtgttggtaaatctgaaattgagagaaaacttgctgaaaatgatgaaaaggcagagagatggttgagcaaagtatctcaacttcatgattcagcagacttaagtagtctagcagaagatgaggactttcctgagattatgcctatgcgcaagggggtgaataagtttgtggttagcacacgcaaaacaccactggagagaaggcttgcaaatgcacagtacagcagtaacaatatcctcacattgtccgacccaaagataagtcaaactttggacaggatacttgggagttcagctcctactgcagccccaaacaatcaatctgttactagtgatgcaactatggaagctccgaagaaatcaatagatcacctcagtggcattgaccctgttccctttgagcccctgtctgcagatctctttgctaaaccagagagtaatgatcgacagagaaatgagaatgaaaaaaacaatgtagaagatggcagttctatggcaaataatacagtgcctttacctgagaggcgaagtatggaatcattagatactgctgagaaatggtccgagaaagtagcagaacttgacaatgtaaaggattctccaagtgcaatttccgatgaaaattttcctgagattatgccaataaggaaaggtgaaaatcgatttgttgttagtaagaaaaaagatcgctcattgacatcacagcagtacaaaaggcgcagtattctcgagcaggcagacagttctgattttgtcccatttgttccttttcctcctggctactttggcaagaaagatacgccaatagagagtactacacacacaggaattatgtcaggagacggtcagccaaaaggtaacctgaataatgagaactggaacaggaattactatcaatatcaatcacaatctcaagaatttaggcctagtggtaatgcatatactggctctgggaacacaggcaactccgaggggaacattaatgggagtaggggcgaatctacttaccatgaagctaactttgaaaagcgatcttattataactcaggttatagcaacaacggttattggagcagcgataacaataacagcaacaatgcctggagtgacaactctaattataacaacaataatgcttggagtggtaacaattcctataacgggtgtattaggaacgacaataccagctgcaacagcaatcgtgattataactacaatgatacatggagtgccagcagcaacagtgcatggagcagcagcaacaacaataaccagagtggtccatttgctgacaatagcaatgccactagaagcagtagttccgtgaatgctaatcactcggttcacagctcaggttatggaggaaactcgaacagaggttatactggaaagagcttggaaggatctgctgtgaaggatcctgatcctctagacatgtctgaggaagctaaggctgagagatggtttaggagggcagctcagataaaggacatctctgagctggcgaatattcccgacgaggacttccctgagataatgccgatgaggaagggggtgaatagattcgtcgtgagtaagaggaagacgccattggagaggagattaacatccccgcaatacagaaggaacctgccaatcgttagttctgaaacggacaaagatgccaactgaaaacagaggtatgattgcctgcataccacaatcttaactgtactgcgacgcaccatttttacaccaaggtattactctttgtgacgataagggagcaatcagaaacaagaatcatcaagaataatgctccaggaaggtttttgtacggtaaaaattatgtccgcaatgacctagggtttgctggattgtgttcgctacatgtacactatacacgtttacgttgtactaagaaccttttaacatgcaacccgtgggtgcgcggcattatcgttttttttttgtggcttgtctgagattacatgttgtcggcgttt

SEQ ID NO: 4480 - DNA, 1406 bp, Zea Mays
tgattcccttttagttaaaattccacgacaataatattcgctaagaatttcttggcagcgatggaaatatttatttgtaacatgccaatcaaaagctatggtattgttttcatcttattgggttatcttttgcttatttagatcaaggcgatcatggaagccaaatgttcaggagaagcgtcttttcagctatgttcatgatcagcacattagagtcaaggttaccacacacgcacttcgatgtattgacaaagctggtgggatagatgaatacctcctgaagacaccttacaataaaatggataccgagatggggatagtgtggaaagcaaatattgaaaagatgtattcagatttggctgaaatagaagtaggcttcttccctcccgaggttgaggctaagattaaaaagggcttagacgaggttcgcgctgcgaagatagacttttgtagggaaggaagacgagctttggcaaggcaaagccagctagaagcaagtagtgttggtgatgaccaaacgagtgaagtcatagatacaaatgaagaggtatctgatgctgctgctaaagtctgagcctaaacctatgtgcctgtcttgaatgatcagaggaggcagcaaatcattggatgcacctgggcaaataatggaaggcttgctacttgcgcactaactgtacccccttttcgggagcagcagtgtatgttaagccagcatatcttgtatatcaatgtcttgccgttgtaaagcagcttttatgtgttggaaactttgtacaattattgagatctcaaaagcctgaattgtgggggtagtttgtcttttagaatctatcattttatgcagcttaactgaattgtcgaaataataatgctaaagtagctagaggtctgacattctagctcatttctgttccactcctatgttgcttaactgaatttgtagggccgagtgatctgggtacagttgttattttgtttttgcggataactgtgacacgatttctatttgcttcaactcatctcatggccaatgttcatctcaggcgcggaacttccaatttgacgccttccgatatatattacgtggatcacttgttaaggctgctggaaaatgtttctgatgttccatccgcccgcaaaggctagcttggcgaggacgtcgccgagcgcatctttggttgctgcgaagtatttctcggcctccggggtgctcttgatctttgcggcagtagccacaacgacaccgtggaatgtcttcgcagatttgaaccgagaatctgcaactcaaatgcctagagttagagttagagctaagctgccgatggttcagagcatgttcatagaactgatgaaacattcgaatttcataaggagcactctgcttttccgcagaaaaaaaaaggaaa

SEQ ID NO: 4481 - DNA, 1550 bp, Zea Mays
ggaaatctcacacctgctgcccctcccaaattcccttctccctcacgtctctttctctccccaagccgcctcctccctgccgttccgtggagcaccaggccagtgccgttccgatggtcattccaagccagtgccgttctcctttggctgtccctgctccagccgtgagctcacccaggccacggcctcgtcgaaccgcacagcccctgcgctccttccccagccgcgcttagcccagccctccctgctcgatctccttcgagccgtaacggctccctggcgtgtccggctccctgcccctctccatggcgtcgcccagctctagctcgccccccctctgatctgtgcgcaggggtttcttccatggcgagctcccctgcaaacttcatctagccgccgaccgagtttccttggtggtcgcttacccccagcatcggccagagcttgctgtcattccccaacaaacatgtggttgtaggtgagagatttcagaagtctgttggatgaagaaaagagaagtgaaatttgtgcagcgcccgtcaggtgttaggtttaatagatattgtgtctaccgtgtgagggaatcgcgccagcttcctttgggtttgggactgggagctccatcgctctatggtcacttggtcgtggaagggcttcttattgcagtcatagtgttccagctctccaggaagagctacaaaccaccaaagaagccactcactgaaaaggagattgatgagctatgtgatgagtgggagccagagctgctatgccctccaatcaaggagggggccaaaatagatgctccaacattggaaagtgccgttggaccacatacgattgttgattgttgatggtaaagaagttgtgaactttgcatcagcatgaggtctggagtctagacacagcgttgcaaactgaggtttaatcatcttagcaactacggtatgtgaccctgagcgcgtgattgttgcgaaacaacgaccacctcggtctacaccttaaaggtttgcgtgacatggcttttcatagtgctcaattggatccatcccctgagcataggagaaaagtatcaatttgtacagtggatccaagtattctataaagcatgcatcctccaatttcccacaagcgagaatggcatgatatgatggatgaaatggctgttgcggtcaaatgtctttcaaggatcaattgtctttcaagaaccacacttatgtattggtttgtgtgcagttcaagctctgcaaggtaaggtctgttcagtttggccagaaagtcatcccctacctgaacacctacgacgaccgcaccatccgactccgaccctctcatcaaggccaacgacaccatcaagatcgatctggagaccaacaagatcatggacttcatcaagttgtatttgccatttcatagacttcatcaagttatatacttagttaggctcaatgttaacacaaacagttgatgagcaagtttaaatttagagtacacttatgtatgagttatttgacaatacttatttatgagatattgaatattatttatct

SEQ ID NO: 4482 - DNA, 2096 bp, Zea Mays
caacctttccctctcctctctgtttcatctcgccagctttgcgggaaaagagacaccagggacaagccccgcctcctctcccgagtcctgacgtgccccttttgctccggccccacttcctcgcaaaaccctaacccctcgatctcccaagatggcgtcgcagccgccgccccctgccgcagccgcggcatctggagctccgccgccggcacaagtggtgggcaacgccttcgtgcatcagtactacaacatcttgcaccagtcgccggagctcgtctaccgcttctaccaggaggccagctgcctcgggcgccccgccggcaccggtgccgacggcatggacacggtcaccaccatggacgcgattaacgacaagatcgtgtccatgggtatcgaccgggcggagatcaaggcggtggacgcgcaggaatcgctctgtggcggcgtcagcgtgctcgtcatgggtcatcttacggggaggaacagcgtcagccgccagttcgtgcagtccttcttcctcgcgccgcaggagaagggctactttgtgctcaacgacatactgcgctacgttggggaggggggaggggacgagggggctgagaagcagccagcacctgaggttgctgcggacgcggagacgaccacctctgcccctatcctgagtgccaggtggccgagcctgcacttaatccaaaggaggaagttctgaacggggaggtttgtaactcgctaagtgatgtggagaagcctgttgctgaggaaacgccggttcctgatgtcataaatgaagtgccaaataatgttgcagtggctccaccaatttcatcccctcctgtaccattgaaggaggcaccaaagaagtcatatgcttcaattgtaaaagtcatgaaagaacatcggccattagcacctgcagttccttccagacctgcacccccaataacagagaagcaagcctctcctgcccccactccagttactgaggctccagctttctcccctaatcctcagagcggcggctttcaagatccagaagttgatgcacatgccatatatgtgcgaagtctgccattaaatgccacaccacaacaattagaggaagagttcaagagatttggaaccattaaacatgaaggcatccaagttagaagcaacaagatccaagggttttgctatggctttgtagaatttgaggatgccagtgcagttcaagctgcaatagaggcttctcctgttactattggtgagcggcaatgctttgtcgaagagaaaaggactactggttctcgcggtggtagcaggggaggaaggtttccaccaggtagaggtggtaatttccgaggtgaaggcattagaggccgtggtacatacaatggaggcagagggtacggaaggggcgagttcagttaccgatccgattatggaggccgaggtggcggcaggggtggctcattacacggaggtgatgttggctatcagcgggtcgactactctggcacatccagtggacgtggtgcccgggcaccatcagcggccgctgctatggcaaagtgagttcttggtagctatgagtcggtagtagtttagttttgtggccaccatcacggttgaccaaaagagtggtgtggtgattcgagttcatgtgaggattatgaacaaaagtcaggtcataaattgatgcttccttgttttgtggcaaggcaaagcagtggtgatatcggttactaattgtagaatatacgtctgttgagatgtcctagtatgtctggcttcggtgagcaggcttacttgttgccaaattatagaggtttttttgagatgccagctatttatagtattttattgactgtcgttgaataagttttagggtctagcgctgcaaatatgagtatgatatttttcctgtttctggaatatgcatgcccactcatgtctgggaaatgtctgttccttttatgctgcctcttgccagcagctacattccgtgccagtagaatattggaatgtttgctgtcggaatgttttccgtttggctgagctctatttgcttgtaaaaatgagatttttaattgaaatcttgcattcaataggaaata

SEQ ID NO: 4483 - DNA, 2530 bp, Zea Mays
gcacaagcaaaggcgggggagagagctccgtgcagtcaccgtcgtgttcggaacgagcgagagagcgggagacgagtcgcggcgcctctgctgtgctgtcttcttctccccctctgctctgcttcggctcctcacgcggcctcgccgagacccgcagaacagggggttcagacttcttggtgagagcgatatgagtgtcccaggtcaatgctcatcccagccacaatttatcaccagcgttgggaggagtaaccgctccaatggccccggcactcctcttatcgaaagcatagatgttgatcaaattgttattccagagaaaaacagttggaagaacttattctcatacatagggcctggatttctcgtctcaattgcatatattgatcctggaaactttgagacggatctacaggctggagcacagtacaaatatgagcttctttggatcatacttgttgcatcctgtgctgctcttattattcaatcacttgcagccaggctaggggttgtgacagggaaacatcttgcagagcattgcagggctgagtatcccaaggtcacaaattttgtcttatggattcttgcagaacttgctgttgttgcatgtgacattcctgaagaatcccagtatggtgtggtgttctaataactggactcagcactctaatgctcttattgctgcagcaatatggggtccgtaagctagaatttctgattgcatttctggtgttcttaatagcaacatgtttcttagttgaacttgggtattctaaaccaaatgctccagaagttgttaggggcctttttgttcctgaacttaaaggaaatggagctacaggccttgctatctcattacttggtgctatggtgatgccgcacaatctttttctgcactcagcattagtattgtcaagaaaagtgccacggtctgttcatgggattaaggaggcctgcagattctatacgattgaaagtgcatttgcccttacagttgcttttctcatcaacatatctatcatatctgtcagtggttctgtctgtggttcaggtaatttaaacccagaagatcaagcaaattgcagtgatctggacctaaataaggcttcatttttgttaaagaatgtccttggaaactggagctcaaagttgtttgcagttgctttgttggcatctggtcagagttctacaattacggggacatatgctggacaatatgtcatgcaggtttttggaacttataccttatttcagttctagttcgcaagttgaatggcaggttgttttatgatgcatattactcgaggcatttgatgttgatcagaagtaatcaagcatttgcttgcttgcaacattagtttgtttagctgttagatatgaaaagtacagaaaataaattagtacataactcttagatttgcaatgaacaagcttgggcttatgagtttcagtgccaacctccaaggttctcttggtcagctagattgcagagaaaaaggacagatacggggggtttttagatcttcggatgaaaccctggatacgcaatcttgtcacgaggtccttggctatcctgccaagtttgatcgtgtcaattattggtggttcttcagcagctggccagttgattatcattgcatcgatgatactgtcatttgaactcccttttgctttagttccactccttaaattcaccagcagcaaaacaaagatggggcagcatacaaattcaatattcactgctgtgctgacatggatgatcggctcgtttattgttgtcatcaacacctactttctgataacaagctttgtgaaattgctcgtccagagcgggctgaccaccatttctcaagtattttccggtattttcgggtttttgggcatgctgatttacatagttgcgatcctatacctcgtctttaggaggaacaggaagtccacccagccattgctggagagcgatgctgagcttgcagtatcgggtagcagtgctgatgccggagcagaatgctcgctgggccatttgccccgtgaggacatctccagcatgcaacttccgcagcagcgttcagcttctgatctagattagataacagctgccaggaaaataaatgttttttttgttttttatatagtatagtaattacagaatagggtacgtcaggtattggcttctgttcatcctactgatgatgcttaaggaatgtatacaagaggacggatatctatgctgccaaacaaaaaaatggggcacaaaagaatttagtgcctgtttttgggaagtgatgtgaactgaatcctggaaggggcaaaaaaaaaaaatgttggaatccaattgttgaaaattcttcattctaaacatgaggccgttggtaaaaaatgtctacatgctgtaaacatactatattttgacattattatcacagttaatatatactggacatgctgttttatgtgttgtgcattccagtggctgcaggccttgctcagagctagtttggtgattagagaaatggagaagttctatgta

SEQ ID NO: 4484 - DNA, 2557 bp, Zea Mays
gcacaagcaaaggcgggggagagagctccgtgcagtcaccgtcgtgttcggaacgagcgagagagcgggagacgagtcgcggcgcctctgctgtgctgtcttcttctccccctctgctctgcttcggctcctcacgcggcctcgccgagacccgcagaacagggggttcagacttcttggtgagagcgatatgagtgtcccaggtcaatgctcatcccagccacaatttatcaccagcgttgggaggagtaaccgctccaatggccccggcactcctcttatcgaaagcatagatgttgatcaaattgttattccagagaaaaacagttggaagaacttattctcatacatagggcctggatttctcgtctcaattgcatatattgatcctggaaactttgagacggatctacaggctggagcacagtacaaatatgagcttctttggatcatacttgttgcatcctgtgctgctcttattattcaatcacttgcagccaggctaggggttgtgacagggaaacatcttgcagagcattgcagggctgagtatcccaaggtcacaaattttgtcttatggattcttgcagaacttgctgttgttgcatgtgacattcctgaagtaattggaactgcttttgctctaaacatgctgttcagaatcccagtatggtgtggtgttctaataactggactcagcactctaatgctcttattgctgcagcaatatggggtccgtaagctagaatttctgattgcatttctggtgttcttaatagcaacatgtttcttagttgaacttgggtattctaaaccaaatgctccagaagttgttaggggcctttttgttcctgaacttaaaggaaatggagctacaggccttgctatctcattacttggtgctatggtgatgccgcacaatctttttctgcactcagcattagtattgtcaagaaaagtgccacggtctgttcatgggattaaggaggcctgcagattctatacgattgaaagtgcatttgcccttacagttgcttttctcatcaacatatctatcatatctgtcagtggttctgtctgtggttcaggtaatttaaacccagaagatcaagcaaattgcagtgatctggacctaaataaggcttcatttttgttaaagaatgtccttggaaactggagctcaaagttgtttgcagttgctttgttggcatctggtcagagttctacaattacggggacatatgctggacaatatgtcatgcaggtttttggaacttataccttatttcagttctagttcgcaagttgaatggcaggttgttttatgatgcatattactcgaggcatttgatgttgatcagaagtaatcaagcatttgcttgcttgcaacattagtttgtttagctgttagatatgaaaagtacagaaaataaattagtacataactcttagatttgcaatgaacaagcttgggcttatgagtttcagtgccaacctccaaggttctcttggtcagctagattgcagagaaaaaggacagatacgggatcttcggatgaaaccctggatacgcaatcttgtcacgaggtccttggctatcctgccaagtttgatcgtgtcaattattggtggttcttcagcagctggccagttgattatcattgcatcgatgatactgtcatttgaactcccttttgctttagttccactccttaaattcaccagcagcaaaacaaagatggggcagcatacaaattcaatattcactgctgtgctgacatggatgatcggctcgtttattgttgtcatcaacacctactttctgataacaagctttgtgaaattgctcgtccagagcgggctgaccaccatttctcaagtattttccggtattttcgggtttttgggcatgctgatttacatagttgcgatcctatacctcgtctttaggaggaacaggaagtccacccagccattgctggagagcgatgctgagcttgcagtatcgggtagcagtgctgatgccggagcagaatgctcgctgggccatttgccccgtgaggacatctccagcatgcaacttccgcagcagcgttcagcttctgatctagattagataacagctgccaggaaaataaatgttttttttgttttttatatagtatagtaattacagaatagggtacgtcaggtattggcttctgttcatcctactgatgatgcttaaggaatgtatacaagaggacggatatctatgctgccaaacaaaaaaatggggcacaaaagaatttagtgcctgtttttgggaagtgatgtgaactgaatcctggaaggggcaaaaaaaaaaaatgttggaatccaattgttgaaaattcttcattctaaacatgaggccgttggtaaaaaatgtctacatgctgtaaacatactatattttgacattattatcacagttaatatatactggacatgctgttttatgtgttgtgcattccagtggctgcaggccttgctcagagctagtttggtgattagagaaatggagaagttctatgta

SEQ ID NO: 4485 - DNA, 2562 bp, Zea Mays
gcacaagcaaaggcgggggagagagctccgtgcagtcaccgtcgtgttcggaacgagcgagagagcgggagacgagtcgcggcgcctctgctgtgctgtcttcttctccccctctgctctgcttcggctcctcacgcggcctcgccgagacccgcagggggttcagacttcttggtgagagcgatatgagtgtcccaggtcaatgctcatcccagccacaatttatcaccagcgttgggaggagtaaccgctccaatggccccggcactcctcttatcgaaagcatagatgttgatcaaattgttattccagagaaaaacagttggaagaacttattctcatacatagggcctggatttctcgtctcaattgcatatattgatcctggaaactttgagacggatctacaggctggagcacagtacaaatatgagcttctttggatcatacttgttgcatcctgtgctgctcttattattcaatcacttgcagccaggctaggggttgtgacagggaaacatcttgcagagcattgcagggctgagtatcccaaggtcacaaattttgtcttatggattcttgcagaacttgctgttgttgcatgtgacattcctgaagtaattggaactgcttttgctctaaacatgctgttcagaatcccagtatggtgtggtgttctaataactggactcagcactctaatgctcttattgctgcagcaatatggggtccgtaagctagaatttctgattgcatttctggtgttcttaatagcaacatgtttcttagttgaacttgggtattctaaaccaaatgctccagaagttgttaggggcctttttgttcctgaacttaaaggaaatggagctacaggccttgctatctcattacttggtgctatggtgatgccgcacaatctttttctgcactcagcattagtattgtcaagaaaagtgccacggtctgttcatgggattaaggaggcctgcagattctatacgattgaaagtgcatttgcccttacagttgcttttctcatcaacatatctatcatatctgtcagtggttctgtctgtggttcaggtaatttaaacccagaagatcaagcaaattgcagtgatctggacctaaataaggcttcatttttgttaaagaatgtccttggaaactggagctcaaagttgtttgcagttgctttgttggcatctggtcagagttctacaattacggggacatatgctggacaatatgtcatgcaggtttttggaacttataccttatttcagttctagttcgcaagttgaatggcaggttgttttatgatgcatattactcgaggcatttgatgttgatcagaagtaatcaagcatttgcttgcttgcaacattagtttgtttagctgttagatatgaaaagtacagaaaataaattagtacataactcttagatttgcaatgaacaagcttgggcttatgagtttcagtgccaacctccaaggttctcttggtcagctagattgcagagaaaaaggacagatacggggggtttttagatcttcggatgaaaccctggatacgcaatcttgtcacgaggtccttggctatcctgccaagtttgatcgtgtcaattattggtggttcttcagcagctggccagttgattatcattgcatcgatgatactgtcatttgaactcccttttgctttagttccactccttaaattcaccagcagcaaaacaaagatggggcagcatacaaattcaatattcactgctgtgctgacatggatgatcggctcgtttattgttgtcatcaacacctactttctgataacaagctttgtgaaattgctcgtccagagcgggctgaccaccatttctcaagtattttccggtattttcgggtttttgggcatgctgatttacatagttgcgatcctatacctcgtctttaggaggaacaggaagtccacccagccattgctggagagcgatgctgagcttgcagtatcgggtagcagtgctgatgccggagcagaatgctcgctgggccatttgccccgtgaggacatctccagcatgcaacttccgcagcagcgttcagcttctgatctagattagataacagctgccaggaaaataaatgttttttttgttttttatatagtatagtaattacagaatagggtacgtcaggtattggcttctgttcatcctactgatgatgcttaaggaatgtatacaagaggacggatatctatgctgccaaacaaaaaaatggggcacaaaagaatttagtgcctgtttttgggaagtgatgtgaactgaatcctggaaggggcaaaaaaaaaaaatgttggaatccaattgttgaaaattcttcattctaaacatgaggccgttggtaaaaaatgtctacatgctgtaaacatactatattttgacattattatcacagttaatatatactggacatgctgttttatgtgttgtgcattccagtggctgcaggccttgctcagagctagtttggtgattagagaaatggagaagttctatgta

SEQ ID NO: 4486 - DNA, 1820 bp, Zea Mays
aacgaaatgcgcttgttaattcgcctcacttctcgctgtggtcaccacgcttcacatctcgcgcggtagcgtccgacaggcatggccgcctcctccctgctccggtcgttcacccgccgcagctgcgcgggcccgagcgctttcgcttaccgccaccaccaacgacagcaaccttggtctcccttctccaccagcgccgctgcggtcacgcaggacgaagcggcgaagaggttccctggactagggccgacggcgaagggggagaaggccagggtggtggtgttggggacagggtgggcggggtctcggctaatgaaggacctcgatacacaaggctacgacgtggtctgcgtcgccccgcgcaaccacatggtgttcacgccgctgctcgcctccacctgcgtcggcacgctcgagttccgatccgtcgctgagccggtcgcgcgcatccagcccgccgtgtccaagtcgccgggctcctacttcctcctcgcccgttgcaccggcgtcgaccccgacggccacacgattgattgcgaaacagttacagatggtgagaaagattccttggagccatggaaattcaaggttgcttatgacaagttggtttttgcctgtggagctgaggcatcaacttttgggatacatggtgttaccgaccatgcaatctttcttcgcgaagttcatcatgctcaagagattcggagacggctcctccttaatctgatgttgtctgatctccctggaatttcagaagaagaaaagtgcagattattgcactgtgttgttgttggaggtggtccaacaggggtggaatttagtggtgaacttagtgattttattatacgagatgtcaaacaacgttattcacatgtgaaggattatattcatgtgaccctgattgaggcaaatgagatattgtcatcattcgatgttcggctcaggcaatatgctacaaagcaactaattaaggtgttaggcttgtgcaaggaattgttaaggatgtgcagcccaacaaaataattcttgacaatggagaggaagttccttatggtttactggtatggtccaccggagttggtgcttcaccattcgttaagtcattgccatttcctaagtcacctggtggaaggatcggtgtcaatgagtggttacgtgtcccttctgttcatgatgtttatgccattggtgactgcagtggatttctcgagagcaccggcaaggaagttctccctgctttagctcaggttgctgaacgacaaggcaagtacctggcaagcctgctcaaccatgtcatgaaagctggaggagggcatgcaaactctgagactgaagcagatctgggtcgtccaccctttgtgtacaagcatctaggcagcatggcaactgttggaagatacaaagctctagtcgatctgaggcaaagcaaggagtcaagagggatatctcttgcaggatttgtgagctggttcatctggcgctcggcatatttaactcgtgttgttagctggaggaataggttctatgtggctatcaattggctgaccactctcttatttggccgggacataagcagaatctagagtgtctttgtatacgtacgaacaagcatataagtcgatgtagagttacacgccacggtcacttgcttgccacacacccctccgggggtccactcctaccactgtccctattagctgtgaatgtaattcacaggtgaattatgaataaatctgaggatactgcagttacttacatgtggtgtgaatgtataatactctgtcacttgtaccactgtccctaatagctgtgaatgtaat

SEQ ID NO: 4487 - DNA, 1878 bp, Zea Mays
tgcggattgaacgggaccaccgtcccgggccggccgccgacccacaccccacccgccatgggcggcgtccaacgaaatgcgcttgttaattcgcctcacttctcgctgtggtcaccacgcttcacatctcgcgcggtagcgtccgacaggcatggccgcctcctccctgctccggtcgttcacccgccgcagctgcgcgggcccgagcgctttcgcttaccgccaccaccaacgacagcaaccttggtctcccttctccaccagcgccgctgcggtcacgcaggacgaagcggcgaagaggttccctggactagggccgacggcgaagggggagaaggccagggtggtggtgttggggacagggtgggcggggtctcggctaatgaaggacctcgatacacaaggctacgacgtggtctgcgtcgccccgcgcaaccacatggtgttcacgccgctgctcgcctccacctgcgtcggcacgctcgagttccgatccgtcgctgagccggtcgcgcgcatccagcccgccgtgtccaagtcgccgggctcctacttcctcctcgcccgttgcaccggcgtcgaccccgacggccacacgttacagatggtgagaaagattccttggagccatggaaattcaaggttgcttatgacaagttggtttttgcctgtggagctgaggcatcaacttttgggatacatggtgttaccgaccatgcaatctttcttcgcgaagttcatcatgctcaagagattcggagacggctcctccttaatctgatgttgtctgatctccctggaatttcagaagaagaaaagtgcagattattgcactgtgttgttgttggaggtggtccaacaggggtggaatttagtggtgaacttagtgattttattatacgagatgtcaaacaacgttattcacatgtgaaggattatattcatgtgaccctgattgaggcaaatgagatattgtcatcattcgatgttcggctcaggcaatatgctacaaagcaactaattaagtcaggtgttaggcttgtgcaaggaattgttaaggatgtgcagcccaacaaaataattcttgacaatggagaggaagttccttatggtttactggtatggtccaccggagttggtgcttcaccattcgttaagtcattgccatttcctaagtcacctggtggaaggatcggtgtcaatgagtggttacgtgtcccttctgttcatgatgtttatgccattggtgactgcagtggatttctcgagagcaccggcaaggaagttctccctgctttagctcaggttgctgaacgacaaggcaagtacctggcaagcctgctcaaccatgtcatgaaagctggaggagggcatgcaaactctgagactgaagcagatctgggtcgtccaccctttgtgtacaagcatctaggcagcatggcaactgttggaagatacaaagctctagtcgatctgaggcaaagcaaggagtcaagagggatatctcttgcaggatttgtgagctggttcatctggcgctcggcatatttaactcgtgttgttagctggaggaataggttctatgtggctatcaattggctgaccactctcttatttggccgggacataagcagaatctagagtgtctttgtatacgtacgaacaagcatataagtcgatgtagagttacacgccacggtcacttgcttgccacacacccctccgggggtccactcctaccactgtccctattagctgtgaatgtaattcacaggtgaattatgaataaatctgaggatactgcagttacttacatgtggtgtgaatgtataatactctgtcacttgtaccactgtccctaatagctgtgaatgtaat

SEQ ID NO: 4488 - DNA, 2885 bp, Zea Mays
cggcgccggctactcctttcgccttgtgttgcatgacccggccgccgcctcatgggcgtcgttgctcgtgctcggtcctcccagtgcgcgagggcgtggcggcgaccttgcttgagcaggcgcagagtccgctcgtcggctctgccccgacccgcagtgcgcgagggcgcgggggtgaccgcctctcgctcttctgccatttcgctgtgtccggcgagaggcccagcggtgaagctgctgggcaggtgggaccttgagacgtgggcgccgacggtgtcggtgcacatgtatgacttcttgtccggcatggcgggcgccttcgggcgtcgtgagcgaggcaggggtgcttgcggttgccgtggagcgcagtggccgagactaaacattagatgcaacccccaagatgttcttgtttgcattcagataatgaatgaaaggcaacgccaagctgtagtgaggaaagggttcttcaacatacttgacatgaccatcgatgcacttggaagccgaacacacctttgttggctgatggagaagctagacccgaaagacatgactcttcgcattggtccaggcaaagagctgaaaatcaccaaggagaccgtccatctcatcctgggtttacccaatactggtggtgggaagcctctaaacattgatgaagtaaatgcagctgttaaccttaggtcatcacttggcatcagcaaagatgagtttggagttgcaaagctgcaagaacgattaagattaggaggcgatgatgacctctcaattcgatgttttttcttgatccttttcaaccggctgctattcccaactgctagctggtctatatccaacaatgaggtgctcttgacagaacaattggatcgtttccctcatattgattggtgtcatctcatattcaacgacttatgtgaagctgcccataaatggcataacagaagcactacaaatgtgtcggcgacgatatatgggtgttccattgtcgttcttgtgtactacctggaccacctccaccacgctgtagcccccaacaacaaaagcgacacaccgcgtatcaaatattttgacaagaaaaccataaaagcattgtcaatggctgataagaggaagccacgtcagggcggtgaaccatttggccactgtgattttcggagcagctcagagacctgttacgcccctacacctgaatttcatggtcaattcgagtttcagttcagttcagatgcatttgatgtagcccaaaatgcaccctgtggacatcacaccatctctattcaagttccacttatcaaagacatgatttcaagcaagattcagcaactccctgcatatcaccatcccaaatttgaagcaaagctgcgtgcttacgactcagaggttggcaagtcatttgccactatcaaccaacgtcttagcaagattgtcaaaaagcagtacgacctagcagacacatttggagagttgattgacgaggttcttcgtgctgagataaatagtccagacaacaaagatgacatgatagaaccttccaatccctcagcatcagatccactaatgacagccacgcagctggagtcgcagatgatagtcactcaggtggaggccatatataaaagacaacaggaaatgtgccgagccttcgagagttctcgtgatgaatcagtcacacctcaaaacatccggggtgacacgacggaagatgatgctcttcaacttgactctggcctagttttggaccagattctaagtggcaatgagacatatatgatgcacaaaacacgacacgactctgtgccactcacacaaatggactgtgttcgcgcccttcgacaattcctgtgtgctaaggtcatggatttgaacagaaatgtcattgattttggtgaatatgtcggtacttgtcgtgatatacaacgatcgtttgccgatggggagtgccttgacaatgttttcatgcaatgcttcattgattgtgttcgtgatgacgccacaaatcatatccctccactaactgctcatcaacttatcctagacgccattgttggggctatattgaacttcgaggagcaggaacaacacagtaacactcatcggccgtatgacccagccatcctagagaattacttgtcaaagacactgccttcgttcaagcagttggacgaatacaaatcgatcatggtccctatgctccgcgcgggacattggacgttgtatgttatcaattttcagaatcgatgcatacacattctagactccaatccatacggaccagaacttggtgagactacatgggaaagttaccattatgttcaaatggacatcgggaaaaggaagttaccatgggccagactaataatggttagactaaacatggctctccaacatgttcgaccaagatcaaacctacctagatttgacaactttccaatcgacatggctccaaactgtcccacaatgaaagcagggtctaacgactgtggcttctttgctatgaggataattcaggtgacctccgcgctcttgccttgtattacctgatcttccatcgactaaacaagaatcgctcattgtctccagaattagaaagattcaagttcccccattattagattagtctagagcaatatcatcagattgatcgttgcactcaaaggtgtgctagcatgtatttagtgtatatgtttgtccatatgtatagtgatctagtgcctaaaactgttttacaacctttacacgttataaacttctgtcacttcttatggatccatgctgatcaagtgcttaccaccagtttttactacattttgttatgttgctatgtttcaatgatgtggtgtgcaattgttatgttgttatgctcaaatattgttcattttttg

SEQ ID NO: 4489 - DNA, 1015 bp, Zea Mays
gaacacccgaaccctaacttaagctacttgtattcggatctgatctactaagtttatacggccccagtgtatacgtgcatactaacttctatttttatgccattttttgggtgtatatgagtacactcatgtccttacttggtccgcccctgatcctgaccaaatcctagctgctttgagtatggaggcgctgtttgggtgcaacaaacatggcggggacaaggccgctgatttggcctcgtttataatcgtgcaggctgccttggaggtgccaaggttacttgggctccttgccatgattcttcataatgaaatctttacatctggtggagatcagaatttgattaataggattctgagcaaaaacaaaaatgcaactgatttcgagaacaaggatgatggagagtctgatgatgataatgatgaggagggagacgatgaggatgctgaaaaccaagaagatgatggtggtgatgagggatcagatgacaatgggaatgaggaggaagatgacgacgacgatgataacgatcctgcagccaacggtgaaggaggaagtgacgacgatgatgatggtggagaggatgaagaggaggatgatgacgacgatgatgatggggatggtgacaatgaggaagatgaggaggaagaagaggaagaggatgatgacgatgatgtcccccaaccacctactaagaagaggaaatgatagatggctgtgatttggttggctggttgcttacatgcaggaatgctccctgttcgcccctgcctagcagtctcctgtttagtgggtagggggttttagcttgatcgtggacaattcatagcctagcttggaaacaaaaagaaacatttaattgtgcatgtactattaaaccattcctttaatcatgtatctcagattgctaccaacccctgtgatgctccgaatggtttctacattgtgtttgcttcagttttgttgcaacttgcaatttgacaatgttctgatatactttgcttgtctatttcg

SEQ ID NO: 4490 - DNA, 1020 bp, Zea Mays
cgcatacggcaactcctctctccgctgttgctctcttcccgtcgcgctttctcctcgtgcggctactgggtaaccgccgccgctgccgccctacgccaggttctcaggtcattgtcagtccccttacttcgccggctcattcggcggcgacgagcaccagaaatcctagctgctttgagtatggaggcgctgtttgggtgcaacaaacatggcggggacaaggccgctgatttggcctcgtttataatcgtgcaggctgccttggaggtgccaaggttacttgggctccttgccatggtaaaaattcttcataatgaaatctttacatctggtggagatcagaatttgattaataggattctgagcaaaaacaaaaatgcaactgatttcgagaacaaggatgatggagagtctgatgatgataatgatgaggagggagacgatgaggatgctgaaaaccaagaagatgatggtggtgatgagggatcagatgacaatgggaatgaggaggaagatgacgacgacgatgataacgatcctgcagccaacggtgaaggaggaagtgacgacgatgatgatggtggagaggatgaagaggaggatgatgacgacgatgatgatggggatggtgacaatgaggaagatgaggaggaagaagaggaagaggatgatgacgatgatgtcccccaaccacctactaagaagaggaaatgatagatggctgtgatttggttggctggttgcttacatgcaggaatgctccctgttcgcccctgcctagcagtctcctgtttagtgggtagggggttttagcttgatcgtggacaattcatagcctagcttggaaacaaaaagaaacatttaattgtgcatgtactattaaaccattcctttaatcatgtatctcagattgctaccaacccctgtgatgctccgaatggtttctacattgtgtttgcttcagttttgttgcaacttgcaatttgacaatgttctgatatactttgcttgtctatttcg

SEQ ID NO: 4491 - DNA, 1561 bp, Zea Mays
atggagggcggtaacatactgttcaagggtgaacactttcccccgggtgaacgattccctacctgggacgggatttctactcgttggcttctgtacacggaacaagcaccttctgcatggctgaattttgcattgtgtggcttggtggggatcgtcacagcatatgcttttgtttggatttcgaagtattacacggattataaacacgagccagtccggcttttagctctttcgagttccacaggacatggaactaatattattgctggagtaagcttgggaatggaatcaacagcactaccagttctagtgataagtgttgccattatatcagcatattggctggggcagacctctggcttggtggacgagtctggcaacccaactggtggtctttttgggacagctgtagcaacaatggggatgcttagcactgcagggtatgttctcaccatggacatgtttggtcctatagctgacaacgctggtggtattgttgagatgagccagcagcctgaaagtgtgagggaaatcacagatgttctagatgctgtgggcaacacaactaaagctactacgaaaggatttgccatagggggtcttacacaaatgttgcaggttgatatagcagtcccagagatttttgttggtggtttattaggctcgatgcttatattcctgttcagtgcatgggcttgctcagcagttggcaaaactgcacaggaagttgttaaagaggtcaggagacaatttattgagaggcctggtatcatggactacaaagagaagccggattatggacgctgtgttgcaattgtggcatctgcatccttgagagaaatgataaagcctggagctctagcaattatatcacccatggccgttggcgttgtcttccggattttgggccactacactggtcagcctcttcttggagctaaagttgtagcctccatgctgatgtttgcgacggtcgctgggattctcatggcactcttcttgaacactgctggcggcgcctgggataatgcaaagaagtacattgagactggcgctcttggtggcaagggcagcgagtcccacaaggctgcggttactggcgacacggttggagacccattcaaagacactgctggaccgtcgctgcatgttcttatcaagatgctcgccacaatcacgctggtcatggctccgatattcttgtgattaaccaaccactcatcaagcttgctattaaccctgcggagatgtacctatgcgaccaggtagatgaggtgtgtgtgtgtgtgtgttacctgcatgtgatgatgtaacggtccaatcggtttgtgtcacgacatgctgtacccagagaaagaagcggcgatctatacccatgtctcacggtagatattatactgatgatgcaaatgccgtgttttgttactgaattagtggcctgaaagttgcgcttgttgattgatgaaacattatggtagcgtacttgtatgctgcatcccacaatggattttatgatgtggaccccgaatgttttgcttatacaatgtttgctatgcataca

SEQ ID NO: 4492 - DNA, 2392 bp, Zea Mays
tacccagtcgaccgtgccgccaaaaaccctgggtctcccctacgcttcgctcgtcatgctgcgccgcctccgcctgcgcttgccggggagggcggcgtcggctgccgccggcgcggccgctgcaatggcgtcgctcaccaacgtcgcctacgccgacggcctcttccgccgccagtccgcgccgtcgaatccaggcgacgaggacaatttgggagcctccgcgttcggccgcgatccggagaccctggagcgcatggcccgagcgctgcgggagatcaacaactcaccgctcgccaagcaggtgtttgaactgatgcggaagcaggaggagacgcgcctcactgagctggaggtcgagaaggtccaatacgccatctatgagaagctgagggacatcgaaaggatgcagaaaaaagctgaagattacagaaatagtttgcaacaagaagcacaagcaaaagctcaagcattacgctttgaggatgaattagctagaaaaagaatgcagatcatgctgcacagaggcgacaggatgctgaactcgtgaagatgcaagaggcatctgccctcaggagagaagaagctaggcgtgcaacagaacagaagattttggaagaaatgatacgtactgagaaggaaaaggctgaaatagatcaggaaacaaacagagttaaagctatagctgaagcagaagctcgtgttcatgaagacaagcaatcagaagaagttgttaaaagaatgttattggaacgcatgaagggtgaaaaggaaaagtggctcactgcaataaatacaacattttcgcacattgaaggtggattcaaagcactgttaactgataggagcaaactaatgatgggtattggaggagttactgcactggctgctggagtttatactactagggaaggtgcgagggttacatggagttacataaatagaatcttgggtcagccttcgctgatccgtgagtcatcaatgtcaaagttcccactaccaatgtctaggctactcaaacctagttcagcatctttgtcggagggagcaggctttgagaaagttatcctgcacccttcactaaagcggaggattgaacatcttgcacgagcaactgcaaatacgaagtctcatggtgcaccattccgcaacatgctgttctatggacctcctggaactggcaaaactttagtagccagggagatggctcgcaaatctggcctggactatgccatgatgacgggaggagatgttgcacccttaggatcagaggctgttaccaagatccatcaaatatttgactgggctaagaagtccaaaaaaggcatgcttgttttcattgatgaagctgatgcattcttgtgcgagcgtaacagtacccatatgagcgaagctcagcggagtgctctcaatgcattattgtttcgaactggcgaccagtccagggatattgtccttgtcctggcaacaaacagaccgggtgaccttgatgctgctatcactgaccgcattgatgaagtcatagagttccccctgcctggggaggaggagaggtttcaactgctcaagctatacttgaaccaatatatactcaaggaagagggcaaaggatcttcttggagtgcattattcaagaagcagcagcggaagattcaggtcaatggcataagcgatgatttgctcagggaagctgcaaggaagatcgacggtttctctggcagggagattgcgaagctggtggctagtgtgcaagctgctgtttatgggcggcctgactgtatattggacccccagttattttcagaggtagttgactacaaagtgactgagcatcaccaacgcatcaagcttgcttcagagggtatggtttgatcagtaagaaatatttacctcccactgactctagtagtgcatgttttggatcccgtgggagtgggacattttgtagcccccgtctattcccaccagttttgttccatgtgctttgcctgcagcaagggttggtcccggatggacatccaaataggccggttgtggtcaattgaatttagggtgtatttggttcagctttctaaattagattcgccgccaaaaacaggaatctcaatcaaacgggaacgacaatagaatagatttatgaaaatttatagattcctctagttctattcaaaatcaccttatttttaggattcctgttatccatgggctatcatgctcttttacagtttgtttcaaacaaaaatattttctctctccacaaccgttagttttcaagggctatcttcaacaatcaacatgacatttttctaccatggctacaatctcatgctcgtctacctcgacatcggtacaaatagctactatcttcaatgaactacttatcagttcatgtcag

SEQ ID NO: 4493 - DNA, 2999 bp, Zea Mays
atttataataaaataataataaagaaggttttggggcttcctcgactgacctgcccatacttggaactccactccagtttactaccctcctccgtcgaaagcgacgcctcaccgcaacacaaggccgcccgcggacactgggtcggcggggcccgcacctccttggctcctttccacgcagcttttccacagcacagttgccatctgtcctcgccggcgcaggagcagcctgccctgcctcgcgtgcgaccctcctctgctttttagagagagacagcgagcacgcgcagaggagaggagagagaagcaccacgcctcccaggctcccagcgcgcacgcaccagggtccaggagaggaggacaccgtcgcctcctggttggttcatctcgtcagtcgtcaccgcctcctgcagccaaccggcggggattcctgtcctggatgcgacaaggccagcaggagagaccctccccctctccttcttctccctgagcaggaagcggaaagccttccgcgcttttcaaagatcgtaggccgcacgcctgcagcagccgccgactcagggcgagcgttgagaggaggacgaagaagagactgaagaagagcagaccgaagtgaggccggaggaagggatcgggccttgcgggattcggcagtccatcacgaggtaaatgcggcgctaggagctgcagcgatggcgtcgctggtacccggggtcctcctcaagctcctgcagcacatgaacagcgacgtcaaggtcgcgggcgagcaccggtcgtcgctgctccaggtcgtcagcatcgtgcccgcgctcgccgggagcgacctgttcaccaaccaggggttctacctcaaggtgtccgactcgtcgcacgccacctacgtgtcgctgccggacgagcagcacgacctcatcctcagcgacgtcatccagctggggcagttcgtccatgtcgaccgtctcgaggcagccaccccggtgccgatcctcaggggggtcaggccggtcccgggccgccatgcctgcgtcggcagcccggaggatcttgtggtgaccagctcctccacttttcttcttggcagcggcaaggccgcccaagcctcctccaccaatggtagttccaaggatgccggtgccctgtcgctagagaaagagcagggcaggttagagaagatcaatgctcctcccaagagcaacggcacagagagcaagaagccccagctcaccaagtcgaactccaacctctcgaaacaggcgctcaatggcctcctctcggacaagaaggacgtggttagctcgaaggcaaaatcaaccagcgctaggtcgacgccgtcttccccgaccagcgcccattctctgcctgcgtcgttcgataaattctcgagtgacatgaaacagagagtgagaaccaaaggagcagagaaatcgccgccgtcaaggctgtccttgctagaaaaggctgcgtctgtgttgaaggccactacggcagggaggaagtcctccctgggtaactccattagtaacaccttgttgagcttcgaatctgggcccaaggccttgagaagaagctgggaagggaaagcagatgcaaaggacaaaggcaattcggattcaaagcctgccaaagctgaaaagaagtctgaaaatcgaagctcttcgactcccagacgaaaatcattagcagaagagaaaccatcgaataaggatgacagaaactgacagatgctagcgcttcgtggacaacgcttcctccatcactcgttaaactagggaaggagcttctgaagtacagggatgcagcacaaatggctgctgttgaagccatgcaagaagcttctgcggcagagagcatcgttcgatgtttaagctcgtacgcggaggtgagctcgtcggcggaggagcagaacccacagcaggctgtcgagcagttcctcgctctgcatggagcaatctctcgagccaccatcgtcaccgagtctctaaccaaggccacgaccacggtctccaccgcgacttcaccagatcaatcagcagccggcgatgcgtcaacagccgacgaggaaaccatggctgtcgcggcggagcgccgccgccgggcagcctcctgggtcggcgccggcctcgccaccgatctctccgccttctccctctacaacctgaaacccgccccagccagtgtcatctccccgctggccgtcgtgctcgtggacgagtcagccaagccggcggcggcgaaggcagtgccgcccgcgaagtcgcggctgtccccggcgaaggggaggttgaaagctggttccgcggccgccgccgccgccgccgccgctgcggcggcggcagcagtgcctccgcctgaatgggagcggggaggcggcgcggaggagcggggcgagcttgcgcggcggctcggggacgaggcacgggcgtggttcctggcgttcgtggagcggttcctggacgcggacgttgcggcggccgcgccgtgggaccgcgaccgcgccgcgaggatgctcccgcagcttaagcgcgtcaacgactggctgagcgagatcgggaagtcggcagagatggcgccgcatccgccaccggaagcggacggcgaagcggcggcacccactgccaacggcggcgcggccagcggcgtgccggaggagacgatagagaggctcaggaagaagatctacgagtacctcctcaccaacgtggactctgctgccgccgtgctcggcggctgcgagatggcgccggcaccggtggcgaacgggaagaaggggtgacgatagtgggccgcgaaggaaggcccaattgggccgttaacttggctgagccaaaacatgggccggtctggatttaaatgtaaaaatgggctggattgagattgcagtggttgttttggtacttttttctggtgttacagaaagtaaaaaaaatatatttttgtccctctctccttcaattctgaaaccgaaaatatctcctcccttatctctcaaaaccagtcag

SEQ ID NO: 4494 - DNA, 1265 bp, Zea Mays
actcaattgcttctcttcttctcgtccgttccttcgcatgcaccacctgcacggctgtgcaccaacgactgcagatgtacagagctgcaagccttggcgcagaaagaggaggagggacgccagcccagctgctgcaaaggaggtactcatgcagcggtgatgagcgaggaggccccaaggaggagttcctgtgctgcccaccaccaccacctctgaaaagggcccggatgggatacgagagcatgcagggaagccatggagtcagtgatgcgaggactactgctgggggagggggactgtactgcatcgatgattacatgcaagccatggccgtgggctggagaataaaggaggagggcctcatcagatggcagaggagagatgcggctgctgctacgccttccaatctccaagccatgggatgtttggtgcaagaatctggcccctttaaggtacgccgaccagaagcacaccgtcttggttctgcgctgaagcagcaggacggcgacgactccagcaaagaggacggaaacgacggacggccccagtccagcaatgcagcgacgaaggaggacgaggcatctgagcagtgctcgctctcgctgtccctcggtaatctggacgcaaaatgcgggcgtggcatggcggcagcggcctcctcgcgaagcggcgagagcagctgcatcctcacggcctcgccggcgaggaggagctccagcgactgctccggccactcaggctgcttcgtcgtcgggccgggtggtgttgttagcctggagctttccctgtccatctgtggatcttagctagaccactccggccacttctggacgacgattctgtacatcagtggcggcgttggtgatcgccgcgtttgtttttttggtgttcgtgggcacatcatgaccgtgttagaaagtttagtaaccttagaaccatagcatgttagttctagctaagctagtatgatgtttgttacctctacctgtagccctagctggtatgtgtaaggctggctccaacaaggtcccctaaagggttctctaccctaaatatagaggatcaaacggtcctttacgctctccagcaacgtcctctaaacggtcctttaaatttagaggacgctgctggattctctatatatagagtttctctaaacgatcctctattcatttgactacttttaaataaccggtttagtaaaactaaaatatgtacaatatatttgagagtatgataaacacgtatgtacaaaaaaaataaaa

SEQ ID NO: 4495 - DNA, 1813 bp, Zea Mays
cgaggagggagcgagagagagacagaaagagacacagtcacacagcgtagggcgctgcggcctgcggggaggaagggcaccagcttggtctttctcatccattcgcaaatcgcaacaaatcttgcatcttatcttaccctagaaaaacaaatcttgcatcttcagctgtctgtacgtgtgtgtgtgagagagagacactgcgtgccgcagcagcagctctggacaggcttacaggcaagtcagagagcgagggaggagccgggaagaggaggccggagggaacaaaaggggaagtttggttctttcctctaccacctggagcgtctccttgccagccagcgcccggtccggtgagctccataccatccaagtagtgtgaggaaccgtcgtcgttgctggcgatccaagagaccaggagatgggcagcggcaggaacggcgctgtggtgaggcggtacgtccggtccaaggagcccaggatgaggtggagcgccgacctccaccgcagcttcgtgcaggctatcgactcccttggcggccaacacaaggctacgccgaagctcattctccagttcatgggcgccagggggcttaccatatctcatgtcaagagccacctccagatgtacagagctgcaagccttggcgcagaaagaggaggagggacgccagcccagctgctgcaaaggaggtactcatgcagcggtgatgagcgaggaggccccaaggaggagttcctgtgctgcccaccaccaccacctctgaaaagggcccggatgggatacgagagcatgcagggaagccatggagtcagtgatgcgaggactactgctgggggagggggactgtactgcatcgatgattacatgcaagccatggccgtgggctggagaataaaggaggagggcctcatcagatggcagaggagagatgcggctgctgctacgccttccaatctccaagccatgggatgtttggtgcaagaatctggcccctttaaggtacgccgaccagaagcacaccgtcttggttctgcgctgaagcagcaggacggcgacgactccagcaaagaggacggaaacgacggacggccccagtccagcaatgcagcgacgaaggaggacgaggcatctgagcagtgctcgctctcgctgtccctcggtaatctggacgcaaaatgcgggcgtggcatggcggcagcggcctcctcgcgaagcggcgagagcagctgcatcctcacggcctcgccggcgaggaggagctccagcgactgctccggccactcaggctgcttcgtcgtcgggccgggtggtgttgttagcctggagctttccctgtccatctgtggatcttagctagaccactccggccacttctggacgacgattctgtacatcagtggcggcgttggtgatcgccgcgtttgtttttttggtgttcgtgggcacatcatgaccgtgttagaaagtttagtaaccttagaaccatagcatgttagttctagctaagctagtatgatgtttgttacctctacctgtagccctagctggtatgtgtaaggctggctccaacaaggtcccctaaagggttctctaccctaaatatagaggatcaaacggtcctttacgctctccagcaacgtcctctaaacggtcctttaaatttagaggacgctgctggattctctatatatagagtttctctaaacgatcctctattcatttgactacttttaaataaccggtttagtaaaactaaaatatgtacaatatatttgagagtatgataaacacgtatgtacaaaaaaaataaaa

SEQ ID NO: 4496 - DNA, 1311 bp, Zea Mays
tctctcctctctttccgcctccatccgaccacccccgcgagcttcgacagttcgacacacgcggccgccccttcccggctccagccacaccccccggaggcggcgatgcagatggcagcggcagttgcccccaccgacgccccggcctcggcgtctgcggcggcggcgccctcccgcccccacgcgcacgccgcggcagcggtggcggccgcgtcgcctcacccgcacgcactgcatccgcatcaccatatgccgcaaccgcggtgggtggtcatcccataccctcctccacaccatcccatggtggccgcgccgccgccaccttctctgcagtttgtgaagcattttacgccgccgtcctcggtaacaccgccgccgccgactggatccggcgggaacgggggcgaggataaccggaccatctgggtgggcgacctgcagtactggatggacgaaaactatcttcacagctgcttcggctctagcggcgaggtggtgaatattaaagtcattcgcaatagacactcgggagtttctgagggttatggttttatagagttttatactcacgtttcagcagagaaggcactgcagaatttttctggtcacgtaatgcctaatactgaccgggcttttaagttaaactgggcatcatatagtatgggagaaaaacgctcggaaatttcgtctgatcactcgatatttgttggcgatttggctgttgatgttactgatgcgatgttgctggaacttttttctaacaaataccgatcggtgaaaggagctaaagttattattgatgcaaacacaggccgttctagaggctacggctttgttaggtttggagatgataatgacaaaattcatgcaatgactgaaatgaatggtgtttactgttccacaagaccaattcgtgtaggaccagcgactcctagaagatctcaaggtgattctggcacttctccaccaaggcaatctcatgttgactctactaacaggacggtatatgttggtgggcttgaccccaatgttagcgaagatgaactgaggaaagcatttgcaaaatatggtgatcttgcctctgtcaaaattccttttgggaaacaatgtgggtttgttcaatttgtaaacagagttgatgctgaagaagcactgcatgggttgaatggatcaactattgggaagcaggcagttcgactttcctggggccgcagccctgcaagtaaacaggtgctctatggtcgggatcctttgtaaatccggtcctatgagcccggggatacttgcgtggccgctgtggccaagacgatg

SEQ ID NO: 4497 - DNA, 4873 bp, Zea Mays
accttgtcggagaccgacgcaccccccctctccgctctccgctcctcctccccacaccccaccccacccgctctccagtccacctcacgctcacactcccgcagcccgcccgccagccgccatcctgctgccacctctttcttccttgcgggggcggcaaccaggcgcacggcacctgctccctcccactcccactcccacaccgcgccagccaccagaataaagcagccgttgcggcgtcgcgtcggcgagcacagcgcagcgcagcgcgcagcggcccgggtgcatgaggagggggcggcggctgccgaggccgaggctgtgacgaaggagcgcggagggcgatgccgctggtcaggttcgaggtgcggaatgaggtggggctgggggaccccggcctctacggcggcggagctgccgctgccgccgccgccaccgccgccgcgggggaggaggagcccaaggcgctgctcgagggcgtcgccgtcgcgggcctcgtcgggatcctgcgccagctcggagatctcgcggactttggtcataccagattcgcggctgatgttttccatgacctacacgagcaagttatagctacatctgctaggggtcgcaaggtgctgactcgagtacagaacatcgaagcagcacttccatctctcgaaaaggctgtgaagaatcagaagagtcacatacattttgcctatgttccgggctctgattggcacactcagcttcaaaatgagcaaaatcacctgctagcgactgatctgcctcgttttatgatggattcgtatgaagaatgccgagatccgccacggctttaccttcttgataaatttgacaatgctggtgcgggggcttgtgtaaagagatattctgatccatcttatttcaagaaagcatgggatacgatgagagcagataagaatgctaatgtacaaagagaaaagagatcacagaaaattaagagaaaaggatcacgactaagggaaccatatcatggacaagccatgcctaggcataggggcactgaatttcagcgatcacttactgctggccaacttgttaacaggcagtttgcatctcccagcaacgatggtcagggtatctcagagcataagtctacacctgatgcaagatctaatcctgacaatatgagcagatcttcttctcttagttcgaagacacaactgagttcagtagaacaagctatcgatacaaaaccttctgcagtttctcatgagaatggccatgggaagtcattggatactaagttgcacaagcctggtggtctgccttcgcccgtactgcttaacagcaccactgtggatgatcatagtgaccatttgaagcaaggttccccgccagatggtatggttgctagatcaccttatgttaaatgggatgaaaagactgcaattatcatgtctacaagttctatctactgtgacgatgttgttatggatgaggttgaagatgcagaacctacttgtattagctctgtgcagaaagaaactgaccataaggtaatggatacattgcaccagcaagatgccttacttaaaaagacaaaatcactgttagtgccatcagtcttgaaccaccatgatgacattccaggagaagccgacaactacatggatgcacttaatacacttgaatctgagacagaaacagaatctgaatttcaaactaaaaatcgggtgccagcaccttccttcaaagctgaagcccctcaagtgggggcaattgacaatattgttccacagtgtcttgattcctctgctgctgactttattgacacatgtcaagaatctgatattatttgtacttctgaaagagcaattgattttcccagtttgtcaaatgcagattctcttgaggtttcacaactagaactttcagattatacgtctgtaagcccctataaagagtcatctgtcatcactaatatccacgagagtggtgcagagggtgctcgtggagatccttgtgagattatagagcctctgcaggtccattcagccatacttgccaatgatggttcccctgtttgcaatgaaataccaaagagtaagccagatgatgatcttgggtattttcaagagattcctcaaccaggtttctccacctgtatggttattccatcaaacaaagagtctgctgttgccaacaaaaaccttgaaggtgacgcaaaaagtgatgatgatcttattgatggtaccgctgataatgttgtatcgggacctaagattgccaacatggtagttgatgaggtgggtttcaagatggcacctgctaatagaagttcacctggtgacccctctgatgactcatgtgtcattcctgaaagtaggcctcaggattatgctgtaaagagctatgagggagttggtgattgtggtgtgactgaagtgtctaagttatgtagtgagcctcttaacaaaccatcagataatatatgtgcaactcaagatgttcctacaaatacctctactatgtctgctggtgccagtgaagtgtctagttcgtggagtgagcctgttaccgaactaatcgatgacagatgtgcaactcaaggtgttccagcaaatgcctctaccacgtctactgttgtaccatctgttaaactctggacaaatgctgggctctttggacttgaaccatccaaacctccagtatttggtaatggtccaagggaggatactccacctggttttaaagaagctcaaccagtccattcaactgaattcacagaagtgcactgttcaaagccaactgaatcagcagctgtagatgtcccaaatggaaacacatccattaccagcagctttgtggaaaagcttgttggtattcgtcctggttctgcaaacctcaatagctcaggggcaaatcaatcagcagccagaatacctgatccaattcatagtcatacagatgggcactcagatttttcgtcatcctttgagcacaataacatgactggcaaacatacttcaataagcgaacttctagaatttgaggggagtgctgatactggcaccaaaatatactcaactgacatgagaaataacgctgtgtctgcatcaagcttttcaagcattgcacaaaggtttcttgctaatacacttcagagaagaacttccaaatatactgatcttcctatgtcttctgagagggcaaatgctgatacaagtgcaaaatctgaatctactctaaatcctgttgtagaaccaagtgaagcggtatttgcagaggaaactaagtttgagaacaaaacagaaaatggaatggatggattgtccaaaacatcaatattttctagccgccattactctgagaaatcgtctccgccacttgagtacatgaaaatatcttttcaccctatgagcgcatttgagatgtcaaagctgaacctagatttctgtgatggaaatattcatgaaatttctgatgatatgatgttaccgacatttcagttactttcagagtcttccattccacagccaggcagtggttctgagtctgaagatgacacctttggtaggtcatatagttattcttcatatgatgatctgagtccccggctatattcaaactctgaggcatgggatcaagatgatggaactggactggaggaacatgagttatatgatgattcaaatcagataggatcctcaacagcacctttatctagctacatgggattcgagcagatgaacttatctgacatgaagtcagatatttcacttgcaaacattggggatcagaatgtaataggcactttacaatcctgtactgttgaagaacttccaaactttgatacattgatgtccagaagtgatgatcaaaatggtgaaacccccattccacataatctggggaatatgacaccagatgaagatcagttgccaccaccacctcctctccccccaatgcagtggaggatgacaagacaaacaacttcactagaagaggaaacttgcattacaactaaagatatgcttagaaaaacttctagcctaccacatatacacacctctgcccaggaagaacactgtcctccaactgcaccattggatctacaagggcatgctggggaagtgggtgtccagaaaactggtggggtacgagaaattactaatcctcctagtatcatcgatataaaatcaagtttgcttcagcagatcagggataagctgaagcttaatggacatgaaaggtcaaaaaaagcagtaggcggtgacattaaaagcttagacgaaagggaggagttgcttcagcaaatcaggagcaagaccttcaatttaagacgcacaaacgcatctaaggcagatggctcatcacaatctacagccagttccaacgttgcagcaattttggagaaagccaacgctatccggcaggctgtggccagtgatgagggtggcgatgatgatacatggagtgatatatgaccacctaattgcagacgttcatggtagtcttttcctgtatattaagctattacaagatgaagtgattaaatgtgaataccatccttttcttcattgtaattagattttgcaggtcttgttttgtaccttccttagttcatattagtgaatcctaccgtaggtcgctgtggtcgtggaaatgtcagagcatttccacattatgtaaatgcatctttattatttatttatgatagtgagaacagctgaatagctgataaaaataagcatactaatctatctttttatcattgtattgattttttttgcaatgataataagatggagcatgatgttgcaaaaggttgtccttttagctgctatcaagtaaaatatttctaaagcgataggtctgcattaccttgccaagtcacgttttc

SEQ ID NO: 4498 - DNA, 4961 bp, Zea Mays
ggccacgcccgctcctaccaccgcaccgcatcgccacttacccctcgtgccgccgcgctgccttttcctccccgcgtccctttcgtccctcaccttgtcggagaccgacgcaccccccctctccgctctccgctcctcctccccacaccccaccccacccgctctccagtccacctcacgctcacactcccgcagcccgcccgccagccgccatcctgctgccacctctttcttccttgcgggggcggcaaccaggcgcacggcacctgctccctcccactcccactcccacaccgcgccagccaccagaataaagcagccgttgcggcgtcgcgtcggcgagcacagcgcagcgcagcgcgcagcggcccgggtgcatgaggagggggcggcggctgccgaggccgaggctgtgacgaaggagcgcggagggcgatgccgctggtcaggttcgaggtgcggaatgaggtggggctgggggaccccggcctctacggcggcggagctgccgctgccgccgccgccaccgccgccgcgggggaggaggagcccaaggcgctgctcgagggcgtcgccgtcgcgggcctcgtcgggatcctgcgccagctcggagatctcgcggaattcgcggctgatgttttccatgacctacacgagcaagttatagctacatctgctaggggtcgcaaggtgctgactcgagtacagaacatcgaagcagcacttccatctctcgaaaaggctgtgaagaatcagaagagtcacatacattttgcctatgttccgggctctgattggcacactcagcttcaaaatgagcaaaatcacctgctagcgactgatctgcctcgttttatgatggattcgtatgaagaatgccgagatccgccacggctttaccttcttgataaatttgacaatgctggtgcgggggcttgtgtaaagagatattctgatccatcttatttcaagaaagcatgggatacgatgagagcagataagaatgctaatgtacaaagagaaaagagatcacagaaaattaagagaaaaggatcacgactaagggaaccatatcatggacaagccatgcctaggcataggggcactgaatttcagcgatcacttactgctggccaacttgttaacagcaggcagtttgcatctcccagcaacgatggtcagggtatctcagagcataagtctacacctgatgcaagatctaatcctgacaatatgagcagatcttcttctcttagttcgaagacacaactgagttcagtagaacaagctatcgatacaaaaccttctgcagtttctcatgagaatggccatgggaagtcattggatactaagttgcacaagcctggtggtctgccttcgcccgtactgcttaacagcaccactgtggatgatcatagtgaccatttgaagcaaggttccccgccagatggtatggttgctagatcaccttatgttaaatgggatgaaaagactgcaattatcatgtctacaagttctatctactgtgacgatgttgttatggatgaggttgaagatgcagaacctacttgtattagctctgtgcagaaagaaactgaccataaggtaatggatacattgcaccagcaagatgccttacttaaaaagacaaaatcactgttagtgccatcagtcttgaaccaccatgatgacattccaggagaagccgacaactacatggatgcacttaatacacttgaatctgagacagaaacagaatctgaatttcaaactaaaaatcgggtgccagcaccttccttcaaagctgaagcccctcaagtgggggcaattgacaatattgttccacagtgtcttgattcctctgctgctgactttattgacacatgtcaagaatctgatattatttgtacttctgaaagagcaattgattttcccagtttgtcaaatgcagattctcttgaggtttcacaactagaactttcagattatacgtctgtaagcccctataaagagtcatctgtcatcactaatatccacgagagtggtgcagagggtgctcgtggagatccttgtgagattatagagcctctgcaggtccattcagccatacttgccaatgatggttcccctgtttgcaatgaaataccaaagagtaagccagatgatgatcttgggtattttcaagagattcctcaaccaggtttctccacctgtatggttattccatcaaacaaagagtctgctgttgccaacaaaaaccttgaaggtgacgcaaaaagtgatgatgatcttattgatggtaccgctgataatgttgtatcgggacctaagattgccaacatggtagttgatgaggtgggtttcaagatggcacctgctaatagaagttcacctggtgacccctctgatgactcatgtgtcattcctgaaagtaggcctcaggattatgctgtaaagagctatgagggagttggtgattgtggtgtgactgaagtgtctaagttatgtagtgagcctcttaacaaaccatcagataatatatgtgcaactcaagatgttcctacaaatacctctactatgtctgctggtgccagtgaagtgtctagttcgtggagtgagcctgttaccgaactaatcgatgacagatgtgcaactcaaggtgttccagcaaatgcctctaccacgtctactgttgtaccatctgttaaactctggacaaatgctgggctctttggacttgaaccatccaaacctccagtatttggtaatggtccaagggaggatactccacctggttttaaagaagctcaaccagtccattcaactgaattcacagaagtgcactgttcaaagccaactgaatcagcagctgtagatgtcccaaatggaaacacatccattaccagcagctttgtggaaaagcttgttggtattcgtcctggttctgcaaacctcaatagctcaggggcaaatcaatcagcagccagaatacctgatccaattcatagtcatacagatgggcactcagatttttcgtcatcctttgagcacaataacatgactggcaaacatacttcaataagcgaacttctagaatttgaggggagtgctgatactggcaccaaaatatactcaactgacatgagaaataacgctgtgtctgcatcaagcttttcaagcattgcacaaaggtttcttgctaatacacttcagagaagaacttccaaatatactgatcttcctatgtcttctgagagggcaaatgctgatacaagtgcaaaatctgaatctactctaaatcctgttgtagaaccaagtgaagcggtatttgcagaggaaactaagtttgagaacaaaacagaaaatggaatggatggattgtccaaaacatcaatattttctagccgccattactctgagaaatcgtctccgccacttgagtacatgaaaatatcttttcaccctatgagcgcatttgagatgtcaaagctgaacctagatttctgtgatggaaatattcatgaaatttctgatgatatgatgttaccgacatttcagttactttcagagtcttccattccacagccaggcagtggttctgagtctgaagatgacacctttggtaggtcatatagttattcttcatatgatgatctgagtccccggctatattcaaactctgaggcatgggatcaagatgatggaactggactggaggaacatgagttatatgatgattcaaatcagataggatcctcaacagcacctttatctagctacatgggattcgagcagatgaacttatctgacatgaagtcagatatttcacttgcaaacattggggatcagaatgtaataggcactttacaatcctgtactgttgaagaacttccaaactttgatacattgatgtccagaagtgatgatcaaaatggtgaaacccccattccacataatctggggaatatgacaccagatgaagatcagttgccaccaccacctcctctccccccaatgcagtggaggatgacaagacaaacaacttcactagaagaggaaacttgcattacaactaaagatatgcttagaaaaacttctagcctaccacatatacacacctctgcccaggaagaacactgtcctccaactgcaccattggatctacaagggcatgctggggaagtgggtgtccagaaaactggtggggtacgagaaattactaatcctcctagtatcatcgatataaaatcaagtttgcttcagcagatcagggataagtcagagcagctgaagcttaatggacatgaaaggtcaaaaaaagcagtaggcggtgacattaaaagcttagacgaaagggaggagttgcttcagcaaatcaggagcaagaccttcaatttaagacgcacaaacgcatctaaggcagatggctcatcacaatctacagccagttccaacgttgcagcaattttggagaaagccaacgctatccggcaggctgtggccagtgatgagggtggcgatgatgatacatggagtgatatatgaccacctaattgcagacgttcatggtagtcttttcctgtatattaagctattacaagatgaagtgattaaatgtgaataccatccttttcttcattgtaattagattttgcaggtcttgttttgtaccttccttagttcatattagtgaatcctaccgtaggtcgctgtggtcgtggaaatgtcagagcatttccacattatgtaaatgcatctttattatttatttatgatagtgagaacagctgaatagctgataaaaataagcatactaatctatctttttatcattgtattgattttttttgcaatgataataagatggagcatgatgttgcaaaaggttgtccttttagctgctatcaagtaaaatatttctaaagcgataggtctgcattaccttgccaagtcacgttttc

SEQ ID NO: 4499 - DNA, 2016 bp, Zea Mays
agccggtccagcccacagtccacgaggacacgatccccgacctcatatcaggttcccctccccatcccggagagcaaaagcgcttctctcgctagcgagttcggcagtagaaaccctaaaaaaagacaccgccctccccttcgctagcggaaccgccctcccctcgccggggtaggggtttcgggggtagacgcccgccatggacgcgttccggaaacagctggacgtgctcatgggcgccaaccgcaacggcgacgtcgaggaggtgagccgcaactactacgaccgcgacgtctgccgcctcttcctcgccggtctctgcccacacgacctctttcagctcacgaaaatggatctcggtccttgttctaagattcactctcttcaactgcggaaagattatgaagaagcgaaagcaaagggaacagaaaattttgatagagaactcgaggatatgatagaaaggctcattgtggagtgtgacaggaaaattcagagggccctaaaacggcttgcagatgatgatgccaatgctgctattgcgatatcggtctctgaggttactctgacggatgacatactgcagctgtcaaaacagataaaggagaaaatggcagaagttgatgcctttgattttgaagggagaactgatgacaaaataaaggcccaggaagtagtggaagagctaagagctaaaagagctgatatgcaggctaccctcttgcttgatgcttttaacaaggacagagcttcattaactcagcctgctccacctcaagtggcagcagttccaccaccagctccacctgatgctcgtactcaagaaattatcaacgaaaagcttaagaaagctgaagagcttggtgaacaaggcatggttgatgaagctcaaaaagctttggaagaggcagaagctctgaaaaagctggcgccacgttcagagccaccttcagacccttcgaaatatactgctgctgatgttcgaattactgatcaaaaattacgcctctgtgacatatgtggagcatttctgagtgtatatgacaatgatcgacgtcttgctgaccattttggtgggaaattacacctaggctacatgctgattcgtgagaaacagaaagaacttcaggtgctgaatgtaatgtaccattttctgctttaaagagttactctgttttggcccttttggcatatgtgagttttcttatctcaagagcctcaaggaattagtccatgttgcgtgattggaatctcatgcgatcatcttcatacccatggatacaacagtcactgtctgttggcaaatgtaagcataggagggtgcagaccatggagcagagaaataaaaggagaccgggcaaagctgaagatgatagacgatcaagagagcacagcaaggatcgcaacggccggtcgtccagggatagagaaccagaaaggagagacagggttgagtctcgagatggtagaagagattatgaaagggatcgtgatagacgtcatgatagggacaggcgccatgaccgtgatcgggatagggattatgaccgctcccgtggacatgattcaaggaggagagagcgttcacgctccagggagcgcagcaggcgccacgagagatactaaatgttacaccatgcctgacagatttaggagtactggcggcgtctgttcaagatatggtttgagcttgtgcttcgtatcttctgaagaccggtctacttgacgctaaattcgcatggagtgttaagcatttattaaacgcatctggaatcaaatgaagttgtacttgcgaacggcttcacttaaaattcgcgccatttctaatattgtaataagctgtgcttgaaccttagctgtctctgtgtactcgacgtaccactcgctcccacaaatagcttcgaacatcctgtacctgaaacatgacgctgtttggtggaggtggagctgtaagtgttcttttgcacaattcattataaaaatcccaaatctgagtactaggaaatttttagtgag

SEQ ID NO: 4500 - DNA, 2186 bp, Zea Mays
agccggtccagcccacagtccacgaggacacgatccccgacctcatatcaggttcccctccccatcccggagagcaaaagcgcttctctcgctagcgagttcggcagtagaaaccctaaaaaaagacaccgccctccccttcgctagcggaaccgccctcccctcgccggggtaggggtttcgggggtagacgcccgccatggacgcgttccggaaacagctggacgtgctcatgggcgccaaccgcaacggcgacgtcgaggaggtgagccgcaactactacgaccgcgacgtctgccgcctcttcctcgccggtctctgcccacacgacctctttcagctcacgaaaatggatctcggtccttgttctaagattcactctcttcaactgcggaaagattatgaagaagcgaaagcaaagggaacagaaaattttgatagagaactcgaggatatgatagaaaggctcattgtggagtgtgacaggaaaattcagagggccctaaaacggcttgcagatgatgatgccaatgctgctattgcgatatcggtctctgaggttactctgacggatgacatactgcagctgtcaaaacagataaaggagaaaatggcagaagttgatgcctttgattttgaagggagaactgatgacaaaataaaggcccaggaagtagtggaagagctaagagctaaaagagctgatatgcaggctaccctcttgcttgatgcttttaacaaggacagagcttcattaactcagcctgctccacctcaagtggcagcagttccaccaccagctccacctgatgctcgtactcaagaaattatcaacgaaaagcttaagaaagctgaagagcttggtgaacaaggcatggttgatgaagctcaaaaagctttggaagaggcagaagctctgaaaaagctggcgccacgttcagagccaccttcagacccttcgaaatatactgctgctgatgttcgaattactgatcaaaaattacgcctctgtgacatatgtggagcatttctgagtgtatatgacaatgatcgacgtcttgctgaccattttggtgggaaattacacctaggctacatgctgattcgtgagaaacagaaagaacttcaggtgctgaatgtaatgtaccattttctgctttaaagagttactctgttttggcccttttggcatatgtgagttttcttatctcaagagcctcaaggaattagtccatgttgcgtgattggaatctcatgcgatcatcttcatacccatggatacaacagtcactgtctgttggcaaatgtaagcataggagggtgcagaccatggtatgaaaaaaaacatgtttacttaattgtgacgaactgctcatgtgtctgcttagtattatgttgggcagaagccggaggtttcttttctactgcctgagccatattatgtagaccaggtgataaataatactggttaagttatcctgaaagctttgccaacatttgctgagcagagaaataaaaggagaccgggcaaagctgaagatgatagacgatcaagagagcacagcaaggatcgcaacggccggtcgtccagggatagagaaccagaaaggagagacagggttgagtctcgagatggtagaagagattatgaaagggatcgtgatagacgtcatgatagggacaggcgccatgaccgtgatcgggatagggattatgaccgctcccgtggacatgattcaaggaggagagagcgttcacgctccagggagcgcagcaggcgccacgagagatactaaatgttacaccatgcctgacagatttaggagtactggcggcgtctgttcaagatatggtttgagcttgtgcttcgtatcttctgaagaccggtctacttgacgctaaattcgcatggagtgttaagcatttattaaacgcatctggaatcaaatgaagttgtacttgcgaacggcttcacttaaaattcgcgccatttctaatattgtaataagctgtgcttgaaccttagctgtctctgtgtactcgacgtaccactcgctcccacaaatagcttcgaacatcctgtacctgaaacatgacgctgtttggtggaggtggagctgtaagtgttcttttgcacaattcattataaaaatcccaaatctgagtactaggaaatttttagtgag

SEQ ID NO: 4501 - DNA, 1616 bp, Zea Mays
ggttggttggcgccataaattacacgccaccaccgctcgacctaccagccctccttcctcatccgcctgccctgcccgtcccgtccgtccacccccttcccttctttcccctttgcttgctgctgcctgcttctcgccgtcgccgcctcaattccctcctcgttgtccgtcgcctcgtccacgcgcacctcgtcctcctctccgttccctccacctcctcgaccgcaccgtcgtcgtctagctagcggagcgagctgcgaccagatcggagagccaagcacccaggaagagggggccggggaacaagaagaagccgccggaagccgggcgtggacgtgtggtggttttctgccggcggctgacaagtggtgtaggctacccgctctggccatggatccgtcgggcggcgcgttcctgccgccgctgcagcaagggagctcctccttcccgcggtcctccagcaacgcgtcgctcgccaggagcggcagcggcggcggcggcgttggcgccgggcgcgggaccaggggcaggaagatgatgcgcagggtctgccgcggcgtcatcaccttcatcttcgccatcggcggtgggtgcatgatgcagctgggctgttcctgggagcggtgaccggcggtctgatcgggctggcgacggagagcgggctgttccgcggcaccgggatcggcgccatcaccggcgcgctcgtctccatcgaggtcgtcgactcctccatccgcctctggcaggcgcgccgatccgggatctggagcatcctctacgtgctgaacgtgatctacagcctcctgacgggcaggctggtgcgcgagaaggtcgacccggcggtgcagcgggtggtccgcagccagatgaacgcggtggactcgtcgccgttcagggagtcgccggacctgttcgaggtggaggccaccaacggcatgccgcgggcgtccatcgacaagctccccgagtcgtggatcaccgaggagtacaggcgcgacgccgtcggcgacctctccggctgctccgtctgcctccaggatttccaggtcggggagaaggtgcggagcctgccggactgctggcacgtgttccacgtgccgtgcatcgacggctggctcatcaagcacggctcctgcccgctctgcaggaggaagctgtaggcggatcgaccggacgacgccatggacgatgttcttctctgcgatcgagccgatgatgtgtgtgtgtgtgcccccgccgccgccaccaccgatagctgctgctaggatcggaggagggaggagggagaagagactgacatctatagaacccttaatttatagagagggcttttgctttgctgctacttgtacgtgctctactacgtacctattgcatctttctttctttttttgatccaccatgatcgacctccctcctcagatccatccatgcatgtaatataccctggaccggcttgtgcttcgttcgatccattccatgcatctccggactgtgatctcgatctggtgtaatatatataaaaaaaaactactagtatgtaccatcgcactttggacatctatacatgcatgctggttttggtcatatttttttagaaaatattaatattcgag

SEQ ID NO: 4502 - DNA, 2200 bp, Zea Mays
acggccagcccacgccacgcctacggttcgcgccacttgcgggcgcggatcaccaccgccgtccgccggtgatcccctcgtccgccgctggcggttcggttcaccctcgccgtccgtcatctctgactccgacgggtcgtgctcacacgcccacccaagtctccccaaccctgcacctggtctgctcccagctcccagctcccagctcacctcgtgtcgggtcgggtcggtccgagccggaccgggccggagcgcgccacccaacccgttttgcggctgctccggtccgcttttccccctcttcctctgctattctccagtccccccctcccccgtcccccacccactccctcgtccagagtccagacccagaaggagagggagacagaggagaggaggagcagcgtggcgacgcccaaatcgagcgacctgatcgaggcccctcgccccaactcgctgaatcccaatccgagcccgccaattgggcgccccgcccacgccaagatgaagcgagctcgaaggcgtatgtgcaagagatgactgatgagggatgctagtgacattgatgaacttgttacgggcgtgctggcgaccgtcatcgaaccggcatgcccgaacaggctcagatgttaccggtaggcaggatggacttctatggtacaaggacgccgggcagcatgtcaacggggagttttccatggctgttgttcaggccaataacttacttgaggaccagtgtcagattgagtcgggcccactgagttttctagattccggaccatatggcacttttgttggcgtttacgatggacatggtggtccagagacggcctgctatatcaatgatcatctcttccagaatctgaaaaggtttgcatctgagcagaatacaatgtctgctgatgtactgaagaaggcgtatgaagctacagaagatggattcttttctgttgttaccaaacaatggcctgtaaagcctcagatagcagctgtcggctcatgctgcctggtcggtgtaatttgtggtggcatgctttatgttgccaatgttggggattcccgtgttgttttaggaagacatgttaaggctactggagaagttttggctgtccaactgtcagcagagcataatgtaagtattgagtcagtgagaaaagaactgcagtcaatgcacccagaagataggcacattgttgttctcaagcacaatgtttggcgtgtaaaaggactaattcaggtttgtagatcaatcggtgatgcttatctcaagaagcaagagttcaatagggaacccctatatgtgaaatttcggcttcgtgaaccttttcacaagccgatactaagttcagaaccatcgatcaatgtgcaaccactacaaccacacgaccagtttctcatatttgcatctgatggactttgggagcacttaaccaaccaagaagctgttgatattgttcacagtagcccccgcagggctgtgctaggaggctgataagagcggcgctgcaagtggcagccaagaaaagggagatgaggtactcagacctcaagaagatcgaccgcggtgttcgccgccacttccacgacgacataacagtcatagtagtgttccttgattccagcctcgtgagcaaggcgagcacgcaccgaggccccactctttccctgcgaggcggcggtgccagcgctggtctgcgcagcaacacgcttgcaccaacgtcaatgtggctatgaggaggctacaccctgactggaggacgttttctttcctcgtgtcgaatgtgttatatatgtacttgtaccggccaaggtcatccatctcccctcaatggtgtaaagaactaggagaggcgtggaagctcctctccagcgtctttgaatcccctcaatggtgtcaaggtgtggactcaagtcaatagcttcgctgttctgatgatgctctgtggaaactcgaatccttccacctgaaaaccaagtagtatgtcttctagtgctggaattaaccctagtgcatatatacatatgaaataaaaaaaagccaaaaggaggagtaacttatttaactgatgctgtgaggtgtatgtatgttttgtattgtatgtgtactgattttgactgccactgcatatactgttgttaatcgacccctggtaaagtgaaatcgctgatttcgtcctactattatcagctgttcccagta

SEQ ID NO: 4503 - DNA, 964 bp, Zea Mays
ctccggcctgccaaagccacttttttcttgcctccagaaaacaattgaccgctacaggacatacacaagggaaaatgtcaataacaagactgttcaacaagatatacagcaagtcaaagcagatgccgtaagcttggcaagtagactcgaagccctagaaaagaccaaacgaatgtttctgggtgaaaatttagaagaatgctccattgaagaactgcataatctggaggttaaactggcgaagagccttcacgtcatcagagggaagaagacacaactgctggagcagcagatatccaagctgaaggagaaggagaggaccctgctccaagacaacaaagagttgcgggataagcgcaacctccagtctccaccggaggcgccaccggacctgaaccgctgtgtccctccttggccgcgtagcctgccggcaccgagcaatgacatggacgtggagacggagctgtacataggattacccggcagggagcgctcctccaaccgggactctgattgaaccacggattttcagttcgatcggctaaaaggaataagctccctgaaattaaagcatcgaagggcacacgtcaatggttttatttgcaacttttgtatgcaaacttgtacttgaaaagtaaaaaaaataaaaataaatctgtagtatgtggatgcaagaaacggctggttagctagctgcaagccttctggggcctgaaaatgaaatccacccatggatacacccaaccaagcttgatgcgctacttttcttatacgcagctgccgaagtctttagagttcacttggcatatcgcatgcgacgccgacaactcgctcgggctacacgtgtagtgttattgtaacgcaaagggtgaaagggatacctggacactggcactgctgggatatgtaagcacaattccgctggagcgggccgatttcgcggcctgccactgcggcatttttt

SEQ ID NO: 4504 - DNA, 635 bp, Zea Mays
aacattgaaaaccgcagagaaggcatcgcaacctccagtctccaccggaggcgccaccggacctgaaccgctgtgtccctccttggccgcgtagcctgccggcaccgagcaatgacatggacgtggagacggagctgtacataggattacccggcagggagcgctcctccaaccgggactctgattgaaccacggattttcagttcgatcggctaaaaggaataagctccctgaaattaaagcatcgaagggcacacgtcaatggttttatttgcaacttttgtatgcaaacttgtacttgaaaagtaaaaaaaataaaaataaatctgtagtatgtggatgcaagaaacggctggttagctagctgcaagccttctggggcctgaaaatgaaatccacccatggatacacccaaccaagcttgatgcgctacttttcttatacgcagctgccgaagtctttagagttcacttggcatatcgcatgcgacgccgacaactcgctcgggctacacgtgtagtgttattgtaacgcaaagggtgaaagggatacctggacactggcactgctgggatatgtaagcacaattccgctggagcgggccgatttcgcggcctgccactgcggcatttttt

SEQ ID NO: 4505 - DNA, 1799 bp, Zea Mays
attaacgtcactaaaacaatcaggcttgattggttgctgcagcagctccaaggcattctagactggaggtctcaagttcgattcctcttaaatgcatctttttttgtgcaattactaggggcaacaacgtccaaatcccagacccacgcgcgctatgacttctttttgtgcacgctcggtcacgcgcaggatgacttcttttactgcaccggagggagtactcaaccaaccactttctacttttcaaatttagtccatctgtgaatcatttaggcgttttttatcactccagttgacaggtaataaaactattgctgatggcataataaaaaacagttgaagaaaagaaaacttgtcctcaatcctcattgattcatctaagatgatgtgttacctagctgatgctgaaccgttcgttttcgtaactaaacctcttttacatatcaatgggatgcaaattttttcttgtggttctgtattgcatgaagtacacaagtgtaattcacttgatggattcttaactccacagagaatactttgaggatgttgaccgaacatgggaaacctttgagaaaacattatggagccatatctctaactttttcaaactttcaaaagagagtcctcagacattggttcgagctttgagggttgttgaaatgcaagagatcttagatcaacaagttgcagaagaagcagctgaggctgagggtgctggtgctatggcgacaataacaaaccaacgtagaactgcaaacagaaaaggtgcaggggcaacagttaccccaagaaagggcactcaagaaaaatcgaaggttcagggaaagggctacaaggacaaatgctatgagtctatcaggatggctgttgaggcccgcttcaacaagttgcttactgagcttgtttttgtggaggacttgatggaagctttggaggaagccaaagctattggagatgagcttggcgatatatatgattatgttgcaccatgctttcctcctaggtatgaaattttccagctcatggtaaacctgtatactgagagattcattcagatgcttcgacttctcagtgatagagcaaacgatattcaaaatataaatatcctgaaggtgactggttgggtcgtgcaatatcaagaaaacttgattggtcttggtgtggatgaatcacttgcccaagtttgttctgaaagtggtgcattggatcccctcatgaacatgtatgttgagcgtatgcaggcaacaaccaagaaatggtacagcaacattttggaggctgacaaaacacaaccaccaaagagtacagaggatggaaaactatatacacctgcagcagtggatctattcagaatattgaccgagcaagttcagatagttagagacaacagcacagacgtcatgctatatcgaattgcacttgcggttattcaggtcatgcttgattttcaagcagctgagaggcaaaggcttgaggagccagcttctgatgttggtctggaatctctatgtgcattgattaacaataatctgcgttgctatgaactttcatcagagctaagtagcagtacattggaggcgcttccacaaaactatgctgaacaggttaattttgaagacacctgcaaaggatttcttgaggttgccaaggaggccgtcctccaaactgttagtgttatttttgaagacccaggtgtgcaggatctactcgtgaagctttaccagaaaggtattcccctcttcagaaagatgaaattgagagacaagttcaggagatgttgcagtcaggacttatctcca

SEQ ID NO: 4506 - DNA, 1987 bp, Zea Mays
tgagcaggataaattcacattcttgttggaaatgacataaacagacaatgagacaacccctagagacaacagacaatcctcagacattggttcgagctttgagggttgttgaaatgcaagagatcttagatcaacaagttgcagaagaagcagctgaggctgagggtgctggtgctatggcgacaataacaaaccaacgtagaactgcaaaaaaaggtgcaggggcaacagttaccccaagaaagggcactcaagaaaaatcgaaggttcagggaaagggctacaaggacaaatgctatgagtctatcaggatggctgttgaggcccgcttcaacaagttgcttactgagcttgtttttgtggaggacttgatggaagctttggaggaagccaaagctattggagatgagcttggcgatatatatgattatgttgcaccatgctttcctcctaggtatgaaattttccagctcatggtaaacctgtatactgagagattcattcagatgcttcgacttctcagtgatagagcaaacgatattcaaaatataaatatcctgaaggtgactggttgggtcgtgcaatatcaagaaaacttgattggtcttggtgtggatgaatcacttgcccaagtttgttctgaaagtggtgcattggatcccctcatgaacatgtatgttgagcgtatgcaggcaacaaccaagaaatggtacagcaacattttggaggctgacaaaacacaaccaccaaagagtacagaggatggaaaactatatacacctgcagcagtggatctattcagaatattgaccgagcaagttcagatagttagagacaacagcacagacgtcatgctatatcgaattgcacttgcggttattcaggtcatgcttgattttcaagcagctgagaggcaaaggcttgaggagccagcttctgatgttggtctggaatctctatgtgcattgattaacaataatctgcgttgctatgaactttcatcagagctaagtagcagtacattggaggcgcttccacaaaactatgctgaacaggttaattttgaagacacctgcaaaggatttcttgaggttgccaaggaggccgtcctccaaactgttagtgttatttttgaagacccaggtgtgcaggatctactcgtgaagctttaccagaaagactggctggagggaatggtcacagaatatcttgtcgcaacatttgctgattactttggtgatgttaaaatgtatattgaagaaagatcatttcgaagatttgtggaggcttgcatagaggaaacaattgtggtctatgttgaccatctcctttctcagaaaaactacataaaagaagaaacgatagagaggatgaggttagatgaagaggtgcttatggatttcttcagggaacacatcaacgtgacattgaaagcagagtgcggattctggcagatatgagggagctagcttcagctgagagtttggatagctttactctcatttacactaatatactggaacatcaacctgattgcccgcctgaggttgtcgagaagcttgtggcaatgcgggaaggcattccaaaaaaggaagcgaaggaggttgtacaagaatgcaaagagatatacgagaactcgcttgtggatggcaaccctcagaagtccggttttgtgtttggcaaattgaagtgcttgacagcaaagaaaggcatatggaggaagcttgggcagtaagtgtggacttgagcagagtggacagaagtaccacctaggcaaagactgtacgtttcacttctctatgatcattcttttgttcttttgtcgatgctactgttgggtttcacgtttagactatcagtgtgtactcagcttgaggagcaaaaatgtatattccactttgcttagctacagaggattttggtgtaagaatatgtaatttattcaataaaatggttgctatttgcaataagttggcccaagtcatcg

SEQ ID NO: 4507 - DNA, 697 bp, Zea Mays
aaacggcccaagcccaaaaaggcaggctgatatctcagacatagagcccactcgtcgagcgcgctcgcacgccgcgaatcgccggaccggtcggcgacggagacgacagagcccaagtcgaagcgatccgattttgccggcggcagcgaccggagtatggggctgggaggccggggcgtggtgggagacaggtggtcgcaacgcatcctctggatttgcgccctgggcagcgccgcctctacttcgtggcggtggagaggcaggctcagaatcgtgcgcgggcggtggcggagggcctcaaggcgctcgacggcgccggggatgacgtgtgacagcggtggacgctgccgtgcagagggcctcctttggttcacatgttcacagaacctcatagcgttgcaataatgtactaaacatctgtgctcagtctttgtagaattaaatgtggatcaatgtgagtgttctcctatttcacataattcatctgagcctttgttgctgcacagaaatgttgatccgtgccactacgtgagtgttttcttatttcacacaatttgtccatttaaggatccacatgatgtattccgtagagtggagtaaccagaattcaataactgtgtattcactgtgttttttattgtccaatacaatgcatatcacaaaatatcaatatgaaactgaagaaaatttactgtga

SEQ ID NO: 4508 - DNA, 3131 bp, Zea Mays
aaaacagtcggatacgatccgcgaatgcgagctgttttgaacggcgatttgtctttttgttctccagcgcgccagccaaccttaactgctacgatcgatcgaggggaggaagtttctggagctctagttctgcccatggcgtcggcgatggagctactggggagatcgttcgcgccgggccatgccgccgcggcgccgaggcggggaggcgggccctgcttcgcggcggtcggaagggaggggagtggtgcgcacaggaggagatcgtcgtcgtcgtcgtcgctgaggtcgactgcgccggtggacgcgctggccgagcgagtcgtggcgccgccggagagggccgaggcggtcccgccggagccgagcgtggccgcgcgggccgtggtcaccgtgcggcggagtcggaaaagggacgccaagtgccgggtcgccgagcggctggacgcgtgcgccgactgggtcggccgcagcgtcctcctcgagctcatcagcaccgagaccgacccaacggcgctggtgggctggtttggggagaaggacgtgaaggcggagcgggtggtgtacaccgccgacttcaacgtcgacgggtccttcggcgagccgggcgcggtcgccgtgctcaaccggcaccagcgcgagttcttcgtcgagagcatcgtggtggagggctttccctccggccccgcgcacttcacctgctactcgtgggtgcagcccacgcgcgtgcaccgcgacccgcgcgtgttcttcaccaacaagccgtacctgccggcgcagacgccgccggggctgcgggagctccgccgcctggagctcagcgacctgaggggcgagggcgctggcaccggcggcgagcgcaggaccaccgatcgggtgtgggagtacgacgtgtacaacgacctcggcaacccggacatgggcgccgagttcgcgcgcccgatcctcggcgggcgaccagcagctgccgtacccgcgccggatgcggacgggccggcctaagaccttcacagacgaccgcgcggagagcagggtggagtacccggagcccatctacgtgtcccgggacgaggagttcgaggagggcaagaacgagatgctgtcggaaggcgcgctcaaggcgctgctccacaacttcatgccgctgctggtgagctccgtgtcgccggacttccgcgacttcgccggcttccacgacgtggacaacctcttcaaggagggcctcaggctaaagcaggccctgcaggaccagctgttccagaagatccccttcgtgcgcaaggtccaggagaacagcgagggcctcctccgctacgacacgcccgacatcatcaagagagacaagtttgcttggctgcgggacgacgagttcgcgaggcaggcgctggctggcattaaccccgtcaacatcgagcgccttcaggcgttcccgccgatgagcaagctggacccggccgtgtacggcccgccggagtcggccatcacggaggagcacatcatcgggaggctcgacggaatgtcggtgcagcaggcgctggaggacaaccggctgtacatgctggactaccacgacatcttcctgccgttcctggaccggatcaacgcgcaggacgggcggaaggcctacggcacgcgcacgctcttcttcctgacgggcgcgggcacgctgaagcccatcgcgatcgagctgcgcctcccgccgatgaccgacgggtgcgcgcgcgccaagcgggtgctcacgccgcccgccgacgccaccagcaactggctgtggcagctcgccaaggcgcacgtctgctccaacgacgcgggcgtccaccagctcatcaaccactggctgaggacgcacgcgtgcatggagccgttcatcatcgctgcgcaccggcagatgagcgcgatgcaccccatcttcaagctgctgaagccgcacatgcgctacacgctcaagatcaacgcgctggcgcggcagatcctcatcaacggcgacggcgtcatcgagtccgggttcacccctggccgctactgcatggagatgagctcgttcgcgtaccgggagctctggcggctcgaccaggagggcctccccgccgatctcatcagaagaggaatggccgtggaggacccgacgaagccgcacggtctgcggctgctcatcgaggactacccgtacgccaccgacgggctgctcctctggtcggccatcacgcggtggtgcggcgcctacgtggccacgtactacccgtcggacgagtcggtgcaggccgacaccgagctgcagtcgtggtacacggaggccgtgcagacggggcacgcggacaagcgcggcgcgccgtggtggccgcgcctgacgacgcccggggacctggcgtcgctgctcacgacgctgctgtggctgacctcggcgcagcacgcggcgctcaacttcgggcagtacccgctgggcggctacatcccgaaccggccgccgctgatgcggcggctggtgcccgccgagggggacccggagcacgcgcacctggtggccgacccgcaccgcttcttcctgtcggcgctgcccggcctgacgcaggccaccacgttcatgaccgtcatcgacacgctgtccacgcactccgccgacgagcagtacctcggggagcgccccgacgaggcgtggacggccgacccggccgcgctggcggccgagcgcgagttcgcggacgaggtgcgccgcgccgaggaggagatcggccggcgcaacaccgacgcgggccgccgcaaccgctgcggcgccggcgtgctgccctatgagctcatggcacccacgtccggcccgggcatcacctgccgcggcgtccccaacagtgtcaccatttagtcttctcgcttgggcggacagcggagatgatctcgaagcgaattttttccattcattgtaatcgggcggggagaaatctaaaagcagaagcaaatggttttgggaacgtatcctgtgagcacaggtcttccgtgcgcacgtgagcattttaattgggaacaattggatctataccattaaaagatccaaactttagatatataccatggaccccacatgtcattgactcatgtggacccatatgtaagtgagatagtaatagtatggatctaaa

SEQ ID NO: 4509 - DNA, 951 bp, Zea Mays
tttgcatgccctcactcaaaataacagtattccatcttggttttgatgtttttgcttgggtgattcatatgttgactattgagtcactcgtaagtagtaagtcccaaccgtaatgtctttatagacgaaccttagtagcagcgtggaacgtgggaagagacgtggggaagaagaagaacagaggaagcagccgaagtggcggcatagagaagaggaactgaaaaggggcgagctggaggctgacaaagacaaaatgatgagagagtatagagctcaactggatgctgaaagagctcaaaagctagcaaacggaagaaatcactcaaggtcaaactcaaaatcatcatcttccaagaaagagaggaaggataaggacgcaaagaaaagaagtaaaaagaggagaaagcacaaaagttcatcagagtcaagttccagctcatcttcagaatcttcaagcagcgacgatgaggataggggttcaaggaagtccagatcacggtcgagatcaaagagaacaaggaaggaaaagaagagccggtcaaggtccaagcgcagaggcagtgaaagcgaggaggaaggcccggtacgcctctctaaattcttcgggaagtaaggagtagacgccgctgtacccaagacgcctttttcattttgaaacgtagattggtgggtttggatgtatcattcaacacaaattacttctgaaggttgagcgagccgtttaccatggtgttctcaatatgatgctcagctgttaagagggtctggtcaagttgtgtggcttctaaaaactttgtaagcaactggtaagtcattgttaaatcgctgtaccttggaggatttgatgccatatatttgagacattgaactgctatatttatgttaagactttacatatgcagtcagttgtttcagttatatgctcttttgctatatttatgttaagacttt

SEQ ID NO: 4510 - DNA, 1881 bp, Zea Mays
gcgacgtttgcaggatgcacccacatcacggctgtaaaatccgctgcaagtccgtcgattgttgttttatctttcctctttctctatcgaaaacggagcgcctgatacgatagtagcagcacagctagctctcctccccagaatctcgccggattccgccccccgccgcgccctcgcttccgccgcaggttcgcgtctgtgcccgcgcgtgttgtactaccggcggacggcggtgttggtggtggttggtggagttgccgacgacggtaggctatggactaccggccctccgacagcagcggaactgatgatgatcttccacaatttccacataagagtatcagaggcagcggacgtgtcagtggagaaggaaggtctcatgactgaacttaggaaggagctaagagtatctgacaaagcacacagggaactgttaaatagagtcaacaacgataatattatatgtagcataagggaatggagatcaacaggagggcttcaggcaagcttgtctaataacccacaactgattcatgactctgttcccagtcctaccacctctggccgtaagaggcaaaagacatctcaatctgttcctgctttacctgcaccgcctcctgcgatgcattcacaacagctggctacaccaacacagccatcatcttcaactgctaggaaagcagtacccccaggccataaaggcaaaaagatgaaaccagtaagtagataatttgaacactttctttttcctgtaagtctttgctgttctttggcagaagttcatgcactttcagggtcagaaggtaccaggtggctctgcagccaagcctataccatcttcagcaggtcctagtggaagaggaccgcacatgaataggggtggttctgctcctgaagctcaagctcagaatgtcgatccattgattggtcgtaaagtgatgagtcggtggcctgaagacaatagtttctatgaagcagtcatatacgaatatgatgctgaaacgggccttcatgcactggtttatgacatcgatacggcagatgaaacctgggagtgggttgatcttaaagagatgggacctgaagacataagatggcaagaggatgactctgggatagaccctgttacatatctgcgcagccggggtggcccaactagtggcgttaggaagccagcaggtcgcggtgggcccatgccaggttctgtaagaggaagaggattacagaaaaacatgcctaagaaagattttccacctccacaaaatggtgttggcaagagaagttccgatgacattgatatccttcataccgagagcctaataaaagaggtggggaaagtttttagcgttagcaatcctgatccacaggaagtagaaaaggcaaagaaagcactgaaggagcaagaacagtcgttgattgacgccatagcaaggcttgctgaggcatcagatggtgaaagtgacgggcacaatcgtgggcgaaggaacttgtatgctgctaaccagcatcaagcaagctacgttggtgccatgcccgtcggtgacagagctggtgccatgtaaacactgcatgaacgcatgcacaacataaaataactgcctgttgtacaatccatcgcctaatatttatcctggatttaggtctctgtaggctcttttgctttgggatgcttttttttttacaattgtaattcagaacgctgaccatgtaaagcttgtagatgcgtgtttctgtctctagctttttgttagtgtggtctcggcttcaatatgcatgataaagggaaaaagaaaaagatcacatttgttaaacaggtgtttcaccattttaatgcagcaatcattcgtcatgaccatgaatgcgcaaaaaaaaaaaaaaaaa

SEQ ID NO: 4511 - DNA, 1952 bp, Zea Mays
gcgacgtttgcaggatgcacccacatcacggctgtaaaatccgctgcaagtccgtcgattgttgttttatctttcctctttctctatcgaaaacggagcgcctgatacgatagtagcagcacagctagctctcctccccagaatctcgccggattccgccccccgccgcgccctcgcttccgccgcaggttcgcgtctgtgcccgcgcgtgttgtactaccggcggacggcggtgttggtggtggttggtggagttgccgacgacggtaggctatggactaccggccctccgacagcagcggaactgatgatgatcttccacaatttccacataagagtatcagaggcagcggacgtgtcagtggtaatgggcgagctgttgttcctgctggttcatatgctagggcaccaactgatatggtagcacaagttcaacaacttgagcaagaagcatatcgctcagtccttcgtgcattcaaagcccagtctgatgccattacatgggagaaggaaggtctcatgactgaacttaggaaggagctaagagtatctgacaaagcacacagggaactgttaaatagagtcaacaacgataatattatatgtagcataagggaatggagatcaacaggagggcttcaggcaagcttgtctaataacccacaactgattcatgactctgttcccagtcctaccacctctggccgtaagaggcaaaagacatctcaatctgttcctgctttacctgcaccgcctcctgcgatgcattcacaacagctggctacaccaacacagccatcatcttcaactgctaggaaagcagtacccccaggccataaaggcaaaaagatgaaaccagtaagtagataatttgaacactttctttttcctgtaagtctttgctgttctttggcagaagttcatgcactttcagggtcagaaggtaccaggtggctctgcagccaagcctataccatcttcagcaggtcctagtggaagaggaccgcacatgaataggggtggttctgctcctgaagctcaagctcagaatgtcgatccattgattggtcgtaaagtgatgagtcggtggcctgaagacaatagtttctatgaagcagtcatatacgaatatgatgctgaaacgatgggacctgaagacataagatggcaagaggatgactctgggatagaccctgttacatatctgcgcagccggggtggcccaactagtggcgttaggaagccagcaggtcgcggtgggcccatgccaggttctgtaagaggaagaggattacagaaaaacatgcctaagaaagattttccacctccacaaaatggtgttggcaagagaagttccgatgacattgatatccttcataccgagagcctaataaaagaggtggggaaagtttttagcgttagcaatcctgatccacaggaagtagaaaaggcaaagaaagcactgaaggagcaagaacagtcgttgattgacgccatagcaaggcttgctgaggcatcagatggtgaaagtgacgggcacaatcgtgggcgaaggaacttgtatgctgctaaccagcatcaagcaagctacgttggtgccatgcccgtcggtgacagagctggtgccatgtaaacactgcatgaacgcatgcacaacataaaataactgcctgttgtacaatccatcgcctaatatttatcctggatttaggtctctgtaggctcttttgctttgggatgcttttttttttacaattgtaattcagaacgctgaccatgtaaagcttgtagatgcgtgtttctgtctctagctttttgttagtgtggtctcggcttcaatatgcatgataaagggaaaaagaaaaagatcacatttgttaaacaggtgtttcaccattttaatgcagcaatcattcgtcatgaccatgaatgcgcaaaaaaaaaaaaaaaaa

SEQ ID NO: 4512 - DNA, 1098 bp, Zea Mays
gcatactacacacccctcctccctccccatccttcataagctctcatacgtctctctctctctcccttcttcaaaacaccccaccccatccaaaacctagaacacacacaacaccagagggctttacaaccgcgcacatgatcatgcaggcaatgtggaagccaggatggctagaggcccttgacacacagaagttcttcgtagcatgctctttccatgagcatgccaagaagaacgagaagaacatctgttgccttgactgctgcactagcatctgcccacactgtgtggcagcacaccgtgcacacaggctcctgcaggtgcggcgatacgtctaccatgacgttgtccggctggaggacctggagaagcttattgattgctctagtgttcagtcttatactattaacagctctaaggttgttttcctgaagaagagaccacagaataggcaattcaagggttcagggaatatctgcacctcctgcgacaggagccttcaagaaccgtatttccactgctctctggattgcaaggtagagtatatactacgacagaagaaaaaattgtcagcatatttgcgcccatgcaagaccttgcagcttggccctgatttcttcattcctcatgatgctgatgacgacacaactcactcaacccttgttgatgttgatgagcccatgggatcatcggactcggagaatttgagtgtgccgtgcacaaattttgttcggaaaaaacggagtggaccatatatttgtgcacggtctgcaaacagagtgtctgaagaagacatggccacaaatatgagcagaaggaaaggggttcctcagagatcgcctttgtgctaataaattcaatagttaattattttcccttttctttacttctttcatgttctttatctcttggactaaactggtgcaacaatgatagaattttgtctcagtactaccatgtgattaaaatacatcactagaggcaattgtactcaattcttcaagttggtgcaccagtttatatatatgtatgctttaacatagttcatgttatccccttttcgaagttctttaagtatgctgttatttgctcagaaaa

SEQ ID NO: 4513 - DNA, 3832 bp, Zea Mays
catcatcaaggagagagaagcgagactgcgagagcgccgagaggcagaagggctggggcgcggccgcgcggggaggcgtcaagcagtttagcagccatgagcggcggcgggctggaagtgcaggttcacgtggtgggcggcgcccggagctgctttgccgcgctcccgcttcacctcatccacgacttggagcgcacctcagccaccggcgacctcccgcccgtcctcgcgctcgaacttcgcggtcccgccggcgcccgctggtccctcgcctggtccggcgccgcttcccgatccagcgccatcgaggttgcacaagagttggcagactgcatctcgctgcctgatggaactatagcacagttgagcgtagctcgttctctggccaaagctgactcgatcagtattgaaccctacagtgaggatgactgggagatactggagagccgtgctgatttggctgaagaaacaatcttgaagcaggttggcatcgtttatgagggcatgaaattcccattgtggttggatggacataatattgtgaagtttgttgtcttgtcatctttccctgagaagacagttgttcaacttgtaccaggcactgaagttgttgttgcacctaaaaaacgaaaagagaagccttctcaggatctacaaaagcaaagtgcactgaaagaacaagtcaaaataaaggcactcctgcgtgttcaagcagctgataggaagtatgcacatacattcaaatatgaaggtgtcgagataggtgtggttgtcagctatgctgtgctaattcatcctgatacagctgcaagtatttcagttggcaatctccaattagtcgctgtttcacctaaatcatcaaagaaaggactacctctaaaaggcaaagaagttggacgaaaaaaaggaatttcagtaactaaagaaaggtcccatgaagccattgtttatatcttactttcagactctgttgcaaaagggcatgttatgcttccgtactctattcgtcacttcataagtgctgatgtacattcatgggtatatattaagacatattcagccaacatcaaggaggatgaacctctagtgacaatatctcctttaaagttcaagatgcatgtgaaagatgctcatgatagcagtaaattagtcagtcaggaagtggacacttcgaggataaccagaattccttcagaaaatggtgatttcttccagaaagctcgttacagtgaaaacaaaaatattcgaggtgcagatattgagagcatttctgaatcagtgtcaaggcagaaattttttattaagcattggcttattgggcaccttaaagaaatgggcttgcatgctagccatactgagatgaattcaatagtcttgccaaccaatattttgctccatttggaagcgacagataaagaaggaaccaaaggagttgaattcttatactttctaaagcttacatctgaaaattctaatttcaacgattcacaacttaatattgagactacttggagtgttccaaccagcaatgctgatgatcttgaactgcattttgggaagttcgagcttggcgagcctgtatcttttgattccctagtggacagtggttccagtgatggtttcaagctgactcggtcttctttaggctggatggagaatgcaatgtcagatgtgacaaaaaggttatctgtgctcttatcagcaactagcctaaggttatttaacagaataaagttcccctttcctggacatgttattgtatatggacctcgaggttctggcaaaactgctttgaccagggcttctgcaaaatactttgaggaccataaagatatcttggcgcacataatatacattgattgttccaaacttgcacttggcaaggctaaggagacaaggcaagaaattgaagacagcatgtctgaagcactgcttcattcaccttcgatcatcatatttgatgatctggacagtgtagtttcagtctcctcagatcctcaagtgtctcaatcatccagttcttctgattcacttgttcaatatttggctgacattatggatgagtacaagattcaaaatacatgcgggtatggacctatcgcgtttatggcttcagttcagtcacttcagagtcttcctcaagacttaacctcttctggaagatttgatttccatattgagctttctgctcttgcagtacctgagcgcaaagcactattgcaacatcaagttgaggagcatgatttattgtgttctgaggaagttctgtcagagatagcatcaaaatgtgaaggttatgatgcatatgacttggaaattttggttgatagggctgtgcacactgctgcttatcgctttcttctgccttctaatgcttgtcacaactctctgaaacgaactttgttgatggaagatttctttaaagcaatgcatggcttccttccagtcgccatgcgtgatcttaggaaatatgctcctgatgataaagatggtggttgggaggatgttggagggctagatgaagcagtaactatcattaaagagactcttgaattgccgtcaaaatacccaaatatctttaccagggcacctgtgcggttgcggtcaaacattctcctgtatggaccacctggatgtggtaaaactcacattgtgagagctgcggctgctgcttgttctttgcgattcatttcagtcaagggtccagagctattgaataagtatattggttcatctgagcaatctgttcgcgacttttttgcaaaggccgttgctgcagcaccttgcctattattctttgatgaatttgactccattgcaccccagcgaggaactcatagtgcaggagtttctgatcgtgtagttaatcagttcttgacggaactggatggtgtggaaaccttaactggagtattcgtatttgcagctacgaggtttcactggcaagtgatgccagtctcgaagatgttgcttctctgaccgaaggatttactggtgctgatctcgctgctattctaacggatgctggactagctgcaattcatgaacttttggacaaccaggagaacggtgttccagaaaccgaaccgtgcatcagcaaagaacttctcatgtccgtcactaggaaggcaagaccttccacaccagcagacgagaagatgcggtatgatagggagtttggtgaattcgtgtcatccaggaagtctatttcgacaaaggcaagagagtcaaaaggcaaaaaggttacactagcttgagcctttccttggccaatattaatgcgctgcaaaatttggacagtggcctacatgaaggctgctaacacgcggacttgtcaagtcatgcgacgtaggcttcctttcatttgaagagaaacaaaatctacaaagaaacctaaccaaggctcacttgtgttagtgtacttggatggaggaggaaggccattggagggacctgcaggtggtcaaaggtgtcatagtaggaaattttgtacggtaatcctgctgtaattaaagttataacacttgtcacaaattttgtacggtggtgaacggtaggaaatctatactacttattaagaagagaaaaccggtaatcctgctgtaatgaaagttatggtgaatgatccgcttcttaacgtgcagcggtcgtcttggatagatcagatgtgttcgcctgcttcgtggggggctctagccacgggatagatcattgtttgcaaggagagggtgttttttttttggagatgcaaagagagggtgtagatttggttctatgggcaataaaggactgtttagttcagctatagatttttagaattctgattttagct

SEQ ID NO: 4514 - DNA, 1083 bp, Zea Mays
tatgagtataatatatacagctacttcccaccctctcccccgcaccgtcggcaccaagatgacgaccccgccgcgccgatcgccgccgctccggggaagaggccatgcgggacttcgggctctggcgcctatggtcaacatccacgagcgctcgcctgtgcccgcgtgcgtgccggcacacccggacccttcgtcgtcgatctccccggacgactggcggcgtttggagggcgcaacgttctctgtgatgtgcaagatccatcccaccgtctcctcccagcaccttcgcgccagggtaatcgactacgtccagcgcctcttcaggctccaccatgacggctaccaggaaaccttggccggatacgcaaggaattctattttggtgcttgcaagctcggcaagattcttcaggcgcccgcgtgtttctctgccaacgaaatcaaccggtttttcaggaacacattaagcagggcagatgttccggtgagctctcctgatgatgttctacaggccgctagtgtttctgcgtcaccgggcaacaagggcgtggaaggagtcagcaagggcagttcacccaacaactcgtgtgacgttctgtgcaatcagttcggttacattaaaatctcagattccaacaatgcgctgcagaatctggtcgtggacaggcccgcttaggctgtacctgcacatggtcatagaacctccagcagcttactcatcttactttctaccatattttttttaaaaaaaacttccacattataaagaatacagtctatggtataaaataatgttttacatggctgtatacacggaccgctgatcatagcctaagtcgttgtcgttggtggccacaacaactgtgaatggtgtgtataaaaggatgggccaacaaattacgagattaattgtgcataaggttagctcattgcgaagctaggcacataaattttcttttgttaatatgtatatttatgttcttcgtaaggaaatgtctagatcaagaaaatgtggcccatggataatattttatattgtaatagacgtgattgacaaagactttcaccatatattttggtttcc

SEQ ID NO: 4515 - DNA, 1332 bp, Zea Mays
accatctgtccgaccagaaaaaagtattggtcccattcccaacaacagagaccatcgaagatttaaaaaattgtctaacttgttgctgcaaggggatactcaaaccaaaccacgatggagaaggttgatcaaaacttggggaaaaataacttgttgaggagaagcataatgcttatcaaacattggtgttattatgaaagctgcattcttggtgctcaacgtggtttggtttccacttatgctttggagacattagtgctgtacattttccatgtcttccacaagtctctggatggtccattggctgttctctataggtttcttgactactatagcaaatttgattgggataacaaggggatcagcttgtttggtcctatttcactatcttcactacccgagctagtcaccgagccaccatatactcgtgatgatggttttctctcacgggaggcgtttctcaaagactgtgctaaggcttttagtgtccccccaataaactctgaggaaaatccgcaagtattctccaaaaagtttgtgaatatagttgacccattgaagcagagtaacaatcttggacgcagtatcagcaaaggaaaccttggccggatacgcaaggaattctattttggtgcttgcaagctcggcaagattcttcaggcgcccgcgtgtttctctgccaacgaaatcaaccggtttttcaggaacacattaagcagggcagatgttccggtgagctctcctgatgatgttctacaggccgctagtgtttctgcgtcaccgggcaacaagggcgtggaaggagtcagcaagggcagttcacccaacaactcgtgtgacgttctgtgcaatcagttcggttacattaaaatctcagattccaacaatgcgctgcagaatctggtcgtggacaggcccgcttaggctgtacctgcacatggtcatagaacctccagcagcttactcatcttactttctaccatattttttttaaaaaaaacttccacattataaagaatacagtctatggtataaaataatgttttacatggctgtatacacggaccgctgatcatagcctaagtcgttgtcgttggtggccacaacaactgtgaatggtgtgtataaaaggatgggccaacaaattacgagattaattgtgcataaggttagctcattgcgaagctaggcacataaattttcttttgttaatatgtatatttatgttcttcgtaaggaaatgtctagatcaagaaaatgtggcccatggataatattttatattgtaatagacgtgattgacaaagactttcaccatatattttggtttcc

SEQ ID NO: 4516 - DNA, 1823 bp, Zea Mays
tatgagtataatatatacagctacttcccaccctctcccccgcaccgtcggcaccaagatgacgaccccgccgcgccgatcgccgccgctccggggaagaggccatgcgggacttcgggctctggcgcctatggtcaacatccacgagcgctcgcctgtgcccgcgtgcgtgccggcacacccggacccttcgtcgtcgatctccccggacgactggcggcgtttggagggcgcaacgttctctgtgatgtgcaagatccatcccaccgtctcctcccagcaccttcgcgccagggtaatcgactacgtccagcgcctcttcaggctccaccatgacggctaccaggtcatttcatttggatctgttccattgaagacatatcttcctgatggagatatcgacttgactttattgtgcgctgcaatttctgatgagaatctggaaaatgaagtgtgcgctattctaaaatcggaagagcagaggaaagattctgaatttgaagtcaaggatgtcaagtatgtacctgctgaggtcaagcttgtgaagtgcaaggtgcaaaacattgctgtagacatctcagttaatcagattggtggacccaataaagtttattttctagagaaggttgatcaaaacttggggaaaaataacttgttgaggagaagcataatgcttatcaaacattggtgttattatgaaagctgcattcttggtgctcaacgtggtttggtttccacttatgctttggagacattagtgctgtacattttccatgtcttccacaagtctctggatggtccattggctgtttcttgactactatagcaaatttgattgggataacaaggggatcagcttgtttggtcctatttcactatcttcactacccgagctagtcaccgagccaccatatactcgtgatgatggttttctctcacgggaggcgtttctcaaagactgtgctaaggcttttagtgtccccccaataaactctgaggaaaatccgcaagtattctccaaaaagtttgtgaatatagttgacccattgaagcagagtaacaatcttggacgcagtatcagcaaaggaaaccttggccggatacgcaaggaattctattttggtgcttgcaagctcggcaagattcttcaggcgcccgcgtgtttctctgccaacgaaatcaaccggtttttcaggaacacattaagcagggcagatgttccggtgagctctcctgatgatgttctacaggccgctagtgtttctgcgtcaccgggcaacaagggcgtggaaggagtcagcaagggcagttcacccaacaactcgtgtgacgttctgtgcaatcagttcggttacattaaaatctcagattccaacaatgcgctgcagaatctggtcgtggacaggcccgcttaggctgtacctgcacatggtcatagaacctccagcagcttactcatcttactttctaccatattttttttaaaaaaaacttccacattataaagaatacagtctatggtataaaataatgttttacatggctgtatacacggaccgctgatcatagcctaagtcgttgtcgttggtggccacaacaactgtgaatggtgtgtataaaaggatgggccaacaaattacgagattaattgtgcataaggttagctcattgcgaagctaggcacataaattttcttttgttaatatgtatatttatgttcttcgtaaggaaatgtctagatcaagaaaatgtggcccatggataatattttatattgtaatagacgtgattgacaaagactttcaccatatattttggtttcc

SEQ ID NO: 4517 - DNA, 1233 bp, Zea Mays
aacctgattgcacacgatattttctaggcaaaaacctctcatgctaccttttgtttttcgccttcttccctataaataacggccaaattgcccacaaagaaaccacccacccgcgcgccgtgcctcggttttagggcccttccctcaccgccccgcggccatgaagctggaggtcatgcccaagcccaaacagcgggtgctggaggcgcagcagagggaggaggccatggagatgagcggcctggacctgtggaagcacgagaagccgccaaggatctgccccttgcccccgtcgctcccgccgccgccgccagcgttcgacgaggcggcgctcgtgccgccgctcaacttcgccgtggtcgacgacggcatcttccgctccggattcccagggaccgccaacttccggttcctcaagtccctcaacctccgctccatcgtgaaccatttgtcaacatacccgacgacaaaataagggaggcgctcaaagttgtcttagacccaagaaaccaacctctgcttatccattgcaagagaggcaagcaccgaactggctgtgtggtcggatgcttgaggaagctgcaggaatggtgcttgtcttcagtcttggacgagtaccatcgctttgccgctgcgaaagcgaggatcactgaccagaggttcatggagctgttcgacgtttcaagcttgaagcacctgacaccctcacactgttaaccaaggcgtgtgatcgattggtcccccaactctagtacatctcaaagcctatcttccgtcagctactgaaccgattcagttgtgaataattttggaatccgctagagtccgtgaggtagtgatgaaaccattgcaaaacgtttgtgcttgaatggtttattttcctcctgcatagcgcactgcagagcctgagaaccagattgctgtagtcgatttgcgaggggttctcttttttttttggggtacctttcgcgaggaactcgccattgtttttgggtactgaagcatgtactcgagcagctttgctaaggagaaatgaactattctcaaagtgcaaaaaggcttgtctcttcttgcatgagtgtagttagggatcctgcatattaagaagaggcctaaacagcatgttaattgcctagataggcttcagttatcccaaaacattggagaatattaattgcatgtctcggattgaagttcataaactgaaaatgacgtaaaatttccgtatattac

SEQ ID NO: 4518 - DNA, 3478 bp, Zea Mays
ccttccttccgtcgcggcccgcctccttcactacaaccaggacaggccaacgcggaagcccgtcctccccacccccttccagatttgcagctcgcacctcgcgaatccccgaattccccactgcctcgccacgccgcgcgctgaccgcggcacccggagccccacctgctattcccgaggcggaggacccatcctgccttggcgctcgttcctccctcgtgatcggcgccgcgggcgaatcgcgctgcccggtgggggggaatctagggttccggccatgccggcctagtcgtagggcgggggtaccggcctgcgtcgccggcgcgcgtggagatctcggtgcctccgaaccctggcgggggccggggaggccgcagctgctgaggcatggacgtggactcgcgcatgacgacggagtccgactccgactccgacgcggcggccgcggccgcccgcgggggcaacgccggaggttccgggtccgggagcgagacctcctcgtcgtccgcgccctcgacgcctgggacacccgggacgcccgcggcggccccgaatccggcgccggtcggcgctgtgggtccgaggccagcacctgggtacacggccgtgaacgcggtgatcgagaagaaggaggacgggccagggtgccggtgcgggcacactcttaccgcggtgccggctgtcggggaggagggcgcgcccgggtacatcggaccgcggctgatcctgtttggtggggccacggcgctcgaaggaaactctgccacgccgccctcttcggccgggagcgcggggatccgtcttgctggtgccacagcagatgtccattgctacgatgtgtcattgaacaagtggagcaggcttaccccacttggcgagcctccttcaccaagagctgcacatgtggcaactgcggttggaaccatggtggttattcagggtggaattggtcctgctggtttatctgcagaggatcttcatgttctagaccttacacagcaacgaccacgatggcacagagtggtggttcaaggacctggtccaggtccacgatacggtcatgtgatggccttggttgggcagagatttttgttgactattggtggaaatgacgggaagcggcctctggcggatgtatgggcccttgatactgcagctaagccatatgaatggaggaaacttgaaccagaaggtgaaggaccacccccatgcatgtatgccactgcaagtgcacgctcggatggacttctcttactttgtggtgggagggatgcgaatagcgtgcccttatcaagtgcatatggtcttgcgaaacatagagatgggcgctgggagtgggcaattgcccccggtgtctctccatcacccagataccaacatgcagctgtttttgtgaatgcacgtcttcatgtgtccggaggtgctcttggaggtgggcggatggtggaagactcctcaagtgttgcagtactggacactgctgctggagtctggtgtgacacaaaatctgttgttacaactcctaggacaggaagatttagtgcagatgcagcagggggtgatgctgctgttgagcttacacgacggtgcaggcatgcagcagctgctgttaatgatctcatattcatttatggaggtttacggggcggggtacttctggatgatcttcttgtggccgaggatcttgctgctgctgaaacaacaaatgctgctaatcatgcagcagcaaatgcagctgccacaaatttgcaagcaggacgaacacctgggaagtatgcgtataatgaacaaacaagacaaacaattacagaatcaggtcctgatggggctgtagttcttgggactccagttgcacctcctgtaaatggggacatgtatactgatatcagtcctgagaatgcggtgctgcaaggacagaggagattaagcaaaggcgtggattacttggttgaagcatcagcagcagaggcggaggcaatcagtgctacattagctgctgtgaaggccaggcaggttaatggtgagatggagcagttgccagacaaggagcagtctccagactccacatcaactagcaaacattcaagcctcatcaaactggacagtgctctttctaacaacttggcagctccacctggggttcggttgcaccatagagccgtcgtggtcgctgcggaaactggaggtgctctaggtggcatggtcaggcagctttcaattgaccagtttgaaaatgaagggagaagagtcagctatggcaccccagagaacgcaactgcagcaaggaagttgctagatagacaaatgtctattaatagtgttcctaaaaagcttaaagcacctgttaaaatatttggagatttacacggacaatttggagatctgatgaggttattcgatgaatatggtgctccttcgactgctggtgacattgcttacattgattatctattcttgggggattatgtagatcgtggccagcatagtttagaaactatcactcttcttctcgcattgaaggttgaatatcctcaaaatgtacacttgattcgaggaaatcatgaagctgcagatatcaatgctttgtttggtttccgaatagagtgcatagaacgaatgggtgagagagatggtatctggacatggcatcggatgaataggctatttaattggcttcctttggctgcgcttatagaaaagaaaatcgtttgtatgcatggtggcatcggtcggtcaatcaaccatgttgagcaaattgagaatcttcaaaggccaattacaatggaagctggctcggttgtcctcatggatcttctgtgagaacgacagtgttgaaggactgaggcccaatgcccggggtcctggtcttgttacatttgggcctgatcgggttatggagttctgcaacaacaatgatcttcagttaattgtacgagcacatgagtgtgtgatggatggatttgagcgctttgctcaaggtcacttgatcactccttcattaacaacaaaataaggaggtactgcaaataatgccggagcgatcttggttttgggtagagatcttgtggttgtgccaaaactaatccatcctttgccccctgcaattacgtcacgtgaggcgtcgccggatcatattgaggacacatggatgcaggagctaaatgctaacagaccaccaactccgaccagggggcgtccccaagcagtagctaatgacaagggttctcttgcctggatatagtagattgaccacacattggttggtatgattcatatgaagcctgagtggtctggatcttgttattttcatttgtgttcgggagaggggctggtcgacagccgtaccgaaacgaaagattgatgtacaggggagcataaagactataaagttggtagaagggagcttaatctattttcttctctctccaattcgtttcattgaacacgagtagcaaacgaatcaagctgattcatcaga

SEQ ID NO: 4519 - DNA, 3683 bp, Zea Mays
ccttcctcccgttcccttccttccgtcgcggcccgcctccttcactacaaccaggacaggccaacgcggaagcccgtcctccccacccccttccagatttgcagctcgcacctcgcgaatccccgaattccccactgcctcgccacgccgcgcgctgaccgcggcacccggagccccacctgctattcccgaggcggaggacccatcctgccttggcgctcgttcctccctcgtgatcggcgccgcgggcgaatcgcgctgcccggtgggggggaatctagggttccggccatgccggcctagtcgtagggcgggggtaccggcctgcgtcgccggcgcgcgtggagatctcggtgcctccgaaccctggcgggggccggggaggccgcagctgctgaggcatggacgtggactcgcgcatgacgacggagtccgactccgactccgacgcggcggccgcggccgcccgcgggggcaacgccggaggttccgggtccgggagcgagacctcctcgtcgtccgcgccctcgacgcctgggacacccgggacgcccgcggcggccccgaatccggcgccggtcggcgctgtgggtccgaggccagcacctgggtacacggccgtgaacgcggtgatcgagaagaaggaggacgggccagggtgccggtgcgggcacactcttaccgcggtgccggctgtcggggaggagggcgcgcccgggtacatcggaccgcggctgatcctgtttggtggggccacggcgctcgaaggaaactctgccacgccgccctcttcggccgggagcgcggggatccgtcttgctggtgccacagcagatgtccattgctacgatgtgtcattgaacaagtggagcaggcttaccccacttggcgagcctccttcaccaagagctgcacatgtggcaactgcggttggaaccatggtggttattcagggtggaattggtcctgctggtttatctgcagaggatcttcatgttctagaccttacacagcaacgaccacgatggcacagagtggtggttcaaggacctggtccaggtccacgatacggtcatgtgatggccttggttgggcagagatttttgttgactattggtggaaatgacgggaagcggcctctggcggatgtatgggcccttgatactgcagctaagccatatgaatggaggaaacttgaaccagaaggtgaaggaccacccccatgcatgtatgccactgcaagtgcacgctcggatggacttctcttactttgtggtgggagggatgcgaatagcgtgcccttatcaagtgcatatggtcttgcgaaacatagagatgggcgctgggagtgggcaattgcccccggtgtctctccatcacccagataccaacatgcagctgtttttgtgaatgcacgtcttcatgtgtccggaggtgctcttggaggtgggcggatggtggaagactcctcaagtgttgcagtactggacactgctgctggagtctggtgtgacacaaaatctgttgttacaactcctaggacaggaagatttagtgcagatgcagcagggggtgatgctgctgttgagcttacacgacggtgcaggcatgcagcagctgctgttaatgatctcatattcatttatggaggtttacggggcggggtacttctggatgatcttcttgtggccgaggatcttgctgctgctgaaacaacaaatgctgctaatcatgcagcagcaaatgcagctgccacaaatttgcaagcaggacgaacacctgggaagtatgcgtataatgaacaaacaagacaaacaattacagaatcaggtcctgatggggctgtagttcttgggactccagttgcacctcctgtaaatggggacatgtatactgatatcagtcctgagaatgcggtgctgcaaggacagaggagattaagcaaaggcgtggattacttggttgaagcatcagcagcagaggcggaggcaatcagtgctacattagctgctgtgaaggccaggcaggttaatggtgagatggagcagttgccagacaaggagcagtctccagactccacatcaactagcaaacattcaagcctcatcaaactggacagtgctctttctaacaacttggcagctccacctggggttcggttgcaccatagagccgtcgtggtcgctgcggaaactggaggtgctctaggtggcatggtcaggcagctttcaattgaccagtttgaaaatgaagggagaagagtcagctatggcaccccagagaacgcaactgcagcaaggaagttgctagatagacaaatgtctattaatagtgttcctaaaaaggtaattgcatctctgttgaaacctcgtggctggaagccccctgtccggaggcagttcttattggactgcaatgaaattgcagatctttgtgacagtgccgagagaatattttcaagcgaaccaagtgttttgcagcttaaagcacctgttaaaatatttggagatttacacggacaatttggagatctgatgaggttattcgatgaatatggtgctccttcgactgctggtgacattgcttacattgattatctattcttgggggattatgtagatcgtggccagcatagtttagaaactatcactcttcttctcgcattgaaggttgaatatcctcaaaatgtacacttgattcgaggaaatcatgaagctgcagatatcaatgctttgtttggtttccgaatagagtgcatagaacgaatgggtgagagagatggtatctggacatggcatcggatgaataggctatttaattggcttcctttggctgcgcttatagaaaagaaaatcgtttgtatgcatggtggcatcggtcggtcaatcaaccatgttgagcaaattgagaatcttcaaaggccaattacaatggaagctggctcggttgtcctcatggatcttctgtggtcagcattttcagcgactcctaaccctttcatgattggtattctattcatttcatatcttgttctgacttttacaggtctgatccaacagagaacgacagtgttgaaggactgaggcccaatgcccggggtcctggtcttgttacatttgggcctgatcgggttatggagttctgcaacaacaatgatcttcagttaattgtacgagcacatgagtgtgtgatggatggatttgagcgctttgctcaaggtcacttgatcactccttcattaacaacaaaataaggaggtactgcaaataatgccggagcgatcttggttttgggtagagatcttgtggttgtgccaaaactaatccatcctttgccccctgcaattacgtcacgtgaggcgtcgccggatcatattgaggacacatggatgcagggggcgtccccaagcagtagctaatgacaagggttctcttgcctggatatagtagattgaccacacattggttggtatgattcatatgaagcctgagtggtctggatcttgttattttcatttgtgttcgggagaggggctggtcgacagccgtaccgaaacgaaagattgatgtacaggggagcataaagactataaagttggtagaagggagcttaatctattttcttctctctccaattcgtttcattgaacacgagtagcaaacgaatcaagctgattcatcaga

SEQ ID NO: 4520 - DNA, 831 bp, Zea Mays
cctccgatgtctatagtacccaataaatctaggtcacaaaccttgctttactattaaatattgatggagacagaatgtcagccattcagagatgaaatcaccgagaacaagtcacgaaaccaacatatgtggaatgaacatgctctagactctaacctgcccccagttccaaaatcatttatttgctacatggatttccaattgtcaacatcctgcaacacatgcaaaagcgagagcgcaaaaacatagataagccagatgaagcacctaaaagcatagataagccagacgaaccatccacagatagaaatcccaaaccaaacattatgacagttgaactaccaattacttgagctaaatgatctgcagaacacagaaataccagcaacacaagaattaaagcttcagtcagagcatagcaagataaagcagaaacaagcttgattaaatgaaagttgtagtgttgtagttctagcgatctctggttgaatctccgaagttaaaacatgatcattaccttctacaactgcagattaaattagaaatatctgaatattatagtaaaagtatcatggttcatatacaagaatttgtaaattggataagttagtacccccaacacataatccacgatgccaagcccaagcaaaaaatagcagtaagaccaataaaagagaggtagagccaaacgatgttctccagatgcaataaacttcagtccagtcaaagattcaatccacctccaaaatgtttaaatctacctccaaagcaccacctgatcccgctaataacatttttctaattaaggacgatcaagcttcaaattaatcc

SEQ ID NO: 4521 - DNA, 1318 bp, Zea Mays
ggagtggagtagtatgcctgaccaacgcgactggtcgactgctagcccgtagctgcgctgttggcctgttgccatgccatatccgtcgagctgaagcctgaagcaaccaccatttcgatacgcgcgagggaacggggccggccggccggccggggatcggaactgaagtgtgggcacacaagagtcacaacagggggagtgggggacattccaatcagttccctgcgtgtgagcgatgcagcgggacgcgagaagctggtcgccggcgccggccacggacgccgccggcccttacgcgatgccttcgcccgtgcagccgtcgaccaagagcacgaaggagacggtgaagaatgcgctgtcgcggtgggggcggaaggtcggggaggcgaccaggaaggccgagggcctgtcgcgcaacacatggcagcactgtgggcgactctgctctgttcatcaactctctctaactatatacaccatcgccgatcagactggttgaggacggcgccgagcatcgcggaggccgcggtggggaggatcgcgcaggggaccaaggtgctggcggagggcggccacgacaggatattccgccaggccttcagcgccccgcccgacgagcagctgcgcaagtcctacgcttgctacctctccacggccgccggcccggtgatgggcgtcctgtacctgtccacggccagggtcgccttctgcagcgacagcccgctgtcctacgaggcttccggcggcgacagaacggagtggacccactacaaggtggcgattcctcttcaacggctgcgggcggcgagcccgtcggccaacaagaccaagcccgcggagaagttcatccagctggtgtcggtggacagtcacgagttctggttcatgggcttcgtcaactacgacggcgcggttgcgcacctgcaggaagcgctgagcgggttccgcaacctgcaggcgtgacatggaggacctcaatgcaatggacagtgttgtcttgtacgtgctcgccagaactgattgatcgaacagagcgattgtgtacccgctctctgtgtgtgttgcggtgctagtgtttgcatcgtgttgtgcgtgtgcggatttgtatgacatttttttgatttggttgccattgtcagcgagagaacagtccaatcattttattcagatttcagagaagaccatggttatccatggcgatggctttgatgatcacctgcaacatcatcaacacatctattttagacgctcttttgtgttggatttgatctcaaacttatatagggcattaataaatataattactactagatttcat

SEQ ID NO: 4522 - DNA, 1015 bp, Zea Mays
aaatcgagtcgagcaagttatcgaggaaccagtatttcgtccggtcgtccagccctatctgcagtccaccgtcgggcgagcccgagaatcccgtctcctcggcgccgcggcccccggtttttttatgctttcctttcggtcggcgacgcatacattcggcgagggagaggaagaagtcagtaaagtaaattctgttgctccaattcggacgaggagatgccgcggatccctctgatcaggttccccaagcggaatctcaaagccccatctccatccgcgccaggggctaaagcagaggcaccatcttctggagagattaaaaattaccgctttagatctgatgtgccttgcccaccttctcatactgccgtaggaggtccagcttcactccttcctaagcgcaaacccctgactgaagaagagattgaggctattatgctggggggctccatctgatatcacctcatatgaattggaaattctaggaacatcaataagattgtatgcctgagcttattgcctttgacctctgaaagagtgttattgaagccatgtcgatatggaagtgttttttttaattcagtctggaagttggctgttgagacatccatttccagtactccgcacatgtaactgagcaaaccgtgaacacatttagttccttgcagaagtgttgagcatggaatggttttgcttttgcataccaggttattttgttgcggatgttttgcattcttgcccccaccataagatcgctgagcatgctttttgaagcatgcctttcttgtgcatgtacttgcccacgaggccacaagatccgtgtgcttttggataagttgtgccgttggtgagcccgtgctgcagtttctggttcccgattccgtactggcgtcagccgtcagtgttcccggttctgtttgggtgtttcagcggtttaagccttgcagaaatcagcctctatactgtagtggttcatttcacgtgcgcacggcagtttaacccaaaattacatgtg

SEQ ID NO: 4523 - DNA, 1424 bp, Zea Mays
gcttgctcctcgctgccgccgtcttcttcttcttctttcttaccagtctcctccggtgcgggcgagggagacgacgacgacggcgatggcctggctgaggcggacggagacgctggtgctgctgctcgtggtgcttctggcctccgcttcaacctccgcggcggcggcggcggcgggagaggaggaggaaagagtgatcaggctgaagcacagtgacggtggctattcttataaccatactctggctcatattcttgtcgaatacgcgtctgcggtgtacacatctgacttgacatcacttttctcatggacctgtccaaggtgcaaaggccacacaaagggatttgaggtcatagagatcatagtagatgtggagaactgcttacaggcgtttgttggagttgcacctgaccctcgatccataatcattgcttttagaggcactcaacagcacagatcttttctggaagcagcttgatgtgacatacccaggcatgccggatgcaatggtccatcatgggttttattctgcatattataatacaactctgcgatatgagatcctgaagtctattaaatgggcaagaaaaacatatggaaatctacccataaatgttgtgggacactccatgggaggggctttagcttcgttttgtgcccttgatctatctgttaaatttggatcgcaggaggttgaactcatgacctttggacagcctcggataggcaatcctgcatttgctgtatactttggtgaacaagtcccaagaacaatccgtgtgacccatcagaatgatattgtgccgcatttaccaccgtattattattacctaggtgaatggacataccaccacttcgctagagaggtttggcttcatgagagcatagatggaaatgtagttaccagaaacgagacggtatgtgatgattctggtgaagacccgacctgtagcaggtcggtctatgggatgagcgtagcagatcatcttgagtactatgatgtcacactacatgctgattcaagaggaacctgtcaattcgtgattggtgcagccaaccaagtatacaactacgttcgtgaagttgatggatccatcatcctgtcaagatacccgcaagaaccacaagctctagaatctatgtgactttgtatgccacggaatgcacccctgtacagtatttttcattttcattttgtgtacagctcatgaaatgctgggcgctcctggagctctccagaggataaggagaggctcacctttttaaatgtgccccctttgctcaagtgagaatcgtgcatgtaagctccataagattgtccgcacaattcaatttgtgtatataaataatactatgtgttactaagtaatgtaagtattagatggtactccttgtttggtcattccctcattgtgttgtgttgc

SEQ ID NO: 4524 - DNA, 732 bp, Zea Mays
gcccaaacctaatggcgctggcagcctctagccctctacacgccgtccctcctgctcctgctctccacacgccgccggagaaacgcggcggaacgcccagcacgggctgcacggcaggtcggcactcggtagcacatccctcccggtggtccggccctccgccgtcccagcacgacagcacttccggcgaccaggtcacctccgcgcgttctcccaggctcactgcctctgccgtgcaggttctagcgttctgctgtccacggctccgcgcgtccaggaggatgtgtattccaagttttgggagggaaaatcctttttggaggatctgccattgaatcagaaggaaactttgtgcaaccaacaattgtggaaattacacgttctgcaccagttgtgaaagaagaactctttggtcctgtcctttatgttatgaaatttcagaccttgaaggaagcaattgaaatcaataactctgttcctcaaggattgagcagttttatatttacaaagtggccagatattatttttaagtggctcgggccccatggtagtgattgtggtatagtgaatgtgaacatacctactaatggtgctgaaattggtggagcatttggtggagaaaaagcagctggtggtggacgagaagcagggagtgattcctggaagcagtacatgaggagggcgacttggagggaggtcctagaggtagtaagtcacttgtttactccatga

SEQ ID NO: 4525 - DNA, 3219 bp, Zea Mays
aaacccaaacccaagcccccccattcaaaacggagcagcggtagccttcatcgccgatcgccgttacatcatcgccgccgcggctggcctcatccattgtcggaacggagcccgggccatggagaccaacgagaagcggcacggctggaaggaggcggcggcgctcagcgggggccacctctgccacgtctgcgggtaccagtacccaaacccgaaccccagcgccaagctccgccgttcccaccgcaagcactgcggcaaggcgctgccggaggctgcggaggaggcagtggtggcggaggttgacgaagccgttgtgggggtcggggtttgcgtgggtgagcgggaggacgtcgccggcaaccgcaatgcggccgggcggacggtgctcggtgaggaaggaggacggcagcgagaggagattggcacgggcgaggccaatggaggaggcgcggcgctgcgcggatctgcgggagaagttgacagttctgttgaggacaaggtgattgcagcagcagtgaaaatgtttttcttgaagatactgtacctcaaatggatgccagtgaattaagtgaaaacggccttgttgactgcaccagcaattctattgaaattgtaaacgaaagcagtgggactgaattactgattgctttgactaatggaagtcaaaatatcgtggaacgtccagctgagcgagaagacagcattgatgaataccaggatgcatctccgtttcttcatccatcagattctgaagatggcgctgcaccaagttctgcattttctacagaaatgagtaatttgaatgctattccatcagggtcaagtgtaactacagatgtaaattctctaggaacaaatggattactcaaagatcaaatttctggggaacccaatatgacagaaatatctgctgactctaaagctggacgtaatttggaggaaggagctcttagattggctaaacatgaagtaaacctgaagcttgggggtccatatgaacaatctgtgaatgttgactacacttacacagatatggttgatagtaaatctgatgaagcatctgttcatagtgtgatgatcgaacctttggatgcttcaccccttcaggaaacccgcctgacaattttggaaccagaatcagagtctacatgctcgaaaatggtggaaggttttatggaagatagaatgcatgttcttcttaccatgcctgaagcatcaccaaaatcaaaagtagtaggatcagataatgttcagttggaaacaataaccaatcctagcactaaccccatgtcaactgggagtgatctgaatgttgtttacactgataatactgctacagattgttccatggagctccccagactgaactggagtgttgaggatgttccaggtgatagtcaacctgttgagaattctagcaagaaaactttgagatgtcccactgccgtttttgaggatgatcttcctgttaccaagatggatgatactcctgttactaatgtggacgatgtagaattcacctttcatgagaagccacagacagatactgtagaagaaaatctttccatacagaagactaacgggttcactaaagaggaagtctgcaacaagcagattaaccctgagatccctacagaagatcaattttctaggggtcagaaacatgacactttactaatggatcgagtaccttctgtcaagaatccatttaatctagacgatgacaggaatgacgacttatttgaacttcccactgagagctgctttttggaggtaccaaatgttgttgaatcgagaaaacaagttgactctacatcccgaatggtggttccaccaatagtctctaaccaaattaggatggctgaagttcaacaatgccataactcaattgaacgcatattatcttcatcaagtgccagtgaaaatggtgaagtggttggtccggaagacattactgtcaggagtagttctgaactggtgaacaagacttgcttgactgaccatgccctgcaggaaaatggacatacaagtggtgatatttttgtgccatctcaggcagcctccacagagcttagcacaatatctatgcaggatatcagtgcactcagtgaagttgaaattatgcaaaccgaagatgctagtgcaaaggacatgactgcagtatgtagcattgattgtattgaaatgaaacaggctatcaacactacagcaaatgatacatatgcagctattgttgaagaaaagaagttgattgaaggcaccactgcaaggatgaatggggtgcgagagacatattatgttgaagaacagacacaagctagtgacacaaaggagttgagtgcagtacagaacatagggaattctgaagaaaataagcagactgaaaatactgatgcaaaggagactaatgcacggtttaatgcaaacgatgttgagcacaaaacacagactgcaaaggagattgctgcagccgaaagcacaagcagcgttgaagagaagcagcagctaaacatcgtggttgtccaagatggaagcaacaagaagatgaatgaagagattgcatcgacaggtgcccaactgaattcaggaagagttcgtgtcccgctgaaggtcctcctcgccgaggcaagcatggagaaccaagtgaagaaacccagcactaaggaacgaatgctgtcgttccggcgccaggtgaccaaggacaacaacttgtcagtgaaatcggggtcacgcaaatctggccctgatgaccaccattggagctccccagccaaactgccacataaggacgttgacaagatttccagagaaaagaagcagccgtggatgccgttcatctgctgccactccgtgcgctgataatatattttgcatcagttgacaactctacatacatgtgctgctgtaactaatgctatccgtctttgtgtagatagtctgcaatctagtatctgatattttgaatcagtgcaattttgatgtatccgctacctgacttgttagacatttgcgcgtgaatctgtcctgatgttcagattcagctagtgtttctgtggactgaacaggcctggaatcttgtaccggattaagctcggtgtggcctgctggtaattttgcggcaacgaaaagaagcaaagtgaaattaacgaaacgatttcatgttcatgggactgccggatctgatgacagttggctggagagtggggagaagtcaga

SEQ ID NO: 4526 - DNA, 1253 bp, Zea Mays
actttgttcatccatgggcataaattcacatttaagcacttgtgttggcactcaatcaccaaaatacttagaaatggcccaaaggcacatttccctttcagttgggcccgccgcgcgaccgcgccggggctctcgctggctcccgccgttgcgagacgggcggcctccgcgtcgggaggaggccacgggcgcgtcgtcgttcgctcaaccgacggcggctgtctgtggttccgcgacgagggcgcccatggtgaaagtcgcggcaagcggctctactgccactccactctgcggcggtgccagcgttgatgaccacctctcggcctactgctacttcttctctcggcctactgctacttcttctccagcatgggtctagtccatgtcgcgatacggggttgttcagcatgggtctggtgaatgaaggcatcgacatggaggagggaaacccggagatcggcatagcaattcttttgcatgacagttagttttattttattaatctgtgctagatcttcaaatacacacaatccaatcttgaatatttggttaaataagtatgctgcttgtaccataaactgtgtgcgacgcaaatttcagtaagtgcattttgctgatgtattgtggtagtagaccgaccttccttctgcagagtggaaccaaaggtatttgatgagttttttggcatgccacatagcagatttgaccgggaagcttgcattgcttgtgtggataacatcaatatggcatacggtgatgactttcctgaacttagtactttcaagtgtgtgacaaggaaggaaagtagcaagctggaaagcaagaaccaagataaattgtttgatgcatatatcctgcatggtccgcaatacaatctacaacacaccggattatatgcgaagtgatttgctgaaataatgacgcataactacgcttatatcgagaaggggagaaaggatcaaccgtcattgtctccgtcggcaacatcggccctgttgacagcccgagctctgtgtgccctcctccccacgcgtttgatggcatctgttttctcttctccctcgcgttgcaggtacgaacactcttagacatgtgtcttcttggtgttagggttttcttctatcctctcgcttcgtgcactccccccacaggcccacaccattcctactcattgacgagcaagacccatgtgttcccatcacccccgttcgaccgtcacccaaatgcagaaattgttttactgctgcagagct

SEQ ID NO: 4527 - DNA, 1348 bp, Zea Mays
aattttccggtaacaccatggaccatggtgcgcggggtagttgcagctgttaggagcaccgagcacaataatttgtctgttcttcggcctccatccccgcaggatagagaaagagggagctctagacggggaggctcccaaatcgatattttttcgcatctgttcgttctccgacgcggcggcgaatctgagaacccctcgctgagtggtcggcggcgagtccgtgatggtcggcggccggcgggcgcggacatgcacaaccgctcctcctcctccgccgccgctgcgtcgtcgttgccgctctcccccgccgacggcttcctgcgcgtgaaggacggcgtggacggaatgatcaagtacgtcgccaacgagccctccgtcgggctctacttcgtccagcagcacgcccgggcttccatgcccctcctccttgacgtcaagggtaagctcgtagagaagacgcgtgaggtgacattgcacactgaagacatggaggattctatttgcgctgtgagatccatggctgattttggacttccacttgctgatgacatgatcaaggacataaatagatcactgcaaataatgtcaaagacccagccaaagagaggttgggggttccagtcaaggaaaagctcaggaacttgggacgaactgggctctaccaatggaagtagcagcaggaactacctctcttcaatgttcaacacggcgaagcaaaaggcatcgggtctcaggtggccgcagcctaattttgcaacaaaagatgatactagcgagaactcggcgtcgtcttctgccctggaatcgccacaagctggtgggcaaggtgcatctacaccagatacagagaaggatgagctccccatttcaagtcggttgtcagagggtacggccgcaaaccgtagcctgcctgctaccggcgtctcggaaacagtggaggcttacaacaagttcaaagaagagcaggagctgaagcttcgtgagtggctaagagactctgaagaagccgtcaatgataaagactgagtgtgctaaagctgcttcggccctgtgcctctgttattagatatatggtacattctgaactaaaaagaaacatagcactctgttaatgaaacagaggttgattggtatagatgcacaagatgccgaaagactgtagtttgtgatgaaggggttggtccggacgattgtaacgtgacttatttatagatgccattgcatagtgtttgtctcaagcctcatgtgtaattgaatcacgatagataatagataaaagatgttgtctgtttctgttcttgtgatccaagtatacagctcccagcatataagcattggaaagttt

SEQ ID NO: 4528 - DNA, 835 bp, Zea Mays
atgccgaggagactcaagactaaacttggaggtgctactgaagaatgtgactttgattcaaagggaaatctcggaaacctgctcctgatcattgtcccgactgtatgcgacgaagacgggaacccgtttggggatgattcaagcacttgccgctcacgcagtctctcctacttgtccttgtccatggctctgggttgcctcttcatatggacgcacacgtacagcctgatgcagaagtccggcaagctgtacaacaagatgcagtctaaaagcatccagtgcccagccgacagtgacgaggagcatgagcacgcgaaagaagatgggccagctggctgcgctgacgaggaggcacctcttccgacgtcagtcaagcctcgcgagcacgagcacggggaagaggaagaacaccaaatggaggcccctcccttgtcctgcgagagcgaggtcgctgacaaggggttctggacgaagctgaaagacgctatccaccagttcatcgaggagctgatggcaccgcgcaccatatccgcgataattgggttcgttgttggcctggtcccatggctgaaatccctaatcgttggcgacggagctcctttaaaagttatacaggattccctccagctgatgggggcttcggaagtcggggctaaagcgtgcggtgatcgtcgcgatcatgtgtgtccgcttcgtgctcctcccgctgatcggcatcgccgtgtccgcgccgcgtacgagctcggcttcctgtcccgtgacccgctgtaccgctacatgctgatcgccgtgcctcccgcgatgaatatcggaacaatggctcagctgttcgacg

SEQ ID NO: 4529 - DNA, 577 bp, Zea Mays
gttaggagtgtagctgatatgttgtcatgtatgattatgctgaatatctggcactaagaacctttgtgtataacccactcacagttctttttttcttccccaataagccaggttccaagtgaagaagaaacaattctttcgaaacttcattactattacactgtttggtgcagttggcaccttgatctcttttactctaatatcccttggcgctctaggactaatatcaaggcttaatatcggcgcacttgaactggaagactatcttgcacttggggcaatattctcggccacagactcggtttgcaccttgcagaactttgatcctggaaatatcagcggtgccaaattactgaacttcattggcagtttcctttatctgttcagctccagcaccattcttggagtagctataagttatatgctcttccacttctagctttgctaaagtttactgacatgtgtttttttttctgcagtctggacttcttagtgcttataccattaagaagttgtactttggcaggtttttacttgtaaagccctaaaattggtataataaaaaaaataaaataaa

SEQ ID NO: 4530 - DNA, 1587 bp, Zea Mays
accccgcgcggcgttgcgtgtgctctatctatccgccccgcgcgcttctccgccaaccaactccccggcgcctccctcctccaccagaccaccacccacaaacccttcttattgataccatccacagtcccagcccgcgccagcctctgcctctgccccccagactaccccctgcctgcaggctcctgcaactgcaatgtcggcgctcgggacgctctccggcggggccgccggtgtctccggcctcatccgcctccgccgtcgggtggcccccgcgctcgcggcgccgtcgcaccacgccgctgggacgttgaactgcgccgccttgcccgatgccgccccgctcgtctggggacgccagctccgcccgtcgctcctcctccccgccacactgctcccgtcgtcgtcgcagggcgccaggaggcacacgccacggcggcccgccgcagccgcaggcagggaggccaagtctgtgggtttcctggagaagtacccggccctggtcactggcttcttcttcttcatgtggtacttcctcaacgtcatattcaacatcctcaacaagaagatctacaactacttcccctatccatctttgtgtccttgatccatctagtagtgggtgtcgtatactgcctcatcagctggagtgtcggtctccccaagcgagcgcctatcaatggcacgctcctgaagcttctctttccagtcgccctgtgccatggtattggtcacatcactagcaatgtgtccttcgctgctgttgcagtctcatttgcccacactatcaaagctctggagcccttcttcagcgcagctgctactcagtttatccttggacagcaagttcccttctctctgtggctttctcttgcccctgttgtcatcggtgtttcaatggcatcccttactgagctctcattcaactggactggcttcatcaatgccatgatatcaaacatctcattcacctacaggagcatttattccaagaaagccatgtttgaagggccccggctaatgcagcatggattcagtgatgccattgcaaaagtaggcttgacaaagtttgttagtgacctattcttggttggactgttctaccatctgtacaaccagattgctacgaacaccttggagcgagtggctcctctgacacatgctgtgggcaatgtgttgaagcgtgtgtttgtcattggcttctcaatcgttgtttttggcaacaaaattagcacacaaactggaattggcacgtccattgccatagctggtgttgctatgtactcttacattaaggctaagattgaagaggagaaaaggaaaaagagcgcatgatgagctgactgctgtgaatattttaccttctgcgtctgggacacaacaacaacatcgtcgacaatcaagattatgccttgttttgtagtattcgtcttgagtcgctttgtttattaccaatctattatctggtgttgaacagcagcacattgcagaacagatgatcgtcgagtgaccttcatatacgcctctgccttgcgtggtggctgctgcatactggtggaaccctcagcgccaaagcgtgaagagaag

SEQ ID NO: 4531 - DNA, 1724 bp, Zea Mays
accccgcgcggcgttgcgtgtgctctatctatccgccccgcgcgcttctccgccaaccaactccccggcgcctccctcctccaccagaccaccacccacaaacccttcttattgataccatccacagtcccagcccgcgccagcctctgcctctgccccccagactaccccctgcctgcaggctcctgcaactgcaatgtcggcgctcgggacgctctccggcggggccgccggtgtctccggcctcatccgcctccgccgtcgggtggcccccgcgctcgcggcgccgtcgcaccacgccgctgggacgttgaactgcgccgccttgcccgatgccgccccgctcgtctggggacgccagctccgcccgtcgctcctcctccccgccacactgctcccgtcgtcgtcgcagggcgccaggaggcacacgccacggcggcccgccgcagccgcaggggaggccaagtctgtgggtttcctggagaagtacccggccctggtcactggcttcttcttcttcatgtggtacttcctcaacgtcatattcaacatcctcaacaagaagatctacaactacttcccctatccatactttgtgtccttgatccatctagtagtgggtgtcgtatactgcctcatcagctggagtgtcggtctccccaagcgagcgcctatcaatggcacgctcctgaagcttctctttccagtcgccctgtgccatggtattggtcacatcactagcaatgtgtccttcgctgctgttgcagtctcatttgcccacactatcaaagctctggagcccttcttcagcgcagctgctactcagtttatccttggacagcaagttcccttctctctgtggctttctcttgcccctgttgtcatcggtgtttcaatggcatcccttactgagctctcattcaactggactggcttcatcaatgccatgatatcaaacatctcattcacctacaggagcatttattccaagaaagccatgactgacatggatagcaccaacgtgtatgcttacatttcaataattgctctcattgtttgcattccgcctgcagtgatctttgaagggccccggctaatgcagcatggattcagtgatgccattgcaaaagtaggcttgacaaagtttgttagtgacctattcttggttggactgttctaccatctgtacaaccagattgctacgaacaccttggagcgagtggctcctctgacacatgctgtgggcaatgtgttgaagcgtgtgtttgtcattggcttctcaatcgttgtttttggcaacaaaattagcacacaaactggaattggcacgtccattgccatagctggtgttgctatgtactcttacattaaggctaagattgaagaggagaaaaggaaaaagagcgcatgatgagctgactgctgtgaatattttaccttctgcgtctgggacacaacaacaacatcgtcgacaatcaagattatgccttgttttgtagtattcgtcttgagtcgctttgtttattaccaatctattatctggtgttgaacagcagcacattgcagaacagatgatcgtcgagtgaccttcatatacgcctgacagagtcggactcctgctgcagtattatcaactcatctattttaaactctttaagttggatttattttcaatttttttttaaataataatgagataaaaatctgacacattataaccatcc

SEQ ID NO: 4532 - DNA, 3346 bp, Zea Mays
caccgttcaaatttcaaatttcttctgcacgctttccaccacgaagagacaggatcccatcacaggctcacatagtcacaaggaagtccagtcggccatggggagaccgagagctaccaccaccgcagcctcttccaagccgaagccgaagccgaagcccaagcccaagcccaggtccagggccaagcctagggcgacgcccagccccgtctccctgctctccggcatctcctctccttacgcgtgccgcacgccgtcccctgctgccgccgacctcagcttcctctcgccctcctccccgcccgcggaacccggaaccaggaattcttcgcccctcgccgcccccactaccatgtccaccatcggagacctgaggagcctcgccgcgtcgcacctcgactccctgaagcgccgcttggacgcgctccacggcgactatgtccgcgaccttgaggcctcccactcccgcatctccaagcgcgtcaagatggagtcccatggctgcctgcagctagcagaggaagtggacaaggaacagcagaagatagccgacaagatcgccgagcgcgccgagctggtgaagacctcttacaagaagttcgtggctgaagtgcaggcgtccacatcccgtgtgtgcaaggtgactgtccctgagatgacgaagtccatggagagggctattgatggcttgcgcagtcgctacatctccgctataccatcagcttagctggtgagtcgggctgtgttcatacgaactgaatatgggtaaaatgacttatccacattgcacatgttgttcgctgccgaatatctgttatttctagcgactgttaagtgttgaaagaagtagatatatagtacgcacatgtgatggatgatgggtactgctctagtactctagagctaggtcgtcctgccgactgccgtatagcttagtgttttgatatcctgattcctggtttacaataccatgcgacatgcgctctgagtttgtatgttgcgagaagaaacttgaatactgtatttgctgagttgtctagaattgcattttgagaacactacaatgaattttgattttggaataacaatcagctagtttgtcaaataagagttactgatttcatagtaggaatttggtcaaactagagagggacttacccgtgtcgagagaatatcctagacttcggcttttttaggcatgccaatttttattcaaaatctgaactcctacggtaaatttcaaaattcaggaccatgtcatttactggatgtagcaattgcattttcagaaatttcagcatggtgacattgtaggcaaatatgaaggatctgttccataaaaaaagcataaagcaaggtccgtacaccttaaattgcttggaagtaccattattatttttcttggaggtgtcatcacgctaatgatgctgggatttttattttgaggatgttctgtcgggcaagtcaatttttctagcaaatgggtccgcgagatgtttctagtttctcaaaaatatcctcctccttattcgtccttcctgccaattttcatcagaacagaataattaaatgttgtaacggcatgcattgttacagttccttggaacactgatagaggcagcttctcgtttcatgtttttttgtttttgtttttttacacacagtattcaatccctacctggctgattcttgtttgtttaatcttgatcaggtgctgttgtccacatcaattgaggtcacatgttgagtcttaaatcggcttcgcagcagggacttgcacatttgtacataatatcaccgttgcatgagtacatgagatagttcattgctacatctccatttccagatatcccgaaaagtcaataatagttccttcgatccttggaacttttttttttgcttcgtcgcatttcttgtgcatcccgtaagatgctactgtcgatgtacctttcacgctcagagcatctaatttttaatcatgtttgttctagcagtacgttagctatcgcctcaagcctgaatggtcagttgctgcatgacaattaacaaccaaaacccaggtcttgttttgttctaagcggtaatttctgttcagtttgtagctgccagttgatttgcactttatacttgcgcccgaaaacagtttatgacttcggattaaacccatgattaaaactagctgtttgaattgctgcaaactatgacacgttatgacaacacaacctgtgtttgctgcttgttggtttttcatcatccaattccaatccacgatacactggataaaaccggttcagatttcttttgattaaaacccttgtttcgcactcactctatgctaacaataacgggttctcgattgatatgtcatcttttagctactcagatgttttagtttgctaagtttgaatagtcttttgctgtcatgctcatgcttggttccgtccgtccgtcgaggaatttgtcaaaataggtcgttctaaactgccgctctgcaaaatacgcccgcgctagctcaggtcgtaaaaatgggtcgctcaagcgctgtcactcgccaggagaggtcacggcagcttctggcgtacctggcaggtgggccccagtacgcttgtacctattatgcccttacggtttaactccatgccgtctgttcttcttctctggacgccgagcactccttctcctcctctgtcggcggtcgtgggagacgtacacggcgattaggaggcacgtcgtccaccagtctcctcgcagggatgtcgaagagcacggaaatcgcagataaagcaatcatcttgatgcaggatcatgccaagcatatctatcgtatttgcaatgagaagctaatattgggtaaaggattgactgcatttgaggtcaaagaacttcgtgaagcacttgaattcgccgccgaaggattggaccaggactcccttttttgccaagaggaattggatgcaactgttaaggaggaacaattggagcatgacgagaaggtggcttcacagatgattgaaagcccacttcttctcctgattcggactgcttcctatcccttgaagagcacattgagaagttttggggcgttgattacaactcggaccagatgcctagctactccgactaggctcagagtttatggtgctgtgaaattctggatgtttgggtgtaatggtattttggatgtgtatgtgaactgtaattctggatgtgtggatgtaatggtgaactgactgaatggtgtcttgtgtaatggtattttggatgtctatgtgaactctagttctgggtttaatggtgaactgaaattcagtgttcattgttcagtataatttgttaactccactaa

SEQ ID NO: 4533 - DNA, 3561 bp, Zea Mays
accacgaagagacaggatcccatcacaggctcacatagtcacaaggaagtccagtcggccatggggagaccgagagctaccaccaccgcagcctcttccaagccgaagccgaagccgaagcccaagcccaagcccaggtccagggccaagcctagggcgacgcccagccccgtctccctgctctccggcatctcctctccttacgcgtgccgcacgccgtcccctgctgccgccgacctcagcttcctctcgccctcctccccgcccgcggaacccggaaccaggaattcttcgcccctcgccgcccccactaccatgtccaccatcggagacctgaggagcctcgccgcgtcgcacctcgactccctgaagcgccgcttggacgcgctccacggcgactatgtccgcgaccttgaggcctcccactcccgcatctccaagcgcgtcaagatggagtcccatggctgcctgcagctagcagaggaagtggacaaggaacagcagaagatagccgacaagatcgccgagcgcgccgagctggtgaagacctcttacaagaagttcgtggctgaagtgcaggcgtccacatcccgtgtgtgcaaggtgactgtccctgagatgacgaagtccatggagagggctattgatggcttgcgcagtcgctacatctccgctataccatcagcttagctggtgagtcgggctgtgttcatacgaactgaatatgggtaaaatgacttatccacattgcacatgttgttcgctgccgaatatctgttatttctagcgactgttaagtgttgaaagaagtagatatatagtacgcacatgtgatggatgatgggtactgctctagtactctagagctaggtcgtcctgccgactgccgtatagcttagtgttttgatatcctgattcctggtttacaataccatgcgacatgcgctctgagtttgtatgttgcgagaagaaacttgaatactgtatttgctgagttgtctagaattgcattttgagaacactacaatgaattttgattttggaataacaatcagctagtttgtcaaataagagttactgatttcatagtaggaatttggtcaaactagagagggacttacccgtgtcgagagaatatcctagacttcggcttttttaggcatgccaatttttattcaaaatctgaactcctacggtaaatttcaaaattcaggaccatgtcatttactggatgtagcaattgcattttcagaaatttcagcatggtgacattgtaggcaaatatgaaggatctgttccataaaaaaagcataaagcaaggtccgtacaccttaaattgcttggaagtaccattattatttttcttggaggtgtcatcacgctaatgatgctgggatttttattttgaggatgttctgtcgggcaagtcaatttttctagcaaatgggtccgcgagatgtttctagtttctcaaaaatatcctcctccttattcgtccttcctgccaattttcatcagaacagaataattaaatgttgtaacggcatgcattgttacagttccttggaacactgatagaggcagcttctcgtttcatgtttttttgtttttgtttttttacacacagtattcaatccctacctggctgattcttgtttgtttaatcttgatcaggtgctgttgtccacatcaattgaggtcacatgttgagtcttaaatcggcttcgcagcagggacttgcacatttgtacataatatcaccgttgcatgagtacatgagatagttcattgctacatctccatttccagatatcccgaaaagtcaataatagttccttcgatccttggaacttttttttttgcttcgtcgcatttcttgtgcatcccgtaagatgctactgtcgatgtacctttcacgctcagagcatctaatttttaatcatgtttgttctagcagtacgttagctatcgcctcaagcctgaatggtcagttgctgcatgacaattaacaaccaaaacccaggtcttgttttgttctaagcggtaatttctgttcagtttgtagctgccagttgatttgcactttatacttgcgcccgaaaacagtttatgacttcggattaaacccatgattaaaactagctgtttgaattgctgcaaactatgacacgttatgacaacacaacctgtgtttgctgcttgttggtttttcatcatccaattccaatccacgatacactggataaaaccggttcagatttcttttgattaaaacccttgtttcgcactcactctatgctaacaataacgggttctcgattgatatgtcatcttttagctactcagatgttttagtttgctaagtttgaatagtcttttgctgtcatgctcatgcttggttccgtccgtccgtcgaggaatttgtcaaaataggtcgttctaaactgccgctctgcaaaatacgcccgcgctagctcaggtcgtaaaaatgggtcgctcaagcgctgtcactcgccaggagaggtcacggcagcttctggcgtacctggcaggtgggccccagtacgcttgtacctattatgcccttacggtttaactccatgccgtctgttcttcttctctggacgccgagcactccttctcctcctctgtcggcggtcgtgggagacgtacacggcgattaggaggcacgtcgtccaccagtctcctcgcaggtaaccttcccccttccctcagtgagtaacctttcccctaccctaatcgacgcttaggcatggttgtgcaccctgtattttttggttttagggttagggtttagaggtatagtgtttagctgcagtggtgattcactgagagctcgatatgcaccctgtattttttggttttagggttagggtttagaggtttagtgtttagctgctgttgtgattttttatctgctcctcgccgtgtactaatggatgcagggatgtcgaagagcacggaaatcgcagataaagcaatcatcttgatgcaggatcatgccaagcatatctatcgtatttgcaatgagaagctaatattgggtaaaggattgactgcatttgaggtcaaagaacttcgtgaagcacttgaattcgccgccgaaggattggaccaggactcccttttttgccaagaggaattggatgcaactgttaaggaggaacaattggagcatgacgagaaggtggcttcacagatgattgaaagcccacttcttctcctgattcggactgcttcctatcccttgaagagcacattgagaagttttggggcgttgattacaactcggaccagatgcctagctactccgactaggctcagagtttatggtgctgtgaaattctggatgtttgggtgtaatggtattttggatgtgtatgtgaactgtaattctggatgtgtggatgtaatggtgaactgactgaatggtgtcttgtgtaatggtattttggatgtctatgtgaactctagttctgggtttaatggtgaactgaaattcagtgttcattgttcagtataatttgttaactccactaa

SEQ ID NO: 4534 - DNA, 1491 bp, Zea Mays
gacgcagggcaatcacggatttcatggtacaagataagaagaatgccagggcactgcccctgcccctgtggtttggacagctagctacatggactcctgctttcacgttctcatacaggcactcctgcactgtgctccttcgtctcctcctcccctgcctgccaccaactgccaaggtgccaagtgcagataccttccctgcctcacaaacaacgccaccctgtactagataccatcagggtcttcaaccagggcagggagcagtttggcaagtttgacagcgtgcttgagccaggatgccactgcatgccttggttcgccggcaagcgtgtagctgggcaactcacactcaggctgcagcaactggatgtgcgctgtgagacaaaaacaaaggacaatgttttcgtgaatgtggtggcatctattcagtaccgcgctctggctgacaaagcaagtgacgctttctacaaactgagcaacacaaggtcccagatccaagcctacgtctttgacgtgatcagagcaagcgttcccaagctccatttggacgatgctttcgagcagaaggacgagatcgcaagggcggtggaggaagagcttgagaaggccatgtcggcttatggctttgagatcgtgcagactctcatcgtggacatcgagccagacgagcatgtgaagcgcgcaatgaacgagatcaacgcagctgcgaggctcagggcggctgcaaacgagaaggcggaggcggagaagatcgtgcagatcaagcgcgcggagggggaggcagaagccaagtacctgtccgggctgggcattgcgcgccagcggcaggccatcgtggacgggctcagggacagcgtgctggggttctccgtcaacgtgccgggcaccaccgccaaggacgtcatggacatggtgctcatcacccagtacttcgacaccatgaaggagatcggcgcgtcgtccaaggcgtcctcggtgttcatcccgcatggccccggagcggtgcgcgacattgccacgcagatccgcgacggcctcctgcagggatcctctgtcgccaaacactaagctgcctgccgttgccgttgctgctgaagaacaccaccaccactattatatatataatataatgatgatcttggtaccagagtgatgcttgtctatattgttcatcactcatcgtcaccatctgctaggatggctatctttatgcttggggattggagaaaaccttatctaaccttttagggaaccggtaatatatataatgcagcatgagtttgcagtatgttcatcagaaccttttagagtctagatgcatgaatggcatcatagaatagaatacaagagttgcttccattccatcactgagttactttttcctcagcaccggttgctgctgcccgttgcaactgctagagatattaaatctgaactgatctttataaatttataataaatttatcttagcttaaaaaaatataaaactaa

SEQ ID NO: 4535 - DNA, 1490 bp, Zea Mays
atggactgtttttcttctaatttcggcccccaagcagcccataggcccgtccggatagtgccaggactgccagcccgatctcgcgtcgaacgatgtgaaagaactcctttcttctacgcggacggattcctctcgtctcgatcagctcgcttcgtgacttctctctcctctcgatcgattgcttcctccaccgaggcgggggaaagcgccgcccagatcgccgtaggcaagcggcgatcactccagctttgagcataagggaggctcgtgaagtcagtagtcgtatctggcagtggcagcacagcgcaccatggaatggctgagctggagaacggtgtgttgtttatcagtgctgtgcaccgtgctgttcttgcgcccggtcgagggcattcgctttgtgatcgatagagaagagtgcttctcgcataacgtggagtatgagggggatactgtccatgtatccttcgtcgtcatcaaggctgacaccccgtggcattacagcgaagaaggcgttgatcttgtggttaaggatcctaatggcgctcaagtccgtgattctcgagataagactagtgataagtttgagttcatagttcagaagagaggcgtccatcgcttctgcttcacgaataaatccccgtaccacgaaactatagacttcgacgtgcatgttggccatttttcatacttcgagcagcatgccaaagatgagcattttgcaccacttttcgagcaaatagccaagttagatgaggcactttacaatatccagtttgaacagcactggctagaggcccaaactgaccgtcaagcaatatgtaagtatcccccatttaccttctccttaaagtactatcttgagtgtttttcaccttacgccccctgtcttgtttgatcttgtaactcaatatcttgaggagtcatctgcacaatagttcttggtggtttatgggcaggtgtggtgaacaaatgacatcgatatcatgaaagagtagcttaacaggactttgaacgagaacatgagcaggagggcagtccacaaggcactcttcgagtcggcggcactgatcgtggccagcgtcatccaggtctatctcctgcgccggctcttcgagcgcaagctggggacgtctagggtataaggctccactggtatccaactctcccttgtagtagccaccatgatcgtatcgacataaccgttaatggtcgctagatcagctaatactgcttccttgtgggctttagttacatgtaatcttttgtggtgccacagatgagaactcttcggatttaaaccgtcaatctttcagccttcattttgtctctcgtgaacaacaaggctctctgtacagaataggagattttcttcgccgtctctgttttcagggaccatctgccggctctctagatggaggtctgggattgtggatgtccacaccgcatttacatgtgtgttgtgtcgatgcgctatggctggggccctgccc

SEQ ID NO: 4536 - DNA, 1787 bp, Zea Mays
atggactgtttttcttctaatttcggcccccaagcagcccataggcccgtccggatagtgccaggactgccagcccgatctcgcgtcgaacgatgtgaaagaactcctttcttctacgcggacggattcctctcgtctcgatcagctcgcttcgtgacttctctctcctctcgatcgattgcttcctccaccgaggcgggggaaagcgccgcccagatcgccgtaggcaagcggcgatcactccagctttgagcataagggaggctcgtgaagtcagtagtcgtatctggcagtggcagcacagcgcaccatggaatggctgagctggagaacggtgtgttgtttatcagtgctgtgcaccgtgctgttcttgcgcccggtcgagggcattcgctttgtgatcgatagagaagagtgcttctcgcataacgtggagtatgagggggatactgtccatgtatccttcgtcgtcatcaaggctgacaccccgtggcattacagcgaagaaggcgttgatcttgtggttaaggatcctaatggcgctcaagtccgtgattctcgagataagactagtgataagtttgagttcatagttcagaagagaggcgtccatcgcttctgcttcacgaataaatccccgtaccacgaaactatagacttcgacgtgcatgttggccatttttcatacttcgagcagcatgccaaagatgagcattttgcaccacttttcgagcaaatagccaagttagatgaggcactttacaatatccagtttgaacagcactggctagaggcccaaactgaccgtcaagcaatatgtaagtatcccccatttaccttctccttaaagtactatcttgagtgtttttcaccttacgccccctgtcttgtttgatcttgtaactcaatatcttgaggagtcatctgcacaatagttcttggtggtttatgggcaggtgtggtgaacaaatgacatcgatatcatgaaagagtagcttaacaggacttgtaagttagaaaatgtcttcgatcgatttttatgtaggaatttaaggtaaaagctgtactgaatttctgttgtggtgagctaaacaagccccatgcttttgtgggacctggtaaggacattacagtttctcttttttctgttttgcttgcttttatttttttgtaacgacgcccctatcctcagtatctgttcccaagcctccttcctagctgggttttatctaagctgctattaagctttgccaagctggtatcgtcccaagatctgcgagctaaccatctctccttctatggcagtgaacgagaacatgagcaggagggcagtccacaaggcactcttcgagtcggcggcactgatcgtggccagcgtcatccaggtctatctcctgcgccggctcttcgagcgcaagctggggacgtctagggtataaggctccactggtatccaactctcccttgtagtagccaccatgatcgtatcgacataaccgttaatggtcgctagatcagctaatactgcttccttgtgggctttagttacatgtaatcttttgtggtgccacagatgagaactcttcggatttaaaccgtcaatctttcagccttcattttgtctctcgtgaacaacaaggctctctgtacagaataggagattttcttcgccgtctctgttttcagggaccatctgccggctctctagatggaggtctgggattgtggatgtccacaccgcatttacatgtgtgttgtgtcgatgcgctatggctggggccctgccc

SEQ ID NO: 4537 - DNA, 2505 bp, Zea Mays
catcctcctagtttttttcttttctatttttcagctaaccttatcttcttcccgcgtcctttccagcctcccgtcccgtgtggcgtctggcgtgtgcgcacgcacctccccaggccccagtgccaccttccctcctcggctcgacccgcccggcgctccgccgcagctggctcatcccaatcccctcgtacagtcgtgctccgcgcccgcttcaccgcctgaacaaagatggaggccttcctagccggcctcttcagggcgcctccacgggccgtccccgcccctcggggcacgcctctccccagccttcctctcttctacggcaggcgccgcaggaggccgtcctcctccgtggtctgcatggcggagccctatctgattgccaagctggactctgcggagaaggcctggaaagaaatgtcggttaggttggcagatcctgacattgtctcggatccaagcgaataccaaaaaatcgcgcagtctgtttctgaactggatcaggcaattcaaggattgtgagaggcaacttgaagcgacaaaagctctggaaaaagagaacgaaggtgaccccgatatgttagagatgatagcttctgagttggaggctctatctaaccagctcgcagagcttgaagaaaaaatgaagtttctactgcttcccagcgatcctctagattcacgcaacatcttacttgaagtaagagcaggtgctggtggtgatgaagctgggatttgggctggtgaccttgttcgcatgtaccagagatactgtgagcgcaacaattggaagtttaagccagtttcttgctcagaagcagaaatgggtgggtacaagacatacgtgatggaggtcaaggggaaacaagtctatagtaaactgaagtttgagtcaggtgtacaccgtgttcagcgtgttcccttgacagaggctatgggtcgtgttcatacgtcaacagcaactgtagctattatgccagaggctgatgaagttgatgtggttattgatccgaaagatattgagcttaaaacagcaagatctggtggagctggagggcagaatgttaacaaggtggagacggctgttgatcttattcacaagccgacaggaatacggatattctgtacggaagagagatcacagctacagaacagagagcgggcatttcaattgttgagagcaaaactttacgagataaaattaagggagcaacaagaatcattaagaaaccagaggaaattgcaggtacgttgtcaattcttcttaaaaagatcgtatcttccgaaggtcgtagctgttgagtccaactgaaatcaacaaaaaaaaactgtcttgtagatgataaatgctcaaattgaacagagtagcagtgtggtagacattttcgagaacagtattagtataatatccagatgaaattggcagaaatttaaaccatgacaagacaaccaaatctattgccttcagtttgtgtaggaaatagagttggcccttatgaaagattttgtaagagcatctccaacaagagccctaaatgggtcttatttaaaatatagggccctaccctaacaccataaaacaggttccaacgtgggacctattttacaaaaaatcatcaaacgattatagggttcggtctctcggattctaaatgtagtatcccatatacttgagccctatcctcattttgtacattatttctaaccttttatttcttaaataacatgatttatttcctaataatatgatataggctcaattgttggagccgcaaacatttttatggccctaaacactttaaatgaggtcctattttaattttgaggacccaaatataggacttcttgttggagatgctctaaaccgctttgtcaatgttactaatacctgttcaactgaaggttggtactggtgcccgatccgagaagataaggacgtacaactacaaggataacagagtgacagaccatcgcttaaagatgaactttgagctgacaagcttccttttaggagacatcgaatcggctattcagtcttgtgctacgatggagcagcaggagctgttggaggaaatggccagttccgtgggcgcagtaaacgtatgattcaggcaaattcggcgttgaggccaggccatcaaactgaaccgcgaaactcatgacgtgctcggactcggtgaagatgattgatagctgtacatgaagaaaactgacaagatgaactccccccataggaactttttccccccctgtagtccgcagggtacaacacacacccacccatgcatctcagcttccttgacggcagcagagttactagtagaaaatatacatggtttgtgcagttcaacgcttcaactgctccagtattcacagtttaatgcattttaggtatgttgctccagtttctcaacaattcactgcttgcaattaaatctacagagcaaagttctcagctagctacatttgaaccaatcaatcaaccacttttctttttgaaacgag

SEQ ID NO: 4538 - DNA, 2889 bp, Zea Mays
catatgttttattctgttttttcagtccatgtgctctagtgctgcatcagctttcagactgagaataagaacatctgcaccctttagtgcccttgcattttgacatggtctccacgttatgttgctgctgatatcaatccatttgccccacagatcattcagaacctgtccacagcactaggtttccctgattcacaagagaacccctacctgatgaagtgcctgatgcgggtgcttgggattgctaatattgctggtcaaattgttcatgagatcacagctcaacttgtgggtattctcatggaagtgtgtaataatcccaagaaccctgacttcaaccattacttgtttgaggctctggcagcagttattggccggactggtgagcaggacccaacactactccctgcttttgagaccagcctctttccagtgctccagaggatattggttgaggacatctcagagttctggccatatgcttttcagatatttgctcaacttgtcaatttgagccgaccacctctctcacagaattacatgcagctatttggtgtccttctcagtaatgcaacttgggaccggccaccatgtgttcctgccttggttcgtttgctgcgagcattccttaggaaaattctaaatgagctaaaccaagagggcaggcttccaaatatattggcaatatcccgtagcctcctctcacgcagcagcactgaagattctgcattctacatgctgaacacactagtggaaaacgttggttttgacattctgaacccatatataagtgagatatggagtgctttgtttactcggctacagactagacagacagtgaaatttgtgaactctcttgtggttttcatgtcgctagtgctggtcaaatatgggtcaagtgttcttgtcaattccgttgatgcaattcagccaaatcttttcacccaaatccttcagcgattttggattcccaacctcaatttgatcaaaggtgctcttgaagttaagttgacagcagttgcttcgataaagttgctttgtgagtctgcggtcctgttggatgctgcagcagcccagttatggggtaaattacttgacagtattgtcacactattgtccagaatgaatcaagatggatcacaacaagagcataatgatggtactgatgcagtggatactcagaagacatcaagttattctgtttcatttgtacgacttcaatatgctgggaagagtgaagatgaccttttgaaagaagtaaatgatccaaaacagtttgtggtcacatccttagccacaatttctgcccagtttcctgggaggtttggtcctgtcattgagcagcatgtggacctagcaaacaaaagtgtgcttcttcaactttgtgcagcctacaatgccaacattgtctaggaaaaaatatgtgcaggcgtgctgaattgctaattacttactgtgtaatcgttaatgattatcctggggatcttttcggctgatctgccagtttagaatgacactgctattctatgctgacggcggaggcgtcaagattgcgagctgcaggatcatgctgtctccatctccgtgtcatccatgatccatctcataggctagagtgcccaaggtgttcggagatatatgcccattcgaactttcttaacgcctacctgcaatgcaatgcagtgcttgcatcgagcagaaagttcgccatcgttttccaagtaaaaaatctgggataaaaaatggaaagaaattaaataaaaaatatatcggtccttgcgtgtcactctctatcataatcagctcaaatgctaaattaatcggactgctgagtataaaggcataccatatctgtaccaaaaatcctccctttcccatctcaagctattttcctgcttagtgagcttaatggctctgacggccagagtgaggaggcttccccagttgcacatctcgctcgacgtcccctcgtgcgccttccgtcaccacaacccgcccgcggcggcctcgacgtccgcgtcgcgagccagcggtgagttccggctctcggacttcgacaggctcgccgtgctggggcgcgggaacggcggcacggtgtacaaggtcgcgcaccgccggacgtcggcgctgtacgcgctcaaggtgctgcaccgcggcgaccccggggccgcgtcggaggtggacgccctgcggcgggccgacagctcgccgcacgtcgtgcggtgccactccgtgctccccgcggcggcccccggcgaggtcgcgctcctgctcgagctcgtggacggcggctcgctggacgccgtcgcggcccggcgcggggcgttcgccgaggccgcgctcgccgaggtcgcggcgcaggcgctggccggcctggcgcacctccacgcgcgccgcgtcgtccaccgcgacgtcaagccggcgaacctcctcgtcagcgccgccggggaggtcaagatcgccgacttcggcatcgccaaggtcctctcgcgcgccggcgaccactgcgccgcctacgagggcaccgccgcgtacatgagccccgagcggttcgacacggagcgccacagccacgccgacccctgcgccgccgacgtgtggagcctgggcgtcaccgttctggagcttctcatgggccggtacccgctgctccctgccgggcagaagcccagctgggcggggctcatgtgcgccatctgcttcggcgagctgccgtcgctgccggacggcgcagcgtcgccggagctccgtgcgttcgtcgccgcctgtcttgagaaggactacaccaagcgcgcgtctgtggcacagcttattgcgcacccgttcgtcgccagaagagacgtcgcggcctccaaagacgcgctccggcgactggtggccggggcctga

SEQ ID NO: 4539 - DNA, 2538 bp, Zea Mays
ggaccggcgtcgaagtccattatctccggcctccgcagacggcagaactgaaccgaaccgcaccgtcgaattccccgtccgaccccactggtcccggcctctgcagggtggcccacccatgacccatcccgcgaccgcgacccgaccgctcccaccttccccgcctcgtcgtccccctgcataaccaccaccccaccaggccaccattccttcctcccctggtcgcccccgcctccatggccctcgcgtgcgcgcccataccgctcccgagtccctaggacgcggcacgcacccttctcgcgggcgcgggcgcgggcgcggggcgcgggagcaggcatggcgtcgcaggtcgctgggtcaaccccggcggtggcggcgcttgggttccttctcccgaccttctgggagatcgaggtcacgtgcgccgccgcgatgatcctcgtggcgctttacgttgcctacgagctcctcaacccgcgctcctcgcaggcggcagcggcgggcgacgccgacgagctcctcgtgcgggggctggacggcgccgacaagttcaaggggggtgtgagcggcccctctgcctatgtagtgaagctcgaattgttggctgcaaaaaatttgatggcggcgaacttaaatgggacatctgacccatatgcattgatcacttgtggtgcagagaagcgtttcagctccatggtccctggctcaagaaacccaatgtggggagaggaattcaatttttttgttgatagtcttcctgtaaagataaatgtcacgatatatgactgggacattgtatggaaaagcacaatccttggctcttttactgttactgttgaatctgaggtaccgagtggaccaatttggcatacacttgacagcacatcaggccaggtgtgtcttcatattaaagtaatcaaggttcatgaaagttcctccagggcaataaatagctcagctgaggctggtgctcgtagaaggatttccttggataagcaaggtcctactgtagttcatcaaaagccaggtcctttgcagacaatttttgaactgcctccagatgaggttgttgaccacagttattcatgtgcacttgaaaggtcatttctgtaccatggacgcatgtatgtctcttcatggcatatttgctttcattcaaatgtcttttcaaagcaaatcaaggttgtgattcctttgagagatattgatgagataaggagaagtcagcatgcagttattaatccagctattacaatttttcttcgaatgggagctggaggatttggtgttcctccgttaggatgtccagatggaagagtcaggtacaaatttgcatcgttttggaacagaaaccatacatttagagcattgcatcgagctatgaagaacttcgtaatgatgatagacgctgagaaacaggaacgtgctcagtctgcattacgtgcacacagtagttcaagaaaaaatagcaagaaggagataaatgtaccagaagattgtgctgcattaacagggaagttacaaccttttgtcaaagaagaagttttggtccctgtattcaatggaacttttccctgtactgcagaacagttcttcagtattcttttaagtgatgattcaaattacataacagagtatcgaacggatcggaaggataaagatataaatctgggccaatggcacgttgcagatgagtatgatggccaggtgagggaacttaattgtaaatcaatatgccatagtccaatgtgtcctccttattcagcaatgacagagtggcagcatatagttctttcagctgacaaaatggatctggtatttgagacagtacagcaagtacatgatgttccatttggttccttctttgaggtgcactgtaggtggtgtgtgaaaactatcagttctaactcgtgcagtctcaacataagtgctggtgcgcatttcaagaaatggtgcatcatgcaatctaagataaagagtggtgctgtggatgagctgaagaaagaagtgaaggtgatgttagactttgcgcaggggtatatgctcaaagttagctctcctgaccaagagaacagtaatctcgcgcagcaagacaacacggcgccggatgcgccttctgatacagggtgacagccgccatcacatgacaacgaatcatgccattacgatgttatacacagaagggcaggtggaccagtaactagtagtccacatgaaccacatctaacatgttaagctgacttccaaaagaatgggtggaccgtgtgtagcgtgttaagttcgtttcctgccattgctctatccgtttttggcagtttggctgatgtatatatatagctgtaaacacacgcaaatataaagtggtggctgtggcaggccagtgtgttgtttgagtataaaaacaaagaaagaaacggaagagagaaatatttgccacagaaccaacgcttctcgagtcacagactcacaggggggcatatgttgtgcaaataaaagcttgatgtcctagaaacaactttgcaactgtcaaaaaaaaat

SEQ ID NO: 4540 - DNA, 2594 bp, Zea Mays
cgcaccgtcgaattccccgtccgaccccactggtcccggcctctgcagggtggcccacccatgacccatcccgcgaccgcgacccgaccgctcccaccttccccgcctcgtcgtccccctgcataaccaccaccccaccaggccaccattccttcctcccctggtcgcccccgcctccatggccctcgcgtgcgcgcccataccgctcccgagtccctaggacgcggcacgcacccttctcgcgggcgcgggcgcgggcgcggggcgcgggagcaggcatggcgtcgcaggtcgctgggtcaaccccggcggtggcggcgcttgggttccttctcccgaccttctgggagatcgaggtcacgtgcgccgccgcgatgatcctcgtggcgctttacgttgcctacgagctcctcaacccgcgctcctcgcaggcggcagcggcgggcgacgccgacgagctcctcgtgcgggggctggacggcgccgacaagttcaaggggggtgtgagcggcccctctgcctatgtagtgaagctcgaattgttggctgcaaaaaatttgatggcggcgaacttaaatgggacatctgacccatatgcattgatcacttgtggtgcagagaagcgtttcagctccatggtccctggctcaagaaacccaatgtggggagaggaattcaatttttttgttgatagtcttcctgtaaagataaatgtcacgatatatgactgggacattgtatggaaaagcacaatccttggctcttttactgttactgttgaatctgaggtaccgagtggaccaatttggcatacacttgacagcacatcaggccaggtgtgtcttcatattaaagtaatcaaggttcatgaaagttcctccagggcaataaatagctcagctgaggctggtgctcgtagaaggatttccttggataagcaaggtcctactgtagttcatcaaaagccaggtcctttgcagacaatttttgaactgcctccagatgaggttgttgaccacagttattcatgtgcacttgaaaggtcatttctgtaccatggacgcatgtatgtctcttcatggcatatttgctttcattcaaatgtcttttcaaagcaaatcaaggttgtgattcctttgagagatattgatgagataaggagaagtcagcatgcagttattaatccagctattacaatttttcttcgaatgggagctggaggatttggtgttcctccgttaggatgtccagatggaagagtcaggtacaaatttgcatcgttttggaacagaaaccatacatttagagcattgcatcgagctatgaagaacttcgtaatgatgatagacgctgagaaacaggaacgtgctcagtctgcattacgtgcacacagtagttcaagaaaaaatagcaagaaggagataaatgtaccagaagattgtgctgcattaacagggaagttacaaccttttgtcaaagaagaagttttggtccctgtattcaatggaacttttccctgtactgcagaacagttcttcagtattcttttaagtgatgattcaaattacataacagagtatcgaacggatcggaaggataaagatataaatctgggccaatggcacgttgcagatgagtatgatggccaggtgagggaacttaattgtaaatcaatatgccatagtccaatgtgtcctccttattcagcaatgacagagtggcagcatatagttctttcagctgacaaaatggatctggtatttgagacagtacagcaagtacatgatgttccatttggttccttctttgaggtgcactgtaggtggtgtgtgaaaactatcagttctaactcgtgcagtctcaacataagtgctggtgcgcatttcaagaaatggtgcatcatgcaatctaagataaagagtggtgctgtggatgagggttctagtacactaattgacatgatcacgtacagatacaggtgtaaaaagaatgatctaccctcttatcataactccagtgcatgagattgtcagctattcacttaaaattcatgtacagccttggtgctgaagaaagaagtgaaggtgatgttagactttgcgcaggggtatatgctcaaagttagctctcctgaccaagagaacagtaatctcgcgcagcaagacaacacggcgccggatgcgccttctgatacagggtgacagccgccatcacatgacaacgaatcatgccattacgatgttatacacagaagggcaggtggaccagtaactagtagtccacatgaaccacatctaacatgttaagctgacttccaaaagaatgggtggaccgtgtgtagcgtgttaagttcgtttcctgccattgctctatccgtttttggcagtttggctgatgtatatatatagctgtaaacacacgcaaatataaagtggtggctgtggcaggccagtgtgttgtttgagtataaaaacaaagaaagaaacggaagagagaaatatttgccacagaaccaacgcttctcgagtcacagactcacaggggggcatatgttgtgcaaataaaagcttgatgtcctagaaacaactttgcaa

SEQ ID NO: 4541 - DNA, 3056 bp, Zea Mays
ccacaatctctctgtcccgggagtccgtcctttctgctctgtcgttactgaaacccagcgagcaccacttcccatctgctcgtgtcagtcagttcctcggctgtgccgtgagtggcggcggcagggagcggcgcagcgcagcgcagaagcagcggagtggcccaggcgatggcgccgagggaccccaaggaggacggcttcggcgtgggcggcgcggcggatccggaggccgacatcgaggccccgctgctggtttcctccggatcatcgttcctcctggacccggcgctcgaggacggcggcggcggcgacgaggagcagcgccgccgccgccgccggttcctccacggcagccacacgcactccaacaccacctcccaggtcgcgctcgtcggcgccgacgtctgccccatcgagagcctcgactacgagctgatcgagaacgacgtgttcaagcaggactggagggcgcggggacggggccacatcctgcgctacgtggcgctcaagtgggccctctgcttcctcgtcggtgccctcgcagccgccgccggcttcgtcgccaacctcggcgtcgagaatgtcgccggcgccaagttcgtcgtcacctccgacctcatgttggacggacacggctcggcgttcgcggtgttcctggcgtccaactttgcgctcaccatgttagccgcggtgctgacggtgtacgtggcgcctgcggctgccggatccggaatcccggaggtgaaggcctacttgaacggtgttgatgcccccaacatattctcactgaaaactctgatagtgaagattgtgggatgcattgcggcagtatcatcatcactgcatgtgggaaaagctgggccacttgtacacacaggcgcatgcattgcatcaatacttgggcaaggtgggtcacgtaaatatcgtatgacatgtaggtggctcaggtacttcaagaatgatagggatcggagggaccttgttacttgtggttctgctgctggtattgctgctgctttccgggcgccggttggtggagtcctttttgctctggaaacagtatcttcatggtggaggagtgctctactatggcgagcctttttcacaacagcaatggtcgctgttgtgcttagggcattgatagacttctgtcaaagtggcaagtgtggtttgtttgggaaaggtggccttataatgtttgatgtgacagcagattatgtcacctaccatttgattgatttacctccagtaatcactttaggggtttttggaggaatactggggagtttgtacaactttttcctggacaaggttctccgtctctacaaccttatcaacgagaaaggaaaagcttacaaactactactcgctgcaacagtcactgtttgtacatcatgttgtctatttggcttgccatggattgctgcttgcaaaccttgtccaactgacactagagaagcttgtccatcaataggccgttctggtaatttcaagaaattccaatgtgcaacagatgaatacaatgatttggctagcctattcttcaacacaaatgatgacactattagaaacctctacagtgctggcactgatgatgaattccacatttcgtccatccttgtgttctttattgcatcgtattttttgggcatcttcagctatggccttgctttaccatctggcctttttgtgccagttattttaactggtgcagcttacggccgtctggtaggcatgttgattgggtcacagtcaactttagatcatggtctttttgcagttctcggctctgctgctctgttaggtggatcaatgcggatgactgtttcagtttgtgttatcatcctagaactgactaataatctgcgtatgcttcctttggtaatgcttgtccttctcatatcaaaggtggtggcagatgcgttcaatgcaaacgtctatgatttgcttgttagattgaaagggtttccacaccttgaaggttatgctgaaccatacatgaggcaactgtcagtcagtgatgttgtaactggtcctctacagacattcaatggcatagagaaggtcggccatatagttcatgtcttaaagacaactggccacaacggtttccctgtggttgatgagccaccattttcagatacccctacattgtatggtctaattcttcgagaccacctgcttgttctattgaggaagaaggatttcatccgtagttgcacagcgtctacactgaatgctttaaaccatttctcacatgctgagtttgctaaacgtggatcaggaaaacatgacaggattgaggacattgaattatgtccagaagaactggaaatgtttgtagacttgcatccattcacaaacacatctccatatactgtccttgagactatgtctttggctaaggctcttatacttttccgtgaagttggattgagacatcttctggttctaccaaaatcttctaagagggcacctgttgtcggcatactaacaagacatgatttcatgcctgaacatatattgggccttcatcctttcctctttaagagtagatggaagaaggtgcgacttggcaaggtaaaagttaccaacatattttgaagcttgctggtgactggtgatttggggaggtcaccgaaggatcatccgaagctgtatacctggtgtcaaatcacgtattttgcagagaataactcaacttgaaaactagtggatcttacttcaagaaaataatttcgttgtaaatgctaagaaggggatggaacatggctgctaagtgctaacaagttattttcccacgaacaagaggaatctcactgtaaatttattatgcatactttagctaacctttgaaaacaaatgctatctgtagtgcctagatgcattccttattaggcccatcagtgcaaaagtaacttcagttccatcctccattcatataggctactcaaaatagctgctcatatcctgcatatggtgtgataaatacaatgtatttcctcagctttgttccatagcttctttttgcaatattcatgtgcttacattgtggt

SEQ ID NO: 4542 - DNA, 2897 bp, Zea Mays
cacacagccaacttggctggagaaagaggtgtagagagactcgtctctagctctctgctcctctcggctggagcgagcggtccactccagggctggaggcagccacagccaagccgaaggcaacgagtggagaccggacaccggagccgcggagcgggagaccatccttgacttgttttttccgccccttggatgtgacgactgaccggatgagacgcgcgcggccgcgcctctccccactccgctgaccggacctgcgtgccctgcgaccgcaccagcgcggagctgcgtatcccgccagcggtgagccggtggaaggaccccgcccgccctgctcttctctgctccaaatccaaaccagcctttttccccctccgtgcgcccacagcaaagcccgatgaggagacgagagtgaagaagaagaagaaaccactaggcgcggcaaggatttgctccgagagagtgatgcgcttaaggattcacgacaatggcttcattggtgcccggtgtcctcgtgaagctccttcagcatatgaacacggatgtaaaagtcgccggcgagcatcgctcctcgctccttcaggttgtcagcatcgtcccagcgctcgccgggagcgatcttttcaccaacaaaggcttctacctcaaggtgtcggattcatcccatgcgacctacgtttcccttccagaggaacagcatgatctcatcttgagcgacaagattcagctgggccagttcatccatgtagaccgtctagaggctgccactcctgttcccatccttagaggagttcgcccagttccgggtcgccatgcttgcgttggcacccctgaggatcttgtggtgaccagctcctccagttttcatggcagcaagaaagcgcaaccatcaaatggaacgaatgatgccagcatcttgtcgctagaaaaggaaacgagcaaattggagaaaataaatgcttcacgtaagcttaccgggacggaaaataagaagccgatgctcaccaaatcaaactcttcactgtcaagacaagctttgaatgtgattggtgataagaaggaagcggttaaatcaaagaggaacagagtaaaaggagcagagaaagcttcatcttctaggctttccttgttagaaaaggctgcttctgttttgaaggctactagtgccgggagaaagccctctgctgccaattcgatcagtagctctgtgttaagtattggatcagggccaaaggccttgagaagaagctgggaaggaaacacggatattaaaggaaaaggcaattcagaatcaaagacagccaaacctgacaagaagtctgataacaagatgccaatgactcctagacgaaaatcaccagtggaccagaaggtgccacctaaagatgatagccagaaagctgctaggaagagcaccgcaagtgctccctcagatgacgctgacaaagcagccaagaagcatattcctactgtaaagagaacatctggggtcttaggaaactcgaatgttacaaatctagtgaagattcctcccaaccgcaaaaaactaacagatattagcacttcatggacatcactccctccatcacttgccaaactaggaaaggagcttcttaagtacagggaatcggcacaaatagctgctgctgaagccatgcaagaagcttccgctgcagagagcttgctcagatgtttgagctcgtacgcggaggtgagctccacggcggaggagcacaacccgcagccagccgtagagaagttcttcaccctccacgccgcgctttcgcgcgccacggtgatcaccgacaccctcaccaagtctgccacatctgcagcatcgccagattgctcggcagctagcgacgctggaactgtgggctccgctacagacgaggagaccgctgccgtcacagccgagcgccggcgccgagctacgtcctgggtgagcgccgctctcgctacggacctgtccgccttcggcatctacaacctcaaaccggtccccgccaccgtctcctcgccgctggccgtggtcgtcgttgacgagtccgcgaagccggcgacggccgcagccacggctacgaaatcatcgccgtcgccgaagtcgcggatgtcccctgcgaaggggaaagcgaggacgggcgctgcgacggcagcagcagcggcgctgacgaagacgtccgcgccgacggagtgggagagaggagaaggggcagaggagaggggcgaactggcgaaacggctcggagaggagtcaaggggttggttcctcggcttcgtggagcggttcctggactctgacgtggcggcgtccgcgccgtgggaccgcgagcgtgcggccaggatgctcccgcagctaaagcgggtcaacgactggctcggcgagatcgcaaagcgcagcgagactcagtcgctgccgcctgccgacgcggacggtgaggcgaccaccacgagcaccgcccctgtccccccgaacgacggctgcggcgtgcccgaggagacgatagagcggttaaggaagaagatctacgaatatctcctcaccaatgtcgactctgccgccgcaatgcttggcggtggcggaggcagcgcggcggccgccctgacgaacgggaaaaagggctgacgcgtaaacgggacgaacgggaaaaagagctgacaggtaaacgtgtggtctaattgggccgttagttgtgtggaatttgattgggccaaaaaatgggctggatgagctaatgtaggcttagtttctgttgtttctttgctgggctttgagcctttctgcttctcttagtgtttcttattatggctacagggaaaaaaaaggtggtgaaaatttgacttgtattcccctttctctcaaattataagtcattttatttttaaaagttaaaata

SEQ ID NO: 4543 - DNA, 3280 bp, Zea Mays
cacacagccaacttggctggagaaagaggtgtagagagactcgtctctagctctctgctcctctcggctggagcgagcggtccactccagggctggaggcagccacagccaagccgaaggcaacgagtggagaccggacaccggagccgcggagcgggagaccatccttgacttgttttttccgccccttggatgtgacgactgaccggatgagacgcgcgcggccgcgcctctccccactccgctgaccggacctgcgtgccctgcgaccgcaccagcgcggagctgcgtatcccgccagcggtgagccggtggaaggaccccgcccgccctgctcttctctgctccaaatccaaaccagcctttttccccctccgtgcgcccacagcaaagcccgatgaggagacgagagtgaagaagaagaagaaaccactaggcgcggcaaggatttgctccgagagagtgatgcgcttaaggattcacgacaatggcttcattggtgcccggtgtcctcgtgaagctccttcagcatatgaacacggatgtaaaagtcgccggcgagcatcgctcctcgctccttcaggttgtcagcatcgtcccagcgctcgccgggagcgatcttttcaccaacaaaggcttctacctcaaggtgtcggattcatcccatgcgacctacgtttcccttccagaggaacagcatgatctcatcttgagcgacaagattcagctgggccagttcatccatgtagaccgtctagaggctgccactcctgttcccatccttagaggagttcgcccagttccgggtcgccatgcttgcgttggcacccctgaggatcttgtggtgaccagctcctccagttttcatggcagcaagaaagcgcaaccatcaaatggaacgaatgatgccagcatcttgtcgctagaaaaggaaacgagcaaattggagaaaataaatgcttcacgtaagcttaccgggacggaaaataagaagccgatgctcaccaaatcaaactcttcactgtcaagacaagctttgaatgtgattggtgataagaaggaagcggttaaatcaaagaggaacagagtaaaaggagcagagaaagcttcatcttctaggctttccttgttagaaaaggctgcttctgttttgaaggctactagtgccgggagaaagccctctgctgccaattcgatcagtagctctgtgttaagtattggatcagggccaaaggccttgagaagaagctgggaaggaaacacggatattaaaggaaaaggcaattcagaatcaaagacagccaaacctgacaagaagtctgataacaagatgccaatgactcctagacgaaaatcaccagtggaccagaaggtgccacctaaagatgatagccagaaagctgctaggaagagcaccgcaagtgctccctcagatgacgctgacaaagcagccaagaagcatattcctactgtaaagagaacatctggggtcttaggaaactcgaatgttacaaatctagtgaagattcctcccaaccgcaaaaaactaacagatattagcacttcatggacatcactccctccatcacttgccaaactaggaaaggagcttcttaagtacagggaatcggcacaaatagctgctgctgaagccatgcaagaagcttccgctgcagagagcttgctcagatgtttgagatggtccaggacatggatcaacacgtttctgaactgtctccgaatgctattgtactgcataatgatgcttacagatgctgtacaggaagtttctcctgctgtacttgtagctgcatgctgttgtcttctactgaaagtacctgtttatttacattgctagctgtatattctccagttaatccaatggttgataatctcgaaatcactgtatagatttcaacttggtgtcttgagtcagaagaacctgccacttttagcttaccgcgattatttgtgttggaaagttcacggcagagctgcagcatttttttttgctaccaatgttgattccagttactaaccgtacatatatctaactgcattgtatgtattggccggagcagctcgtacgcggaggtgagctccacggcggaggagcacaacccgcagccagccgtagagaagttcttcaccctccacgccgcgctttcgcgcgccacggtgatcaccgacaccctcaccaagtctgccacatctgcagcatcgccagattgctcggcagctagcgacgctggaactgtgggctccgctacagacgaggagaccgctgccgtcacagccgagcgccggcgccgagctacgtcctgggtgagcgccgctctcgctacggacctgtccgccttcggcatctacaacctcaaaccggtccccgccaccgtctcctcgccgctggccgtggtcgtcgttgacgagtccgcgaagccggcgacggccgcagccacggctacgaaatcatcgccgtcgccgaagtcgcggatgtcccctgcgaaggggaaagcgaggacgggcgctgcgacggcagcagcagcggcgctgacgaagacgtccgcgccgacggagtgggagagaggagaaggggcagaggagaggggcgaactggcgaaacggctcggagaggagtcaaggggttggttcctcggcttcgtggagcggttcctggactctgacgtggcggcgtccgcgccgtgggaccgcgagcgtgcggccaggatgctcccgcagctaaagcgggtcaacgactggctcggcgagatcgcaaagcgcagcgagactcagtcgctgccgcctgccgacgcggacggtgaggcgaccaccacgagcaccgcccctgtccccccgaacgacggctgcggcgtgcccgaggagacgatagagcggttaaggaagaagatctacgaatatctcctcaccaatgtcgactctgccgccgcaatgcttggcggtggcggaggcagcgcggcggccgccctgacgaacgggaaaaagggctgacgcgtaaacgggacgaacgggaaaaagagctgacaggtaaacgtgtggtctaattgggccgttagttgtgtggaatttgattgggccaaaaaatgggctggatgagctaatgtaggcttagtttctgttgtttctttgctgggctttgagcctttctgcttctcttagtgtttcttattatggctacagggaaaaaaaaggtggtgaaaatttgacttgtattcccctttctctcaaattataagtcattttatttttaaaagttaaaata

SEQ ID NO: 4544 - DNA, 1612 bp, Zea Mays
gcactcggcccacgcggcgcacggcacctcaagctctgctcctccttttccactgctctgcgtctgcgtctgcgtctgcactgcttcgcgtctccctccccccgcctccgcccccgccccggcaaaaagcaaaacacggccatggaaggctacgaccgcgagttctaccagttcagcgaccagctgcgcctgcagacggccgccttctcgggcctctccctcggcgactccatctggtcccccgccggccggcgcaacaacagcaacgacgtcctcttcgccgcctccgcgtcgcccgccgacgccgccgccaagagcaacgccgtcgtcgggctcaagctcaacgacggagggcccggcctcatcggctccgggaagctggccttcggcggcggcgccggaggcggcggcaccaacaaggccgaccgctacaacaacaacaacctccccaacaccgacaacaagaccgtgtacaacaccagcagcagcagcttcatgggcaacggcagcagctacgccaagaacaacaacaacaacgccgacatgctggcgttcgacaagatggggagctacggctacaacggcggcggtaataccaacaacaacagcaacggcgtggaggtgaagagctacttcaacaagtccgccgggagggcggcgagcaacaacaacaacaacaacaacagccacgccggcggcggcaacaagaagggcggcgccggggagtacggcaggaagaagcacgccaagagcgagggcgcggcggcggccacggacaagcagcggttcaagacgctgccggcgtcggaggcgctgccgcggggccaggccatcggcgggtacatcttcgtctgcaacaacgacactatggacgagaacctcaggagggagctgttcgggctgccgtccaggtacagggactctgtgcgtgctatccgcccgggactgcccctcttcctctacaactactccacgcaccagctccacggcatcttcgaggtgcgggtggcaacgcggaagatctacgacccgctggaggaggacgccttccgccccatcctgcaccactacgacgggcccaagttccggctcgagctctccgtcaccgaggccctcgccctcctcgacatcttcgccgacaaggacgacgcctgatccccatcggatctgtcgtcgggccactcgaagctcggatgcacgaatgaatgaacaaacaataataacgaatggatgtgcatgtatatcgtcatgcgcatgtcccacgacgagacgggagtataccacggtgtagtagtattatattaatacgtaattaatatagtatgtccacctttgtttgatactactaagggctatgtattgaggcacgcgtcccattgttttgtttttataacacttgtgcgatggttgcagaggactagccctctttttttttggtaagatgtctgtattattattattattcgggttccactgacatggataaaaaccatctgtgaaatagtttgctcttgtgctgtgctacaactcaaacgtaagaaacggactcgatctagtctgttcaagcaccagaagacgcgtttccctagcgacaattacaattagcacctca

SEQ ID NO: 4545 - DNA, 2190 bp, Zea Mays
gcactcggcccacgcggcgcacggcacctcaagctctgctcctccttttccactgctctgcgtctgcgtctgcgtctgcactgcttcgcgtctccctccccccgcctccgcccccgccccggcaaaaagcaaaacacggccatggaaggctacgaccgcgagttctaccagttcagcgaccagctgcgcctgcagacggccgccttctcgggcctctccctcggcgactccatctggtcccccgccggccggcgcaacaacagcaacgacgtcctcttcgccgcctccgcgtcgcccgccgacgccgccgccaagagcaacgccgtcgtcgggctcaagctcaacgacggagggcccggcctcatcggctccgggaagctggccttcggcggcggcgccggaggcggcggcaccaacaaggccgaccgctacaacaacaacaacctccccaacaccgacaacaagaccgtgtacaacaccagcagcagcagcttcatgggcaacggcagcagctacgccaagaacaacaacaacaacgccgacatgctggcgttcgacaagatggggagctacggctacaacggcggcggtaataccaacaacaacagcaacggcgtggaggtgaagagctacttcaacaagtccgccgggagggcggcgagcaacaacaacaacaacaacaacagccacgccggcggcggcaacaagaagggcggcgccggggagtacggcaggaagaagcacgccaagagcgagggcgcggcggcggccacggacaagcagcggttcaagacgctgccggcgtcggaggcgctgccgcggggccaggccatcggcgggtacatcttcgtctgcaacaacgacactatggacgagaacctcaggagggagctgttcgggctgccgtccaggtacagggactctgtgcgtgctatccgcccgggactgcccctcttcctctacaactactccacgcaccagctccacggcatcttcgaggccgcgagcttcggcgggaccaacatcgacccgacggcgtgggaggacaagaagtgccccggcgagtcgcgctttcctgcgcaggtaccctactgtactgtctgcttcgatccacagtctagtactctagtctagcagccatggcggcggcggcggcggcgggtgatcgatcagctcaacgtaccacacgccacactagcgaagcgtgacttgtacgcttgtttcaattgtgttcaacaccaccaaacagtacatgtacatgtatcaccgacagacgaaaggctatcaatcacatcacgtgctgcgatggcgtgtggaatcgcaaaaagatttggtcagcggaggtaggttttggttgcgaaaaagtgaccgcccgccctaccctatacggcgggaccgcgtcaggtcagcagcttggttggctcgtagctttcgtcctagctagctactgtagtgtaggttgcttggtcagtcggcagaggatctggtcgcaggctccaagtgcgaccatctagatgctgtagctgctgcatttcctcgttattgacgcatggtgcttgcgatgtgatgtgctgcaggtgcgggtggcaacgcggaagatctacgacccgctggaggaggacgccttccgccccatcctgcaccactacgacgggcccaagttccggctcgagctctccgtcaccgaggccctcgccctcctcgacatcttcgccgacaaggacgacgcctgatccccatcggatctgtcgtcgggccactcgaagctcggatgcacgaatgaatgaacaaacaataataacgaatggatgtgcatgtatatcgtcatgcgcatgtcccacgacgagacgggagtataccacggtgtagtagtattatattaatacgtaattaatatagtatgtccacctttgtttgatactactaagggctatgtattgaggcacgcgtcccattgttttgtttttataacacttgtgcgatggttgcagaggactagccctctttttttttggtaagatgtctgtattattattattattcgggttccactgacatggataaaaaccatctgtgaaatagtttgctcttgtgctgtgctacaactcaaacgtaagaaacggactcgatctagtctgttcaagcaccagaagacgcgtttccctagcgacaattacaattagcacctca

SEQ ID NO: 4546 - DNA, 2183 bp, Zea Mays
cctggttcaaggtaacgcatcatcacacctctcgaccgcccccttctctttcatcaatcaaggatcacagagctgccaaagccagaggagcgttatcagagcagggaggaagaagagcgttgtgttcgacgcaggagaatttcgagggacagcgactcgactcgactcgaagctctggagagatctagcggggctccggtgcagccgatgcatggcaactcgcaagggctgagctgctcgtcactggcgtaggaaagtgccgtcgtcgccatggacagggacagcagctcgtcggtctcggcgtcggacgggagctcggaggcgggggagcgcggcgggtgctgctcgtcgccgccgtccacgcggagcctcgtcgacacggcgggcaacaacctcatcagccgcaccgcgtccgacgcgtccacgtccctctcggaccggtgcagcagcgtcgacgtcgaccacagcgggccgttccagcccgccgccgccgtggccaagctcatcggccggtcgtccccgccgtccgccgccgcgtcgctcagacggctcagcatcaagccccgcgccgacgtgctcgaccgccgctccaccgaggacgagatggagctggtgaaggagcgcttctctaagctcctgctgggcgaggacatgtccggcggcggcaagggcgtctgcaccgccgtcgccatctccaacgccatcaccaacctctacgcgacggtgttcgggagctgccacaagttggagccgctgccggcggggaagaaggcgatgtggacaagagagatggactgcctcctctccgtctgcgactacatcgtccagttctacccgtccacgcagaccctgcccgatgggaccaaagttgaggtcatggcgaccagaccaaggtcggacatctacatcaaccttcccgcgctcgagaagctcgacgccatgctcatcgacattctggacagcttccagaaggcggagttctggtacgcggacgccgggacgaggtcgttcggctcggtcacctcgtcctcgtcgtcgaggatgtcgtgttcgtcgtcattcaggaggtcggctcaccggaacgacgataagtggtggctgccggtgccctgcgtcccggacgccggcctcaccgacaaggcgcgcaaggacctgcagcagaggcgcgactgcgccaaccagatccacaaggccgctgtctccatcaacagcggcgtcctcggagacatggaggtgccggagtcgttcatggccgtgctccccaagagcggtcgggcaagcgtgggggactcggtgtaccgcgtcatgcttggcgccgacaagttctcgccggagttcctgctcgacacgcttgacatctcgtcggagcacgacgcgctggcgatggccgaccgggtggaggccgccatgtacgtgtggcggcgcaaggctagcggcagccacggcaagctgccgtggagcaaggtcaaggagctcgcggccgacgacgacgacaagaacgtgacgctggccaacagggccgagagcctcctgctctgcatcaagcaccgcttccctggcctgtcgcagaccaccctggacaccagcaagatccagttcaacaaggatgttgggcaagcgatcctggagagctactcgagggtgttggagagcttggctttcaacattgtttcgtggatcgatgatgtccttttcgtcgacaggtcgataaggaaactgagtgataacctcaagtcctgagttctttatcctgcactgaagcttcccagcaaaaaggttttagatgtctgttggtgaagctgcagaagaagggtgcgtgactgtagtagcggtagtagggtgattttgctgacctagagagatgcaagcctctagctttgcaagaatgcacaatgcagagtagcgtgtctgaccaacagtgaacgtgtgtgattttcgtgtcctttttatttttcagctctcgcgctcttagcttggcagcacgaagattggtgaaagggatcaaaatgtccaatagcataaatggagtcattctatttcagttttattgttgtttggttacaaagtaactagaacggagtgactccaattagagaatattctcctcaaattcgaaaccatcccactccaaaaaatcaaccggacggagtcgctccgttctcagcccgctcacacagtcacgc

SEQ ID NO: 4547 - DNA, 728 bp, Zea Mays
taagcctgtaatgaggctggccatttatgacgagacaatgttatttctaccccagcaataaaaggaacaatattacctggtatcacaaggaaaagtataattgacgttgctttgagtaaaggcttccaggttgaggagcggcttgtttcagtggatgaactgcttgatgctgatgaggtattctgcacaggaactgctgttgtggtgtctcctgttgggagcattacatatcaagggaaaagagtggaatacggccaccaaggtgttggcgttgtgtcccagcagctgtacacttcactgacgagtcttcagatgggtcaaaccgaggattggatgggctggactgtgcaactgaattagttggccgtggttcgtggatcattcccaacagatgatgggttcgcaagatccaaatctggaggatcacaaccatgtgtacctcttcggttacagttttgtagtgtcttatgcgatggcgtcctgctgtatatttcttagacggtatttaaaccataaaacagtattcgtctgtacgactgtacccttcagttctgtagcatctgccggagacgagtactagttttgttattttctttcttttacaaaccaagaacagttctatagttttattgtagacactggaccatcatatgatctcaatgggtagctttttcctttttatatttaaaaataaacagaattttaattttataaattttatattttaa

SEQ ID NO: 4548 - DNA, 1604 bp, Zea Mays
tggtgcgggacacgtttctggtgtggaagcgtggaatctggtgaggtaattgaccgggaatgggaggaggggactggggaatctcggtacgaggggaatccgaggtgttaaatcatcgaagtgattcagaatcgtctttattcgatctcgtcattcccactaaaggctggacctgtaagggcatgcagagctttagcaagcaactacacgcaaacatctgaaacagttgatttggactgggagaacctgggttttgggattgtgcaaactgattatatgtatattgctaagtgcgggacagacgggaatttttctgagggtgaaatggtgccttttggacctatagcgctgagtccatcttctggagtcctaaattatggacagggattgtttgagggcctaaaggcgtataagaaaactgatggatccatcctattatttcgcccagaggaaaatgctgagaggatgcggacaggtgctgagaggatgtgcatgcctgcaccctctgtcgagcagtttattgatgcagtaaaacaaaccgttcttgcaaataagagatggattcctcctactggtaaaggttctctgtatattaggcccttacttatgggaagtggggctgttcttggtcttgcacctgctcctgagtatacattcattatatttgtctctcctgttggaaactactttaaggaaggtttagcaccaataaatttgatagttgaagacaagttccatcgtgctactcctggtggtactgggggtgtgaagaccataggaaattatgcttcggtgttgatggcacagaaaattgcaaaggaaaagggttattctgatgtcctctacttggacgctgttcacaagaagtaccttgaagaagtttcttcatgcaatgtttttgttgtcaaggacaatgttatttctaccccagcaataaaaggaacaatattacctggtatcacaaggaaaagtataattgacgttgctttgagtaaaggcttccaggttgaggagcggcttgtttcagtggatgaactgcttgatgctgatgaggtattctgcacaggaactgctgttgtggtgtctcctgttgggagcattacatatcaagggaaaagagtggaatacggccaccaaggtgttggcgttgtgtcccagcagctgtacacttcactgacgagtcttcagatgggtcaaaccgaggattggatgggctggactgtgcaactgaattagttggccgtggttcgtggatcattcccaacagatgatgggttcgcaagatccaaatctggaggatcacaaccatgtgtacctcttcggttacagttttgtagtgtcttatgcgatggcgtcctgctgtatatttcttagacggtatttaaaccataaaacagtattcgtctgtacgactgtacccttcagttctgtagcatctgccggagacgagtactagttttgttattttctttcttttacaaaccaagaacagttctatagttttattgtagacactggaccatcatatgatctcaatgggtagctttttcctttttatatttaaaaataaacagaattttaattttataaattttatattttaa

SEQ ID NO: 4549 - DNA, 2421 bp, Zea Mays
ggagccgatatccaaccctccatctaaccagtggtaatggtggttttggtcagagtgttggtcgcctgtgccaaattccgctgcccggcggcgaatttactcctctcagcctctacttctcgggttcgagctcaacccggcgggccactgctgcgacaaaggactagcaaggtttcattgcgctcaattgctatgtctaccacacaagcctcagaagcagctgctgacaaaggattgcctctggcagtggacgctaccatgattgatgagtatgcctcccagtcaaagttgctgcaagaatttgttaaaatcccaactattggcaaggcttggatcttcaattccaaggatgacgacatgtccaaagcagtggtttcgattggcaaatcagatcttttggccaataagaggagacaattccttttgaatactcacatttcaaagagtccctcaaagtctgtcgattttcagtggtcccccttccctactgaaataagtggagtgtcagcaatagttccatctccatctggagaaaaacttcttctagtacgcaattctgaagatgattcccctacaaaactagagatttggggcccatgtcagttagagaatgagatacatattgcaaaatctgttcatggatcactctatactgatgaatggtttgaagggatatcatggaaccaggaagagactttcatagcttatgttgccgaggagcctcctcaaccaaagccagtgtttaatgattatggattcaagaaggaaggtttatcagaaaaggactgcaagagctggaagggacaaggggattgggaggagacctggggagaaacctattccaagaaaaggattcctgcactgttcgtcatcaacatctccagtggtgaagttcgacctgtcaagcaaatacctagatcattaagtgttggccaagtgatttgggctccatcatcttcatatagcttggtttttgttgcatggtcatctgacaatgggttccaagggacaccaaggaagcttggtattaaatactgctacaacagaccatgtgctctgtatgctgctcctgatcctttcggacaagaagctgagaaatcattaactgagggcaataagggtgaaactacaactatgatcaaattaacagcaaacctgagcagtgcctttttcccacggttcagtccggatgggaagtatcttgtcttcatctcagcgaagagtgctgtagatagtggggcacacaatgctacaaattcattgcatagaatcgaatggtgtacagatggaaaactggatgggagccttggagttgctgacgtggtgcccattgtgctgtgccccaaagataactgttttcctgggctatactgctttggcttgcttagggatccatggcttaccgatggacaaactatgattatatcttctgtctggggaagtagggaagtaatactttctgtaaatgttgtgagctgtgaactttcaagagtgagtccccaggactcagattattcatggaatgttcttgcagttgataagaacaacattcttgcagtttccagcagccttattacactccctcagatgtactatgggattaaggtttctcagactgaaagcaattgggagtggcagggagtttcaactcctttcccaaagccatctgataagatcagctccgtactagcagagcataagttcagcatactcaaaatcccaattagcaacccttctgacgaacttgccaatggggctaagcttccttttgaggctatttttgtgtcgcataaggattctgcaagtaatccaacaatcgttgttcttcatggtggaccacactcagtttatccatcaagttattccaaatccttggcttttcttttttcgcagggatataatcttcttgttgtgaactacaggggttcattaggctttggggaagaagcactgcaatcccttcctggcaatattggttctcaggatgtcaatgatgtattgacggcattggaccttgttataaagagaggactaatagatccatccagagttgccgtagttggaggttcacatggaggtttcctgacaacacatttgattggccaggctccagacacatttgttgcagcagctgctcgaaacccagtatgtaacttatcattgatggtgggtacctctgacatccctgattggtgctttgtcgagatttatggaaaagaagggaaaaagtacttctcagagtctccttcagtagacgatctttgtcaattccaccagaagtcaccaatttcacatattgcaaaggtcaagacaccaacactctttcttcttggagcgcaagatctcagagttcctgtttctaatggcctgcaggcctgatgcagtgatgagagctgtctcagttgagtcactaggttagag

SEQ ID NO: 4550 - DNA, 2446 bp, Zea Mays
cttgaaaaaaaagttccacttcttcttgttcttcctcttgttttctcgtctctcggatgacatctcagagttgggactagcaaggtttcattgcgctcaattgctatgtctaccacacaagcctcagaagcagctgctgacaaaggattgcctctggcagtggacgctaccatgattgatgagtatgcctcccagtcaaagttgctgcaagaatttgttaaaatcccaactattggcaaggcttggatcttcaattccaaggatgggatatcatggaaccaggaagagactttcatagcttatgttgccgaggagcctcctcaaccaaagccagtgtttaatgattatggattcaagaaggaaggtttatcagaaaaggactgcaagagctggaagggacaaggggattgggaggagacctggggagaaacctattccaagaaaaggattcctgcactgttcgtcatcaacatctccagtggtgaagttcgacctgtcaagcaaatacctagatcattaagtgttggccaagtgatttgggctccatcatcttcatatagcttggtttttgttgcatggtcatctgacaatgggttccaagggacaccaaggaagcttggtattaaatactgctacaacagaccatgtgctctgtatgctgctcctgatcctttcggacaagaagctgagaaatcattaactgagggcaataagggtgaaactacaactatgatcaaattaacagcaaacctgagcagtgcctttttcccacggttcagtccggatgggaagtatcttgtcttcatctcagcgaagagtgctgtagatagtggggcacacaatgctacaaattcattgcatagaatcgaatggtgtacagatggaaaactggatgggagccttggagttgctgacgtggtgcccattgtgctgtgccccaaagataactgttttcctgggctatactgctttggcttgcttagggatccatggcttaccgatggacaaactatgattatatcttctgtctggggaagtagggaagtaatactttctgtaaatgttctgtgaactttcaagagtgagtccccaggactcagattattcatggaatgttcttgcagttgataagaacaacattcttgcagtttccagcagccttattacactccctcagatgtactatgggattaaggtttctcagactgaaagcaattgggagtggcagggagtttcaactcctttcccaaagccatctgataagatcagctccgtactagcagagcataagttcagcatactcaaaatcccaattagcaacccttctgacgaacttgccaatggggctaagcttccttttgaggctatttttgtgtcgcataaggattctgcaagtaatccaacaatcgttgttcttcatggtggaccacactcagtttatccatcaagttattccaaatccttggcttttcttttttcgcagggatataatcttcttgttgtgaactacaggggttcattaggctttggggaagaagcactgcaatcccttcctggcaatattggttctcaggatgtcaatgatgtattgacggcattggaccttgttataaagagaggactaatagatccatccagagttgccgtagttggaggttcacatggaggtttcctgacaacacatttgattggccaggctccagacacatttgttgcagcagctgctcgaaacccagtatgtaacttatcattgatggtgggtacctctgacatccctgattggtgctttgtcgagatttatggaaaagaagggaaaaagtacttctcagagtctccttcagtagacgatctttgtcaattccaccagaagtcaccaatttcacatattgcaaaggtcaagacaccaacactctttcttcttggagcgcaagatctcagagttcctgtttctaatggcctgcagtacgcaagggctttgaaggagaggggaatcgaaacgaaaactattgtcttcccagaagatatccatggaattgacaagcctcagtctgatttcgaaagcttcctcaacataggggtttggttcaagaagcacatgggcaaataaacattagtgcttcccattacattcatgatttactttttcattgttactaaatgcctgtaaccgggtcaaagtatacatgatttgcctgtccaatctggtgtttgccaagatggaataattcttgaagacatatagaagcccgtgtttattctagtgtggattctggaataccaactgtagctagtttatataataatcttctaataaatgatgcttatgtgttaatgtgaaacggtgcgtgcttttgaattgtattcagaaaaaaaatggcccagctgaccagctcactgttgtttagttcatactaagactgtctccaacaggtcctgtaaaccctcc

SEQ ID NO: 4551 - DNA, 1234 bp, Zea Mays
gggaaccatgtacaacaaaaaaaaatctgtgtgcatcgagtcattgtactgatctacagctacgacgagtaaaacaagaagccgtacctgtacggtcttctctatagagggagcaattggagagagagagaaagaacagcgaaaaatggtcgatgccggcgacataacggccggagggccgccgcgcgctcacgaggaggagcaagcgggaactccggcatacggttcggtggtcctcggcggcacttttgaccgcctccacgacggccaccgccgccttctcaagtatgcggagcttattgagcccgttgacaagcgcatcaagggtgtggaggattacatcaagtctataaagccagaactgatagtacaagtggagcctattgaggacccttatggcccatccataactgatgagaagttggatgccattattgtcagtaaggagacattaaatggtggactggctgtaaataggaaaagagaagagaaagggttcccactgttgaaggttgaggttgttgatctcctttccggcggtgtggagggggaaaaattgagttcttctgctttaaggaaacttgaggcagaacaagctcaacaaagtgaaacaaaatctggtagccttgaagcttcttagggaggaaattgaatactttgatctggttagctgaatgcacaaatacgggggtgatctgctccaagctcagtgtgaacaaaaaatatgatcagagctgacagtttggttacctttctagaggaataatcttcgaacactggcccatggccctgtaacagtattgctctaaccttctaaaatcaacctggcaacatagactctcccctactaaccaaatttacaaattttgtattggcaatgccatctgaatgttaaaaggaaatcttcttgggtttgtataaatatctacaattgtgacaaagctacaaacgaatatggttccccttcgcaagaacccatgcaatgtagcttgtcattataatctttgttctcttgaaacatattgtataattatgtgtatatacgcattggttgatcagagactttgggttctccattaatgtagaatcaggaaactgaagataacctgtaagggtacagcttttttttgttaggtggtcaagaaccctgttgtttcgaataattagtaaatttaacctagtgtgttaatctcttactaaatctaaaaagatacccactgtggagataattctt

SEQ ID NO: 4552 - DNA, 1749 bp, Zea Mays
gcaaccagcttctcgccccgcccccggcgcggctcgtcgtcactcgtgagccgcgtccgtcgtccgcgcacgcccgtgatctccttaaattcccccctccgggaattataataacccccggccgcttgctagttctcgcaggccagcggtgaccgcggccacagggcacctccaccgcgcgacgacgacaaccatggccgtgccatcgcggctcctcctctgctccgccgtcgtcgccgtggcgctgctcgtcgcgccgggagaggtggccggcgccgcgggacacgggcacacgcacacgaggcgcctgcggcccaagaagagcgcggcggcggccgccgcgaagctgtacccggcgaacgcgacgcgggcggaggcgatcgagcggcagttcacgcggtgggtgcgcttcgtgggcggccgcctcggccacggcacctacaactacaaccggccggcgctcacgctcctgcccgcgcgcacgctcgtcgtcgacaggaggccgggcgccggggacttcacgtccatccaggccgccgtcgactcgctcccgctcatcaacctcgcccgcgtcgtcatcagggtcaacgccggcacgtacacggagaaggtgaacatctcgccgatgcgcgcgttcgtcaccgtggagggcgccggcgcagacaagacggtggtgcagtggggcgacacggcggacacggccgggtcctggggcaggcccatgggcacgttcggctccgccacgttcgccgtcaactccatgttcttcgtcgccaagaacatcaccttcaagaacacggcccctgtgccgcggcccggcgctctgggcaagcagggggtggcgctgcggatatcggcggacaacgcggcgttcgtggggtgcaacttcctgggcgcgcaggacacgctgtacgaccacctcggccgccactactaccgcgactgctacatcgagggctccgtcgacttcatcttcggcaacgcgctctccctctacgaggggtgccatgtgcacgcgatcgcgcggaactacggcgcgctgacggcgcagaaccggcagagcctgctggaggacacggggttctcgttcgtcaagtgccgggtgacggggtccggcgcgctgtacctgggccgcgcctggggaaccttctcccgcgtcgtcttcgcctacacctacatggacaacatcatcatcccgcgcggctggtacaactggggcgacccgacgcgggagatgacggtgttctacgggcagtacaagtgcacggggccgggcgcgaactacgccggcagggtgcagtggtcgcgggagctcaccgacgaggaggccaagcccttcatctcgctcgacttcatcgacggcttccagtggctccggttgtagcacgccacattgttgacacacacacacacacacaccatgcatgaccttaattagttgatgtgaatgaagagcaaacaaaaacacaaggcaaatacaaatccaattgttggcgcaactgcgtacgatgagagttggtggttggctggctgatgagtgagcgctgcagaactacgtcctgcactctttttgttcgactcctttcctgtgcatcacatcgctgcaggttttcatgaacatgggcttccttggcccaggccggaatagcgtcaggtttggtccacatgctgacacgcgagtgcagccaagcccatcacccgttccgagcaaccttcatgtttacagccgagcaagcctagtactgttca

SEQ ID NO: 4553 - DNA, 1458 bp, Zea Mays
agcacagctagagacctctcttcgtctcatcagtagagagaaaggttaattgtggggaaactaatgaagacctccgtagtcgtcgttgctgctctagcagcggtgctgttcttagcacagtcgtatgcttccctcgccggcgccagcggccccagggtcatcatcgtcggcgccggcatgtccgggatctcggcggggaagacgctgtgggaggccggggtccgggatctgctgatcctggaggcgacggggcgcgtgggcgggcggatgcacaagcacaacttcggcggcatcaacgtggagatcggggccaactgggtggagggcctcggcggcgaccagctcaaccccatctggcccctcgtcaactccacgctcaagctcaggaacttctactccgacttcgacagcgtcgtcggcaacgtctacaaggagaacggcggtgggctgtacgacgaggagtacgtgcagaagagaatggaccgtgcctacgaggtggaagagctgggcgccaaccttaccaagaagatgcaccccagtggccgcgacgacatctctgtcttagccatgcaacggctgttcaaccaccagccgaacgggccgacgacgcctgtggacatggcgctggactacttcatatacgactacgagttcgcagagccgccgcgcgtgacgagcctgcagaacacgcagccgacgcccaccaacgccgacttcggcgaggacaactacttcgtggcggaccagcgggggtacgagtccatcatacactccatcggcagctcctacctctccaccgacggcaacggcaagctcaaggaccgcaggatcctgctcaacaaggtggtgcggcagatcgcctacaacaaacaaggggtggtcgtgaagacggaggacgggtcgtcgtaccgtgcggactacgtggtcgtctccaccagcttgggcgtcctgcagaccgatctcatacagttcaagccacagctgcccgcgccggttgggagggtctacttcactggtgagcacaccagcgagcgctacaacggctatgtccatggagcataccttgcaggtatagactccgcaaacatcctcatcaactacatcttcaagaacgaggagtacaaggtccgtggcaagtacgacgtcgacgacctaatcgcacagtccggtagtcgccaccgcgatcgatcccggcccatcattaatgggctgggcctgggcaccaccaccccgtgcgtcatgggccgaatgggggcacccaaacaagatccggagggtggtgaaaatgaattcctggggcaggcgcacgaggcgtcatcgctaggcgctatggataaaactggacggggaaacccaccctatctgacgtttctgtttctacattcttttttacgagaacgagatcgccttcatctaataatagtccatgtgaagataaaaatggcaacaccagaatga

SEQ ID NO: 4554 - DNA, 2302 bp, Zea Mays
ctgcggctgcggctgcgctaggcgctagctagctgctgcgcgggcaggtggcaccaaaaaccctcgtgctttcggctgcccgcccgcgtggttttcacggagaagccgcggaaccgaatggcagcaggggcaagcgatcaacttgccaagcaacgcactgcagcactactgtactgcaccgcaacagcgcggcggcacagtagcgcaaccgaaggctccacaactccgccttcattccccaatccatcctcgccgcccggcgcccgcctttccccacctcgactcgacgcgacgtcggcccgacccgatcctcggcacgctcttttcgtccaatgggaattgtcaagataggaagccgtgagcctgcagcgaggagtggttacagttgtggaggcggaggtggactgtgagcttgcatcgtcgagaggccagatgtgcaatatcccctatgggatttatgacctgcatggtggcttggccgaggttctttctttggagacatggaattcatgcctgacggaagatgatagactccgtctagcagcctacctcccggacatggagcaacaggactttgtcacaaccatgaaagagctgttcagtggggatgctatgttctttggaagtccagttaaaagtttttttcatggattgagtggtgggctctattctccacaagtttctcaggcaagggagttactgatgatgtttcaaagacgaaggcattatcactttctcaagtggtaccacgatgatatggttgctaagtttgcatccatgagcaatctgttgaggagttctgatacgagtgcaactcttggagagaagcttcccatctcgcgcaggcacgtatacgagaagcgtttcccatgtgttagtcttagcagtaccattccaccagttactatcaaggatgaaactgccactgtttcatcaccaatggaatgcgctaaacttgcgggtgggccattaagcactcattgttcaaccagacatgatgaaagagcccatgcagccaaatcagtagaaatgaactcattggaaagtcaaatcctccgtcctctcagtgaccccatgcaaaattgtagtaaactgcccaaaggtgtgctgaaaataaggactggttgtgcttctgttgccgatggcagtgaagggacgcgtcatagacctggaccggttctagcagatcaaccaggagcacagagctccagaatttgcactccacctcttgtttttagacatggtgttcatggcttttctgagaatccatcttctcacaccaacagaatcaacagcacgtctgacagctcacaccgtactcccttacaacgggagggtacactagaaccgtacgcaccaatgggcaaaatcccacctcgagtccaaatgacagttccacaggagcacagtgcggtttacccttccatgacaggcttctaccaaccagcagctaaccatagcttagcatattccagtgaagcatacggcaccagagaacgtgcccacatggaagaccttctgaagaacttcggctgcggtcaaaacatcgtagcccatcagatttctcctgatccatatgcgagagccatggatggccttcaaacaaacggatactccagttcgaaaaacgctgagagtatctcagacatgctgagccttggtacaaggacatacccgcttcatagcagtgcctcggagctgctggaaaccgtgtgcaaccaccgtgaaggcgcaccatctgccaatgctgttgctgaagctgaagagtctcgtcagttcacttacacctacgcgaggaggaagccgcacaagagatcgactatggcggagcgtacagtgccaccaagtgcggtagacggcatggccatcatgaaagcgaaggcaatcagactctgaactggatcttgtcagctgcaaacattgagaactgaacatagttggggctggggacagaatttagcatccacctaacatagtaaataagcatgaaccgttttaccttctatagaccagaccctcccagcagaatatatgcctgttgtcattgtcaaacgggataagtaacttagcttacactgaaatgctgaagtatgtaaatcagctatatctttctcctgttttcaggagcaattttgccccgctattatagatgtccaagagtgccgttccatgttgagctgcgatatttcttctgttactccagtcatgttgtgcctttttagctgggcggatccatggtgggctggacggggctcggaccgtcacccctccatattttattggaataaaagaagaagagtga

SEQ ID NO: 4555 - DNA, 1276 bp, Zea Mays
ggaagaaacggccaatatacagaacgagccagcactccattttctcatacggttggcccggaattaggcgcctcgattgcttgctagccgccagattagtctttcgctaccctaagatcggtcggaagaagaacagttcaatctcggttcatcagaagtgaaactgcttagatcagatttcgtggattccttcacttcaaagtttgcatgaccatcaagcctatgaagaggctgatcactacgctaagaggaaagcagccaatatttgtgcttccactggtgctagaactgtcaagagaaaactagaagcaagtaggattccacccaatgatttggttagaagaacaggcaaagaacagaaagtacccgcttatgaagttcgtcagttaaccaagaatgagttgcctctgaaggtgtctgctaggaatgccatcaatagcgatcacttccataggcctttaagtagcagatgcaatgatcttaccaagaacatttctgagataaggccagtttgcagagctcttcctttgcctgagaaacctttgtgcatcagagaagaggacgagtgctcagtggctagttgcagcgcaaattactcagagtacagtaccagtgataacaaacaatcagtcggaaccggcagttgtttcgctgacgatgttatgtattcatgccaacgcagacaggagaccaagaatgcctatggatctggtttgtttctgaatgtccatgagctggagctgcaagcataccaatcaaccgtcagagctttccatgctgcaggacccctgacatgggagcaagagtcactcctgacaaacctgcgcctctcgctcaacatctcgaatgaggagcacttgcttcaatttctgtgcagtggatgaataccactttatgagaaagaggtcgctgaaacagacagtgcactgaagtctgaaaaccaggtgcttgggtgcctttcttctctcccgtcaggccatcatattgaaggcatgtctgggttttatgattcattgatcatggtgacggataagaccggtaagacaccggtacaggaattcaaatgagacactgaaacttcaaagatgctggaaatttgtccgtatttgacttttgttccggaacttttgatgaggctgtattttgtactccatatagttactggtttactgtcgaacggcttaagaaagctaaacagatggaaagggaaactattgttttacggcgactagccaacttattgttttttctcgaacacgcaggagaactgcgcatc

SEQ ID NO: 4556 - DNA, 1777 bp, Zea Mays
aagaaccggaagaaacggccaatatacagaacgagccagcactccattttctcatacggttggcccggaattaggcgcctcgattgcttgctagccgccagattagtctttcgctaccctaagatcggtcggaagaagaacagttcaatctcggttcatcagaagtgaaactgcttagatcagatttcgtggattccttcacttcaaagtttgcatgaccatcaagcctatgaagaggctgatcactacgctaagaggaaagcagccaatatttgtgcttccactggtgctagaactgtcaagagaaaactagaagcaagtaggattccacccaatgatttggttagaagaacaggcaaagaacagaaagtacccgcttatgaagttcgtcagttaaccaagaatgagttgcctctgaaggtgtctgctaggaatgccatcaatagcgatcacttccataggcctttaagtagcagatgcaatgatcttaccaagaacatttctgagataaggccagtttgcagagctcttcctttgcctgagaaacctttgtgcatcagagaagaggacgagtgctcagtggctagttgcagcgcaaattactcagagtacagtaccagtgataacaaacaatcagtcggaaccggcagttgtttcgctgacgatgttatgtattcatgccaacgcagacaggagaccaagaatgcctatggatctggtttgtttctgaatgtccatgagctggagctgcaagcataccaatcaaccgtcagagctttccatgctgcaggacccctgacatgggagcaagagtcactcctgacaaacctgcgcctctcgctcaacatctcgaatgaggagcacttgcttcagttgaggcatctcctatctctttgataattttcaaaaactaatgtgccttttttatatctgtggattacctccaacccgtagagatctttgcatgcttgtagcgtatgtttcccaccttgactgttgtatataaagaagagttcagagaaatccacttatagctgttgtacttcaccagaactttgttgctaggagtaaatgtcttgcatttttttagtgtttttacaattcaaggaaatgtgaagctatcttcgaaatatatttgtcatgctgataatcaaggttgaaatatcagttcctttaaatgaagctgaagcatcaattctagttactgatctcgctcattgtatctctttcttcgctttggtatcgttctgtatgtttgtagctgaaatgtttcgccattaataggtcctgattaagatctatctttaatactcctagttttgcattggtgctgctgatgtttaaacctcatgctgtgaacacacagatttctgtgcagtggatgaataccactttatgagaaagaggtcgctgaaacagacagtgcactgaagtctgaaaaccaggtgcttgggtgcctttcttctctcccgtcaggccatcatattgaaggcatgtctgggttttatgattcattgatcatggtgacggataagaccggtaagacaccggtacaggaattcaaatgagacactgaaacttcaaagatgctggaaatttgtccgtatttgacttttgttccggaacttttgatgaggctgtattttgtactccatatagttactggtttactgtcgaacggcttaagaaagctaaacagatggaaagggaaactattgttttacggcgactagccaacttattgttttttctcgaacacgcaggagaactgcgcatc

SEQ ID NO: 4557 - DNA, 2057 bp, Zea Mays
ccggaagaaacggccaatatacagaacgagccagcactccattttctcatacggttggcccggaattaggcgcctcgattgcttgctagccgccagattagtctttcgctaccctaagatcggtcggaagaagaacagttcaatctcggttcatcagaagtgaaactgcttagatcagatttcgtggattccttcacttcaaagtttgcatgtcattgaactgaatgatccaatctgatttgctgactgctcctctcatcactcaaaatttgtgatggaacaggaccatcaagcctatgaagaggctgatcactacgctaagaggaaagcagccaatatttgtgcttccactggtgctagaactgtcaagagaaaactagaagcaagtaggattccacccaatgatttggttagaagaacaggcaaagaacagaaagtacccgcttatgaagttcgtcagttaaccaagaatgagttgcctctgaaggtgtctgctaggaatgccatcaatagcgatcacttccataggcctttaagtagcagatgcaatgatcttaccaagaacatttctgagataaggccagtttgcagagctcttcctttgcctgagaaacctttgtgcatcagagaagaggacgagtgctcagtggctagttgcagcgcaaattactcagagtacagtaccagtgataacaaacaatcagtcggaaccggcagttgtttcgctgacgatgttatgtattcatgccaacgcagacaggagaccaagaatgcctatggatctggtttgtttctgaatgtccatgagctggagctgcaagcataccaatcaaccgtcagagctttccatgctgcaggacccctgacatgggagcaagagtcactcctgacaaacctgcgcctctcgctcaacatctcgaatgaggagcacttgcttcagttgaggcatctcctatctctttgataattttcaaaaactaatgtgccttttttatatctgtggattacctccaacccgtagagatctttgcatgcttgtagcgtatgtttcccaccttgactgttgtatataaagaagagttcagagaaatccacttatagctgttgtacttcaccagaactttgttgctaggagtaaatgtcttgcatttttttagtgtttttacaattcaaggaaatgtgaagctatcttcgaaatatatttgtcatgctgataatcaaggttgaaatatcagttcctttaaatgaagctgaagcatcaattctagttactgatctcgctcattgtatctctttcttcgctttggtatcgttctgtatgtttgtagctgaaatgtttcgccattaataggtcctgattaagatctatctttaatactcctagttttgcattggtgctgctgatgtttaaacctcatgctgtgaacacacagatttctgtgcagtggatgaataccactttatgagaaagaggtcgctgaaacagacagtgcactgaagtctgaaaaccaggtgcttgggtgcctttcttctctcccgtcaggccatcatattgaaggcatgtctgggttttatgattcattgatcatggtgacggataagaccgggtacgccatcaaataacctagggaccttaaaatgtgttcatgccctcttgaagttcaaattctgtttatatatattagatgtccccaagggaccctattcttcattttaactgaaaagttatgtaaattttttcttttaatcaaactgcaattgtgtttgtcaattgttcagccaacatctgttcttgtaacttggaacctgtatctctgcagtaagacaccggtacaggaattcaaatgagacactgaaacttcaaagatgctggaaatttgtccgtatttgacttttgttccggaacttttgatgaggctgtattttgtactccatatagttactggtttactgtcgaacggcttaagaaagctaaacagatggaaagggaaactattgttttacggcgactagccaacttattgttttttctcgaacacgcaggagaactgcgcatc

SEQ ID NO: 4558 - DNA, 3370 bp, Zea Mays
tctgcccgcaggtcattcagcttaaaaattcgaactcccattagcaagcaaaacgaagcagatcaaaaggacatacttccggcggaacagaggtgccaattaagagcatcatgcgtaactctaagccgccgagcaaactggccatgcttatggcgttgctgtcgctgtcgtttctgttttgttatggagtcgagaaggtccattgctcgacggttcacgagaacaaccaagattttcactctctgctcgatttcaagaagggcatcaccaacgatccaaatggagccatgagcaattggaccaacaacactcatttctgccggtggaacggtgtgaagtgtaccttgacaccgccatatcgtgtcatggagctcaacctcactggcaacgacttggctggccgaatctccacctctgttggaaacctgacctaccttagtttgctagcactaccaaataatagatttagcggcccaatacctccccttaacaaactccaaaacctaagttacctttccctggacaacaactttttgaatggtgtgattcctgagtcacttacaaactgttccaacttagacacactaggtctctctaaaaataacctcacaggtgttattcctcctagcataggttctcttaccaagctaaaagttattttcctttataaaaataatttgtccggggtcatcccatcaagcctaggtaacatcaccaatttatctgtaatcgctctttcagaaaatcaactcaatggacttattcccactgagttatggcaaatgccacacatagcgtctttgtacctgttttgtaataatctatccggtgaaatcccacaaactatatctaatttatcttctcttcaagagctatccttggcagtcaatatgctgagcaacactttgccatccaacttcggccatgccctccctaatctcaaattgctatacttgggaggcaacttgtttgaaggacaaattccagattctctaggcaatgtttcaggtctagtacatttggatatgtcctacaataagttgactggcaaaatccatagcatatttggaaaacttttagggctatcttttttaaacctcgaggaaaatatgtttgaagcgagtgatagtgcaagttgggatttctttgttgacctgatagcgtgcagttccctgacggtgctttcattggctagcaataatctgcagggagctataccaaattccattgctaacctatccaccaacctcagaaatctactaatgagcgacaaccacctatccggagtagtccccccaagtattgggaaattgaatggcttaattgaacttgaacttgatggcaacaattttaccggtacaattgaggattggatgccaaagttgacaagcctacaaaagttatatctccatgacaatagctttgaaggtacaatcccaccttccattagtaaccttgctcatttgacacttttggatttttcaaataataaattcactggttcaataccacctagcatgggaaacattcaacttctgatcaatttgagccttagcaacaacaatttcagagggacaatacctgccaagtttggggaccttaaacaattagtcttccttgatgtttcatcgaacgaacttggtggggaaattcctaatagtttgggccagtgccaaaatctagccgccattaaaatggaccaaaatgttcttataggaaacatcccgacctccttcagtaatctaaaaagcttgagcttgctcaatctttcccacaacaaattatcaggccccttgccaaattatttgaatgatctaaagcttctcaataaaattgacctatcttacaataatttccatggagagataccaaaagctggtatattagataattctacacttgtttcactggatggcaattcaggattgtgtggaggagccatgaatctgcatatgccttcatgccatactatttctagaagagcaagaaccataagcgatttggttaaaatattgatccccatgtttggattaatgtccctgctacatcttgtctatctagtctttgggaagaagacttcaagaagaccacatctatcacaacgttcttttggtgagcactttgagaaagttacttacaatgatcttgccaaagcaacaagggacttctcagaatacaacctaattggaagaggaagctatggttcagtgtacagtgggaaattgaaggaagtggaagtggctgtcaaggtttttaaccttgagatgcaaggtgcagacaaaagcttcttggtagagtgtgaaacgctgagaagtattcaacatcggaatcttcttcccatcataactgcatgctcgagtatagatacaacgggaaattcttttaaggctttaatttatgagcttatgcctaatgggaacttggataaatggatacatcacaaagacaatgaggcacttccaaagcgtctaagcttagctcaaagaattgcagttgtcgtcaatgtagctgatgcattggattatttacaccacgactgtggaaggcccaccatccattgtgacttgaagccaagcaacatccttctcggtgacgatatgaatgctgtcttggcagattttggcattgcacatctttattctgattctcagtcaacttggacaagttcatttagttcgatcggtgtcaaggggtcaattggctatatccctccagagtacggaggtggtggctctgtatcgacgtccggggatgtttatagttttggtgtagtgtgcttggagattttgatcggcaaaaggccgatagatcctgtgttcatcgggggactagacatcatcagcttcgtcaagaacagttttccagatcaaatatttcacattatggattcacatcttgtggaagaatgcgagcatttaattcaggacaataaagtaacaaacgaagaaatgtaccagtgcctggtggatctgctgcaagtagcgctttcttgcacgtgctcattaccatctgaacggtcgaacatgaagcaggtagcaagcaaactgcatgcaatcaagacgtcacaaattggatataaataatccatgtaaaattaggtgtaccgtgtactcccacgactaggagcgtaaaaatgtactctagcataaaattaagtgttgttcatctactgtgtgcatgtacttcaattgtccaaaaatatagatgcacctatactgtttgtggacatcgttaatttcttttgtaagttcacgtagaatatcttatatttctagataaattggaaatgttcgaatttcttgcatttgtaaatcgaggtcgtatagaaccgcattggtatgtacaacccaactcaattcacgcaaaccaa

SEQ ID NO: 4559 - DNA, 1851 bp, Zea Mays
gagtccgagaagagcccgttcgacatggacacggagccgctgctgccggcgcacctcctccactcgctgccggagcactcggaggtgttccacttctccccgccgccatccccttcctgcccatcaccggcctcctcctacaaggaccgcatcatcttcggcgcccacccgccaccgcctcagccgccgccgccccctccgcttcccccgtcgcactcgcaccgcgcgcaccgccgccgcagctccgtggacggcctctacgattttgacctgccttcctgctcctcgtccccgccctcgccaccgtcggaccccgaggacccttcctccgccgccgctgccggcgcgtcctctctcttcgaattcatcgccaacgccgcaagcgcccgcaccaacctccaccgctcccgcaccgccccagccatggcgccgctcagcgccgtgacgctcgcggccgcagccgctgccggggaccaggctcccgcgccgcccgagcgcccctccatcgtgctgcacaccttcctcttcctgctcgcctacctcgccctcggcgtgaccttctacgccgccgcgcccgccaatttcagctcctccgcgggacccacgcaccccgtcgccgacgcgctctacttctgcatcgtcacgctctgtaccatcggatacggtgacatcacgcccgccacccccgccgccaagctcttctccatctccttcgtcctcatcggcttcggcttcgttgacatcctcctctccgggatggtctcctatgtgctcgacctacaggagcatctcctcatcaccgcgctcaagaacccaacctctgcgcgcaagcaccgccacaactacatctttgacgtcaagaagggcaggatgcgcatccgtatgaaggtggcgctcgcgctgggcgtcgtggctgtttgcgtgggtgtcggggctgcagttctcaggagggtggagagcctggggtggctcgacgccgtctatcttgccgtgatgtcggtgaccacagttggttatggggaccaggcgttccggacactggctgggcgcctttttgcatccgcttggctgctcgtgtccaccctggctgtggcaagggcattcctctacttggcagagatgaggattgacaagaggcaccgagccatggccaactgggtgctgtccagagacatgaccgtgtctgaatttcttgctgcagacattgacaacaatggatatgtcacgtaagtccatgaggccttggttcacatttctttgctttcattcactagttagcatgattatgtccaaatgatttcttatttttatgctgaggaaacattattcatccattgatatgctatgcaaacgggtggcttcaagctgattatcctccagagagcctttttggaaatcagaatttgttgtttacaagctcaaggagatggggaagattactgaaaaagatatcatgatgatatgtgatcaattccagaggctggacacagggagctgcgggaagatcacactttcagatcttctggagagccatcacttggtttcagaacccagggataagaaaaaggggaagaaatcttaaacatgtgtcatagtatgcacaagaattgaagggcagtgctaaaattttgggactagaaagcacgccaaatgagcaagggtgcgacaggaggcattctcctacacggaatggaaaagacggaatccgctgaagttgacgcgcatggaatgagctcagttgtggtccattgtcacggccgtttagagtgacgaaaccgaatgcacagtatgtgtgtcagaatctgtttttcacaattgtaatattgtatgttcatatcacaattgtaatac

SEQ ID NO: 4560 - DNA, 505 bp, Zea Mays
accctcgacgaccatcgcggccgcgacaccaaccagaccaccatgcgccatacccaacggaaactaggccactgcggctacctctcgagctcgctatcgccagcgttcatggaagggctgggaaggacccccatgccatgtggatcgtgcgcgggcagctaatcaggctcggggagtcggaggtcggcgacaattcctcaccaagaaatcagcgccgccgtagatccgccgagagctgaggccagcaacctctgtgtgcaagattctcgcatggttgcaaatcacttgaagaccaactgagtacctgggagtctcgagtctaaggtcaagaacaggtaccactggacgaggcacatgaaggatgctgtgatgagttcgtgagtggtctaggctgtcgtctcgcagtcaactttgggttgctggatcgttgtcttcgtatgatgtaattatttaactattttgtacagaactccattatatattaaagatgtgacattcatttctg

SEQ ID NO: 4561 - DNA, 1556 bp, Zea Mays
tgcaagtttaggggctaggtgtgacaactgtgcgaattgaatgagacgggaaagcaattttcaagttcaggcagctagcccactagtatttgctttcatcatcaatggataaaacagtacggttgtggcacatgtcaagcacttattgtttgaaaaccttctcacacactgactatgtgacttgcatacagttcaatcctgttgatgatagatacttcattagtggttccctggatgaaaaggttcgtatctggagtattccaaagcgtgaaattgttgattgggttgatcttcatgaaatggttactgctgcctgctatactccagatggaaagggcgcgctgatcgggtcccacaagggcagttgccatttatgacatgctttgctacaaaacacagattgacctgcaaaacaagagaagaaaatctagccagaagaaaataacaggatttcagtttgtcccaggggattcttcaatggtcataatcacatctgcagattcacgaatcagagttcttgatgattttgagctagttcataggtttaaaggattccggaacaccagcagccaaatctcagcttgtttagctggaaacggacggtatattatctcggcaagcgaggattcccgtgtatatatctggaggaacgatgatggttcgaaaccaagtaaaaagaagggcattgtttctgtcacaaatacccatgaacacttccactgcgagagtgtcacggttgctgttacctggccttttaccagcaccacaatgacttctttaatgaaccccaggaaacaagagcttgagcttgggtctgagaatggctattcaccgcaagatctgcaaaccaaacttgctaaggcacaggagatgacagatgttgagtaccggagcacaaatatcacaagttacaactcgaagcataacagtgaccggacatctccggcttggcctgaagaacttgtcacaccaccaaatcaaagtctcagcgctactacctgccatgccaacgagggagaccaagctctgaatcggtcggcctggggcctagtaattgttacagcaggccgtggaggtcaaatcagaacatttcaaaacttcggttttcctgtaagagtatagcatgagtccgaatacataagatagtcactgccattcaggagtgcagtttgtgtatagataggagatagtgggtgagtttcacactattcagggattgggtttgactgttccttggtgcacctgctagagatcagaatcttcatctaacatacactgtcagtagtccaaaacttgtgtatgccaaatttattttaccctgaaggcccaagttgtacatgaaagagaaagccctacagagagcaacactatcagctgactggagataattcatctgtcagcttcaaccctacctttcggttttagacttctattccgaaccatgacatgttcttgtaagaaaagaaaaggaaaaagatagacgtggtgaaattgtcattttggctttatgatctcatggtattggtatcctgaatcttttttcagaccccacctat

SEQ ID NO: 4562 - DNA, 2349 bp, Zea Mays
cacaaattttctagtatagtagggtttggactatacaattctcgtgtctcgccctcccccgacgcgccgtctagggtttcacagccgcaccccgatccactagagctatggagttcgacgaatacgagtacctggagaaggcggtggagccggctcccccgccggccaatggttccggctccggcgagaaggaccgcggctcgcgtcgccgcgagggcgacgagggccgcatatcgaagcgctcccgctcgggggaggaccgcgagcggggccggcaccgcagcgttcgggaacaccgggatcgggataaggatgacgggaaggagaaggagaggagccgcgatagccgcgggaaggacagagacagggaagggagagaacgggagaaggagaggggggacaggcaccggcccagagagagggaggtggaacgggagcggaggagcctgagccgttcggagcggcgccgtatcgaggaagaggagatggtgagggagctggagatggagcgcgagcgcagcgagcgacaccactatcgcgaccgtgacgtcaggcgtaggaaagatgacggggcagagccagaagttgatccagaaagggaccagaggactgtatttgctttccagctatctctgaaggcagacgaaagagatgtttatgagttcttctcaagggctgggaaggttcgtgatgttcgtcttatcatggaccgaaactcaagacgttctaaaggagttgggattacacactgaaattttatagtttgctctacatgctgggattatcggcaatttacaagtaagatggaatattagatcattctgatgtcagtcagcagttgaggacagtttgattccagtgtatttgacaaacacttggtgcaggttctaggcaataaagggggcacccaagaaccaagttcgaaacctctacaatttttgatcaaaatgcctgaagttttctgtgaaaaattgaaatgtggtgcggcttcaggtggagcaagaaagttgtatgttggcaatcttcactcaaatattactgaagaccaattaagacaggtatttgaaccatttgggcaagtggagcttgtacagcttcctctagatgcaatgactggactgtgcaaaggttatggctttattcagtttgcccggcttgaagatgcaaaagctgcacagagtttgaatgggcagcttgatattgccggcagagttattaaggtttcagctgttactgatcatgtgggagtgcaagctagtggagctactactggagatctagatgatgatgaaggtggaggcttggcgctaaatgcaagctccagagctgctctaatgctcaaattggacaggagtggtacagcaaccagcttaactggtggtattggtgctgctggagtggctgtaccagctacttcagttattggggcagcaggagctgcttctcttctgtcaccaacagtttctgctgttggatcagttcctggggcacctgtgcttcctattaccgctcagaatgtgatcatgtccacacctacagaattcttgttgcttaaaaacatgtttgacccatcattggagacggatcctgattttgacttggatattagagatgatgtccaagatgaatgttccaagtttggtgcagtgaagcatatttttgttgacaaaaatactgcaggcttcgtgtatctgcagttcgatagtgtaactgcagcagggaaggcccaacaagcacttcatggaagatggttcgccggaaagatgattacagcgacatttatgtccgatcaggaatacagtactaagttcccaaacttgtgagcatatgcggggaagagttggtcagacccgcatagttcgttcggagagtttgctagtgctgtatcgttggatggtagactagacgaacaccttattgattgtatgacaggatagtttcagttgcagcgctggtcgtgcgtacaatgtttgatgtactttatttacggcatcacacacagtgaccatcccttattttgtccaccgaatgaaatgccctatgatctccaggcacgttggcatatggtttatttatgtacgatctgttggcactggtacgtatttgtatactaagcaaaagcgttacataatcacaatggtacctttattagtcccctgtcgtgggatatgcggccgcattttggccagctttccaatgtgttccattttatttttgttctcatgatgtttcgacatgttttcatcagtttttcctttcaccaaggtcactatttcattccgtttcattttcatttactccactgatactgtatctagttattttatttggtttatcaagaaattataa

SEQ ID NO: 4563 - DNA, 2001 bp, Zea Mays
acatacgggatgatcgaaacatactgcctgactcttcatatctaaaggaatctgtggtggcaattgattttgctgaagaaacaagaaaggtagtggacacaaggacgtgggcgtgcttgcattgtcgagttacgaggggtataagcaggagcatgataagaaggtcagtctgttgaggaagcaagaggtgaagggtgtggattacttgaagatggagaagaacaagatggagattgagagcctggagtccaagatgctggttgccaaccagtccatcgagaccaccacttctgagataatcaggctcagagaatccgagctatttccccagcttcttgagctgattgctggcttgatgagcatgtggaggggtatgtacgagtgccatcaagttcagacccacatcgtgcagcagctggagtacctgaacaatgctcggaataccaatccgacttccaatgtccaccggcaagcagctcttcagctcgagatagaggttgacaggtggtattcagccttctgtagtctggtgaaatcccagagagactacgtctactcattgaccggctggcttcgtctatcgctgttctgccaccacgacccactgactaaagctcagaactcagatatctatggcttgtgtgaggaatggcagctagccatcgacagaatcccagataaggtggcctcggaagggatcaagactctcctgacagtgattcatgctgtcgtcattcaacaagctgaggagcataagcagaagaagaggtcggagtctgcattcaaagagtttgagaagaaggcagaggagctgagagccctggagtcaaaatatgtcggcgctgaaggttacagagaaatgtcacgaaaatcatcggtagctgacaagcgggcgaaggttgaggctctgaggagccgtgccgacgaggagaagatcaaatacgagaagagcatcggggtcaccagagcaatgaccctgaataacctgcagactggcttccctaacgttttccaggcgatgacgggcttcgccagcgtgtgcatggaggcatttgagtcggtgtacaacttcaagcggagctcggacccgaagaggctgctgacctgaagcaatgttgtataaaatgtatacagtcctaggtttttagtaacaatgataccttgcaacctttgtctggctgttatcaggttctaatggcgcaaaaaaaaaaccccccgtcaagttcaattacaccaagtaattgaaacttgaggccttgttttcctttttggttgagataatctcttgcctcggatgcaggttccaaaaggctcagctttgttttttcaatcggaagaaggtttgaactgtttgtttgcttccagcagctaatgacctgtttgtagcttcatgtcacgagctgagacttggatgggactggtaacagtagtctgtgcaattcagaaatgggccacacctgttgtttttccagcgcctaaattatatttctggtgatatggtcagtgaattctaattgaggcttttcagcttcaatttgcaagttcaacaagaggactgaaccgcacggcacacctgcctatccaatctcctataactttttttttctttcgaaaagttataccctctatgaagatctgaccctaagccacaccccctatgaagatctgaccctaagcagtggagagtgggacacccaggaaggataatcccttggcaccagctattgggtacttgatttcaattccctgaatgcatttgagaatcaaggcaacacaagttagtaatgtgaaccttcgacctgatctaaagtgtcaatatggagaacgaaggtcatagaaatgcaaacggaaatgatgtgtaatggagtaacacgacacaatggtgtatgaaaactcatctttcttgtcttgacattttcattccatctcccattacactagataaatttataagcatacattctgctccttaacagaaggtagaacgaaagttcttcggag

SEQ ID NO: 4564 - DNA, 1573 bp, Zea Mays
tatcgctaatcccttgatctgctaattaagacctacatgttcaagtatgacactgtgcacggacagtggaagcaccatgaggtcaaggtgaaggactccaagacccttctctttggtgagaaggaggttgctgtgtttggctgcaggaaccctgaggagatcccatggggttcggttggcgctgaatatgttgttgagtctactggtgttttcactgaccaggagaaggctgcagctcacttgaagggtggtgccaagaaggttgtcatttctgctcctagcaaggatgcccccatgttcgttgttggtgtcaacgagaaggagtacaagtctgacatcaacattgtctctaatgctagctgcacaaccaactgccttgctccgcttgctaaggtcatcaatgacaagttcggtattgttgagggtctgatgaccactgttcatgccatcactgctacccagaagactgttgatgggccctcatctaaggactggaggggtggaagggctgctagtttcaacatcattcccagcagcactggagctgctaaggctgttggcaaagtgcttcctgtcctcaatggaaaattgactggaatgtctttccgtgtcccaactgtcgatgtttctgttgttgatctgactgttaggcttgagaagtctgccacctatgatgagatcaaggctgcggtcaaggccgaggcagagggtagcctcaagggcattctgggttatgtcgaggaggaccttgtttccaccgatttccagggtgacagcaggtctagcatctttgatgcgaaggctggcattgccttgaacggcaactttgtgaagcttgtgtcctggtacgacaacgagtggggatacagcacccgagtggtcgacctgatccgccacatgaacagcaccaagtaaatgaacaaactgatgaaagcatgcaaagagtgatgaaagcatgcaaagagagttgtgtttcttccccggaagtgcttccgagaataaatttttcttatctgattgtctaaaacctataattggtgtaatggtatcgtagtggttggttgagcattgagtgactcatattttgtcaggtctatgtgttatcgttaaacttttaacggtcattctatttcaaaagttttgcattttgcaatctttgacgctccatttcacttcatagttccacgtcatttcttccttcatttggctatttggttgtcggcttctttatagttccacgtcttttcttccttcacttattaaccgttagctgctgctgtggttgagatgagattaccatcgagaagagtacagtgactggatcactggaagtgcaactcaggcacacatttattgtcactctaaccttgtgtagccaaacaacttcagtgatggtaatatcttaggtagtatcttgataaaatgacacaaacaacttcagtgatggtagtatatttgctgaatggaccacaaacaacttcagcgatgtgggatgtctcgggtttcttcgaggggattcaaccaaggtcttgtttgttttagtgccaatccatgtagattgagcggaattgca

SEQ ID NO: 4565 - DNA, 701 bp, Zea Mays
tggcaggagctcctttctcctccttactctgtcatctccgtccgttccttttcttcgttccctgatttccttgccacctgtgcaccggatccatcttgggattgctctgcctgtaaggcgagattgcgagaagatggggcagacaaggaaggaggtcgtattggcgctggactctaggttcacaagcatgatgacggaccaaagaagctcgagaactccatgctgcattgctatctcaaccaagaggacttggtggaggaaggaaaggaggaagagaagaaggagaaactgagtaacatgtttgtcctgattaccgtaaaaaacaggtttggtgtatcattctcagtgacaaagtaccttttaaaatgcattgccctttacactctgacatgcaagacaatggtatatgcattggcttattatgtatagcgagtcatattttgatagacttttggtacatgtttatttagttaaaaacctgtagtgacgcctgtttgatttttacaatatgtacaagattggaagatcctctttattttttgttcttctttatgagttgattgtcacaacatcaactttaaattagtgtcatatgttacctgcattctattttggtttgccattattatgcttcatgccattaaaaaaataattacgtctatttgagctacaacttttaaaacttgtaaggctgatagcag

SEQ ID NO: 4566 - DNA, 2409 bp, Zea Mays
gccgcgcgcggggtgctccacgcgtccagcgcgagccaggcgtccttcctttccttctccccgccgtcgtcgtgtcctcatccagccgtgcaggcagtggcggtggaccggagatctccgctccagctccgattgagcccaagagaagtcgttggtgcagacagccttggattggatgtggaatgaggcgatggcatctgacggatcatcctcctctaccttccgggggttgtacggcaacgtccacggcccggcggtgctcactggcgcggcgttcgcgctcgtggcgctcctcatctcgctctggctcatcctgcagcacctcagatcctacagcgatccagctgaacagaagtggatcatagctgtgctgttcatggtgcctgtttatgcctgcgaatcgataatctcactgtggaactcgaagctctctctggcctgtgatatattacggaattgttacgaagcctttgctctgtacgccttcggacgatacttggtggcttgccttggtatgtaaagcagctgcacagtaataatctgcatatatatatataatcacagcatattttccgttagttctctagagggatcgaatcgctgtagtgtaatcttgtgatgatcagctacgtacatatctatgctctccccactcgccacagctctctgaattaacagctgtgtgctcacttcttgttacatgactactacacttgaggcggggaacggcaagtgttccgtctgcttgagagcaggaagagggacgagctgagccaggagttgctagacaaggcacgagctcgtaaccgcggcggagcgtacagtttcttctgtgaccctgacgctctgggagagaacctgtacacgattataaagttcggccttgttcaatacatgattctcaagacactatgcgctctcttggcgttggtcttggagccttttggagcctatggagatggcgaattcaagtggaattacgggtatccttacattgccgctgtcataaacttcagccagacatgggccttgtattgccttgtgaagttttacaacgcgacgcatgaaaagctacaggcgataaggccactagccaagttcataagctttaaggccatcgtgtttgccacttggtggcagggagtcggcattgcgatcatctgccaaactggactcctgcccaaagagggcaaagtgcagaacgcgctacaggacttcctcatctgcatcgagatggctatcgcagcggtagcgcatgcctacgtcttcaccgtggagccgtaccagcacgtccctgctctacctcctgatcacggggaagtcatgtgtcaggaaagcaaaatggaggtggaggtggatgtcgacgacgatacaggcggtacaccagcttccattgcgcagcaggagacccatgtcgaagctccaggagggacgagcatcaaggagagcgtgcaggatgtcgtcctcggcggcggccagcatgttgtcaaggatgtcgcgcttacgatctcacaagcgatcgggcccgtggaaaagggcgtcgggaagatccaggagaaattccaccacatctcgctgaagccaggggacaagaaagagcctcaagttgctgtggaggagcacgtaactgagaacgtggtggatggcaaacctgctgttgcggtcaacgcggaggttgaagtccaacagaaggcgcaggatcgtcgtggcgaggaagaaggtgtgcaactcaaaagaacagagaaggaaggacgattgtcacacctgagagtgccatggtggaagatgcaaaggaagcgggagcaggtgcaggagcaagcggagtcgaaggctgaagctgtgcgagggccggacggtgaacaggggtgattgtgttggcctgcatctaaatgggctgtaagaccaactccagcagcctccgtatacggctctccatccccttttttcactgcgcagtacactattcatcagtccagcagactccgtatccctctccctaaaaagcacgctgtgtacttatactcctcttttccacgtcttctctcctctccgtacaagtctgagaaatggtgcaattaaaagccccgatagagtgtaaatacggagtctgttggaatgcaccatgcaaaaaaaccactttatctatgatcacgtctgcttattttacggataccttattttacggatatggagccatgctggagttggtttaagtggtgtgtggatgaattgtggagtgtgtcggcccaacagggtcagttctggtgtttaaaggagttgtaacagacttaagagagaaattaagaagaaaatagagaactcaccacagaacgttgcgtcgaccctctctggcggcgaaaacgtgctcacgtcccggcgaacctccctcttgccggcggccaggggcca

SEQ ID NO: 4567 - DNA, 440 bp, Zea Mays
gccatatcgcccatgccgctactttctaccagcatatagagtccctccgctagtgtcttgctttttccctcagcctggtggcaggagctcctttctcctccttactctgtcatctccgtccgttccttttcttcgttccctgatttccttgccacctgtgcaccggatccatcttgggattgctctgcctgtaaggcgagattgcgagaagatggggcagacaaggaaggaggtcgtattggcgctggactctaggttcacaagcatgatgacggaccaaagaagctcgagaactccatgctgcattgctatctcaaccaagaggacttggtggaggaaggaaaggaggaagagaagaaggagaaactgagtaacatgtttgtcctgattaccgtaaaaaacagttgtcgaatcagtggtgtgtacaaccaaccagctga

SEQ ID NO: 4568 - DNA, 1770 bp, Zea Mays
tttccgcgaatcggcaccttctccttttttttaagctgaatccccatcttcgacttccgcacctcgcctgaatcgctcattcgctccccaccccaacgctccgtccccgcggcccaccaaccgccgccgccgccgccacagccatgcacggccgccggcacctcgcggcgtcccttacccgggccctgatccaggcgccatcccgctccatctcctccaccccgtctctcctccaaaccctcgacccctcagtgccgtcgcctcccgccgcgggagcagggcggctcgcggagctgcggcggcggctgcaggcggacgcgccgtcgctgggtgacttcacgtactcggtggaggtggggacgcggcagcgcccgctgcccaagcccaagtggatgaaggagaccgtgcctggcggcgccaagtacgcggccatcaaggccaagctgcgggagctgaagctgcacaccgtctgcgaggaggcccggtgccccaacctcggcgagtgctggtccggcggcgagactggcaccgccaccgccacaattatgatccttggggacacctgcacgcgcggatgcagtggtcactttgctgaaacagtacagaagctaaaggctttgaagccagaaatgcttattgaagcgcttgtacctgatttccgtggagatccaagctgcgtagagaaggttgcgacttctggattgcatgtttttgcgcacaacattgaaactgtggaagagcttcaaaggaatgtcagagactaccgtgcaaatttcaagcaatctatagatgttctggaaatggcgaaagagtatgctcctcccggtacccttacaaagacatcgataatgctgggatgcggggagactccagatcaggttattaggaccatggaaaaagtgagggctgctgatgttgatgtcataacatttggccagtacatgaggccatcaaaacgtcacatgcctgtttctgagtatgttacgcctgaagcttttgagaagtatcgggcccttggtgtcgaaatggggttccgctacgttgcgtctgggccaatggtccggtcttcgtacaaggcaggtgaattctacatcaaggctatgatcgaagcggagcgagccaagggaaccgctgcagactcaagtgcataaccgagatagcacctcccggccccacccaccccttgacttggttgtgctgcaaataagctcctcactgcttttgtagtcagagagacatgtcgattttttacgtcataattgtaaccacacattcacttctattttttttggtcaattgaacagttccggcgccttcgtgccttggttcatcctccctctcaagtccaagaaaaaaaaagaggtatttgttgtagcagtatatttaggcgaccgcttcctttgtatctcgctcgtacagaacatgaatacagggcgtggggtttctgtgccgttggtagatccaatctgccgcagatctgaatcagatatccagatcacacacacacacaagaggcagacggagcttgcaggtagtgcggaaatcctggagcactccgcgcgtggctgggacggagtcaatttgaccatcttttgcgcggtcaaccgactcgacatggcaaaagcaggaacgctgctgccctgccactggctcgtacgtgaacgatctgggattatggctggatgatcgtccgtcagatggccgtggcccccagtggaggaggcagctgggcagtgttgcttgcaataatgctaggaacatgtagtgatg

SEQ ID NO: 4569 - DNA, 1270 bp, Zea Mays
atgaaggcgaccacatcgatatttggaggaatccaaagggctcctccacaaaaaaagacagacaaaaaaactaatagaaaaattaaaaagaatccattgactcgcaggttcccctgctctcaccatttccacctataaagtcggccgcagcctcctgcgcgacaaacacctcccaacccaatctccccagagagagagagccccaagccaagatccgcgcgaagcaagtcacccggcgaagcaccggctcccatggccgtggacctgatgggctgctacgccccgcgccgcgccaacgaccagctcgcctcctgtcgtccccggtcctgcccccctggcggccgtcagcgtggcgcagccgccgcagagcctgacgctggacttcacgaagccgaacctggccgtgtcggccgccacgtccgtcacctccacgtccttcttctcgtcggtcacggccggcgagggcagcgtctccaagggccggagcctcatgtcctccgggaagccgccgctgtccggccacaagcggaagccctgcgccggcgcccactccgaggccaccaccaacggcagccgttgccactgctccaagagaaggaagaaccgcgtgaagaggaccatcagagtgccggcgatcagctcgaaggtcgccgacatcccttcggacgagtactcgtggaggaagtacggccagaagcccatcaagggctccccttacccacggggctactacaagtgcagcactgtgcggggatgcccggcgaggaagcacgtggagcgggccaccgacgacccggccatgctggtggtgacgtacgagggcgagcaccgccacacgccgggcgcggtccaggggccgagccccctggcgaccgcgtcgccggtgcccgtcgccgtctccgccggcaacgggctcgttgtctagtctactaaaagctaggattagcttctcgtcttctttgttttttttttgtttgagctgatgtccgtgtaaaacaaggaagaaggttgtagaaagagggagaggaggacaccggaatttcgatgccgcaaaactcaaacctttgtgtcgtgtcctatctccgattggtgctcgctcaggctcccgttttgtgagtaaatactacaagctcagacgaaaatcgcgcccgctagcctgcacagaccccgagtcacctggggggctggtaccatccgacgcagctgtaaaattctggggcgtggttaggaacagttgaacaacgacggaggatgaaccattggggcgccg

SEQ ID NO: 4570 - DNA, 2319 bp, Zea Mays
ctttttttcgagcccatgaaaaacatcattactttattcaactacccaagtagagggggctcttgtagaggcgcccatcccacagtccgacacactccggtaaagatcgcccacccaatgccatcgccgccgccgtccacggcagcggcggcggcgctgcagctggagcccctcctcccgcacttgtccacgctttcccattacaagcagttccacgcgcgcctccatgccttgggcacgctccattcctacccttccctccgcgcgcgcttcctcgaccgcctagcgctcttgccgcacgccgacgcgcttccgcacgcgctactcctcctccgctccctcccgtcccccgcaaccaacgacttcaacgccgccctgcgcggcctagccgcctccccgcaccctgcgcgctctctcctcctccttgccggccgcctcctccctgctcccgccccgccacggcctcgcctcgatgcgctctccctctccttcgcgctgaaggccacagcccgatgctccgacgcgttcgccacactccagctccacgcgaccctttttcgcctcggtgtggctgctgatgtccgcctgatgaccacgctgctggactcctatgccaagtgcggcgacgtcgcgtccgcacggaaggtgtttgacgaaatgcccgtgcgcgacgtggccacatggaacgcgctgctcgcagggctggcgcaggggacggagccgaatctcgctctattgctattccgcaggctggcagggagctttcgggagttgccgccaagggaggagccaaatgcggtgactgttgtcgctgcactttctgcatgtgcacaacttggaaccttaaaggatggattggctgtgcatgagtttgctcgtacaataggagctgtggacaatgtttgtgtcggcaacgcacttattgacatgtactccaagtgtggctcactgagccgggctcttgaagtgttccattccatcaagctagaagaccgaacacttgtgtcctacaatgctacaattcaggcgctttccatccatgggcatggggaagatgcactgaagctgtttgatgaaatgccagctcgtattgaaccggacgaaatcacttaccttgctgtgatgggtgggtgcaaccatgctgggcttgttgatgatgggcgcagggtttttgattccatgcgggttcctcccaatatgaagcactacgggaccattgtggacctccttggccgtgcaggccgccttgctgaggcatatgacatgattatgtctatgccatttccagcggatattgtcctctggcagacattgctaggtgctgccaagatgcatggtaatgtggatctagcggagttggctgccacaaagcttgctgatcttggctctaacgttgatggtgactatgtgctcctgtccaatgtatatgcatccaagtcccgatgggtggatgttggtcgagtccgtgacaccatgcgaagtaatgatgtgaaaaaagtccctggcttcagctacacagaaatagatggcgtaatgcataagttcataaatggtgacaaagaacacatgaggtggagggaaatatatagagcattagatgaaattgggtcaagaatctgtgctctggggtatgagccagaaacgagcaatgtgctacatgacattggggaggaggagaagcagtatgctttaagctaccacagcgagaagctggctattgcatttgggttaatttctacaccacctggggagactattcgagtgatcaaaaacctccgaacatgtggagactgtcatgtggtggcaaaacttatctctaaagcctataatcgggtgatcattattcgggacagggcaagattccaccgtttcgaagatggacattgttcctgcagagattactggtaaaaatgctggcacactggtcacttgcagccctactaaacacaacatgtgctccttgaggagagttcaagtgatgtgactgcatttctagtcaaaagtacggatgaaagtggatgacatacatactcttgaccaccatgttactgtccagagggctcatcaagttaaaaagttcttagaagatgcaaagttatcttacttgcatgaactcctgggttcgcataacaattcgagaagtgccttggaagcagaaccaaaaaattgtgataactgtgcaagctttgaattgaaatcgctccatgactgttatcattcaatattttcacaatctacaaggagaggatgggagggatggggctgacacttgacaactttcagcactctcttacgttttcgaaaaaaaaggtgtgaaaa

SEQ ID NO: 4571 - DNA, 1232 bp, Zea Mays
ccaactgcactgcactgcacccaccttttcaatccaatcctgccgcattgcataattcgcatcgaagatcgatgtgaatccgtggaagggagggcggaggagaaggaagaagaggggtcgaggccgaatccgccggtgagaaggggagcgatggcgaggctggcggtggccgcgagggcgttctccgctgcggcctccggcggcggcgtgtccttggtgcagggggcgtcccgggggatcggcctcgagttcgtgcggcagctgctgcgcagaagcgatggaggccgcgtcgtcgctacgtgccgcacgccgggttccgcggccgagctccagaagctcagggaggagcacgcgcccgggcgcctcaccgtgctgccgctcgacgtcaccgacgagagcaccatagaggcagctgcggcctcaatcacggagacccacggttctcttgaccttctgatcaactccgccggcatcctctcgatcccgaacgtgatacagccagagactacgctaagcaaggttcagaagtcgtccctgatgctggcatacgaggtgaacgcagtcggccctatcctagtgatcaagcacatgtggcctctgctgaagatcggaggccgctccgagactaggagagggttcgcgcttgttgcaaacatgagcgctcgagtcagctccataggagacaacgctctgggtggctggcatgcgtacagagcttctaaaacagcgctgaatcatgaccaagacagtgtcggtggagttcggcaggaaggacaacatcgcctgcgtcctgctgcatcctggaaccgtggacaccgacctctcgaggccgtttcagaggaatgtccccgagggtaaactcttcacgagggagttctctgtgcagaggcttctctccgtcatcgacagcgtcaagaaaggcgacaacggcaagttcttcgcgtgggatggccaagaaatcccttggtgaacggtcatcgtaactcgcttgagtctatagcacagcacacagcagtcaacaacgcccctggttttaatccaacgttgtttttttttcaacaagccaagcgaacagatgcattatttctagctaaagggtcctctttttgtgttatcaccgacctaaagttcaagatgttttttttcttcttctaagtgttgaaatattagacatttttaaatcaaattctgaatataaatcatgactaaatcaaaagaactgaagtataaag

SEQ ID NO: 4572 - DNA, 1360 bp, Zea Mays
cagccttggtctcctgggatatggatattatccgctctgggagttccgcagcctctcaaattccggcgttcttccacatccactcttttcttcgtcccgaggcccggccggcccccggtggcccgcccgatcacgaggcacccatccgaacgctggcacctggtcgcgccacgtctccgcacaataccacatccacatggtgaccccccccccccccccggctgtctctaccctctcctcctcctccagtcctccctcgctcttcctcctcgcgaaacgacgcggaggaggttgccggtcaggccaccgccgcgcccgcccgcccgccggagacccggtccgcagccaacgcgtgacgtagggaggacacgcagccatggccacttcctcctcgtcgctcacaacgctccactcccgcttcctctctcccaccccttcctcgccctacatggcggcgctgccccgacggcgaagggccggagcgcggtaccctcgcatccgggccattgacctcgaccagaacacgattgtggccatttcggtgggcgtcgtcagcatcgccgtgggaataggtgtccctgtgttctacgagactcaaatcgacaatgccgtgagtattcgccactttttaagtttgttgcgacccgttcgctcttcactgcacagcctgttgccgtccaagtcgtgttaattaggctgggagttagcagctaagaacattgtttactgagactggaagatccaatcttgggtgaatttgccactgttctgtacgagtatttattactgttttaagtcataaaaaaggttgcaatatatttttttccatgcaggccaagagggataatacacagccatgcttcccctgcagtggttctggcgcgcaggtatgcaggttttgcagtggaaagggcattgttactgtagtacttggtgcaggcgagactgaagaatcgcagtgtgtcaactgcgagggcatcggctctttgacatgcactacatgccaaggcaccggaatccaaccacgctatcttgaccgcagggagttcaaggatgacgattgatgaaggttttattgccatctttggtagtatatgtcaaagatgtaacatcacgtctaatttgaggacaaagttgcggactcagaagagatgtacctatcagccataggaatcatctgattgttttgtgtttatatgttccagtttggtaaatatagatggcagtcgccctccagcagagaagataatgtctcaaatttaagtgttgaacgttttttgcgggagatgtagtacacattgttcttctggttttgtcatgcataattgcaaataaacaacgcgagtaaacaaaaaattca

SEQ ID NO: 4573 - DNA, 1709 bp, Zea Mays
gtgaggaaaaatctccccatctgctgaaaatccttcactcgtccctctctcggtctgtccctttggagcgaaggcgaaccgcgtcgcgaacccaggatcccatcgagggcaggcgggcagatcccggcgtccgacggcgatgggcgaggaggacgcgagcgccgggggagatccgcagcggctgaagcggatcgccgctgcggcgtacgactacgagaacgatgcgcggtgggccgggtactggtccaacgtcctcgtgccgccccacctcgcctcccgccccgacgtcgtcgaccacttcaagcgcaagttctaccagcgatacatcgatcctggtttggttgttgaaccgatgtcctccatgacttcaactcagtctagcagaccagcagcgaagtcttcagctacaccatctagtgagaatgtcagagctcgggactcaggctctagcacgagatcaactgggacctcccaacatccaccagcagagaggactgcaaattcattacagctagacggacggacaataaacttttctatcaatgcctgggtactggttgtagctagtctcggaatactcccagttctacccaaccatatctcgagtaaagcataccgtctttcattgctaggaacaatatgctcgtctgcatattctttatatggcacttatgggttgctctacttcctgtgctttgctgggcgcttgatcatgttgctcgattcctaaggcgtaattttacacactcttctttatacaggaagtacttagaggacccttgcctatgggtagagacaaacaacactacactcagcctactttgttcgaatgctgaaatcaccctggggtttctcatgatcatctcgcttttctcgtcgagacgcaatataatccagacatttatgtactttcatcttttgaagttgatgtaccattctcctgtgacatctggttaccaccagagcgtgtgggcaagaataggccgggctgtaaacccgtacatttaccgctatgcgccattcctgaacacacctatttcggcagtccagagatggtggctgaggtaggaaagcatggaccgcagcacagtgaaaatatgcctaaacagctactctgatctcagcgcctcgatcttttagaaggcgtgcttgcacggcgtgttcttttcttgtaaaggttgtattctcagttcatgtcttactgagctactgaaggcataacactagagaatttcttacgatgagcagtagcgcttgagcaaactgtcgatttgatgggatacagttacaggcataaagtgattgcacagaattttcataaggatgcttgctgcagtcaataggatggaacatgcgagtggcactattgattcttgaagtaataaatgatgttcttgtctattttattttgctactgctaggttatcttggttctgcactgttctgtgtctgttattatggaggaaatgccttagcaactctaacaaactctctatattcttcctaatctatataaatagagttttttttaaaaaaatacctctaacagcttatttaaatggctatctaaatatagccatttttttatttcgggttttctttagctaaatatagaaaaatatgaatggctctttagagtgcaaacaatatatataaaagattgttgaaaattaaaaaaatatagaaattgaattttatataaatgactc

SEQ ID NO: 4574 - DNA, 1833 bp, Zea Mays
gaatacgtctctctagtgttttggcgtaggaattaattacacgtgagtggttggcttaaaagcctaaacctgtgtcctgtaaccggtgaatttagatcaggattcaggaatagaaaaagaaaaagaatggacagcttgttgctcaagttgttcacccacctccactccacctgtgtgtgtgtgtttcacgtcccggcggaacttgccggcggacacgcgtcgtcacagccgaccaacggcgcttgcccgttcccccatcccccttgattcctccgccagcccagcggcggccactctccacgcatctgcatccgcatggctctccacgccgcggcgccggcctgcgcggtgttctgccgcctcccgtcgccctccccatctcacgccggcagcagacgctcccttcccgccgtcgcgagtccccgcggcgttgtctctgccgcgccgctacggacacgcgcagttccaacaaaggcgatcgtaaacagtgatggcatccctgaaacgagtgattctccacatgtggtttgctttggtgaattgctaattgacttcgtcccaactgtcaatggcgtgtcactggcagaagcacctgcctttaagaaggctcctgggggagcacctgccaatgttgcagttggaatagctcgccttggtggctcgtcagctttcattggaaaggttggtgatgatgaatttggctacatgctagctgacatattgaagcagaataatgtcaataatcaaggattgctgtttgatcctcatgctagaacagctttggcgtttgtgtcactccgaagtgatggtgaacgcgaatttatgttctatcgtaatccaagtgctgatatgctacttgaagaaaaagaacttgatcttgatcttatacggaagctgccagagctgctaaagatgctggagtacttgtttcatatgatccaaatttgaggctttcattgtggtcatcacctgaggatgctagagatggtatcctgagcgtatggagaactgctgatattttcaaggtaagtgaagaggaggtttcctttctcacaaatggagaggatccttatgatgatgccgttgtaaagaaacttatgcactcaaacctgaagttgcttcttgtcactgaaggtccagacggctgtaggtattactctaaggattttagtggtagagttggtggacttaaggtaagtgctgttgacacaactggtgctggcgatgcctttgttgctggagtgctatctcaattagccacagacttttctctgctccaggatgaaggtcggttgagagaagccctgaagttcgcaaacgtctgtggagctctcaccgtgacacagagaggcgctattcctgcgctgcccacccgacaacaagtgcttgatgccctgaccaattttgttgcttgaaagtagccgtgcacacctacttgtgtattgtaatgctgaccgcctgagcgccatgtcgatagattacaggcgtgatttcgcttgcataccacttggcatttttgttggtgcgtaccaaagccccccagccaaaccaagtactcggtggaagaggttgtttcccgtcggattttgatgtgtgaagttgtgtgttggggacgttgggttaacactttgtggacgtgtgtgatgtgtgtgctgatgttgtaatgctgctggggagaacatgacacagcggagcagttttggtacctgaaaacatgagctatgaatgagtgattcagttattgggcccaatttgcgttgcttccctagcatcaggtctgccccctctttacgatagttggatcaacaataaccaggcaacagtccaatgtta

SEQ ID NO: 4575 - DNA, 3009 bp, Zea Mays
gtattattcaaaatatccccgtcctcccgttccgtccccaaaaccctagggcgccgccgcctctggagcaagctcagggcaaagaccaagatgaaatcgatcctggtttacaccacctgaacaccgcccctcatacttgtcgacggtctacctgatggcagcaggttccggcggtggaggttttctgggcgacgtcaacgacccatggctgaagccgcggctgctccgcgcggtggtcaccgggcgccttccgcagcctggcgccgccgccgagctctcgccgacggaggtcgcctccatcctcgaggtggtacgcactcacggcctactcacggaggatctcccgggccgcggcgcgctggtgaacccgaagctcgccgaggcgtggcgcgccgccgtggacgcctgggttgagcgtgtcgtggcgctggtggagagcgactcgacatacagttgttggttgggtacttgctttctcggtgtgactttccaagagtgcagaaatgatcgatttgcagaatcacactccatttggtttgagaagattctgagtaatttgcagcaatcgtctagctttcaacttgttattgttatttcctgtacttccatgtctgatttatttgtaagattggctaagttttcgaacttaaagaaagagggatcatcctttgctggaagggttgttgaaccagtgctgcggcttttaaatcaaaatggtctagtagctgacgaagcaattgatttgctgaggacagttattaaattgtacccatcctctgtaaaccggcactacaataaagttgaatctgctattgcagcaaagattatgagcaatgtaaaaccatctgagaattccccaagtcttacatatactgtttcaatgctccagaaatttgcgagaaccttagcattgttaccttctgtccgagtgtccgaggacagttggtcactgatgattcggaggatactgattgtggtaaacaatcttttgaatgatgctttcattgggcttgaagaagaaaagaaaggccatgatattatgctgctgctagttccacctggaactgatcctctaccaacattgggagatgaagtaatgcctggaggcaatgtgcatatcatgaagaaatttcgtgtctttactgttcctaccatttcagctcttacgctttgctgcagcgtgatgctgactagttattatccagttcaggtcaatgttccaattcatgctttgatagctttgatgcgaagagtgctgttagttgatggatcattgcataacaagctgttcccttctacaacttcattgcatcaagagcttatttgttttgatcttccatcgttacattcaactttcttggatttgctgaatgcaactattaaaggcatgcgaagccaactcttacctcatggtgctagtatcatacggcttataacagagtacttcaaaatagcaaagctgcctactttgaggacaaaaacttatagcattttgcagctgttgctgacctccatgggtgttgggacgtctctgcacctgcttgaggcaacagtccgcaatgcagttgctgatctgaatgatgatggtgaaattaacatgactatgatcaacacaaattcatcgcaattgaccaatgaatcatcatcaaaagtttattcgaagaagaggaagcaagaaccacagatgcaaaactcaaccatctcaggttcagagaaagtagcaatcagcccaaggaaaagaaaaggttcttccataccaattacatcaaagggagtggcccctgaaagtacaggagatgttacactatcaactccacattctgtcaaaatagctgcgcttgaaacattggaagttcttctgaatgtgggaggttcattgcggatggatcgctggaggtcagaagtggacatgctcttaattaacgtggctagaagtgcttgcggcatgggagggagttatgagcaaaagccatccacatttggggagccaaacatatcggacttccaacttgcttcgcttaagggcctgctggcatcttttctttcttctcatgcccgtcctccttatttagccaacggaattgaactcttcagaaaagggaagctagagataggcactaaggttgcagagttttgttcacatgctttgcttgctttggatgtccttgtccaccctcgagccctttctctggaaagaacagttcctgcaagctctgggttcaactacactgcacagaaaaaaacagtttttggtgctggtacacaccagatctcaccatttggggaccagcctcaagcaatggaggtcgaagacatgtacgatgactggctaatatccaacaacaatgaaccaccagaggttccagtgaacggtagtgatgctgtggtaagtaaaggtgtgctggtggaggatggaaagcagctcaatcccatagcagaagatccaaaagtcgacccacccagaatcacagacgcagcacaagatgcaccagcatccaccaagactgatgtcaaggtggtcgatgcagctgcagccacagctgccaagccaaacacagcggagaatccttcgagttccaatgctgtcccctctccagtgcgcacaacagattctgattcacgtaagcatgcgtcatttcccgagcaggatagtcctcatgagaacaaaagcgcagccgtccatccaggtgaagcttctgcgactccaggtgttggttcaagccaccaccgccatgaagcacctgaggcccgttcagccagcttcacggaattgtttggttctgagtctggcatcgaatcagagtccgaagacttgatgccagatatcgtcgacggggaccctgactctgactaggtttgccgtcgtcatttgtgacatggcaatggaaattttgtgatgttcctgttttgttttgagcaaattgtacgacattgccggctgacagatgatgcagtatttgattgatagatatagatggagctaaattttgtgatgttcctgttttgttt

SEQ ID NO: 4576 - DNA, 1323 bp, Zea Mays
cttctgttgctgggtgttgttgttgttgctgttcccttctccctctctctccctccccatctccctctccatctccatctctgtagctatagggaggagatgtattccgacttccgagccccccatctccaaggaaattgcgacgagcccatcgttccatatctccctttaagattgacctgagactgcttcgtccacaccacgagtgcaagagaggtgggagacagacacacagagagagagagagagagagagagactggcgaggaagagataacgaaccagcatttgctgcgtcaccagctctctacctagcaagctagctagcggccggtgcgcgcggcggcgatgaacagaggacaattccgggcctcgcctttgcagcagcaggtgatctggagcgccgataccgccacggccagcagcagcagcgtcgtcatgagcgccttcaacttcaattcgtgccatgaggatcaagaggccttctcccccaacaacctgccgtccttgtcttccccgtcgctgctcttctcccacgaccagcagcagtcgtttccgcacaccggtaccactaccacctctccgggccaccaacttcttgccaaccgcggcgcagcagcgggcggctgccttccaagtctgcacgacggcggccaggagaaccaccacatgccggagtcgtggagccagatgcttctagcggggctagtcggaggagatcaggagcgctgcaccgcagctctcctgtcaaagggcatggacgattggggggatcacgctgcgactgcaagcgcggcgtgcatggtgggtggcggcggtacgaagaaggatgagggctccgccgtgcctcaacaacctccgtatagcttctacgggagccacggccacctcgctgctggcggtgatgagcatgagatgccggcgccagccagcaaggctcagctcagccagatgctcctggcctcgtctcctcgctcgtgcgtcaccacgagcctcggcagcaacatgcttgacttctccaacagcgcgccgccgatggagctgaagcgccaccatcatcactctgataactcatccgagtgcaacagcactgcgactgctgcaggttcggccgtcaagaagcctagggttcaggcggcctcctcttcagcacaatctactctaaaggtgaggaaggagagactgggcgatagaataactgctcttcatcagatcgtttccccgtttggaaagactgacacggcgtctgtgctgcaagagaccattgggtatatcagattcctcctgggtcaaattgagtaactgcagcgcgagacggatgaaa

SEQ ID NO: 4577 - DNA, 1124 bp, Zea Mays
ggacctgctagcaattgaaaattctggtggagtattatttcagtgatataaacctggccaccactgaacatttgatgaggtttatttcaaaggatcctgaaggatatgtgccaatatcagttgttgctggctttaagaaaattaaggctttggttcaaagtaactccatgcttgcttctgctcttcggacttcatcaaagcttgtggtcagtgacgatggtgcaagagtaaaacgtgagcaaccatttacagaatcggatttagaagaactccaggcccgaattgttgttgcagaaaatctcccagatgatcattgttaccagaacctgatgaggctcttttcagttgttggcagtgtcaggacaattagaacttgctatcctcagaccccaaatggcactggtccagctactaacagatctgcaaagctagatatgctttttgccaacaaacttcatgcttttgttgagtatgatactattgaagatgctgctagagcgattgtggaacttaatgatgagaggaactggagaagtgggcttagagttcgattgttgagcacttgcatgggagaagtctatggccatccaacgttcatatttggcgattcagctattttgatgggtggttttggtgacgtggatgacaagtggcagtcagtcccgcttgtcatcattgttcaattttttagaatggctcaaaatggagaaatgaccaaaaccaaagttgttatagttgagatctactttgcacttgacttgttcatttgaaattatttacattctcaaaactctgtttgacgttctcatattttgaaatccaaaatttttgaactgttcaaattaacttggatggggaaatgacccaaactgaagatgtagatctcatcgatgagatctacaactttgtagctggcaactttttttagtgaaaatcatttatggtcccaaaattttgtttgaagtcacattttgaagttcaaaattttcaaacctccttggatggagaaaaaacggccagaaacaaagatttacttctccaccagatggagggggaagaagataatgctgacatgtgggcttgctgtttccctaacttgtttttgtgtcacaaaacaattttct

SEQ ID NO: 4578 - DNA, 1128 bp, Zea Mays
ataccccggtcctgaagtggtagaacaatcatctcccagaccgcgcgatggccttatcctcctcgcgagcgccgctgctgccattgttatgcttgctactaacagttgtagctgccgccaaacacccgaagcaggagaagcctactccggcggcgttggcgcccgtcgtcacacttgaaggctgccccgacaagtgcggcaacgtcagcatcccctaccctttcggcaccaaggacggatgcttccgcccaggcttcttcgtcgtgtgcaacgacaccttcgatccccctcgccccttcatcaactccagcctcgcgctcggcaccgacgacacgaggacgcagatcgtcgtcgaggacctgtactacctgaccgccgaggacggcatgccggagacgacaccgacaaggtccgcgtggccgatcgagctcgccggcgtgtctctctcggacgcgaaagcgcggctgctgggcgccttcagctacgagtgcaggctgaacgagacgcaccactcggtgcggcggcagaggatcaacttcggcgtctaccgctcgcccttcctcctgtcggacgccgacaacgtgctcatgggaatcggcagcaacgtcgtcgccgagcagaccaccggtccgctgtgccagtcctacctcaacctgatatccttgtcggacggccccgtcaacgggtcgtgctctgggcagggctgctgccaagccaacctaccccccgtccgctctgacagcacggtgaccatccagaagggcaccatgtacgaggacggtggctacggcggcggcggcggcggccgcgtcgactgctcctacgccatgatcgtggagaaggcgtggtacaacttctcgtcggtggacctcgacagcgacgcgttcctgcggaggaacgccgccggggtcgtccccgttgtcgcggacttcaccatagacggaggtggatgtcccgacgccggcgagccgacgcccaaggacttcgcctgcataagcgacaacagcaagtgcgtggaccggctggtctacgacaattccagggggcactactgcagttgctccgttgggtaccaagggaatccatacatccatggaggatgccaagcgtactgttgacgccttttcg

SEQ ID NO: 4579 - DNA, 613 bp, Zea Mays
attttttggttgcaaatggtaggtgcgccccaggcaatgttccacagctgtgtcaccttcgcagcattctcatgcataatggacggtctcagcaagcagcaggcagcaatggcactcacacttgatgtgaaatctccaactgtcaagtatgaggagggccgggtcatcccaccattcactcttccgccgcttctggatgcattggatcctctaggttcattctgccagacccttatcaagcctaagcattaggagtgcgctgaggcttgttaccccaaaaaggcagtttcgatctatagtttggcactgtatgctctataaccgttctgaatttgtctccagtcatgctgttcaagtttggtaactgtagtggcgctataggacatatgcccattttttgtcaatggtacattttttatgaaacttgctgaagagattataaccataagattgttcattggtgaagatttgatagttcattgcaacaatggtgttcaactctctgagttgaagatattttttcagaaaacaaactgttagcaggaaatctgaataggtgcttaggctctgtgtaccaatttgcccgatagtgcaaaacctcgtcagatcgagc

SEQ ID NO: 4580 - DNA, 822 bp, Zea Mays
gccggcaacaaataagttgcttctgcttaattccaataggaaaaggtttgatcacaaaccaaggcacgaaggcttgtcttagcattgctggatcttctgcaaagacatttgctgctcttgctggtgtccaaagtttcatcatgtgcttgctaagaagactgcgtgggaaagatgacatgatcaatgcgggtatggcaggttgttgcacaggcattgctttgagctttccaggtgcgccccaggcaatgttccacagctgtgtcaccttcgcagcattctcatgcataatggacggtctcagcaagcagcaggcagcaatggcactcacacttgatgtgaaatctccaactgtcaagtatgaggagggccgggtcatcccaccattcactcttccgccgcttctggatgcattggatcctctaggttcattctgccagacccttatcaagcctaagcattaggagtgcgctgaggcttgttaccccaaaaaggcagtttcgatctatagtttggcactgtatgctctataaccgttctgaatttgtctccagtcatgctgttcaagtttggtaactgtagtggcgctataggacatatgcccattttttgtcaatggtacattttttatgaaacttgctgaagagattataaccataagattgttcattggtgaagatttgatagttcattgcaacaatggtgttcaactctctgagttgaagatattttttcagaaaacaaactgttagcaggaaatctgaataggtgcttaggctctgtgtaccaatttgcccgatagtgcaaaacctcgtcagatcgagc

SEQ ID NO: 4581 - DNA, 2513 bp, Zea Mays
cgggctcagccatgccctaacacaatgccgtatgtgccaaaataagggaatagaaaggtgccgtgtcatccaataattttcctcgacaaatcctaaccacacacaaaaggccctattttaaatttctgaggagaaaaactaaacagaaaaatcgaggaaaatatgctgctagcaggggccgccattcccactagggttttcggattattaggtttctagaacctttcttcgccgccccccccccccccccccccagaccccatgcacgctccgccgctggtcgcgttcgcagggggcgcctgccccgcttccgctgcctcctcgctgtcgccctggttggcctcgctgcggcccgccatcgttgctgcgccggcgaggctgctatggttccgccgcggggcactccggctggaagccaaggccgcgtggagggctaccggagggggacggggcccgcgggtcccggccaagggcgctgtgctcgcctcctatatgggtgccgaggaggtggtgggacccttgtcgctgctcgacgaggaagagctcattttgcacataagaaaggaacgggataatggaaaacttcctgcagatgttgccattaacttggaggagctgtattataattacaggaatgcagtcctgcaaaatggtgatcctaatgcatatgagatcatgctttcaaatatgacagctttgtttgatcgtgttctactggatgtacagaatccatttacctttccaccgtatcacaaagctgtgcgggaaccatttgactattacatgtttggtcagaactacattaggcctctggtagatttcaggaactcctatgttggcaacatttcccttttccatgacatggaagagaagctccaccagggccacaatgttgttttgatgtccaaccatcagacagaagcagatccagcaattatcgccttgcttcttgaaaaaaccaatccatggattagtgaaaacatagtttatgttgctggcgatagggttgttaccgatccactttgcaagccatttagcatgggaagaaatctcatttgtgtgtactcgaaaaagcatatgaatgattttccagagctaattgagatgaagaggagatcaaacactcggagcctcaaggaaatggccttgcttttacggtatcttcccttacaataacatgttagtttgtaatcctttttccctatgtattgactctgtattgatgacttgtaccaaaagctggtgcctcatggcacaaatttatcaagtaaaagagtaaagaactcctgttcaaaaaagactaatggactattcacttgcacaaaaatctttaaagttttttgtgcaccattactctttgctaagttggttcttgccctcatgaggaaaaacatattctcaatctagatcatcgtgcatgcaattgcctttactgttttgtgcttgatcccacatatcttcttacgacaatacacagtggtggttcacagctaatttggattgcaccgagtggtggtagagatcgcccaaatccttcaacaggagagtggtacccggcgcattttgattcatccacagtggacaatatgaggaggcttctggagcatgctggtgttcctgggcacatatatccactatcattactgtgctacgaggttatgcctccaccacaacaggtcgagaaagagattggtgaacagagggtgatatccttccatggagtaggcttgtcagcaactgaagaaacaaagtatggggatattacttgtcataccaagaatgctgatgagggaagggagctattcacaaatactttgtacaactcagttgttaatcagtacaatgtcctcaaatctgctatctttagagatcgtggagcagctgtatcaaacaatgccatctcactgtcacaaccatggcgatgaatgtagctttcccagtccagattcgatactgaagttaccttttcagaagaacaggtgaactgcaattgtgcaatttttctgggaaaaactcttgaagtttaatctttctgatatcactggactttaccaatcatggtggagcttattactctaatgcagatcctcgctaagatgtctggctggtcaagggtgattggtgattctgcagatagggatcctcgtaacattgcatgccgtcgtccgcaaattactgctccctcaggttgttcagtaatgtgctggttgggcactgaggaatccatcaggttgcatccttttgtctagacgtcgatttgtgttgttgaagtggtaaacattttcatcctgggctgtatcgtcatcatgtatagataggctcgagtctctctcttttttttttggctccacaattttttggagatataaaagcggcaggagttatgacatgcccacagtcggccctccttgtagaaatcctttggatgtaacctgtctctttcttatatacatactgaaagtcaaggcagatatcccgtgtttcgagtacgtggctccgtgactacccgcgtc

SEQ ID NO: 4582 - DNA, 2079 bp, Zea Mays
ctgactcccaagcgtttgtttgaccttccgaaatcaacccagccgcccaatcgagcaagtgatacgcagagagagagagagagagcagtgtgtatgcgtatgtgtaggccccacaggcgggtagtacgtacggaacggaacggaagtaccgtctggtgtccgggcctttgatgcccttttattttatttattatataaaaatcgcctgctactgctagggggctaggtgcttgctggagtacctgcacagcttacacactgtaccgtgtggaagcgtcgctgggtcagctagtagcttctcccttccgttccgttccattccgttggtggcctcctctcctcctccaatctctttctctatagtagtagtactcgttagttgtgtctcttctctcggttccctccctagtccctcccgctatatatcaaggctctctcgcttggctcaaggctcaccttctcctacctctcgcctagcctgcctcgctcctccgttcaggcaggctttcagctaccgccgcgcggccgcgaccggcggcctcctttagcggctacgtacgacgtatataccgggcaggcgggcaccggccacggccaacgctagctgctgccaggttgctggaaagagcagctaagagagataattcaggagtgggatcgagacgacatgagggacatgggagagaagaggagacacgggcatggacatggacatggacatcttgttgggtttggagctggaggggttgttggacatgccgcagagcatgaggagaagcgcatggagcagaagaagctggacatgagcagcatgtccatggacaccctgccacatctcaccacgcctcttggcaacatcactaccctggatctctccaacaacaacctacagagcattccggagtccataatcgcgaggctcctgaacgtggtggtgctggacgtgcgctccaaccagctcaagtcgctgcccaactccatcggctgcctctcaaagctcaaggtcctcaacgtctccggcaacctgctccaagaactcccggccaccatcgaggaatgccgtgcgctggaggagctgaacgccaacttcaaccagctgacgaggctgccggacacgctgggcttcgagctccacggcctccggcggctgtccgtcaactccaacaagctcgcgtacctgccgtcgtccacctcccacatgacggcgctgcggtcgctggacgcgcgcctcaactgcctccgcgcgctgcccgacgggctggagaacctcggcggcctcgaggcgctcaacgtgagccagaacttccagtacctgcgggagctgccctacggcatcggcctcctcgtctcgctccgggagctggacgtcagctacaactccatcgccgcgctcccggactccatgggctgcctcaccaagctcgccaggttcagcgccgcgggcaacccgctggtgtgcccgcccatggacgtcgtcgagcagagcctcgacgccatgcgcgcctacctcagcgcgcggatgaacggcaccgccaaggccaagaagaagagctgggtgcccaagctggtcaagtacagcaccttctcggcggggatgatgacgcccggccgcaccaaggtgcacgggaacaacaccgacggcctccacatgtcggattaccggtcgctcgacggcggcggcgttgcgtcgtcggcgtttctcagcatgctgtcgccccggcgtctcttctcgccgcggagaaattcggccaagcactagtagcttagcagtggccactggttcggcgggctatacatgtgtgctccctccttattgctggctatttgcttgctgcttcgatgttcatatgacatgcacgtactgtagcgcaagctgaagctaatgatcttgctactgcagttgtatatgctttgaagagaggtatatatgaagtgtgtatagtagcacgtagtgcaatagggcattaatgtacataagaattaagggtgtctttctttccattgtttacatttgcgttagtgcttatgctggagtagtctttttgaaggaaattgtgtcatcactacagtaaacggaac

SEQ ID NO: 4583 - DNA, 3905 bp, Zea Mays
gttgttagccaaaagtcaaaattgcccatgtccatccatccgctcgataagatcacgttataaaagcagcccaatcccccagaaacccacacaccgccccaaaagaataaaaaaaatcattttgctcttttgattgattgatatgctatagctggagttcaaaccaacaggccacaggctacaggccacagctagcacacccttctcgccacgctcttgtccgcactctactcgccgagagtgtgagtcgagacgcctctctcgccctctcttctcctccctccactccgccgccgcgcccgagaaaagagagttccaatgcgcctcctcccgctgctcctgctcctgtccctcgccgctgtcgcggccggcacggacgcggacgcggacgcgctgctggccgcgaaggccgcgctctccgaccccactggggcgctcgcgtcctgggacgcggcctcctccgaccattgcgcgtgggtgggggtcacctgcgcgccccgcggctccggcggaggcgtcgtcgtcgggctcgacgtctccgggctcaacctgtccggcgcgctcccgccggcgctgtcgcggctccgcggcctgcagcgcctctccgtcgccgccaacggcttctacgggcccatcccgccgtccctcgcgcgcctgcagctcctcgtccacctcaacctctccaacaacgccttcaacggctccttcccgcctgcgctcgcgcggctccgcgcactccgggtgctcgacctctacaacaacaacctcaccagcgccacgttgccgctcgaggtcacgcacatgcccatgctccgtcacctgcacctcggcggcaacttcttctccggggagataccgccggagtacggccggtggcctaggctgcagtaccttgcggtctccgggaacgagctctccggcaagataccgcccgagctggggaacctcaccagcctcagggagctctacattggctactacaacagttacaccggtggccttccgccggagctggggaacctgaccgagctcgtccgcctcgacgccgccaactgtgggctctccggcgaaatcccgccggagctcgggaggctgcagaatctggacacgctcttcttgcaggtgaatggcctcaccggcagcataccgtcggagctgggctacctcaggagcctcagttctttggacctgtcgaacaatgcgctcaccggtgagatacctgcgagtttctccgagctcaagaacctgacgctgcttaacctgttccggaacaagttgcgcggcgacatccccggcttcgtcggcgacctgcccagcctcgaggtgctgcagctgtgggagaataacttcaccggcggtgtgccacgccgcctcggccgcaacggccgcctccagctgctcgacctctcgtcgaacaagctcaccggcacgcttccgccggagctctgtgcggggggcaagctgcagacgctaatcgccctcggcaacttcttgttcggtgccatcccagactcactcggccagtgcaagtccttgagccgtgtccgtctcggggagaactacctgaatggctcaattccgaagggtctattcgaattgccgaagctgactcaagttgagttgcaagataacctcctcactggcaatttcccggctgtgatcggtgctgcggctcctaaccttggtgagattagcctgtccaacaaccagcttacgggtgcattgcctgcatctcttgggaacttctctggtgttcagaagttgctgcttgatcagaacgcgttctctggtgccatacctccggagattgggcggctgcagcagctctccaaggctgaccttagcagcaacaagtttgagggaggtgtgccaccggaggtcgggaaatgccggcttctcacttacttggacatgagccaaaacaacctctctgggaagatacctccggccatctctggaatgcgaatactgaactacctgaacctgtccaggaaccatcttgatggagagatacctccatccattgcaaccatgcagagcttgacggcggtggacttctcgtataacaacttgtctgggcttgtgccagggactggccagttcagctacttcaatgccacatcttttgttggcaatccaggcctgtgtggaccatacctcggtccatgtggtgcaggcataggtggcgccgaccactctgtccatggccatggctggttgaccaatacggtcaagctgctcattgtccttggcttgttgatctgctccattgcattcgctgtggcggcgattctgaaggctcggtcattgaagaaagctagtgaagctcgagtatggaaactcactgcattccagcgcctagacttcaccagcgatgatgtgctggattgcttgaaagaggagcacattattggcaaaggtggtgctgggattgtgtataagggggcgatgccgaatggtgaacttgtggctgtgaagagactcccagcaatgggccgtggctcatcacatgatcatgggttctcggcagagatacaaacacttggtagaattcgacaccgtcatattgtgcgcctgctaggcttctgctcaaacaatgagactaacctgttggtttatgagtatatgcccaatggcagccttggggagatgctccatggcaagaagggagggcacctccactgggatacccgatacagcattgctattgaggcagccaaggggctttgctacttgcaccatgactgttcacctttgatacttcaccgggatgtcaagtcaaataatatacttcttgactccaactttgaagctcatgtggccgactttgggctagcaaaattcttgcaggactcgggggcatctgaatgcatgtctgccatcgctggctcatatggctacatagcgccagaatacgcatacacattgaaggtggacgagaagagtgatgtctacagcttcggcgtggtgcttctggagcttgtcacaggaaggaagcccgtaggcgagttcggcgacggcgtcgacatcgtccagtgggcgaagatgacgacgaactcaaacaaggaacaagtgatgaaggtcctggacccaaggctctcgaccgtcccgctgcacgaggtgacgcacgtcttctacgtcgcgttgctgtgcaccgaggagcaaagcgtgcagcgcccgacgatgagggaggtggtgcagatcctgagcgagcttccaaaaccgccatctaccaagcagggagaggagaattctaccaagcaaggagaggaggttccgaattccggcgacggctctgcgcccagccctctacactcagcaccagttgggaccaacgaagcaccagccgtcgaagcgagagaccaccagcagcagacaagctctccgtcgtcgccaccgcctccagatctcatcagcatctgagtaaccggaatcgaaaacgttaccgttcctcgcaaaaatccccgcttcagtgtagcaagcttaggtcgtaattttaggtttgcaataagtttatttggcctcctgtgctgtacatatccgagtttgtttgttggttggttgtgtccggtctgtcatgtttcatttgctggtgcggtgtggtaggagtctgtagcgagttgagtttgagtgagccacgttgctagagcctttgatttcccttctctaatactagtgcactctctcttgtcaaatttggcgccagaatctttgttgtggaaccaaaaaccttaaagtgctttctacttctgtgtaaacggtgggagtgggccataggcccatagctaaaggcctcgaaatcaccagaccttaggctgtattggttggtcccaaagagaaagcctgcttgcaagacggcctgggcccagaatgtcaaaggacgagacaggagcgcatgaaagaga

SEQ ID NO: 4584 - DNA, 3741 bp, Zea Mays
tgcaaaccaccagctccccctctggagtctcgtctcgcttccactccactgcgctgtgctcttccactccactgcctcctccctccctcgctcacacagcttccaacgattccattcccagctccctccctcctctccccaactttttcctccgtcccccgttcctcccctcccaacccatttcaaatcgcaccaaaacccccccgaggacctgcagcgaggcctcccctctccgcgctcgccctagcctagccaggcatccgccccccgcgtagatcccccattcctcggccccatcgctctctcgcccgcccgccgccggcggccagattccggatccgccgggaggtctcgttcggagacgggaggcgccgcccgtgcctgcctgatcggtcgctgagacttggcggcgggtcctggcatgggattgcggcgccggggcatttccccgaccaggcggcgggcggcggcctaagatgcgagggcggctggcccggggtgtggggcaccagctcggggaccgcttctcgccgtgcgccggcgtccgcctgctcatgctgccggccgcccggggccctcggcgacgggcattggggcgcgctcttcccgcgggctgctgagacgcggacgcgccgtgccaccagcctcccgccggccatgggcaacagcacgtcccgcgtcgtcggctgcttcgcgccgcccgacaaggccggcggcgtcgacctcgacttcctcgagccgctcgacgaagggctcggccactccttctgctacgtccgcccgggcggcggcgccgccgcagactcgcccgcgatcacgccctccaactccgagcgctacacgctcgattccagcgtcatggactcggagacccgcagcgggtccttccgccaggagcctgccgacgacctggccgccgccgccgccgctgccgccggtctgcagcggccctgcaggagcttcggcgagactaccttccggaccatatcgggggcctccgtcagcgcgaacgcgtcctccgccaggacgggcaacctcgccgtctccctcgccggtgacgtgcaggagcccgccgccgcgttcgagagcaccgcctccttcgccgccgtgcccttgcagccggtgccgcgaggctcgggggcgctcaacaccttcctgtcgggcccgctggagagaggattcgcgtccggcccgctggacaagggctccggcttcatgtctgggccattggacaagggagccttcatgtcaggccccatcgatggtggcagcagaagcaacttctcagcacctctttcctatggcgggaggaaggctcgtctcgggcgtcttgtacataggatcagcagacccatgaaaaccgcattgtccagaacattcagcaggagctcacaaaatccaggctgggttcaaaagtttctctcgcatcctatgactcaactgccctgggcaagggacgcaaagtccagatcagaaggctcacagaatggcttggaacccgggatacctgaacatgagtataatgtgacaaggaaccttcagtgggctcatggaaaggcaggggaagatagggtgcatgttgttctatccgaagagcaaggatggctattcattggaatttacgatggttttagtggccctgatgcacctgactttctaatgagcactctatacaaggccatcgataaagaactggaaggactgctctgggtctacgaagacagctctgaaaggagtgatcatgtatctactcatgaagagggtgaatcagttgctgcttctgtggatgctcctcatggtgatagtgaccagttccagagtgacagtgggaaacaagaacaagttggtaattttggaaaacaaaatatttcacctggaaagggttgtgatgaaagtgtcttgcaggttcagccaaactgtaccagcagtgaagagaaaaatttggctacacagggttcaactagtgagaagttggccagggatgagatagttgaggaaatggctggagctgatctgggaaatgatctccaaagtagagaatctcaaaactcaaacagaggtctttcagatacagatctaaacaacaattgtagctgtgcaacagaaaccacttcctattgtgatcagcatgccaaattcttgaaagaaaacagaaagagcaagcgtctttttgagcttcttgagatggaattgctagaagattataacaaaaggttatctaaggcatcaccaaaggaaaggaaaataccgaacttgcatgttacacaggcgggcactgcagaagtgttctcaagaaacacagctgaagtctccaggtgttcattggcagcaactggagaatgttttgatgattctgaagatcttggaagttcaagacacgctgatagtgtacttggcatagatattaaagagtgtactgggtgttccatatctacatcttcatcagggcacaagcaagttacgagaagatttgtgttcggatcaaagttgaggaagatgtacaaaaagcaaaaaatgctgcaaaagaagtttttcccgtggaactacgattggcacagagatcaacctcatgttgatgaaagtgttataaaatcttcagaggtcactaggagatgtaagtcagggcccgtagagcatgatgctgtattgagggcgatgtcacgggcgctggaaacgacagaggaagcatacatggatattgtggaaaatgagcttgatagacacccagaacttgcattaatgggttcttgtgtccttgtaatgttaatgaaggaccaggatgtatatgtcatgaatcttggggacagccgagctatcttggcacaggacaatgatcagtacaatagctcaagtttctcaaaaggagatttacgacatcgaaacaggtcaagggagtcacttgttcgtgttgaacttgataggatatcggaagagtcgccgatgcataatcctaacagtcacctaaacagcaacacaaaagctaaggaactgtcaatatgtagactaagaatgagagcggtgcaactgtcaactgaccatagcacgagtattgaggaggaagtcttgaggattaaagtagagcatcctgatgatccccattctgtctttaatgatagagtgaagggacagctgaaggttactagagcttttggtgctggttttctaaagaagccaaaatttaacgaggcactacttgagatgttcagcatcgactatgttggaacatcaccatatatcagctgcaacccttctgtacttcaccatcgtctctgtgcaaatgatcggtttcttgtactgtcctcagatggattgtatcaatatttcagcaatgatgaggtagtttcgcatgtgttgtggttcatggaaaatgtaccagagggagacccagcgcaataccttgtagctgaacttctttgtcgggcagccaagaagaatggaatgaattttcacgagctactggatatcccccagggtgatcgtcggaaataccatgatgatgtttctgttatggtaatctcacttgaaggaagaatctggcgatcttctggatgagtgttgaaacatgacctgattcctgttctcgttgaggacctgttagttacaaccaaggaggttcaaaggaacaaaagattccagaggaatgtggtggttatcagcctatgatgaatcaacctcaactatgagataatgacagtattgtgattctgaatttgggaatatatgctgtgaccgacctttgac

SEQ ID NO: 4585 - DNA, 1297 bp, Zea Mays
tatgtgtattatactgctaaaaatatcttcttcttctcggccgtacaaatggggcgcggcaaggtgcagctgaagcggatagagaacaagataaaccggcaggtgaccttctccaagcgccggaacgggctgctgaagaaggcgcacgagatctccgtcctctgcgacgccgaggtcgccgtcatcgtcttctcccccaagggcaagctctacgagtacgcctccgactcccgcatggacaaaattctagaacgttatgagcgatattcctatgctgaaaaggctcttatttcagctgaatctgaaagtgagggaaattggtgccacgaatacaggaaactgaaggccaaaattgagaccatacaaagatgccacaagcacctgatgggagaggatctggagtctttgaatccaaaagagctccaacaactagagcagcagctggagagctcactgaagcacatcagatcaagaaagagccaccttatggccgagtcaatttctgagcttcagaagaaggagaggtcactgcaggaggagaacaaggctctacagaaggaactttcagagaggcagaaggcggtcgctagccggcagcagcagcagcagcaggtgcagtgggaccagcagacacaggtccaggtccagacaagctcatcgtcttcttccttcatgatgaggcaggatcaacagggactgccacctccacaaaacatctgcttcccgccgttgagcatcggagagagaggcgaagaggtggctgcggcggcgcagcagcagctgcctcctcctccggggcaggcgcaaccacagctccgcatcgcaggtctgccgccatggatgctgagccacctcaacgcataaggagggcgagcaaatggcgtgcgaagtgattgattgctcaccgttgattgaacgatagcctaagttcatggcggcagcaaactaagctaaaactattgttatgtttgcaaggaagggtagggtaacccgctgtgtaatctttgtccagctagcatgtaccaactgagatgcatgcatgcttattattgtccaattacccgtgaatctagcggtgcttttggtgagaggccggccggtcgggtgcagtttacttcaaatatggtttgtgattttgtgtaaatagtattaactaggagtcctatggtaagtaaattaattaatgggaggatgcatgaataaaacctctcttgtgctgcagattcatgagcctcatttttttttgaaagatcgagaaagtcaactgtgtaggggttgaatgagggacaattaaaat

SEQ ID NO: 4586 - DNA, 946 bp, Zea Mays
aaagccaagttccaccaggccgaaacgtttctttagtctttaccctaaccttccagcgaaggcacacagccgccgccgtttcttcatcttctcgcagcgccggcgctccatcttcccctcccttccgtactcgcgctcggcacgcgggcaacggcagcggcgctcaggctctcagcgacggcgtcagcggcttcccctcccgactctcgccagtcgcctcgcgccctagcctccgatcctccgcacaccggccggtgacccagcttagtggtccattgaagtgtagctgtattgcgatcttcaactgctggggccatggcctacgagattagtgagatcaaaaagattggcataggtctggtggggtttggcatcctattctcattccttggtgttatccttttcttcgataggggcttgttagctctgggtaatattttctttttaactggagtgggtctgttactcggttggcaatctatgtggcagcttttcacaaagaaggcaaaccttaaggtactctagacgtgcatagatacaggatcacttttctgaagtttgtcttttccattattgatcctcataaatttttatttctgttctaaacatgaagttgtgttgtataatacttgaactgatgaagttcctagtgtttgggcatctttgtgatggtggctgttgcagtataccatcaaaatgtggaagcagaaagataactttgacaggattattatagttttatttcatccttgaaatatggttttaggtgatagttatttttgtttattattccatcttcgccaaattaataacttcttgatttgtccgatttcagttgaagctaaccttctgaatgtgtgttgatgcaacaacttctcttagcataattttataagcaaacaaataatttattatgaggatgtatttatttaggggaacaacgctg

SEQ ID NO: 4587 - DNA, 1177 bp, Zea Mays
aaagccaagttccaccaggccgaaacgtttctttagtctttaccctaaccttccagcgaaggcacacagccgccgccgtttcttcatcttctcgcagcgccggcgctccatcttcccctcccttccgtactcgcgctcggcacgcgggcaacggcagcggcgctcaggctctcagcgacggcgtcagcggcttcccctcccgactctcgccagtcgcctcgcgccctagcctccgatcctccgcacaccggccggtgacccagcttagtggtccattgaagtgtagctgtattgcgatcttcaactgctggggccatggcctacgagattagtgagatcaaaaagattggcataggtctggtggggtttggcatcctattctcattccttggtgttatccttttcttcgataggggcttgttagctctgggtaatattttctttttaactggagtgggtctgttactcggttggcaatctatgtggcagcttttcacaaagaaggcaaaccttaagggatcagtgcctttcttcattggtttgtttcttctgtttgtccgttggcctgttgctggtataatcatggaactatatggatcttttgtgctcttcagtggttatgggcctcctatccaggccttcctgtatcaaataccaatcattggttggattctgcagtacccattccagctgcttggtcagttgaggcgtaaacgcacctgaaatgttctgcaactgccaagatactctttgactcttcatggttaaagctatggtttattgttcatatttagacaataagagttcataagttgatggatgctccgactcttgaagcaggacctcagtgccttttggtcatcacaacaacaatggggccagagtgatcacacctgatttatttctgattctggaatctggacacaatttgacaaattattttgcaagttgcacggacggaacccttgaagaaaactagagaaaacaaaatcttacagtggagcttgatagcccacctgatgaataccacgcgtgatctgcttcatttttttgtcagatgcaatgttcatatgatgagagcacaaattcaaaatcagagaagccgtcttcaacagctagtgcaggcctctccaatccttttgtttttttcttctatgagaagcttgctcaatgtcac

SEQ ID NO: 4588 - DNA, 2187 bp, Zea Mays
atcgctaccactgcacccctcaaacccagtgacccaacccactacacatcggagtctcgcgcgcgggctcaagcacttgttcttagctgcttagctgctttcttcgttgtaggaactgcaacaatggctaccccctaccgtcttccttgctgctgctatgccctcgtcactgtgctcgtgctcttcttctccgtcgacgctacggagggcgccatcagggagtaccagttcgatcagcaagagcatcgtgacggtgaacggccagttcccggggccgacggtgttcgcgagggagggcgacttcgtcgtcatccgcgtcgtcaaccacgtcccctacaacatgagcatccactggcacggcatccggcagctgcggagcgggtgggcggacgggccggcgtacatcacgcagtgcccgatccagagcggccagagctacgtgtacaagttcaccatcacggggcagcgcggcacgctgtggtggcacgcgcacatctcctggctgcgcgccaccgtctacgggcccatcgtcatcctgcccaagcccggcgtcccttacccgttcccggcgccctacgacgaagtccccgtcttgttcggggagtggtggacggcggacacggaggcggtgatcagccaggcgctccagaccggcggaggccccaacgtctccgacgccttcaccatcaacgggctgcctgggccgctctacaactgctctgcaaaagacacgttcaagctgaaagtgaagcccgggaagacgtacatgctccgcatcatcaacgctgcgctcaatgacgagctcttcttctccatcgccggccacccgctcaccgtcgttgacgtcgacgcggtctacatcaagcccatcaccgtggagaccatcattatcacccctgggcagaccaccaacgtgctcctcaccaccaagccgtcctaccccggcgccacctactacatgctggccgcgccctactccaccgccaggccgggcaccttcgacaacaccaccgtcgccggcatcctcgagtacgaggaccccacgtcgtcccctcccccgcacgcggccttcgacaagaacctcccggcgctgaagccgaccctgccgcagatcaacgacacgagcttcgtcgccaactacacggccaggctccgcagcctggccaccgcggagtacccggccgacgtgccgcgggaggtgcacaggcggttcttcttcacggtcgggctgggcacccacccgtgcgccgtgaacgggacgtgccagggccccaccaacagcagccggttcgcggcgtccgtgaacaacgtctccttcgtgctccccaccacggcgctgctgcagtcgcacttcgccggcaagtccaggggggtgtactcgtccaacttcccggccgcgccgctggtcccgttcaactacacggggacgccgcccaacaacaccaacgtgtccaacggcaccaagctggtggtgctgccgtacggcaccagcgtggagctggtgatgcagggcaccagcatcctcggcgccgagagccacccgctgcacctccacggcttcaacttcttcgtcgtcggccaagggttcggcaacttcgaccccgccaaggacccggccaagtacaacctcgtcgaccccgtcgagcgtaacaccgtcggcgtgccggcggccgggtgggtggccatccggttccgcgcagacaatccaggggtgtggttcatgcattgccacttggaagttcacgtcagctggggcctgaaaatggcatggctggtgctggacggagaacgccccaacgagaagctgctgcctccgccatcggatctgcccacatgttagacgacacgaggaattgctggcctagtcgtcgccatcaacggccgtgattgatcggcccggaccatcttggaacagggattgcgtgctctctaatttgcacaggatatcttaccgtcttttgcttgtgctggggttggtgttatgcttccatttagtggtgtgctttttccggcttgagtcgtcgtctggttagctgtgtgagagacacgggcaggaaggtccgctgatgctactagacagacgccatttatttttttgattacttatgagttactaccatcttttgtactgcctcggtcctaaaataattgacattcttgtttttaaaaagtcaaacattcaacggt

SEQ ID NO: 4589 - DNA, 2152 bp, Zea Mays
aaaaaatacatctccctcgcaccgccggcgttcatcttccgctctctcccttactcgcgctcggcagtcggcacaggcgacggcggcggcgctcgggctctcagcgacggcggcagcggcttcccctctcgcctcgcgccctcgcctccggtcctccgcacaccggtcggtgaccctgtgtgcgtgcctctctctctcctcccccctctagtggatcgtcaacggcttccggccccggaggcttcgccgcgcgcggactgagggcagcgggagccagcagccgctgctccaccaaggcgatcgcgccgctttgagagctcatgccccaaagcgaagcgttacccatccttttagcgcttcagcaggctcaagggtgcgcttagtgctgccttttggaattatcgttcctggccaatttgtcatcagatcaccatacatgacaagggtcatccatgactccggagatggcatgcagaaggaggcacttgatttggtctcatctgatgttaactttcccaagggctgtttcccagactataggattggaccaaacaaccaaatcattgatccagaggaaacgcatgaggccgtacctctcaaggaggttgttgcaaaggaaacagcgcagctgctagagcagcacaggcgcctttctgtgcgtgatctcaaggagaagtttgagaagggtctatctagcgcttccaagctttctgaagaggctaagcgtcgagaagctgcttcattagacaggcaggttcttttgaagaagctcagagatgttttagacacactgaaaggtcgtgtggctggtcgaaataaagacgatgctgaggaagctatctcactggtggaggcactagctgtccagctgacacaacgagaaggggagttaatttatgagaaggctgaagtaaaaaaattggctaacttccttaagcaggctactgtagatgcacgcaaagtagctgaagaggaaagggctcttgcacttgctgaaattgaaaaggctagagctgcaatcgaaaaagtcgagaaagcatttcatgtgcatgattctacgaaaagcagcagagaggaggaaatagaagaacttaggaaagaggtccgagaggctaggaggataaaaatgctacaccagccaatcaaggtcatggacatggagtttgagcttcaggcactgcggactctcatctcacagaagactcagctatgcaatcagctaaataaagagcttgccacgatcaagaggttagaagtagatagttctgacctctttgagcttgaaggttctaatacccttggatcgcagttttgtattattcctcgagttgatggtgctccaaacattgcgaactgtccaattcagtggtatcgtgtaatttctggtggcagtagaggactcatatcgggagcaacaaaatttacgtatgccccagaaccgtttgatgttggtcgattattacaagcagagattattttgaatgcagataaaatcatagttcagacggatggccctatagataatggtagtagtaacccaaatgaatgggaaggattactcgtcgaattctgtccatgtttttcatattggaaagctgagaataaaacttcaaaaaggatggtctacaaaagcaagagagttatattccaccacgatgaagttatgtgggagccgtggtggtggtaatgctgcagctagggcagttttctggcaagctaggaaaggcctgtcctacactctagcattcgaaacagacagggacaggaatgctgcaattatgattgctcgcaaatttgcttcgaattgcaatatcgctctcgctggcccaggtgaccaagacacctgatgaagtgatcatgcgtgttttgacagagacactgtacataatcaggtgtagattggctgatttttttgggagtctatttgtgtgcttgtgagggtagaggttgtacaccgcgtgacggtaatccccccttccatatatcttatggaggcattgtttttgtttgcctgtttgcagcattagcgacgttctcgaaacgtgatgtacaaattgatcactgttcttgtgcgtcacatctgtaataatatcactgttcttatcgcttctttttgtaagtcaaatatatatatttttaaatttgttcctat

SEQ ID NO: 4590 - DNA, 2204 bp, Zea Mays
aaaaaatacatctccctcgcaccgccggcgttcatcttccgctctctcccttactcgcgctcggcagtcggcacaggcgacggcggcggcgctcgggctctcagcgacggcggcagcggcttcccctctcgcctcgcgccctcgcctccggtcctccgcacaccggtcggtgaccctgtgtgcgtgcctctctctctcctcccccctctagtggatcgtcaacggcttccggccccggaggcttcgccgcgcgcggactgagggcagcgggagccagcagccgctgctccaccaaggcgatcgcgccgctttgagagctcatgccccaaagcgaagcgttacccatccttttagcgcttcagcaggctcaagggtgcgcttagtgctgccttttggaattatcgttcctggccaatttgtcatcagatcaccatacatgacaagggtcatccatgactccggagatggcatgcagaaggaggcacttgatttggtctcatctgatgttaactttcccaagggctgtttcccagactataggattggaccaaacaaccaaatcattgatccagaggaaacgcatgaggccgtacctctcaaggaggttgttgcaaaggaaacagcgcagctgctagagcagcacaggcgcctttctgtgcgtgatctcaaggagaagtttgagaagggtctatctagcgcttccaagctttctgaagaggctaagcgtcgagaagctgcttcattagacaggcaggttcttttgaagaagctcagagatgttttagacacactgaaaggtcgtgtggctggtcgaaataaagacgatgctgaggaagctatctcactggtggaggcactagctgtccagctgacacaacgagaaggggagttaatttatgagaaggctgaagtaaaaaaattggctaacttccttaagcaggctactgtagatgcacgcaaagtagctgaagaggaaagggctcttgcacttgctgaaattgaaaaggctagagctgcaatcgaaaaagtcgagaaagcatttcatgtgcatgattctacgaaaagcagcagagaggagaagaacttaggaaagaggtccgagaggctaggaggataaaaatgctacaccagccaatcaaggtcatggacatggagtttgagcttcaggcactgcggactctcatctcacagaagactcagctatgcaatcagctaaataaagagcttgccacgatcaagaggttagaagtagatagttctgacctctttgagcttgaaggttctaatacccttggatcgcagttttgtattattcctcgagttgatggtgctccaaacattgcgaactgtccaattcagtggtatcgtgtaatttctggtggcagtagaggactcatatcgggagcaacaaaatttacgtatgccccagaaccgtttgatgttggtcgattattacaagcagagattattttgaatgcagataaaatcatagttcagacggatggccctatagataatgctgcaggacttgaacattatgtggactcactcatgaaacggacggatattgagttcaacgtagtagtaacccaaatgaatgggaaggattactcgtcgaattctgtccatgtttttcatattggaaagctgagaataaaacttcaaaaaggatggtctacaaaagcaagagagttatattccaccacgatgaagttatgtgggagccgtggtggtggtaatgctgcagctagggcagttttctggcaagctaggaaaggcctgtcctacactctagcattcgaaacagacagggacaggaatgctgcaattatgattgctcgcaaatttgcttcgaattgcaatatcgctctcgctggcccaggtgaccaagacacctgatgaagtgatcatgcgtgttttgacagagacactgtacataatcaggtgtagattggctgatttttttgggagtctatttgtgtgcttgtgagggtagaggttgtacaccgcgtgacggtaatccccccttccatatatcttatggaggcattgtttttgtttgcctgtttgcagcattagcgacgttctcgaaacgtgatgtacaaattgatcactgttcttgtgcgtcacatctgtaataatatcactgttcttatcgcttctttttgtaagtcaaatatatatatttttaaatttgttcctat

SEQ ID NO: 4591 - DNA, 649 bp, Zea Mays
ttaccaacccggccagcttccatggagagagttgcatcaagctactgcgtcagcctcctagcacaaaggagggcctacactgtggccgcggccatggctaagaagggagccgccgcacggagggtcgacgagaagaaggcggcggccgcgctgaccaagcgcgtgatgggcaagaaggaagtgaacacggctgccgctgcggcagctgaggagaaggcgtgggtgccggaccctgtcaccggctactatcgcccagcaggtagcgccaaggaggttgacgcggcggagctacgcgccaagctgctgacggaggctgcggccaactgattaatcaagcagtcactttgtcgagctacagcatgagttggctcacttggctgtccacctagcttctcctgctttaatattcgcgctcgttgatccccgagctcgttggcctagagccttttatacactgaatgatacatatataatatataacaggaacatatccaatacacatgagtttttgatacacatatggtgcatataaattaacaaagtccacacaaaattcatacttattctttctatcttactctaattatatacaaaagtttaaatttaaattcattatactttagttgtagctgtaataaaaaagataaaa

SEQ ID NO: 4592 - DNA, 1539 bp, Zea Mays
tttgcacctgtcggtggatggtcatggcgagtgcggaacacgatcggccagagtgaggagccgacgaaggatcccgcacggtggcggtggaccaggctgtgttgcggagtcaccgtcggtgttggggcctcgcgtgtgccacagctcgatcgctccagagtccagaccaccaggagactctctcagacagcataagctcacatcggcaataaaaaagcatccccgtctcccctgattctctccgcccagctcagctctgctccccgccgctcctctccgcgccccttcatcccggatctcggcatgggcaccgccaccaccaacggctcggcggagcaggcgtccgcgcccgtgccggcgctcaagttcctcatctacggccgcacgggctggatcggggggctgctgggcggcctctgcgccgcgcgcgggatccccttcgtctacggcgccggcaggctcgagaaccgcgcccagctcgaggccgacatcgacgccgccgcgcccacccacgtgttcaacgccgcgggcgtcacgggccgccccaacgtcgactggtgcgagacgcaccgcgccgagaccatccgcgccaacgtcgtgggcacgctcacgctcgccgacatctgccggggccgaggggtcctgctcatcaactacgccacgggctgcatcttcgagtacgacgccggccacccgctcggctccggggtcggcttcaaggaggaggacacgcccaacttcgtcggatcattctactccaaaaccaaggccatggtagaggaattgctcaagaactacgagaacgtatgcacccttcgtgtgaggatgcctatctcatcggatctctccaatcctcgcaacttcatcaccaaaatcacccggtacgataaggtcgtcaacatcccgaattcaatgacagtactggacgagctccttcccatctcgatcgaaatggcgaagagaaacctcacgggaatatggaatttcactaaccccggcgtggtgagccacaacgagatactagagatgtacagagactacatcgatccaggcttctcctggaaaaacttcaacctggaggagcaggcaaaggtcatagtcgcaccgaggagcaacaatgagcttgaccagaccaaactgaagagagagttcccggagcttttgtcgatcaaggagtcgctggtaaaatatgttttcgaaccaaactgtaaggcgtccaaggcttgacaagtggagattattgaacggagcggggcaagcaaggtgtaatttagctcaactttcgcattggctcctggcctcctggggcgttatcataccgtgcggttggaatgaactgaggagcttcatgcctgcctgcttctgttgtgccatagaatttgtagttcgcgatgtttcatttgtaaccttttattgaatatgactttttaatgggatccttagcaatacaggacccctgtttcataaatgatgtagttctagaatactgttcagtcaactcgtttgagtaaatttataaaaaaagatacaatgtttatc

SEQ ID NO: 4593 - DNA, 1159 bp, Zea Mays
ctaacagtcatggagactagcatgctgtgagggctgcacacagcaacccaagttcccactcagcgagtacttctctacttcctgtcacaaaaaaaagatttgcaatctagcatatttatggaagcctttgctctggataaaatttgcgggtcagggagatcagcggtcaccacccaagaaagagtgatggaagcccaaagtagtacttgcttttcaaaagtcgtgggacctaacttatggtatggcgatcgcacaagacttacgcccaagcaagaagaagctgcgcttggtttgtcacgtgcctgtggctctggcattccagcatacatttgcaccatgaagaagtctaatgttgtcaagagacagatggtattttcaagacagttcagtaagcgacacatattcggtcgtctgggcacttatgggtgtgaaaccagagtttttgcaggcagggacctggtcggcagtaagctcaacttctcaatgatccatggagaactaaggcttcttggtggatggcccctctttgtgaagagccaccgtatcgaagcaggacacgtgtgtgctttcatgttccaggaagaggaagaggaagagggcgaactgtcacttagggtgcacgtgctgggtactatgccagtgccaacaatctagcctttgcttgtttcgttgatgaggcacgggatgaacgtcgctaacgaattatgcatcagacattagtattggaaacagcagcatgtggctatcttgctctggaattagttgttgttgttctatctagataactatgtatggacatattgttcttttgtgttggagagagtaagcgttagtgttttaagacacaaagattgttatttttagactgaccgctccagttgtgcaaataggaactgaattagtggcattgttagcatgtacatgaaaacgtgatttgtgcagtgctgggattagcttgggaatgtcgtccaaggatggccttatattgtttcctcgcaatttgtggttggatttttctatcccatctttaaagtacatttggaatgtttctaattcttcttggaagatgtttgagaagtgtaagatacagctatgtacgactatgattcctttcattgttttcatcaagttggtgtgaaattacccacctttgccatcg

SEQ ID NO: 4594 - DNA, 320 bp, Zea Mays
gacttggactgttatctgtattagtggcgtaaacaatcaacatctctgcatgtacctgaatacaaacactactttgtacaatgctgtactgaaagctgagggtgaaagtgtcctgctcacagaggaagctcgaagggcagcaactaccttgcatattgactttcaaaaaggagggattcatcttcctaaagataaacttgagaatgctaatcagctgaaccttgagattgcccagctgggtagaaagtaggtacattaattggacacttttgctttctatataagctgggtattacctctgtcaaacaaatattaattgg

SEQ ID NO: 4595 - DNA, 721 bp, Zea Mays
ctgacttccacggctcgcctcgcttccccatcccactctctgtccctccggcgagtggcggcggcagagacggaggccgagtgagcagtacaacgccgccgacaccaatcacgagggtatatcaactacaagtagagggaggccaagcacgaaaccatcaaagctgaccaactgagcgcccgccgcaatgctctcgcgcgccgccgccatccgtcgcggcgctgcggcggcgttctccacagtctcggagaaaccggagacggggctatacggcttcgacgtgcttcgcacggcgaaggggttccgccgcttcgtggacgacgccatccatcggtcggacgaactcgtggcacgcgtcgcgcggctgccgtcgtccaccgagatagtgcggaccatggacgagatttccaatacagtttgttctgtcattgattcggccgagctgtgcaggaatacacaccctgatagggagtttgtggatgaggcagataaggcgtcgatgaggatttatgagcatcttcagaggaagctcgaagggcagcaactaccttgcatattgactttcaaaaaggagggattcatcttcctaaagataaacttgagaatgctaatcagctgaaccttgagattgcccagctgggtagaaagtaggtacattaattggacacttttgctttctatataagctgggtattacctctgtcaaacaaatattaattgg

SEQ ID NO: 4596 - DNA, 1682 bp, Zea Mays
aaaatatgcaaaaaaaaaaatctattgcctgactccttcaaaccctgcacaccccacctgccttgtaccaaattcccctgacccgtcggtctgctatcccatctgagctcacggcgatcctctttctcctcatcggcatgagcggcttcttggcggtggtcggcaaggtcggcacctttctgctgtgggtgctgttcctggtcttgcagaccgccaccaggatcgtcggcagcctccttgccagctcagctgagcagcaggatgaccaccatcaggaatcggcggcggcacggcgcaggtcgccgccagcctccccacatcccgaactttacgagccggcgtctgcgtctctggcgcagctgtgggacccaccgcctcttccgcaccttgcttttgctcccgctgcggatgagagctcttcgtcctccagcttacggcggcgtgccagtgcgccgctgccccgagcggatgaagactttgtggtgccatcgagcgcttactcgcgtccaacagtgggggtggctcatacacactctgtgtcagcaccaccactgagggcaatcgagacgcgggcggtgccatctaggctggtgacagccgggggtaagcggccaaggctggagaggaagtactccaagattgttgaccagtaccgatccttggatgaggttattgaagcattagcacaggctggtcttgagtcttctaatttgatcataggaattgatttcacaaagagtaatgaatggacaggaaagaattgcttcaatggtatgagcctgcataatatcagtgacaacccaaatccttatgaacaggcaatatccatcattgggaaaaccttatctgcttttgatgaggataatttaattccttgctttggttttggagacgcatctactcatgaccaagatgtatttgccttctatcctgatgaaagaccatgcaatggttttcaagaagctttagctcgatacagagagattgtacctcatcttcgcctttcgggtcctacgtcattcgccccaataattgacatggccacaaccattgtggagcaaagtggtggccaataccatgttttagtaattattgctgacgggcaggtcacaagaagtgtagatactgaatttggtcagttaagcacccaggagcaaatgacagttgatgctattgtacaagcaagccaattcccattgtctataattcttgttggagttggagatggtccatgggatatgatgaaggaatttgatgacaatataccagctaggtcttttgacaatttccagtttgtcaacttcactgcgatcatgtcaaaaaagataagtcaaagcaaaaaggagacagagttcgccctttcagcactaatggaaattccattgcaatacaaggcaacattagagcttggaattttaggacgtcgaattggagagtcacctgagcggattccacttcctcctccttttgcaagttatagcacagtttcaagagcagaaccatctcgggcaaatagttatcgaagtgtgccttcacatccaagggaggagccagctgtaaattcaactatcacagcatcagttacatccccatcagctgccgaaagtagagttttagaaccccagccgaaggtgatgggcatagccaattttccaagggccaacacctgctgccctccgaag

SEQ ID NO: 4597 - DNA, 2171 bp, Zea Mays
aaaatatgcaaaaaaaaaaatctattgcctgactccttcaaaccctgcacaccccacctgccttgtaccaaattcccctgacccgtcggtctgctatcccatctgagctcacggcgatcctctttctcctcatcggcatgagcggcttcttggcggtggtcggcaaggtcggcacctttctgctgtgggtgctgttcctggtcttgcagaccgccaccaggatcgtcggcagcctccttgccagctcagctgagcagcaggatgaccaccatcaggaatcggcggcggcacggcgcaggtcgccgccagcctccccacatcccgaactttacgagccggcgtctgcgtctctggcgcagctgtgggacccaccgcctcttccgcaccttgcttttgctcccgctgcggatgagagctcttcgtcctccagcttacggcggcgtgccagtgcgccgctgccccgagcggatgaagactttgtggtgccatcgagcgcttactcgcgtccaacagtgggggtggctcatacacactctgtgtcagcaccaccactgagggcaatcgagacgcgggcggtgccatctaggctggtgacagccgggggtaagcggccaaggctggagaggaagtactccaagattgttgaccagtaccgatccttggatgaggttattgaagcattagcacaggctggtcttgagtcttctaatttgatcataggaattgatttcacaaagagtaatgaatggacaggaaagaattgcttcaatggtatgagcctgcataatatcagtgacaacccaaatccttatgaacaggcaatatccatcattgggaaaaccttatctgcttttgatgaggataatttaattccttgctttggttttggagacgcatctactcatgaccaagatgtatttgccttctatcctgatgaaagaccatgcaatggttttcaagaagctttagctcgatacagagagattgtacctcatcttcgcctttcgggtcctacgtcattcgccccaataattgacatggccacaaccattgtggagcaaagtggtggccaataccatgttttagtaattattgctgacgggcaggtcacaagaagtgtagatactgaatttggtcagttaagcacccaggagcaaatgacagttgatgctattgtacaagcaagatggtccatgggatatgatgaaggaatttgatgacaatataccagctaggtcttttgacaatttccagtttgtcaacttcactgcgatcatgtcaaaaaagataagtcaaagcaaaaaggagacagagttcgccctttcagcactaatggaaattccattgcaatacaaggcaacattagagcttggaattttaggacgtcgaattggagagtcacctgagcggattccacttcctcctccttttgcaagttatagcacagtttcaagagcagaaccatctcgggcaaatagttatcgaagtgtgccttcacatccaagggaggagccagctgtaaattcaactatcacagcatcagttacatccccatcagctgccgaaagtagagttttagaaccccagatgtgcccagtttgcctttccaaaccccgggacatggcatttggttgtggccaccagacatgttcagaatgtggaccgcaagtcacagattgccccatctgtcgaaggcccattgacacgagagtaaaattgtactaattatttttgggtggaactaggtttaactgaagcacatgccaggagtagaatccactaaaataaatctctatttgactgttaacgatgtagtgtgaattaatttaataaatcagacgtagagaaaaggaggatacttgttctttgcttgtatcctgttcctacattgtgcgttgatagatgtgaggctacttccattatctgatactggacaggcgccctacttcgctgcggcgattacatataatgttgaagtatggttatggtttgtctgtaaactggatggtatttggcttgttagtatggataacctagcttgtatataaagagacaatcattagtagatgatgtggtttgctaatatgaataactaaacactccctctattcccgtttataattcgtaccattccgtcttattcatcttttttttttgcaaaaaataaaaaa

SEQ ID NO: 4598 - DNA, 1238 bp, Zea Mays
gtgggcactaggatttgaaccttgctgcagataccttaatgaaggcagtgatggtgacaatgctccagaaacaagcagtgatgtaagcaatgagagtgacaatgacaatgacaatgaaaggtctattggaagaacaacccaatgtttagtagaaaatatttgcaccgatcaagaaaggttgtccagtgatgactgtgattccagtaaccaggaacctccccctgttttccaatatatggagcatgatgcaccatatggaagacaaccattagcagatatgatttcagtatttgcatgtaagtttcctgatctaaatacatacaagagctgtgatcttctcccgtccagttggatctctgtagcctggtatcccatataccggataccaacaggacctacgctacaagatctagatgcttgctttttaacattccattcattgtcaacaacacctgatggtacgataagcggttgtcctgagacaaataacttacataacagtaaagttgcttctgttcctgggaagatcacactgcctctgatcggcctagcatcttacaaattaaatggttccttgtggacgtcaaatcagcaccatgagcagcagttgactacgtcgcttctgaaagctgctgatgactggctttgccagcggcaagtagatcacccagattaccgcttcttcctcacacactaaattggatgtccatccaaactacctacctactgaacatcacagctcgatgcccactattttattcaatgaacttacattatcactttatatagtccacaatcacaagtaccagtatgctctgtaatatcatttttggggcttagtttatgttagtcccatattggtatctaggcaggattagttggtgactgttttggggttgtactgtaggaaccaattagacatagatcacctatattacgttcagtaccaattgcgggtgtgggtgatctgcaatcgggctaagtaggagattgattggcaatatacatttggcgtacttcaaaggcggttctaggatatattgatgatggcgataaaaatatttttctacttccctctgtgtgtttgatatattgtaacccatgtagtgctgctgctggattgttattatatgtattaccccgagaacgtatcatgtgttaccacaggttaggctgtgtgacatcatgtgatgaaattttggtttgaaatgaaattggcactaaggtggttggacttt

SEQ ID NO: 4599 - DNA, 647 bp, Zea Mays
ggcgtcttgttttcggtgcctggccacccttccctcttcgcacgcagtcgcagactcgcagccccccttctgatcctcttcctctaccacgcggccacgcccccgccccccgctgactcacgcaacgcgcgcgacgacgcggaggagaaaaccaggaatcccataaaggtttcagttccgcaagccaagccactcccacacccccacgctcgagcgaagggaaccagcaatggcgcgtcgcgggccgtgagagacgggaacaagaatggctgccatggtgcgcgggcccgcgatggcctctgcggctgggccgggtgcgacgtcgtcggctgctgcggccgcggccgcggcggcggaggagatgcggtggcggcagctagacagcggcgtgagcgcggtgtcgttcgggttcgtggccaccgccatactcgtgtccatgttcctcgccatggccatcctcgagcacttcctccgccccccgacgacggcccacgcgccgccccggggccggggtgtcctccgccgcctccgcctcttcctcctcggccgcagtggcggcgcccccggcgggacggatctcgaggcggcgaggaagctccacggtcacgcgcccctcgagaagaaccttcatagttctctacatcgcg

SEQ ID NO: 4600 - DNA, 2292 bp, Zea Mays
tctcgaagtaaaatagcacaattgctggggccaaatgaggtagaccgtcgcatccatgacccatctacttccctccccttcttatctgctactgcaataatcacccgaggcaattttggcgtgctttacttccgcttccaatatacctttttttccgcgacaaaaatcatttttgttaattgcgaaaaggaaagagcccgtgtgaacaggaggggtgaggagaagagggggaaaagagagagaaatcggagggcattagcaagaaaccatgagttctaggttagctgaaatctcctttgatctttaatctgttcatctccttgcgtgagtctgtggcgttagcgtgatgccttctccaagttcatgaacttcccggtctggagctttgcttactcagttacccttttttgacccgtatttttttctctccattccgcaactgttggctcccaaattctggtgatttgttgggtatccccctgcgaaatccgggcaaaagtggggatctgcagcttctgtggcttgtcggctttaagcctacctttttcttggaccttttaccattttcttttgcccatttttaatcccccatttccgtcagtaatttacttttattttcatgtctacttatttccgccgtaaaactgtgtttgtcgcgtgaaagatcgcgtacttgagcagtgaagggttttatggttttttttgcaggttcgcaatccctagtcgtcttgtcctgatcttacttgagtgctcgtgagctctttccagtggctaatgactgcagatttgagttctggcccaagaaccgcgtgctagcccgccatggaggtgaggtccgagcaagggctgatggcggggagggatctattcggcttgacgaagagcccgccggcgcccgcgccgccgtcgtccgccgccatgcagagcgtgcgcatggcgtacaccgcggacggcaccgccgtgttcgctccggtgagctcttcgcctgcgacgccgtcttaccagccgcagggcgcagcccacggcgctagcatgtccgcggcgacggtcgttggaggcaatggcgctccagctgcgccgagcatgggtgagccgctggccaagaagaagcgcggacgaccaaggaagtacgggcccgacgggtccatggcgctggcaatggtgcctgcttcggcggcttcagggtcgccggcgacagggcagggtttttctgggccgttctcaccgcctgcgttaaatccggcgagctctctggtggtggcgtcgccagacggattcaagaagcggggccggcctaagggttctaccaacaagccacgcgtggacgctgctgggtcatcaggagctggatttacacctcatgttatcacagttcaagctggggaggacgtggcatcaaagattatgtcattttcccagcatggaacacacggagtttgtgttctttcagcaaatggctccatatcaaatgtaacgcttcgtcagactgctacatcaggcagaactgtaacatacgagggtcaattcgagatactgtcgctgtcggggtcattcttcctggctgaggatggtgtccagcgcagccgaaacggaagcctcagcgtgtcgctggctggtcctgatggccgtctgttgggtggtggggtcgcaggacttctagtagcggcttcaccggttcagtactgggaagcttcaattctggaggcggaaaggagccacaaaagcaggctccttcagaacccacatcggctccaccgagggttgctccgacagccgggatgggaggacccagcagcccttcttcaagaggcacattgagcgagtcatccggtggcgctggaagcccaccgccactgcatcgagccatggctgctagtgctagcaatagtaaccagccaccgttcttgtccagcatgccttggagatgagtttgcagcttgcattctcttggccaattccaggcaggatgtagcaatctgcgctttcagtagcgcccgttgtgtgagtagctgtgtgtagtacaagccagaagcttgggtgggaatagaattgcgtctggtaaatctgtagctctgttgtaggttccaccctgaattcctgtgctaggtgtgttgagctgtgtaagcaatgtaatcctttcagcgttatcaaatgctatttagttaaatgtttctaccaaggcatgtcgatttgaatcataagatatcaatttgctgtttgcgtctcgggcaacttctgttctagagaacgttctactcactgaaatttgagcctgttgccaagtttgaaaac

SEQ ID NO: 4601 - DNA, 785 bp, Zea Mays
atgccctgtttgtctgctctcactagccgaccctccttggctcccataccgcatcatgacatctttgtccgcatttatttatgtactcttgttgccatctcggccgacgaagaaaagcgcaggaataacggccacacaaacaaaccgggattccggtcagtgcgcaggctctctgctccagtaaacttggcagcggtttcaggaagctgctggctgctgctagctctcagtctcagtctcagtctcagtctcatacatacatacatatacagcagctggtggggtgtctaggtctctcgtactcgtcggtacacgcttgccaatccatccaaacccgctgtatctgcgctagctggtgtccgaccgtgtctgccatggcttcttctccacgcacagccatgttcttcctcgcgctgtccctggcgctactgggcgacgaccttcgccgctgctctgcctctcaggtgtacgtggtctacatgggcaaagcgccgcagggcgacagggcaccccgtcgacgacgacacgccgggctgcaccgccagatgctgacggctgttcacgacggcagctcggagaaggcgcaggcatcacacgtctacacttacagcgccggcttccagggcttcgcggccaaactgaacgaaaagcaggccatcagattagccgagatgcctggcgtcgtctcggtgttcccaaacacaaagaggcgactgcgcaccacccattcctgggatttcatgggcttgtccaccagtgcagagggtcaggtccctggactgtga

SEQ ID NO: 4602 - DNA, 1558 bp, Zea Mays
aacaaggtcaccgagaaacagaaaaaaaaaagaacaaaaaggaagacagcgaagttgtctacatcacttgacttgcgagcgaccgcggctcacgtcggctgcataaattgcttcgtagactagtaccacacagtttgcgagaaggggagaggtagaggttccgaggtagagagatagagaggaggagagggagggcgaggcggcggatccgtcactccgttcttctccgctgatctggaggaaggaggcgagaagtcccaaattctttcttttgcttggtcaagtgccaattgggaggcagaacggaagacagaacctccatgcgaactttagtcgcgctgatttcgatggaatcggaactgatttaggtgtattttagctctgattgttcttggcaggagtacaattttagtagcaccgtttgatggtacggttcttctgggtggtaaattgcccttcctgcgacgcgatgtcagacttcgatctctgttggaagacgctagacattgcagacataaatatttttactgcaatcatgagctcgaaatccaaatgttaatcagttcacagttcagacaatcgcttgaacatgtttaaaagctggacgaggtttcatctactcgattgaatcctcgtcttcgccgctaaatcgttgcaggggagttgcaaatccatcaatggccactccaaccacctattcagtccgcatatcctcggagacccacaagattgaagcctgggtggtgtctgacgaagctttggccaggcaactgcaggaggaggagaacacgcgtgacgctgctgccgacaccagagaagtcgccggcaatgtacccttggagtcatcgtcaccggctgttgagtacaggcctgcacagaatgcagctcaggttgcaagggaagacaatgtggacccagataatatgtcatatgagcaactacaagcattaggggaagcagtaggaattcagtccagagggttatctgatgagctgatatcttatttggagccatttaggaacaagtgcactttcttctccaggaaaaagaacagtgaggaatgtgtgatctgcaagacaacatatagaagccggcagaaattgataagactaccctgcagccactgttatcacgcagattgcataactcgttggcttaagatcaacaaggcatgcccagtctgcaacgaggaggtgtttggatgaactgcaaggttcctggcagatgctgcggtttcatcgttacttgcttgcggcatgcttttgagaagacgttggacgcataaggtccattgtttgtgattatgttgtgagcctagtttggtgccctttgcttaagaggactggctctgcccatgcatgggtcggtctacacgtgtgctagtaactggaccaggtcgcgttttgtgatgcgtctatccatcttggttttatcacaaattgatagatctgttgtgtgggtagtttggttgccgttttctgaatataatggatggtgtttttgccccctttttgggagaagttcaagcaaagagcagttcaatactgtcggcgtttcg

SEQ ID NO: 4603 - DNA, 2071 bp, Zea Mays
attctggataggctcctgccagtgtccagtgcaggtgcagtgcacaagaggagcctgcgttggccgccaccgccgccgccgccgtgctgcgctagggaacccatcttcttcttccccgcgctgcctgctgcctgctcgagcttggagatggcgttggtgcggcgatgcctctgtggatccgaggaagactgcagagggagttctaagagacggcactgaatttgccgcgaaggttctgtcctcggaatccgagcaggggatcaaggagttcctagctgagatcgagagcatatcccaggtgaagcacgcgaacctcgtcaggcttctgggctgctgcgtacagaggaaaaaaaggatactggtgtacgagtaccttgcgaacaacagcctcgatcatgcgctcaaaggagcagcagcagatctaccctggagcacgaggtcgggcatctgcttgggcaccgccaaggggctgagctacctgcacgaggagcacgagccgaacatcgtgcacagggacatcaaagccagcaatgttcttctcgaccgagactacctgccaaagatcggagatttcgggctcgcgaagctgttcccggacaacatcacccacatcagcaccgcagtggtcggaacgagtggatacttggcgcctgaatacttcgtgcatgggcagctgaccaagaaagccgacgtctacagcttcggggtgcttgtcctggagatcgtcagcgggaggagggtctcgcaaacgatccagtcggacatgttcccggcatggatgatgtaccagcaaggcaggctgctagagatcgtggacgcgagcatggggagctacccggagaaggaggtgctccggtacatcaaggtggggctggcctgcacgcaggccacgcccagcagccgccccacgatgcgccagagcgagtgggacacaaccagaaaagggacaacagaattagaggcacagattcccaagaaacgggggcatattctattacaagatgactacaacatactataattatatatatagtaaatgaatgctgtcagctactggattcatgttgcctgcctaggctgctaatgaagatgactacataaacaatgtaacggtaacactgtcaagtactcaattctgtgctataacttataacttgcctaaaaacttagcactaataaaactggctacatgctaaggctccaacctactggggtccaactttcaactgaaccagagcacgggaaaaaaaagtgtccaactacagcgctgccctttgatccatggattcctggcatacacccagaaatgaaatggagccgcaagcctgcatcaatccctggttcaaccataaaacttccaggtcaacaattatgccaagttgacagcatggggtaacactggcgactggtcaacggcagtgaaattctgtatgaagtcatggccaccattcatacttcacagtttcttggcccttccataaatatattcgtcggtactctcatggccagtggtggcctgtgagagccttggaagcccacaagaagccaagaatccagggcttgtattcaatttgtggagacctcacagttcaaagcttcgtccactttcaaaatgtagtgcccaggcacatcattcatgcaggcatctaaggagcatggccttcgattctagaatatgttccataaggaactctttgcacggtccttggaaaatctggcttgaaccgcttgttaaaattcggtgccaatgacctagggtaaatggtaactggtcattagaatcatacaaagctcatataacctataatataaacataaatactgtgacgggaatatagttcacacaaatacaaaaacgattgtccgaatgttgactggaacatgaaatgtttattccacatacatgacccaacacagctaaggcactaacttcttcttggtcacctcttaggcgtaagggcttcctagccgtaatccacaatagtaactgagaactagtttagtcaagagtcaaaaagcacacgaacaaatactccaattttccatccctatcaaatttgatcactactct

SEQ ID NO: 4604 - DNA, 1634 bp, Zea Mays
aggcttggccatggcccctctacaacttccctctctctctctctctctcctgagaggcggatcggcgacagaggggagacgctcagtctacacacatcggcaaagggcactcgagtgggtggagtgtggcgaggagggggacgacggcgccattgcgacggagcgaggggacaggtcacagggacctgaccctctgcactggtggacaagcccatgaaatcccaggaatgggtggtgcgcagtcgcctctttgtgtttgggaacaccgagacgacgccaggcatctctgaagaaattgaagacgcgcatcagaattattaggcgcctttttggcatcacagctagctagactcatttaggggccgtctgtttgggaaatgaaacccgtataatctactcagactatgatgtaatctaacttgttttggaccaagattaaattctaaaagagtagcctgtgttgtgaaactaattaccggctaatctgatggcctgcttttcgttcagtttggccgcgaagccctggaagccggcgctgtaagtgtagacgtgtgatgcctgcgccttctccgagctgcggagaggaagcgtccgactcaagatatatatatactgctgcatggaaacggcactgggaggtgggagctagctagctaagcctaggaggggttatggaggaaggaattcaaattaacgagtctgctgtggacctgccgtcgtgaacagccgtcagcatctggcggtgcagcccggcgtgtcgtcgtcgacggggtgccctgtcgccctgcggcgctttgcccatgtagaccacgtacacctgaaggaagagttggcatcatccatccatttgctagctactacagaagtgcagctgaccaccaccgtggagatataatataagcatatcggcgtgcgttggagtaggcacctgagaggcagagcagcggcgaaggtcgtcgcccagtagcgccagggacagcgcgaggaagaacatggctgtgcgtggagaagaagccatggcagacacggtcggacaccagctagcgcagatacagcgggtttggatggattggcaagcgtgtaccgacgagtacgagagacctagacaccccaccagctgctgtatatgtatgtatgtatgagactgagactgagactgagactgagagctagcagcagccagcagcttcctgaaaccgctgccaagtttactggagcagagagcctgcgcactgaccggaatcccggtttgtttgtgtggccgttattcctgcgcttttcttcgtcggccgagatggcaacaagagtacataaataaatgcggacaaagatgtcatgatgcggtatgggagccaaggagggtcggctagtgagagcagacaaacagggcatccgatctttggagatatacaaggaacatgcatgtagattgtagggtggctgcttgctttcgtggacatacctgtgtgtgtcatgtatgcagatatgaggtataataggtgtatttatttcttattattgtcgtagatcggtgtgccacctgccatcgtgtgtctatagtctatatatctatctatatatatagatagagagagaaagaataaagtgatacaaggagtatatatctttctgtc

SEQ ID NO: 4605 - DNA, 4162 bp, Zea Mays
ttttcgtccctcctcgctcctccccgcggccatccgaccccatggcctcggcctcattccagcccgtcgcggcgtcggcggcctccgcgccgccgcgcccggccccgcgccaccccttcgcagccgctgccgccgcgcgccgctcctctctctcgttacgccccgccgcgcaccgtcccgttatcccgctccgctcctccgccgtcgcggctaacaccctccgcgccacgcaccgccgtgccgtctcggcgaggtcgaggagacgcgcgcaagggctcggcgcggcgcccgcgttggctgcgtcgacctggggcggcggtgacaagggaggttgcctctcttgcttccccaagagtaggcggggcaggtcggggctcgcgccttgcgcgctcccgcacgcgtcgggactatcgtttcgcagccggttgagcgggtcgaaggtcaggcctagccatatattgcacgccgctggtcctgatgaaccacatgttgcaagtccaacatggtccgatacttcccttgatacaactgacatggatcatgctattagtaaggaggagcttgaagatgtcctcaacactccgcttcccgagcatccgaagctaattcgtggtcaattgaagaatggcctccggtatcttatcttaccaaataaagttccagcaaacagattcgaggctcacatggaagttcatgttggatcaattgatgaggaggaggacgagcagggaattgcacatatgattgaacatgttgcgtttcttggcagtaaaaaacgtgaaaaaattttggggaccggtgcgaggtctaatgcatataccgacttccatcatacggtgttccatatccactctccaactaaaacaaaggaatatggtgaagacttacttccttttgtgctggatgcattgagtgagatagcttttcatccaaagttttcttcatctcgtgttgagaaggagagaagagcaattctttctgagctccagatgatgaacacaatagagtatcgggttgattgccagttgttgcaacatctgcactcagaaaacaaactgagcaacagatttcctattggacttgaagagcaaatacataaatgggatcctgataagatccgcagatttcacgagcgttggtactaccctgcaaatgccactttatatctggtgggggaaattgatgatattcctagagctgtgcgggaaatagaggcggtatttgaacacactctttcagaaaatgaaggaaatcctgtaccgagcgctaatccatttggtgctatggcaagcctttttgcaccaaagctcccaggtggttttacttcaaacctaactggtgaaaaatcacctgccacagataaaataaagcctgcaaaaagggaaagacaagcagttaggccacctgtagagcataagtggtcccttcctggagttgctcaggatgccaaacccccagcaatttttcaacacgagttgattcagagtttctctatcaacatgttctgcaagatacctgttagcaaagttcagagctacaaggacctgcgcagtgtactcatgaaaaggatatttttgtctgccctacattttcgaatcaatacaagatacaagagctcaaaccctccttttacttcagttgagctggaccacagtgactctggaagggaagggtgcacggtcactactctcacagtaaccgctgaaccccaaaattggagaagtgcaatcaaagtcgctgttcatgaggtgcgaagactgaaagaatttggtgttacaatgggagaaatgacccgttacatggatgcactgataaaagatagtgagcagctggctatgatgattgacagtgttccctcagttgacaacttggacttcatcatggagagtgatgcacttggccacactgtcatggatcagttgcagggacatgaaagtttgcttgcagttgctgaaactgtcacccttgaagaggtcaacactgttggcgcggaagtattggagttcatttcagattttggaaaactcaatgctccccttcctgctgctattgtggcatgtgtcccccaaaaggtgcatgttgatggcgcaggtgaaactgaattcgagatatatccagaagaaatcactgaggctatcaaggcaggtcttgaggaacctatttaccgagagcccgagcttgaggtgccaaaggaattgattactcaatcagagctcgatgacctgaaatctcaatgcaatccttcatttgttcctttaaccaaagaggagaatgcggtgaaagtgtttgacagtgaaactggtatagcacaacgccgtctttctaatggaatttccatcaactacaagataacacaaaatgaagctagggttggtgtcatgcggctcatagtagggggagggagagcaacggaagattctgaatcaaagggatctgtcattgttggtgttcgtaccctgagtgaaggtggctgcgttggtaacttttctagggaacaggttgaacttttctgcgtcaataaccttatcaactgttcactggaatcgaatgaggaattcatatttatggaatttagatttgctttaagagacaatggcatgcgagctgctttccaacttcttcatatggtccttgaggttcgtagagccgtcaccacattcactgcagaagttgactcttcagtcagttaaaaatgctgtcatgaaccagtttgtgggtggcaacatggaggtcagtattgttggtgatttcactgaagaagaagtagaatcttgtgttcttgattatcttgggaccgtgagggcttcgagttctctaaacacagaggagcgtattgagaagatttccttccgaccatttccatcagatgttcatttccagcaagtatacataaaggacacagatgagagagcctgtgcgtatattgcaggccctgctcctaaccgttgggggttcactactgaaggaaatgacctatttaatgtcattcggatatctgatgctgatgcagaagtatctgaaccagtgagcttggatctaacagggaagagacacgttgatgttcgcagccacccccttttctttggcatcactttgagtctgcttgctgaaattattaattctaggctatttacaacagttcgagattccatgggattaacatatgatgtttcttttgaattaaacctttttgacaaattgggtcttggttggtatgtaatcgcggtcacttcaactcccagcaaggtccataaagctgttgatgcctgcaaaggtgttctgagaggattacatagtagtcgaattgtggaaagggagcttgaccgggcaaagaggacgctgttgatgaaacatgaggctgagacaaagacaaacgcgtactggcttggtttgctagcccatctacaatcttcatctgtaccaagaaaggatgtatcatgcatcagggaattgacgacattatatgaaagtgccacaattgaggatctgtatcttgcatatgagcatctgaaagttgatgattcttctttgtttgcttgcattggaattgctggcgctgaatctggtgaagatacaaatgatgatgagcttgatgtggatcttcatggcatggctcccatgggaggccggggtctttcaacaatgaccagaccaaccacatgatcaccattgggatggccagcccttccaaggagccacatggccctaggagactattctcgtttcccagcaaaacggtttaaagataattgaaacattggatctgtatctggggagactattgtttgtttcctatgagccacaaccaaaaagcttggccgttgcatttccccccgagaagaagcgttggagttaatgactcgcaaggtcgtggaaaggagataatatttttcgaggtcattatgtagcttggcatgtacaggaaagcaggctgattcttgcatacagcagttgtaactaggtcgttgagggcattgaagataggatgacagtagaatcacatataagttgctggtctgcgaattcggaaataatgatgaaggcgtaggctagtaacattttggtgttattctttttttttttaatcaaaaaattgtagcctttgttaccggtaataaatagatccatagctttgatgaaaaaagaaaattcaaaaaatatt

SEQ ID NO: 4606 - DNA, 4350 bp, Zea Mays
ccatccgaccccatggcctcggcctcattccagcccgtcgcggcgtcggcggcctccgcgccgccgcgcccggccccgcgccaccccttcgcagccgctgccgccgcgcgccgctcctctctctcgttacgccccgccgcgcaccgtcccgttatcccgctccgctcctccgccgtcgcggctaacaccctccgcgccacgcaccgccgtgccgtctcggcgaggtcgaggagacgcgcgcaagggctcggcgcggcgcccgcgttggctgcgtcgacctggggcggcggtgacaagggaggttgcctctcttgcttccccaagagtaggcggggcaggtcggggctcgcgccttgcgcgctcccgcacgcgtcgggactatcgtttcgcagccggttgagcgggtcgaaggtcaggcctagccatatattgcacgccgctggtcctgatgaaccacatgttgcaagtccaacatggtccgatacttcccttgatacaactgacatggatcatgctattagtaaggaggagcttgaagatgtcctcaacactccgcttcccgagcatccgaagctaattcgtggtcaattgaagaatggcctccggtatcttatcttaccaaataaagttccagcaaacagattcgaggctcacatggaagttcatgttggatcaattgatgaggaggaggacgagcagggaattgcacatatgattgaacatgttgcgtttcttggcagtaaaaaacgtgaaaaaattttggggaccggtgcgaggtctaatgcatataccgacttccatcatacggtgttccatatccactctccaactaaaacaaaggaatatggtgaagacttacttccttttgtgctggatgcattgagtgagatagcttttcatccaaagttttcttcatctcgtgttgagaaggagagaagagcaattctttctgagctccagatgatgaacacaatagagtatcgggttgattgccagttgttgcaacatctgcactcagaaaacaaactgagcaacagatttcctattggacttgaagagcaaatacataaatgggatcctgataagatccgcagatttcacgagcgttggtactaccctgcaaatgccactttatatctggtgggggaaattgatgatattcctagagctgtgcgggaaatagaggcggtatttgaacacactctttcagaaaatgaaggaaatcctgtaccgagcgctaatccatttggtgctatggcaagcctttttgcaccaaagctcccaggtggttttacttcaaacctaactggtgaaaaatcacctgccacagataaaataaagcctgcaaaaagggaaagacaagcagttaggccacctgtagagcataagtggtcccttcctggagttgctcaggatgccaaacccccagcaatttttcaacacgagttgattcagagtttctctatcaacatgttctgcaagatacctgttagcaaagttcagagctacaaggacctgcgcagtgtactcatgaaaaggatatttttgtctgccctacattttcgaatcaatacaagatacaagttgagctggaccacagtgactctggaagggaagggtgcacggtcactactctcacagtaaccgctgaaccccaaaattggagaagtgcaatcaaagtcgctgttcatgaggtgcgaagactgaaagaatttggtgttacaatgggagaaatgacccgttacatggatgcactgataaaagatagtgagcagctggctatgatgattgacagtgttccctcagttgacaacttggacttcatcatggagagtgatgcacttggccacactgtcatggatcagttgcagggacatgaaagtttgcttgcagttgctgaaactgtcacccttgaagaggtcaacactgttggcgcggaagtattggagttcatttcagattttggaaaactcaatgctccccttcctgctgctattgtggcatgtgtcccccaaaaggtgcatgttgatggcgcaggtgaaactgaattcgagatatatccagaagaaatcactgaggctatcaaggcaggtcttgaggaacctatttaccgagagcccgagcttgaggtgccaaaggaattgattactcaatcagagctcgatgacctgaaatctcaatgcaatccttcatttgttcctttaaccaaagaggagaatgcggtgaaagtgtttgacagtgaaactggtatagcacaacgccgtctttctaatggaatttccatcaactacaagataacacaaaatgaagctagggttggtgtcatgcggctcatagtagggggagggagagcaacggaagattctgaatcaaagggatctgtcattgttggtgttcgtaccctgagtgaaggtggctgcgttggtaacttttctagggaacaggttgaacttttctgcgtcaataaccttatcaactgttcactggaatcgaatgaggaattcatatttatggaatttagatttgctttaagagacaatggcatgcgagctgctttccaacttcttcatatggtccttgagcataatgtatggctagaagatgcatttaatagagcaactcagttgtatttgtcttactatcgctctatccccaaaagtttggagcgttctacagctcataagcttatgttagccatgctaaaccatgatgaaaggttcgtagagccgtcaccacattcactgcagaagttgactcttcagtcagttaaaaatgctgtcatgaaccagtttgtgggtggcaacatggaggtcagtattgttggtgatttcactgaagaagaagtagaatcttgtgttcttgattatcttgggaccgtgagggcttcgagttctctaaacacagaggagcgtattgagaagatttccttccgaccatttccatcagatgttcatttccagcaagtatacataaaggacacagatgagagagcctgtgcgtatattgcaggccctgctcctaaccgttgggggttcactactgaaggaaatgacctatttaatgtcattcggatatctgatgctgatgcagaagtatctgaaccagtgagcttggatctaacagggaagagacacgttgatgttcgcagccacccccttttctttggcatcactttgagtctgcttgctgaaattattaattctaggctatttacaacagttcgagattccatgggattaacatatgatgtttcttttgaattaaacctttttgacaaattgggtcttggttggtatgtaatcgcggtcacttcaactcccagcaaggtccataaagctgttgatgcctgcaaaggtgttctgagaggattacatagtagtcgaattgtggaaagggagcttgaccgggcaaagaggacgctgttgatgaaacatgaggctgagacaaagacaaacgcgtactggcttggtttgctagcccatctacaatcttcatctgtaccaagaaaggatgtatcatgcatcagggaattgacgacattatatgaaagtgccacaattgaggatctgtatcttgcatatgagcatctgaaagttgatgattcttctttgtttgcttgcattggaattgctggcgctgaatctggtgaagatacaaatgatgatgagcttgatgtggatcttcatggcatggctcccatgggaggccggggtctttcaacaatgaccagaccaaccacatgatcaccattgggatggccagcccttccaaggtgacatattaaatgctgtgttactgcatcatggacaagttgtgctgaaacctactcggaattggttgtggatctttatatggattttaaccttgctcctgaagacaggagccacatggccctaggagactattctcgtttcccagcaaaacggtttaaagataattgaaacattggatctgtatctggggagactattgtttgtttcctatgagccacaaccaaaaagcttggccgttgcatttccccccgagaagaagcgttggagttaatgactcgcaaggtcgtggaaaggagataatatttttcgaggtcattatgtagcttggcatgtacaggaaagcaggctgattcttgcatacagcagttgtaactaggtcgttgagggcattgaagataggatgacagtagaatcacatataagttgctggtctgcgaattcggaaataatgatgaaggcgtaggctagtaacattttggtgttattctttttttttttaatcaaaaaattgtagcctttgttaccggtaataaatagatccatagctttgatgaaaaaagaaaattcaaaaaatatt

SEQ ID NO: 4607 - DNA, 4376 bp, Zea Mays
cctcgctcctccccgcggccatccgaccccatggcctcggcctcattccagcccgtcgcggcgtcggcggcctccgcgccgccgcgcccggccccgcgccaccccttcgcagccgctgccgccgcgcgccgctcctctctctcgttacgccccgccgcgcaccgtcccgttatcccgctccgctcctccgccgtcgcggctaacaccctccgcgccacgcaccgccgtgccgtctcggcgaggtcgaggagacgcgcgcaagggctcggcgcggcgcccgcgttggctgcgtcgacctggggcggcggtgacaagggaggttgcctctcttgcttccccaagagtaggcggggcaggtcggggctcgcgccttgcgcgctcccgcacgcgtcgggactatcgtttcgcagccggttgagcgggtcgaaggtcaggcctagccatatattgcacgccgctggtcctgatgaaccacatgttgcaagtccaacatggtccgatacttcccttgatacaactgacatggatcatgctattagtaaggaggagcttgaagatgtcctcaacactccgcttcccgagcatccgaagctaattcgtggtcaattgaagaatggcctccggtatcttatcttaccaaataaagttccagcaaacagattcgaggctcacatggaagttcatgttggatcaattgatgaggaggaggacgagcagggaattgcacatatgattgaacatgttgcgtttcttggcagtaaaaaacgtgaaaaaattttggggaccggtgcgaggtctaatgcatataccgacttccatcatacggtgttccatatccactctccaactaaaacaaaggaatatggtgaagacttacttccttttgtgctggatgcattgagtgagatagcttttcatccaaagttttcttcatctcgtgttgagaaggagagaagagcaattctttctgagctccagatgatgaacacaatagagtatcgggttgattgccagttgttgcaacatctgcactcagaaaacaaactgagcaacagatttcctattggacttgaagagcaaatacataaatgggatcctgataagatccgcagatttcacgagcgttggtactaccctgcaaatgccactttatatctggtgggggaaattgatgatattcctagagctgtgcgggaaatagaggcggtatttgaacacactctttcagaaaatgaaggaaatcctgtaccgagcgctaatccatttggtgctatggcaagcctttttgcaccaaagctcccaggtggttttacttcaaacctaactggtgaaaaatcacctgccacagataaaataaagcctgcaaaaagggaaagacaagcagttaggccacctgtagagcataagtggtcccttcctggagttgctcaggatgccaaacccccagcaatttttcaacacgagttgattcagagtttctctatcaacatgttctgcaagatacctgttagcaaagttcagagctacaaggacctgcgcagtgtactcatgaaaaggatatttttgtctgccctacattttcgaatcaatacaagatacaagagctcaaaccctccttttacttcagttgagctggaccacagtgactctggaagggaagggtgcacggtcactactctcacagtaaccgctgaaccccaaaattggagaagtgcaatcaaagtcgctgttcatgaggtgcgaagactgaaagaatttggtgttacaatgggagaaatgacccgttacatggatgcactgataaaagatagtgagcagctggctatgatgattgacagtgttccctcagttgacaacttggacttcatcatggagagtgatgcacttggccacactgtcatggatcagttgcagggacatgaaagtttgcttgcagttgctgaaactgtcacccttgaagaggtcaacactgttggcgcggaagtattggagttcatttcagattttggaaaactcaatgctccccttcctgctgctattgtggcatgtgtcccccaaaaggtgcatgttgatggcgcaggtgaaactgaattcgagatatatccagaagaaatcactgaggctatcaaggcaggtcttgaggaacctatttaccgagagcccgagcttgaggtgccaaaggaattgattactcaatcagagctcgatgacctgaaatctcaatgcaatccttcatttgttcctttaaccaaagaggagaatgcggtgaaagtgtttgacagtgaaactggtatagcacaacgccgtctttctaatggaatttccatcaactacaagataacacaaaatgaagctagggttggtgtcatgcggctcatagtagggggagggagagcaacggaagattctgaatcaaagggatctgtcattgttggtgttcgtaccctgagtgaaggtggctgcgttggtaacttttctagggaacaggttgaacttttctgcgtcaataaccttatcaactgttcactggaatcgaatgaggaattcatatttatggaatttagatttgctttaagagacaatggcatgcgagctgctttccaacttcttcatatggtccttgagcataatgtatggctagaagatgcatttaatagagcaactcagttgtatttgtcttactatcgctctatccccaaaagtttggagcgttctacagctcataagcttatgttagccatgctaaaccatgatgaaaggttcgtagagccgtcaccacattcactgcagaagttgactcttcagtcagttaaaaatgctgtcatgaaccagtttgtgggtggcaacatggaggtcagtattgttggtgatttcactgaagaagaagtagaatcttgtgttcttgattatcttgggaccgtgagggcttcgagttctctaaacacagaggagcgtattgagaagatttccttccgaccatttccatcagatgttcatttccagcaagtatacataaaggacacagatgagagagcctgtgcgtatattgcaggccctgctcctaaccgttgggggttcactactgaaggaaatgacctatttaatgtcattcggatatctgatgctgatgcagaagtatctgaaccagtgagcttggatctaacagggaagagacacgttgatgttcgcagccacccccttttctttggcatcactttgagtctgcttgctgaaattattaattctaggctatttacaacagttcgagattccatgggattaacatatgatgtttcttttgaattaaacctttttgacaaattgggtcttggttggtatgtaatcgcggtcacttcaactcccagcaaggtccataaagctgttgatgcctgcaaaggtgttctgagaggattacatagtagtcgaattgtggaaagggagcttgaccgggcaaagaggacgctgttgatgaaacatgaggctgagacaaagacaaacgcgtactggcttggtttgctagcccatctacaatcttcatctgtaccaagaaagggaattgacgacattatatgaaagtgccacaattgaggatctgtatcttgcatatgagcatctgaaagttgatgattcttctttgtttgcttgcattggaattgctggcgctgaatctggtgaagatacaaatgatgatgagcttgatgtggatcttcatggcatggctcccatgggaggccggggtctttcaacaatgaccagaccaaccacatgatcaccattgggatggccagcccttccaaggtgacatattaaatgctgtgttactgcatcatggacaagttgtgctgaaacctactcggaattggttgtggatctttatatggattttaaccttgctcctgaagacaggagccacatggccctaggagactattctcgtttcccagcaaaacggtttaaagataattgaaacattggatctgtatctggggagactattgtttgtttcctatgagccacaaccaaaaagcttggccgttgcatttccccccgagaagaagcgttggagttaatgactcgcaaggtcgtggaaaggagataatatttttcgaggtcattatgtagcttggcatgtacaggaaagcaggctgattcttgcatacagcagttgtaactaggtcgttgagggcattgaagataggatgacagtagaatcacatataagttgctggtctgcgaattcggaaataatgatgaaggcgtaggctagtaacattttggtgttattctttttttttttaatcaaaaaattgtagcctttgttaccggtaataaatagatccatagctttgatgaaaaaagaaaattcaaaaaatatt

SEQ ID NO: 4608 - DNA, 3143 bp, Zea Mays
ggctccctccctcctcccctctcccctgtcccctctctctttctcaccgtccacgcgcgactgcgcgggacactggtcaacgccccggtggcaggcggctccgttggggggtgagtctagctccgtctgttgcgccggaataacgcggcgggtgctacctccggccctcgggttccatggggaggaacggtagcgtgaggcgctcggcgttttcgggcgccgcgggtgctgccgcggggccgccgtccttctctgtgaatcccgccgactaccggttgatggaggaggtggggtacggtgcgcacgccgtcgtgtaccgcgcgatcttcctcccgactaagggtgttgtcgcggtcaagtgcctggatctcgatcagctcaataacaacatcgatgaaatacaaagggaggctcaaataatgagcttgatagaccatcctaatgtcatcagggcttactgctcatttgttgtggagcacagcctctgggtgataatgccattcatgacagagggttcttgtttacacttaatgaagatctcataccaggaaggttttgatgagccgatcattggctccattctcaaggaaactcttaaggctctggattaccttcaccggcagggtcaaatacatcgtgatgtcaaggctggtaatatccttatcgatggtgctggggtagtgaagcttggagactttggtgtttctgcttgtatgtttgatagaggtgataggcaaagatctaggaatacatttgtaggaacaccatgctggatggctccagaagtgctccaacctggcactggatataatttcaaagctgacatatggtcatttggaatcactgctcttgaactagcacatggccatgctccattttctaaataccctcctatgaaggttcttctcatgaccctccagaatgcaccacctggtcttgattatgaacgtgacaaaagattctcaaagttgtgaccagtcatttaaagaaatggttgcaatgtgcttggtcaaagatcaaacaaagagaccaacagctgagaagttgcttaagcattcatttttcaaaaatgcaaagcctccagagttgactattaagagtatcttatctggtttacctcctctctgggaccgtgtaaaggctctccagcttaaagatgaagcacaattggctttgaagaaaatgccttcttctgaacaggaggccctctccctgagtgaatatcaacgcggcgttagtgcatggaacttcgatatcgaggatctcaaggctcaagcatcattaattcatgatgacgagcctcctgaaataaaagaagatgaggacattgcaagaaacattgaggttgaaaaggacttgtcttcacggaaccatttgggaaagtcatttgcaaatgagtgcaattccaggcagcgagcctttgtcaccactttaaaatcggatggaaacagacccaccacgaatgaagcttttgattttgattttgattttagcgaggctgccactacaagaagggctgatggacatgaaagaaacataagagagaatgattcattgccctctacagcaaagcgagatccagagtcgaatcattggacaagtgacgttgggcagagacaactgtcttctggtgggagcaatagctcaacagctgaaaggggctatggttttgagagggatgcagttgtgcaaacaatacctgaaaaacaaagaagtgaggcgagaaaaacagcaagccttagtggtccactttcactgccaactcgtgcttctgcaaatagtctgtcagctcctattcgatcttcaggaggttttgtagattcatcaggtgacaagtccaaacgaagtgtagtagagattaaaggccgcttttcagtgacatctgagaatgtcgatcttgcaaaggttcaggaaggtccacttagtagcctctcacggaaatcaccagagggttcactgctaaaaaaatctgccagcactggtgattgtttgattaatactaagctgatgcgtaacgctaatcagctgaaggaattctgcaatagttctgtatcatcttcagtattaattccccaccttaacaaccttgtgcaacagaccatgtttcagcaggatgtaatcatgaacctacttagtaacttgcaacaggatgagaaagttgatagaacacagcctggaatatcttctcaagtccgaacgatggagaatggtaaagtggctgatacagctaactctgagaaggaacggtcattacttgttaaaatttcagaattacagtctaggatgataacactgactgatgaactaattgcagctaagacaaaacatgttcagttgcagcaagagctaaatgctttgtactaccgagaagaaattgaggatgttagggatgaggatatcgaagaaacatagtgtatgaattatctgcctctccctgagacagatcaattacccgcctctccctgaggtcaggggagaacaagagaaggaaagcggcagggagaactagcgatggaaagtggcgatgccgcaaatatttgctggatctagagaccagctgcggttctacggaatttgttctttgaaggttgccgtgcccctggcctgctgccatccagtgtgtataaccgtcttagttcgttttttttttgtggccacaagattgaggcgtggtcatgcagctatttcggccatgcctatcattgggagtagctgtagtccgtaggctaccgggtggttatctatgcagaatttcagaagactgcaaaataaactgtattttatctagcaataggatgtatattggcgcattcgttgatatgtatcatatagggctattcgcaaacatccaaacagagttgtttgcacatatctaataaagtatgcatttactgcatttatcactgccatgtactaaatgattgttttaaaggcattatacattacatgatctgggtaaatcttctctataattggatcttcatgctattttccagcggtgtttctatctcattacatattttacctcctatttcaaatttcactatgcaaataatactatttacaatacaaagcaatgttataaacgattggaaagcaatgttataatactatttagtgatctttctttctttttcttttcc

SEQ ID NO: 4609 - DNA, 1594 bp, Zea Mays
aacagtgtcgccactcgccacagagcgctccatcaacacgaccgccggtataaacgcagcccccctccggcctccaccaaggccaacattgctcaggctgctcccaactcccatcctccccctcccggagtacgaagtactagaaagagagcggctttcctctaagaatggcgggtggcggcgccggcgacgacgacgtggtggtggtgagctgcggcggcagaggcggcggcgaccccggcgcatacgccgcggtgctcaagaggaagctcgacctgtactgcgccgccgtcgccaaatccatggtgacatagatggggcaagcctagttacaaactctaatgtcatagaagatgatgattttcaaggcaagccaaccaacagtggcacatcaaaggaactgtcagacgatgatggtgaccttgaagagaatactgaccccgctaacgccaagaagatgaggagttaaatttcggtgttgtgatcagaatggtgtcaaaccgggaatcggctaggcgatcaagaaagaggaagcaagcacacttgaccgatcttgaatcacaggtttcaattgtgttagaatatagatgagtgctcaagttaatatccaactaaaatgaatatactcgtgctaattaccgcacaactctccaggtttccaggttaacgtctgagaatgcatctttgctgaagcgactggctgatatgactcagaaatacaaggacgcttccgttgacaataaaaatctaacagttgatgttgagactatgaggagaaaggttcgttcgtcttgaatgcatcacagacctttttcttcttttttttgttgtacgagaactcttaactgcatccatttatcgatcataacatttttactgggctctgtgtatactcaccgtaatcaacgtttacatctctctagatggctgcaaagggcagtgaaagtaatatgattgttcatagttcttattttagaacctgcaagttcagttttagtttctaatggtttttaactgcacacaaaaggtgaacatagccgaggaagctgtcaggaggctaactgggatcaccctcatgctaccgaccgcttttgagaagcccacgagcagcgcgcccctgtcatcatgtccatctgatgcagcttctgcttctgcttctgccgccattgaagacagcgtgaagcatttcctccaggcgccacttgaaaacagtgggatcatcccaaacgcagcagtttttcagaccaagccagcttctctgcaccgtgttgctagcctggagaacctgcagaagaggatcgtcggggatgcaatgtattccgagaccgcgtcaacgacattctcagatcctgaagctcttgccgataggtaaaggttgctcctgtcctgtgatgaacagccgtgtgatgctctagcggcctaagtgcttctggtaatggaagttgtagcacccatgcgcctgggtggggtctacacagtgatttgtacactattttgaaggttaataataattgttgagaaatgatctcatccctttgtacctatataagtaaagtattccattaataaagagaatagagttttcactcttcat

SEQ ID NO: 4610 - DNA, 2117 bp, Zea Mays
aacagtgtcgccactcgccacagagcgctccatcaacacgaccgccggtataaacgcagcccccctccggcctccaccaaggccaacattgctcaggctgctcccaactcccatcctccccctcccggagtacgaagtactagaaagagagcggctttcctctaagaatggcgggtggcggcgccggcgacgacgacgtggtggtggtgagctgcggcggcagaggcggcggcgaccccggcgcatacgccgcggtgctcaagaggaagctcgacctgtactgcgccgccgtcgccaaatccatggtgacatagatggggcaagcctagttacaaactctaatgtcatagaagatgatgattttcaaggcaagccaaccaacagtggcacatcaaaggaactgtcagacgatgatggtgaccttgaagagaatactgaccccgctaacgccaagaagatgaggagttaaatttcggtgttgtgatcagaatggtgtcaaaccgggaatcggctaggcgatcaagaaagaggaagcaagcacacttgaccgatcttgaatcacaggtttccaggttaacgtctgagaatgcatctttgctgaagcgactggctgatatgactcagaaatacaaggacgcttccgttgacaataaaaatctaacagttgatgttgagactatgaggagaaaggttcgttcgtcttgaatgcatcacagacctttttcttcttttttttgttgtacgagaactcttaactgcatccatttatcgatcataacatttttactgggctctgtgtatactcaccgtaatcaacgtttacatctctctagatggctgcaaagggcagtgaaagtaatatgattgttcatagttcttattttagaacctgcaagttcagttttagtttctaatggtttttaactgcacacaaaaggtatggcagcattttcatttgattttctgaaattctgcataccttctacaagtgtgataggaataatttagttccttggttttgttttcttgcagtatcatttcagaaattttatttccttgtattatatatatatatatatttaaagaataacagtgttctcttacaggtgtgaggagttgtaaaacgaaacaaaacattaaaagcgcacataccatgccgcaatgcgccaagtgtgtgtcccattaagcctgtggggtgttgcccttgccttgccttgtggatgggctgctctatctcaaatgataccgagaggagtccaaacagaatactaccatacaaacatttcttaatgcttgtgtgtgagtatatgcacaactctgtactcttgtatcattagtaaaactgtgtttttttaaatatccatgctgaagggttctaacataatcatgttaagtttttatgaaaaaaatttgcttaaactatgactgttccaatcagttttttacctaaagaaggtattcacaagaatcttggcatttaacagacctgcacaccttgactttatgaaaagggacatgtcttcaggaacacagtactgttttaattccaggtgaacatagccgaggaagctgtcaggaggctaactgggatcaccctcatgctaccgaccgcttttgagaagcccacgagcagcgcgcccctgtcatcatgtccatctgatgcagcttctgcttctgcttctgccgccattgaagacagcgtgaagcatttcctccaggcgccacttgaaaacagtgggatcatcccaaacgcagcagtttttcagaccaagccagcttctctgcaccgtgttgctagcctggagaacctgcagaagaggatcgtcggggatgcaatgtattccgagaccgcgtcaacgacattctcagatcctgaagctcttgccgataggtaaaggttgctcctgtcctgtgatgaacagccgtgtgatgctctagcggcctaagtgcttctggtaatggaagttgtagcacccatgcgcctgggtggggtctacacagtgatttgtacactattttgaaggttaataataattgttgagaaatgatctcatccctttgtacctatataagtaaagtattccattaataaagagaatagagttttcactcttcat

SEQ ID NO: 4611 - DNA, 2717 bp, Zea Mays
tccatggccactttccctgttaccaccgcccccactcctcaccagagcactccacccacagccggcctgcccggccacctccgtctgcccactgccgcctccgccgatgccgccctcatcaccctctccgccttcctctcctccggccgcctcacgacctcctccccttccctcctccaccgcaccctccgcgccgccgccgaccaccgcctcccgcggctcggcctgcagctccacgccttcctcgtcaagacccgcttacttgccgaccccttctcggcctccgccctcctccacctctactccaccatcgccccgctgcaccgcacccgcctcctcttcgacaggatccccaagtccacctaccccgtcccctggaacaccatgatcctacggacggattcttggatgaggcgttcgatctgatggtggccatggaggaatccggcatccccattggtgcctccacctggaacgccgtcatcgctgggtgcgtccgagctgagaacggagagctcgccatcgagctgctaggcaaaatggtttcggttgggggagttgtgcccagtgtggccacgttcaacaccgtgctccacgtgatttcggcgttgcgcggggtgaacgtgctccgagagttgcacgcatttgtgctgcgcaacgctgaggttgtgggacttgggcctgtggatttggatcgactccaggaatccctggcggcaggatacatgtgcagctcctgtgtccagtacgcaggccgtgtgtttcgtgatgtcaggataagcacttgcttcctgggcaacctgatgatatcgggatttcttgacacggggcagcggaatcaagccttgggtgttctgcgagaaatggcgtttggctgtggtcatgaagctcagcatctgccatcggcttcgcttacgctggtcctccctgaggtcaatctggcaacaaagagaggcctagagatccatgcttatgcctatcgccatggttttgagtgtgacacctcggtctgcaatgccttgatggcaatgtatgcaagagggggcaagatatgccggtcagacaaggttttccaaggactggatgctaaagatgtcgtgtcatggaatactatgatttcaggctatgccacggttcatgattttgatctctcatttgagctgttccgtgaaatgcaacgtaatggtaccagacctgatgactacacatttacatcagtgctcaacgcctgcagctttgcctgcaatcacaggacagtaatggcattgcacgggcaaatgataaggatggggctttgccattcctatgttgatgatatgaattctctcatggatgcttatggaaagtgtggtttcattgctgaagctcagaagatatttgatgaaaccgagcgaaaggatacagtttcgtggaatatcatcatttcgtgctacggctacagcggttttcctcaacgagcaatcaggcttttccatcagatgcaagatcaaagctacaaacctaccagagtcactttcattgctgtgctagcggcatgcagccatgcaggcttagtagacgaagcactgcgttatttcgaggcaatgcacggagactacagcattaccgctgatgaggctcactatgcctgcatcgttgactgttttggcagagcaggtcagctccaacgggcttatgagttcatcagaggaatgccggtggttccaaatgcttgtgtgtggggtgccctacttagcagttgcaggatacacggaaatataggcctagcagaaattgccgcgaagaagctcgttgagctggaccctcagcattctggatactggatgctgctaaaggatatgtactcaaaagccaagagatggaatgatgtatcgcaacttcgagctgctatgagagataatggcgttaagaagtgcccaggttatagttggattgaggggcgagatagcgaggtccacagattccttaccgctgacaagcttcactcacaaagccaccagatatacgaagtactaggtgggttaaccgagcagttgatggatgaaggatatgaaatagatgtcgatttgacatatactgagtgagggatgtactagatttctacaacttgtcttgaaaatctagccatttagctgacatccctagtcccaacaccatgtctattgcaagcagccacgcgaatcttattcaatgattacaaggttgcacgagctaaagagttcagtttctgcccaggttagaagcgctaagaagtaggcgcaagatgttacattttgggctcgtcatctgatgtgtaagttgatgccttgtcacgaaaagatcagacccggagcattgtgtaacaagaatatacagagttcacagcctagtttcaatatttttttggtgagaaattctgattcaaatattccaccatgactcataggaaaggttcctcaagatttactggataagagaagacaaaatgagattgtggaaacagaaaagcagctgctgacttcagtggcttgtaaaatgccttaacaggagtccttgttggaaaatacagaaggcaaagcagcaacggactgttacttttgaacaagtttgtttcttgctggtagtttgctataacaaaatagtaggggcatgaaataggctggacagagacgacgactactatacaataaacgagtatcttggtccgttagatcatgatttaattttgatccgttaaa

SEQ ID NO: 4612 - DNA, 1040 bp, Zea Mays
aagacatcacatctctacactcaagggtatcttcacaggaacctgtggaaacagcgttggaccatggtgtcacggccgtcggctacggcacagagaacggcaaggactactggatcgtgaagaactcttggggcagcagctggggcgagtccggctacgtcaggatggagcgcaacatcaaggcgtccagcggcaagtgtggtatcgccgttgagccgtcgtaccctctgaagaagggcgccaaccccccgaaccctgggccgaccccgccttcccccaccccgccgcccaccgtctgcgacaactactactcgtgccccgacagcaccacctgctgctgcatctatgagtacggcaagtactgcttcgcctggggctgctgcccgctcgagggcgccacctgctgcgacgaccactacagctgctgcccccatgactaccccgtctgcaacgtcaagcagggaacctgcctcatgggcaaggacagcccactgtcactgtcagtgaaggctacgaagcgcaccctggccaagccgcactgggctttccctggcaacacagctgctgacggcatgaagagcagcgcatgagaaaaacgcagcatggcattaggccgccaacagccagcatgattagagcccccctgcatgcagaatgatcacccggtcccgtagttcacgacgaaagcatggctgggcggccgctgtttacggatttacttatatcactatagtaggtactcctcctgtacataagcctgaaaaaaaatgggttcagttgtttatggaactctgccaaatttgcttttgcatgccatgtaaaaatccagctagctcttgccaagcttcccctgcgcagttcaacaggactgcgattgatattcggtgtaatggaagtatttatcggaacaatcagcaatgttatgctatattcatttcttggacgtgaacaatagattggtcgatcccagttctcagagcggtggcgcagggggatggtccgtctgaggccttgcccaccaccaaacaagaggaagcggt

SEQ ID NO: 4613 - DNA, 1060 bp, Zea Mays
aaaagccgagcagaagattctgaaaaatgtttcccttgccataaaggtatcttcacaggaacctgtggaaacagcgttggaccatggtgtcacggccgtcggctacggcacagagaacggcaaggactactggatcgtgaagaactcttggggcagcagctggggcgagtccggctacgtcaggatggagcgcaacatcaaggcgtccagcggcaagtgtggtatcgccgttgagccgtcgtaccctctgaagaagggcgccaaccccccgaaccctgggccgaccccgccttcccccaccccgccgcccaccgtctgcgacaactactactcgtgccccgacagcaccacctgctgctgcatctatgagtacggcaagtactgcttcgcctggggctgctgcccgctcgagggcgccacctgctgcgacgaccactacagctgctgcccccatgactaccccgtctgcaacgtcaagcagggaacctgcctcatgggcaaggacagcccactgtcactgtcagtgaaggctacgaagcgcaccctggccaagccgcactgggctttccctggcaacacagctgctgacggcatgaagagcagcgcatgagaaaaacgcagcatggcattaggccgccaacagccagcatgattagagcccccctgcatgcagaatgatcacccggtcccgtagttcacgacgaaagcatggctgggcggccgctgtttacggatttacttatatcactatagtaggtactcctcctgtacataagcctgaaaaaaaatgggttcagttgtttatggaactctgccaaatttgcttttgcatgccatgtaaaaatccagctagctcttgccaagcttcccctgcgcagttcaacaggactgcgattgatattcggtgtaatggaagtatttatcggaacaatcagcaatgttatgctatattcatttcttggacgtgaacaatagattggtcgatcccagttctcagagcggtggcgcagggggatggtccgtctgaggccttgcccaccaccaaacaagaggaagcggt

SEQ ID NO: 4614 - DNA, 1364 bp, Zea Mays
cttctcttcccttccttgcatgctgtgcgaaggcacgggcctcaggatgcagtccttggtccggaatgtctgccgagccggaagccgtggagcggcggcgaggctcctggaggccgccgcggttcatccgggggcggcgcagccgtcctcggccgtcagacacctcaggcatccttgcgggttcgctcgtccgatcggggtagatcaacccaagcctgtgcagcgccggaccattttgcgtgatggcggccgcgttccggctgccgcctccggattcggtctctgcgcgaaagttctcgttgcgacgaggggtctgtcgacggcgggaaatgctgctgaggttgcctctgattcggacgattccacctctcctgcggttgagcaccccccgcgcatcaagttcaagaggcctgacaagaccgctagacacattatgaatatcctgaacaaagaggcggtcgaaaaggtccgctcggagagggcgattcctgatgtgcagcctggatgtatcattcagatgagattggtaataccacttctttgtgttcctgctttagcgctgttcctataggtttctggtactgatccttcctgtgagtcgatgaacagcaagttcctgagaacaaacggcgcgagtcgacactgaaagggattgtcataggaaggcgcaacgctgggatcaatacaaccttcagattgcgtagattagtggctggcgtgggagtcgagtctgtctttccactttactcaccaaacatcaaagaaatcaaggtcttggacaggaagaaagtcaggagagctaagctgtattacctgagggacaggatgaacgcacttaaaagatgaggatttcaacttgtttctaggatttctttttgccgcgcggatcagcatggtttctcaagatgcaatcacattgtttggtgttccatctttgaaaaaaatcatagtttggggttgtcagttgccatgctccgatcttctttcttttgatttgatgcgctgtaacattagtgcgaaaattcatgtgctcaggtctattacgttactttcccaatctttttttagtatgtgcgtctgacatgaacaagctggaacactttactcatcaaagcgaaactattgtatgatgattcatgctatccggttttagatgtcaaatcatttagtctttattcacagaaacctcctgttctgaaaaatgttctgggcatcctgttctgaaatttgtgtatatgctctattggaacctgtgttacagtacatattcgcagtggcatgctgatccgtgattactctatctagatgcaggcagttcacatctaactatccccttctgccactctgaaaggcacgagtatgat

SEQ ID NO: 4615 - DNA, 5073 bp, Zea Mays
tccagacgccaaagcaccactctcccgccgtccccctcactctccgccgccggcgaggtgtgatgccacgaaggtcggcggaggcgccggccatttgatgcgcccacggccgcctcctcacggtgcgctgtccaagcaccacctcctccgcatccgccgctgccttccacccgtttggtttaatgctgccctcgcccaggacccgtccctgccacccgctgcctcctcctcccccgcgtttctctcatccctcatacgctactgcacgaccaagcgcgcccgccgccccggtgagcaggcgcacgcgcgcgccgtcgcgctcgggctcggcgcgcacccctcggtgctccccgggctcgcctccttctacatcgcgctcggcgacctccccgccgcgcaagcctccgtcgagcgggcggcgggaaaggcgcgggcgttcccgtggaacctgctcatttgggggtatgccgaccgtgggctatgggacgacgtcatcctcgcgtatcagaagatgctggcgctgggcgtggccgccgacaggttcacgtacccgtcggttctgcgcacatgcggcgagctccgagattccgccattggtcgggggattgagaagcgcattctgacgtggaggtatggtctggacatgtatgtctggaacgctctggtgggaatgtacgccaagtgcggggagatgaaggacgcgcgcagggtgtttgatggaatgcctgcgcgggatgttgtcagctggaactccatggtgtctgggtacgtgtcggcgggtatgtggggcgaggcgtttgacctgctgcagttggttcctggggcgaacattgtcgcctggaacgcggttgtggcaggaaattttaaggcggggaactacggtgaggtgatgaggttggtgtcgcagatgaggacatgcggtggtccggggctggattttgtgactgttgtgattggcttgagggcttgcgctaggggtgggtatctgaggattggcaaggaattgcatgctgcctctgttcgtctatgctttgataggcttgagcgcgtggagagttcattgatcaccatgtactccagatgccagatgatgagatctgcatacctcctgttcagaacatgctcaactcagagcatagtaacatggaattcattgctagcaggatttggattcatggaccaggttgaggaggctattttcgttttcagagagatgatttattcctctgtctttccaaatgatgtcactgtgttaactatgctttcacttagtgcacgttttggacacctctgtcatggaagggagatgcactgctacattttcaagcatggacttggggcctctaacatattgcagaactcacttgtcgatatgtactcaaagtctggacagatggcaactgccaatagagtgtttgaccagatgcaatgtcaggacaggcatgcctatacttcattgattttgggctatggaatgcaaagagaagggcatctatcactgaagctctttgatgaaatgattgtaaacaatatcaaggtggaccatgtaactatggttgctgttctttcagcttgcagccactctgggctggtagctcaagggcaactacgatttgctcagatgtatgatgtgttttgcattgcaccgagggtggagcatttttcttgcatggttgatttgtactgccgtgagggtttgctgagtatggctgaggagatagttaacaagatgccattccagccaactgccgcgatgttggcaactctaatcgaggcttgccggatccatggcaaaacagaaattggggatcgggctgcaaagaggctgttggcaatgaggacaaataacccgggtcactacaaattgattgcgaacatgtatatatcagcaaaacgctggccagaactagctaaagttaggtcattaatgagcgtcatggaactaaatatgattccaactcattccttactggagtcagaatatgagatatgtccaattgaaaaagattattgcttaaaccgatgtctgcatggaggcttgtctgacgacatgacagatactgatttctctagtagtgaggaagtgaaatggaatgaagctttcggtgggtaacagtaaagctggaatccaataggctgttttgggatcatggctttcatttaaggaaaatatgttaacaacttgtattctttgcatcatggaagagtcagtgtttttaaggcgtcgcttaggcggccagacgcttgaagaattatgctcgcctaggcgtccaggtggcagtccaacgcctcgcctcgccttaccgccttaagaacactgcttccagtattgccttcaagcacgatcacaaacaatttggcatgaaaactatcaggccatactttgcataccactaccagaggatcagatacggtaacaaggaagcgttgtgttgggcacacttatgtgggcgtctcagattataagctggttactcagcagtgtggagtggcaactggcaaccataatccataatgacaaaaatggaaggctccacttggcagtgtccaaatcatgtctacgcgtttggtccagccagagtcaggaagctcactggacatggtgccgtcagagccagagatcgttcacctgactccatggctcctgaggtcactatcagtcgtgttgtccttcctgctgaacaggctgctgaatgtggaagcactcatgggctccatccctgtgctggccatgtaggttagcgagctcgcagatgtcatcttcactgccatgctgttgctgctaaactatggcctcgcatatggagccgcattctggctcttcttaaacacctggtcagatataaaccatcgcagcagcagcgatggaggtggagggtacacgctctccacaccgccgccgcctgccagtgctggacagatggttcctcgacacctgccctgtggcaatccatctaccctttggcaagctgaaggacatcgtcgtccagtgacccgaacacgcgcggtccagaaatgtttcttccatttctctgcggagagcacaaagaggctcaagacgaaggcaaacaccgggaactgcaacggtcatcatctcctcattgaagtccctgctctctcaccttgagcgagcagtgtgccaccgtctgcatactttgttgaaggaactctatttttcttttgtgctgttatataccaagtcagcttgcccccccaaaagaattcctcggaagagagacgtcattcacaaactgcggcacaagttcatctgtgttgcgtctgacctacctgatcaaagacgttttggtgacaattgtgcaaaacatttgggatgattactcatgctcgtttcgcaggtgggaatgcttaattggcgacaagttttatctatctagagagattgcttttgttttcagaccgtgatagattagccaacgccatcaaaggaaataattgaagcatggctgtgaacctggaaatcacactctgaagtctgaacacaatgtaaacattcagaattagcacattggtcgtgtagctcattgtacataagctttatttatgctccaggagttgttactgtagttacagtgtcccaccaaatcaagaaggataaaaaatttaacgtgtgggaaaacagaaccggcccaggagaaggcccgtgcgggtgcactctcgctgcgcccaacaacactgactgggccggccgtcgatgcactgcattcccccccttccgtccgctgcatccctccgccgccaccgccgcccaagccaggtgctgaggctttcgttggtctcttcgccggcgacgagcacccaccagggcacgggcctcaggatgcagtccttggtccggaatgtctgccgagccggaagccgtggagcggcggcgaggctcctggaggccgccgcggttcatccgggggcggcgcagccgtcctcggccgtcagacacctcaggcatccttgcgggttcgctcgtccgatcggggtagatcaacccaagcctgtgcagcgccggaccattttgcgtgatggcggccgcgttccggctgccgcctccggattcggtctctgcgcgaaagttctcgttgcgacgaggggtctgtcgacggcgggaaatgctgctgaggttgcctctgattcggacgattccacctctcctgcggttgagcaccccccgcgcatcaagttcaagaggcctgacaagaccgctagacacattatgaatatcctgaacaaagaggcggtcgaaaaggtccgctcggagagggcgattcctgatgtgcagcctggatgtatcattcagatgagattgcaagttcctgagaacaaacggcgcgagtcgacactgaaagggattgtcataggaaggcgcaacgctgggatcaatacaaccttcagattgcgtagattagtggctggcgtgggagtcgagtctgtctttccactttactcaccaaacatcaaagaaatcaaggtcttggacaggaagaaagtcaggagagctaagctgtattacctgagggacaggatgaacgcacttaaaagatgaggatttcaacttgtttctaggatttctttttgccgcgcggatcagcatggtttctcaagatgcaatcacattgtttggtgttccatctttgaaaaaaatcatagtttggggttgtcagttgccatgctccgatcttctttcttttgatttgatgcgctgtaacattagtgcgaaaattcatgtgctcaggtctattacgttactttcccaatctttttttagtatgtgcgtctgacatgaacaagctggaacactttactcatcaaagcgaaactattgtatgatgattcatgctatccggttttagatgtcaaatcatttagtctttattcacagaaacctcctgttctgaaaaatgttctgggcatcctgttctgaaatttgtgtatatgctctattggaacctgtgttacagtacatattcgcagtggcatgctgatccgtgattactctatctagatgcaggcagttcacatctaactatccccttctgccactctgaaaggcacgagtatgat

SEQ ID NO: 4616 - DNA, 5129 bp, Zea Mays
gcaccactctcccgccgtccccctcactctccgccgccggcgaggtgtgatgccacgaaggtcggcggaggcgccggccatttgatgcgcccacggccgcctcctcacggtgcgctgtccaagcaccacctcctccgcatccgccgctgccttccacccgtttggtttaatgctgccctcgcccaggacccgtccctgccacccgctgcctcctcctcccccgcgtttctctcatccctcatacgctactgcacgaccaagcgcgcccgccgccccggtgagcaggcgcacgcgcgcgccgtcgcgctcgggctcggcgcgcacccctcggtgctccccgggctcgcctccttctacatcgcgctcggcgacctccccgccgcgcaagcctccgtcgagcgggcggcgggaaaggcgcgggcgttcccgtggaacctgctcatttgggggtatgccgaccgtgggctatgggacgacgtcatcctcgcgtatcagaagatgctggcgctgggcgtggccgccgacaggttcacgtacccgtcggttctgcgcacatgcggcgagctccgagattccgccattggtcgggggattgagaagcgcattctgacgtggaggtatggtctggacatgtatgtctggaacgctctggtgggaatgtacgccaagtgcggggagatgaaggacgcgcgcagggtgtttgatggaatgcctgcgcgggatgttgtcagctggaactccatggtgtctgggtacgtgtcggcgggtatgtggggcgaggcgtttgacctgctgcagttggttcctggggcgaacattgtcgcctggaacgcggttgtggcaggaaattttaaggcggggaactacggtgaggtgatgaggttggtgtcgcagatgaggacatgcggtggtccggggctggattttgtgactgttgtgattggcttgagggcttgcgctaggggtgggtatctgaggattggcaaggaattgcatgctgcctctgttcgtctatgctttgataggcttgagcgcgtggagagttcattgatcaccatgtactccagatgccagatgatgagatctgcatacctcctgttcagaacatgctcaactcagagcatagtaacatggaattcattgctagcaggatttggattcatggaccaggttgaggaggctattttcgttttcagagagatgatttattcctctgtctttccaaatgatgtcactgtgttaactatgctttcacttagtgcacgttttggacacctctgtcatggaagggagatgcactgctacattttcaagcatggacttggggcctctaacatattgcagaactcacttgtcgatatgtactcaaagtctggacagatggcaactgccaatagagtgtttgaccagatgcaatgtcaggacaggcatgcctatacttcattgattttgggctatggaatgcaaagagaagggcatctatcactgaagctctttgatgaaatgattgtaaacaatatcaaggtggaccatgtaactatggttgctgttctttcagcttgcagccactctgggctggtagctcaagggcaactacgatttgctcagatgtatgatgtgttttgcattgcaccgagggtggagcatttttcttgcatggttgatttgtactgccgtgagggtttgctgagtatggctgaggagatagttaacaagatgccattccagccaactgccgcgatgttggcaactctaatcgaggcttgccggatccatggcaaaacagaaattggggatcgggctgcaaagaggctgttggcaatgaggacaaataacccgggtcactacaaattgattgcgaacatgtatatatcagcaaaacgctggccagaactagctaaagttaggtcattaatgagcgtcatggaactaaatatgattccaactcattccttactggagtcagaatatgagatatgtccaattgaaaaagattattgcttaaaccgatgtctgcatggaggcttgtctgacgacatgacagatactgatttctctagtagtgaggaagtgaaatggaatgaagctttcggtgggtaacagtaaagctggaatccaataggctgttttgggatcatggctttcatttaaggaaaatatgttaacaacttgtattctttgcatcatggaagagtcagtgtttttaaggcgtcgcttaggcggccagacgcttgaagaattatgctcgcctaggcgtccaggtggcagtccaacgcctcgcctcgccttaccgccttaagaacactgcttccagtattgccttcaagcacgatcacaaacaatttggcatgaaaactatcaggccatactttgcataccactaccagaggatcagatacggtaacaaggaagcgttgtgttgggcacacttatgtgggcgtctcagattataagctggttactcagcagtgtggagtggcaactggcaaccataatccataatgacaaaaatggaaggctccacttggcagtgtccaaatcatgtctacgcgtttggtccagccagagtcaggaagctcactggacatggtgccgtcagagccagagatcgttcacctgactccatggctcctgaggtcactatcagtcgtgttgtccttcctgctgaacaggctgctgaatgtggaagcactcatgggctccatccctgtgctggccatgtaggttagcgagctcgcagatgtcatcttcactgccatgctgttgctgctaaactatggcctcgcatatggagccgcattctggctcttcttaaacacctggtcagatataaaccatcgcagcagcagcgatggaggtggagggtacacgctctccacaccgccgccgcctgccagtgctggacagatggttcctcgacacctgccctgtggcaatccatctaccctttggcaagctgaaggacatcgtcgtccagtgacccgaacacgcgcggtccagaaatgtttcttccatttctctgcggagagcacaaagaggctcaagacgaaggcaaacaccgggaactgcaacggtcatcatctcctcattgaagtccctgctctctcaccttgagcgagcagtgtgccaccgtctgcatactttgttgaaggaactctatttttcttttgtgctgttatataccaagtcagcttgcccccccaaaagaattcctcggaagagagacgtcattcacaaactgcggcacaagttcatctgtgttgcgtctgacctacctgatcaaagacgttttggtgacaattgtgcaaaacatttgggatgattactcatgctcgtttcgcaggtgggaatgcttaattggcgacaagttttatctatctagagagattgcttttgttttcagaccgtgatagattagccaacgccatcaaaggaaataattgaagcatggctgtgaacctggaaatcacactctgaagtctgaacacaatgtaaacattcagaattagcacattggtcgtgtagctcattgtacataagctttatttatgctccaggagttgttactgtagttacagtgtcccaccaaatcaagaaggataaaaaatttaacgtgtgggaaaacagaaccggcccaggagaaggcccgtgcgggtgcactctcgctgcgcccaacaacactgactgggccggccgtcgatgcactgcattcccccccttccgtccgctgcatccctccgccgccaccgccgcccaagccaggtgctgaggctttcgttggtctcttcgccggcgacgagcacccaccaggatgcagtccttggtccggaatgtctgccgagccggaagccgtggagcggcggcgaggctcctggaggccgccgcggttcatccgggggcggcgcagccgtcctcggccgtcagacacctcaggcatccttgcgggttcgctcgtccgatcggggtagatcaacccaagcctgtgcagcgccggaccattttgcgtgatggcggccgcgttccggctgccgcctccggattcggtctctgcgcgaaagttctcgttgcgacgaggggtctgtcgacggcgggaaatgctgctgaggttgcctctgattcggacgattccacctctcctgcggttgagcaccccccgcgcatcaagttcaagaggcctgacaagaccgctagacacattatgaatatcctgaacaaagaggcggtcgaaaaggtccgctcggagagggcgattcctgatgtgcagcctggatgtatcattcagatgagattggtaataccacttctttgtgttcctgctttagcgctgttcctataggtttctggtactgatccttcctgtgagtcgatgaacagcaagttcctgagaacaaacggcgcgagtcgacactgaaagggattgtcataggaaggcgcaacgctgggatcaatacaaccttcagattgcgtagattagtggctggcgtgggagtcgagtctgtctttccactttactcaccaaacatcaaagaaatcaaggtcttggacaggaagaaagtcaggagagctaagctgtattacctgagggacaggatgaacgcacttaaaagatgaggatttcaacttgtttctaggatttctttttgccgcgcggatcagcatggtttctcaagatgcaatcacattgtttggtgttccatctttgaaaaaaatcatagtttggggttgtcagttgccatgctccgatcttctttcttttgatttgatgcgctgtaacattagtgcgaaaattcatgtgctcaggtctattacgttactttcccaatctttttttagtatgtgcgtctgacatgaacaagctggaacactttactcatcaaagcgaaactattgtatgatgattcatgctatccggttttagatgtcaaatcatttagtctttattcacagaaacctcctgttctgaaaaatgttctgggcatcctgttctgaaatttgtgtatatgctctattggaacctgtgttacagtacatattcgcagtggcatgctgatccgtgattactctatctagatgcaggcagttcacatctaactatccccttctgccactctgaaaggcacgagtatgat

SEQ ID NO: 4617 - DNA, 2146 bp, Zea Mays
cccctgcacgtcacgggagtccatggaggccgcccgttctagatcgcacggctcgcgccccgcgacgccatccaaccccgcgcggccccacctacagcgagcggctcgcgccgtgccccagttgccagctccgcctcccttaaaacccaccgctgttcgcgtcctcgtttctctcaatctctctcttctcctcgcctcgccttggtgttcacgccgtcgctagcgcctgccgcggcgaagcttctgccctccccggcgccgggctcgggtcgtcgtcggccaggaagatggctggcggcttcagggtactgcatctggtcaggccttttcttgctttcttgccagaggtgcagagcgcggataggaagataccgttcagagaaaaagttatctacactgttatttccctcttcattttcctggtctgcagccagctcccactctatggcattcattcaacaactggagctgatcctttctactggatgcgtgttatcctcgcatcaaaccgtggcactgtgatggagttgggtattactccaattgtgacatctgggatggtaatgcaacttcttgttggatcgaagatcattgaagttgacaacagtgtgagagaggatcgtgctctgctgaatggtgcacaaaagttgcttggtatcctgattgctattggggaagctgtggcatatgtcctgtctggaatgtatggcagtgtaagccaacttggaacagggaatgctatcctcattatacttcagcttttctttgctggcatcattgtcatctgtctggatgaacttctccagaaaggttatggcttgggatctggcatttctctgttcattgctaccaatatctgcgagaatatcatctggaaggcatttagccccacaaccatcaacagtggtcgtggtgctgaatttgaaggggctgtcattgcactgtttcatctgttgattacgagaaccgataaagtccgtgctcttcgtgaggctttctaccgccagaaccttccaaatgtgaccaatttgcttgccacagtcttggtcttcctcatagttatctatttccaaggcttccgtgttgtccttccagtgagatcaaagaatgctcgtggccagcaaggctcatatccaattaagctattctacacttcaaacatgcccatcattctgcactctgcactgattaccaacctctatttcatatcccagcttctctacaggaagtacagtggaaacttccttgttaaccttcttgggatgtggaaggagtctgaatactctggccattctgttcctgttggtggtcttgcttactatgtaactgccccatcaagtttggctgatgtccttgcaaatccattccatgcactgttttatgtggtcttcatgctgtcagcttgcgctctgttctcaaaaacgtggattgaagtttctggttcatcagcaaaggatgttgctaagcagctcaaggaacaacaaatggtgatgccaggacatcgtgagtcaaacttgcagaaggaactgaaccgatacatccccactgctgctgcatttggtggagtatgcatcggcgcattgactgtcctggctgatttcatgggtgcaattggttcaggaactggaatactgctggctgtgacaatcatataccaatactttgaaaccttcgagaaggaaagggcaacggagcttggtttctttggtttttgattagtagctgtggaaccttgaaccgatagctgaattttcttggcctaagtcactgtagtgcttagccagttgtaacttaagagagttctgttaggttgccttgtggccacaatcatgtagcagaatctgtccaaagagcgtgttcatcccatccacaatcagtaatccgcactctacagtttgctcataggttaccctggcaactggatgttctgtgttcaatttcagttacttttgaactgtaaggtctgttattactagtttcccagaacttagatgctcacgtgcgctttatttcaatatctattttgtgatgttgcatgattatctctgaatctgattgcttgtttgctaacagaccttacaatggacttttttgttacattgcatgctgcattactgaagcaatatattttgctactgttacaata

SEQ ID NO: 4618 - DNA, 1736 bp, Zea Mays
atgggttccgtgcaggtgcagcgtgtcgccactgactccgcgtccgtccgtcccccatacggccacgcctctgggtctcccgcgctgccatggacgggggaagagagcagcaggcgccgccggagtcgcagcccggtaagaacctcatcaagatcccgtcctatcaggaggtcttcggcaccggcgcctccacctcttcctcgaagccgccatcctacaaccctcctgtagccacctccgccgccgccgccgcttcatcctcgtcgtcgtcctcgggatcattctcgcaggctttttctttcctcaagtcctccgagttctactcacctccgccgccgccgcctccccagcccaccaccaccccgaggccgactcaagctagcccctcagcgccgactccccaaagcaagaactccattctcgtcagtcataggcagagaggaaaccctctgctgaagcacattaggaatgctagatggacgttcgccgatgtcgtgccggactatgtgcttgggcaatcgtcatgtgccttgtacttaagtatcaggtaccatcttctacatccagactacttgtactatcggataagagagctgcagaagaatttcaggctgcgtgtcatcttgtgccatgttgatgttgaagatgtaatcaagcctttgcatgaaattacaagaacagcgctgcttcatgactgcacccttttgtgtggttggagcctggaggaatgtggtcggtacttggagactattaaagtatatgaaaacaagccagctgacagtattcgtgagcacatggataacgactatctatcacgggtatatatacttcctgggaaccctctccagaacaagataatttgatgatctatgtcatcggttgatgaggaaaactgttgacgcacgggcttacatccattcggcatgttaataaaacggacgttgtcacactcggttcatcttttgggtcgctctcacagatcatgaatggttctatggacgagctggctcgatgcccaggaatcggtgagcggaaggtaaggcggctctatgataccttccatgagccgttcaaacgggttcctgcccgaccacgaccaaacctcgtagtacccgataccccggaccgggagaaagcaaaaggccaaccttcgtctacagatggcagcagtttgcaagatgcggtagagaagccagatgcgtcgaagaagacgaagaaaggctctgatgtaagatcagccctcaccgttgcctttgccaagtattcggagaagatccgcagtcagggccgcgatgcgccaaacgaggccggtgagagtactggcggctcgaccgtggaagctgagagggcgggagactagatttagctgtaggatggttaacggtgctggagtaatgctagtttgttccttcctgttgggtgcttgttgttgtgactcggccgccgatttgcgcgtgcggcaccagtatttcccgcggcgtcctaggcatgtgtttttttaggctaaagaggggccagagaatcttcaacgatatcgaaacatttaagtgagattcctagacggtggcagccattccatcaccatataaatcacacttagaatctctctaaaacataatctgtattgccttctctacctcttaatatatttatatctctaaaacataatctgttgggtgctatatcctttccggcttcagttccaaaattaaaaagggaaaagaaaaagaaagaaa

SEQ ID NO: 4619 - DNA, 2451 bp, Zea Mays
ctcccgtccttcccctccccctatcctttctctctctcctctccctcctcttctttattgctttaacgttactcccactagccacccactcttcctcgaggccaccacaacacccccgggacacacacacagtcacacacacataaaaaaaaaaaaatcccccctcgcctcggattcgctcgcgcccccgcccgccgacgcaacagcgaggtcgttccgttccaggcttcggacggaggcggggtgacgtaaggaggtgcgcgggaggatccgttcgcgcccggaggaccgggatccggcgcccgtcgtcgtcgacgcccatgtcgggccacctcgatcgcttcgcgcggccatgttttgaagggtgctcaagtcacgatgaacgtagagaccataagtcagactttgaagtctctgaagatgaaaagaagacaagaataagctctttgaagaaaaaagcaatagatgcatcaacaaagattaggcactcattaaaaaagactagaaggaagagtggtagtagggtcctttctgtgtctattgaggatgtgcgcgatctagaggagctgcaagctgttgaagcatttagacaagcattactcttggatgagctgttgcctgcaaggcatgacgactatcatatgatgctgagatttctgaaggcaaggaaatttgatatcgataaagccaagcaaatgtggattgatatgcttcagtggcggagggagtatggcactgatacaattgtggaggacttcgaatacactgagttgagcaccgttttgcaatattatcctcatggttatcatggagttgacaaagaggggagacctgtttacattgaaaggcttggaaaggttgaccctagcaaacttatgaatgtcacaacgatggatcgatacgtgcgataccatgtgaaggagtttgagaggagcttcttgattaaatttccagcttgctctcttgctgcaaaaaggcacattgattccagcacgacaattctggatgtccacggagtggggttgaaaaatttcagcaaaactgcacgcgaattaattcaacgactgcagaaaattgacaatgataactacccagagactctataccaaatgtttatcgtcaatgctggtccgggcttccggttactatggaacactgtgaagtccttccttgatcccaaaacgaccgccaagatacatgttcttgggaacaaataccaaagtaagctgcttgaaacaattgacgctagaattccttggtggcacttgtacctgtcctgaatacggaggttgccttaaggctgaaaagggaccgtggaaggacccaaacatacttaagatagtccaaagtggtggggttcattgtgctcgtcaaattgtaactatttccaatggtgaggaaaaatttattacttacgccaaaccgaagcgccacgcaatgagagggagtgacacatcaactgctgagtctggttcagaagctgatgatgctgtgtcccccaaagctctcagaagttacatatcacatcctaagttgaccccagttcgtgaagaggtcaaaatggtcagggctactagcttttctactcgtgtccctgaatatgatgtacctgttgttgacaaggccgtggatgctacatggaagagagagcaaccacgaaaggcaccatccgtgccccaagactcatctgtgaaaactgcatccaagccatctggccgcccctgggataagatcgctgcaaatctgatggcttgtcttatggctattgtaatgttggttcgatcaatcaaagatcttgccacaatgagattgtcatctaaaggcgggtcagaagaaagctactgtacattgtacccggactccgtccagaaagaggaattccgtcctccttcgccattccctgggttcgctgaagccgacctattcgccgtggtcttgcaaaggctgggagagcttgaagagaaggtccagatgcttcaagaaaagccttctgaaatgccttgcgagaaagaagagttgcttaacgctgctgtgcgtcgtgtggatgcattggaagctgaactaattgtaacaaagaaggctttgcacgaggctcttatcaggcaagaggaactgctcgcgaacatcgacagcaaggagattgccagggctcagagaaagaagaaaacaatgttctgctactaggacaacacctgcttccgtgaggagatgacaaacgcggcggaccccttcatttttctgacacttgtgaatcaacaggtttccgttgtaaatcaacaaaattctggcataaataaaatgttttttttttaaaaattgcaatcctgagcattgctgcctcctcccggtctcgcaatctggttgttgttagttgcagcataactgcataattggttggttagccgcgccgatgataattggttggtttcttagctgatgcgtatcgtcaag

SEQ ID NO: 4620 - DNA, 2569 bp, Zea Mays
cccaacaattatcgaaatcttcaaataccggcccagaccgaccatcccactggctgtaccgtttcggcttctttctgctcttcccgagcgtgaaaggaaaccgagaccaccatacccccccgctccgctgctccggaaccctcgccgtgaggtcaccgccgatggccggggactcgtccccttccccggcctccgcacctgtccaggtgcgctgcgctggttgccgtagcatcctcgctgtcggcctcggtgtaactgaattcatctgccccaagtgccgcatggcgcagcgcctcccgccacagctcatggccaagtccacctcgccctcgtcgcctctgcccaaagccccctcgaagccttctctgcctcctacgcagccccggatgggtgcgccgtcggctcagggggtggaccccacgaagatccagctcccctgtgcgggctgccaggccgtcctcaacgtgccccacggtctcgcccgcttccgctgtccgcagtgtggcgtcgaccttgccgtggaccacgccaagctacaaaacttcctcgccgcctccaacagcgccacgtcatcaggccatgccccgacctcggtgaggacgcagccgcctctggcgacattcctctccgtgttgccgctgcagctagtgcctggtgcaacaatttccatggtgctgcctgccgctgaaccacatgaggagatcaatgaggttgccattgatgttgagcgtgatgaagatgaaggtggcactgttggagaaacttttactgactataggccttccaagctatcacttggtctatctcatccagatccagttgtagaaacttcttctctgtcagctgtacaacctcctgaaccaacttactgcttgaatatcatggacgaattagatgagacaaatgcattgtcttgtttgcaaattgaaacaatagtttatgcttgtcagaggcatcttcatcatctccctactggccatagagcaggttttttcattggtgatggggctggcgttggtaagggccgaacaattgctgggttaatctgggaaaattggcagcagggaaggcataaagcagtgtgggtatctgttggttctgacttaaagtatgatgctcgaagagatttggatgatgttggtgctaagtgtgtccaagcaattggttcaatggtgtgggcaagagtttgatggtcttcttgtatttgatgagtgccacaaggccaaaaatctgattcctgatgccggaagccagcccactcgcactggtaaaacagttcttgagatccaggaaaagttgcacgaggctcgggttgtttactgttcagcaactggtgcatcagaaccacgaaatttgggctatatggttcgtcttggactttggggtgaaggaacatcatttcaaacttttccacaatttttaggtgctcttgagaaaggtggtgtgggagcacttgaacttgttgccatggacatgaaagctaggggtatgtatgtatgccgtacattaagttacaaaggggctgatttttatatagtggaggctccacttgaggaaagaatgatgaacatgtacagaagagcagctgaattctgggctgaactgcgccttgaacttttatcagcaagtgaattatttgctgatggcaattcaaatcaaatatggcgattgtattgggccagccatcagcgtttcttcaggcacatgtgcatgtctgcaaaggtacctgctgttgtgaggttagctaaagaggccttggcagagaacaaatgtgtggtgattggccttcagagcactggagaagctagaactgaagaagctgtcacaaaatatggagttgaaatggaagactttgtttctggccctcgggagcttcttcttaagttggtagaagaaaactaccctttacctccaaaacctgattcttttcagcaaggtgaagaaacagtcacagagattcagcgtaaacgtgcactggatgtatcatttaaagggcgagttaggaaagtagcgaaagtggtagatgtgagcgatgacgacaccgatgattattctccatctgagtcagatcatgaatcaacagaatctgatgaggagttccacatgtgtcaaatttgcaacacagaggaggagcagagcctgttgcttcattgttctggttgttctcggcatgttcaccctcattgtctaacaccaccatggactgggacgattacggatgattgggcatgctacacgtgcaagatagtagaagacgaggaaaagaagcaagatgcccatgtagctgattgtttaaagagaatttcactcctcatgtctatgaagagaataccatgctctggtggaaaagatgtagtgatcagttgcatggaattgccagaaaaggactaaactcgcttatcagtctcagcctctggatattgtggaaacactgaaacgtctgtgtttttgacggccttgctccctgccttaatgaagccatcaagagaactgacgaggaaagggacctgtgggtgttaggaggggctacaaacttagatctcttaacagccccatcccaggtcttagg

SEQ ID NO: 4621 - DNA, 2508 bp, Zea Mays
aagtctagtagtactagcagtagattaccaccgctcgcctcgtcgactcctcgtccccgcaccgccggcctgacatcgcgtcgcgtgccaaagccgacgcgcacaaaagcaacgaaagcgaaagcaaagcggccaccaccggcctccccggcagcccggctccccctcgctgtcctccctccacccatcacaattcacaccgaagcccgagcgggagcggccattttctctcgtctcgtcttctcgtcccctaaaatgagaaacctagtactgctgctatagaagtcaagtcactcgactcgcccgcgtgcccaaccaatcacacggccgcgctcgagacgagaggcgcccacggaaacggagcctcctatgccaccgggcgccgcggctgtcgccgccacctcgcaacaggccgactgctgcggacacgggcccgggcccgggcccagctggcgcggtggcggcggctgcgatgtccccggcggcgcgtcctgcagctacctgccgctgcgcaagcggctgtccgttgacggcaagttcccggcgccgcggatatgcatctgggagtgcgacggcgaggccggggacatcacctgcgatatcgtcgccgctccgatccgccgcagctgcagcgcgagggcaatgccgccgccgccggcggcctcgctcttccgccggatgatgaccccgccgccctcgcggcccaggccgccgcagagggaggtggaggatgctgtggcggctaggaggcccggggagaccatctccaagggccaccggagctacggtctcatgcttaacctgcagcttggcgtaagctattcggtggggaagtcatcggcgctgccgttcaggaagctctcgtcatcagacttcgacccgcgggagaaggtgtggacgcggttcccgccagaggggtccaagctcacgccgccgcatcactccgtggatttccggtggaaggactactgccccgcagtattcaggcacctgaggaagctgttcggggtggatcctgcggactacatgctcgccatctgcgggagcgacacgcttcgcgagctggcgtcaccaggcaagagtgggagctgcttcttcgttacacaggacgatagattcatgattaaaaccgtgaagaaggcagaaatgaaggtcctaattaggatgctgaggagttactatgaacatgtttgtcggtacaagtccactttgttgacaaggttctatggcacacattgcatcaagcaagctggatgtcccaaggtccggttcattataatgggcaatttttgctgctcggagtataagatccatagacgttttgatttgaaaggctcatcacatggtcgtactattgataaggcggaagagaagatcgatgaagcaactactctaaaggacctggaccttgattatgcattccacctacagagattttggtatgacgagctgatgaggcaaattcagatggactgcacattcttagagacacaaggaattatggactacagcttgttgctaggagttcactttcgtgatgatttctcaatgtctaaaatagaatccacaggcaaaagaaaatcatttgaaggtggaggcgatgtttgtgagctttgctttacggaatctggatgcaaggacagagatttcattgttgactctcggaaaccactggtccagttaggcaagaacatgcctgcccaggcagagcggaggtcgaagagagtcctggataagtttctcctaaacgaaagacacttgtttataaccacatcaagtggcggattccaggatgtctatctcttctttggaataattgacattctacaagactacgacataaccaagaagctcgagcatgcatacaagtcctttcaggtcaaccctggttgcatttctgccgtagacccaaagttgtactcgagaagattccaagagttcagtcgcagagtgttcatcagagaacattaaagaacaatttgtccagcgggtgactgctccactggcattttacatcatgggatccattggtgaagtcctggggtatgatggtttcaccgatcccgagcgtgccctggaacagtggaaaggatggtcggtttacccgacgcatagttttctgaataattggcgtcgagggaggaggagcactgccgacacgcatgctaatgctgaaaggatgcgagctaaaactgtagagctttgccttttcaaggacttgtaaaatgtaagtgccggctccatgattgcggagcacatacccaaaccttgctgtttgtttattcttcttccgcactcgcatcttccaagaatctcaagtgattttagcttcttgggatgcttgatgaatactaccagtatgaatgatcttggccaaatggggaccagacattgtacatgcacatactgtcgtgtagtgtgtacactagtagatggatatcttgtcagagtttaaaaggattttggatgcattactgcattcagtaagtgtcactagcatcttgcttt

SEQ ID NO: 4622 - DNA, 798 bp, Zea Mays
acccatgtcctttattgtcttctaggcgtcaaaaggaagctgaatttaagttactggaagaggagcttgctagaagggtcgaagaagctataagaaaaaatgtcgaggaacgtctgaaatctgaagaggtgaaacgtgacatagaacaccgaattgaggagggtattagaaagttatttgatgaggttgacgctcagctacaaaaagagaaagcagtggccctttatgaggccaggcagaaagcagagcaagaaagaagagagagggaggagttggatagaatgctcgaagagaacaggcgtaaagtggaggaagcacaaagaaaggaagctcttgagcagcagcagaaagagttggaacgatatttggagctggaaaggatacaaaggcaaagagaggaagcgttgcgcagaaagaaaatggaggaggaagaagagagagccaacaagctgagattgctggggaaaaaccggggttgagaactgtcatctttatatacacagcggtctatgtgccgtggttgcccccatttgacttgttagttgttgccttaccagtgcgagaacttttgtttgatgtacgaacatgaaaatggtcatgtatgacatctatgaatggaacctgtagcttattctttgagtacgttttaagacaggttatttggattcctcaatgttttgctctgccatgcttaagaattttttaaatgcctagtctggtgcacaagggagcaatagtaatgaatgagctcatgcccaacttcatctgtttgctcaagagagaagaggagcatgtgaa

SEQ ID NO: 4623 - DNA, 1507 bp, Zea Mays
ccgagagtcggcagacgtggggacctgccattggatggcgctggatgcccttcactcccgtcccagattcatcgtcctgcagctcctcttccatctccgatctgctgccataccactaccacaccatggatagccaaactccactgcataacccgctgcgaagaaaccttctaaagtgactaagtgatcgatctccttgtcctgaaaggctgaaacctaaggcgagagaggccacgggagagcgccatggttctcctgctcctgggctgctctcctgcatcgtcgcgcccagactgctctccagcttccaggagaagatgcagcaccgccggacagaaaatggtcaggtgctctctgaatgaagaaacgcagctgaacaaacatggactagtatccaagcagttaatttcatgccttgctgcttcgcttgtgttcgtctctccacctagtcagaaacctttgcccgtccaggcttgtgccagattgcaacagtggcagccattgacagtgcttcagttcctctgaagtttgacaacccttcagatgatgtcagcacagggatgatgatgaggggtatgaccgccaaaaacttcgatccagttcgctactctggtagatggtttgaggtagcctcgttgaaacgtggatttgctggtcagggacaagaagactgtcactgtactcaggcacgctcaatccaggtggatacattctgtgtccacggtggacctgatggatacatcaccggcattcggggcagggtgcaatgcctatctgaagaggacattgcaagtgctgagacagatcttgagaggcaggagatggtccgtgggaaatgctttctccggttccccacactgccattcatacccaaggaaccctatgatgtccttgcaacagactatgacaattatgcaattgtgtctggagctaaggatacaagctttattcagatatactcaagaacacccaaccccgggccagaattcattgacaagtacaagtcttatgttgccaacttcggctatgacccaagcaagatcaaggacactcctcaagactgcgagtacatgtcctcagaccagattgcgctgatgatgtcgatgcccgggatgaatgaggccttgacgaatcagttcccagacctcaagctaaaggcaccggtcgcacttaacccattcacaagcgtgtttgataccctgaagaagttgcttgaactgtacttcaagtaaaaaacagtgtagcattgtccagtagccaatagccaattgcccaacttctcgacttggatcttcaatggaatgaagttcagtttattctgacgtttgctagtcagttagttctttttaagtacattgtttttttgtctattatataagagtgggatatgtaagattaagatctgttcagctgttctcggttactgtttgtacaattgttctttttcctgatgtttttatacaccattgcgattgtctgtccctggtatgccatcgcaaaatcactt

SEQ ID NO: 4624 - DNA, 4032 bp, Zea Mays
tcaaaacccaaaaccttccgagccacaatacagatttttctaataattaaaagatataaagggaagaaataaatctacctttttttactgtctccgagaagatctctctctgctgttcttccttccccataaaccaaaagagaggggaaaaaagaagaaagaaagcaaggagcaccgcaccactccactccacttccctcctcgatccagccatggcggcctaggccccctagggttccctgtcagcccccacccaggcgcctcctgccgcttcctccgctcccacccggtggtcgcgctgcccgattcggccgccggcgtcgaatgggaggcgacccgatgctcgaagccggccgttgccgcgcgctgccgacggagattccctgagctcggcggcgggttcccgtgctcgccgagcgatgactctcggcgccggcgctgcccaaggcactgggtctagggcgcgtggctggttgggagcgcgccgtgcgtgcaatgggggatttaaggcggttctgtagagtcgccgcggcggtcttggttctgcgagcgcgtggcctgcgctcgtgaagggaggagctgtgaggtgttgcttggcgagggtgcgcagctgaggattccgggcatgaggtcagcaatgacgcgcatttgtcgcgacaggccggaattcgagtagcggtttcttgaagtggattggctgctgctgcgtgggaagggggaagcggcggcatcaacagccgcagaggaaggcttactctgaagcggaggggaagcaggctggcattgctactgggagcatggcgaggtgctaaggacgtgcaggttccgcaatcaccgcatcttggtgttcttgtttcaggtcgtagtgggagatgaacctctcaccgcccaggatgtcggagccatcgcttgaaagtgacggggaacaaaggtgtctgaactcggagctatggcatgcatgcgcagggccccttgtgtcccttcctgtggttgggagccgggtcgtctactttccccagggccatagtgagcaggttgctgcatcaactaataaagaagttgacgctcagatcccaaactacccaaacctacctccacaattaatctgccagcttcataatgtcacaatgcatgctgatgcagagactggagaggtttatgcccagatgacactgcaaccattgagcccggaagagcaaaaggaaccttttcttccaattgaattgggtgctggtagcaaccagccaactaattacttctgcaagacgttgactgcaagtgatacgagtacccatggcgggttctctgttccacgccgagcagctgagaaagtcttccccccattggatttttcacaacaccctccagtgcaagagctggttgcaagagatctgcatgataatgagtggaaattccgccacatttttcgtggtcagccaaaaaggcatctactgacgactggttggagtgtttttgtaagcgcaaaaagactagtagcaggggattctatcatatttatctggaatgataataaccagcttctattgggaattcgtcgagcaaatcgtccacagactgttatgccctcttccgtgctatcaagcgatagcatgcacattggtctccttgctgcagcagctcatgctgcagccacaaacagtcgtttcactattttctacaacccccgcccttctgagtttgtgattccactggctaagtatgtgaaagctgtctaccacacacgtgtgtctgttggaatgcggtttcggatgctttttgagacagaggaatcaagcgtcagacgatacatgggtacgatcacatgcataagtgatctggactcagagcgttggccaaattcacactggcgttctgtgaaggttggttgggatgagtctacagctggtgataaacagccaagagtttcactctgggagattgaaccactgatggcctttccgatgtacccaactgcctttccattaaggctaaagcgtccgtgggcttcagggctacctatgttcaatggtgggaggagtgatgagttcgctcgttattcttctctcatgtggctccgagatggaaacagaggggctcaatcactgaacttccagggacttggagcatcaccatggcttcaaccaagaatagattatccattattaggtctgaagctagatacttaccagcagatggctgctgctgcactggaagaaattagagctggggatcatttgaagcagatatcttctctcctgccagtgcaacagccacaaaatttgagtggtggattagatcctttatatggaaatcctgttctgcagcagatgcagttccaatctcagcagtcatccttgcaagttgtgcagcaaggttatggtccaaatgcaagcgactctgggttccttcaaaatcagctgcagctgcaaaagcagcaggagccactaccacagcagcagcagcaagctctgcaacaacaatcgcatcaggaaatgcaacatcacctctcagctagctgtcatgatattgctaatgtagcttctggtgtgtctgagtctggatctgcttctcaaacagaatcttctttgctttctgggtcatcgtaccaacagatctatgatggaaacagtggtccaggtctgcatctgcacaacggtttccacaactgttcaagccaagagtcctccaaccttcttaatctctcaagaagtggacaattcatggcatcagagggatggcctttgaagaggttggctgtggaatctctttctggtcatgagctccaacctgtgcagcacaagtttgagaaagtgaatcaccaaagtaatgtgtctcacatttctagcaccttgcccccactgtcagcaagagacagttatagtgcccaggctagtggtacaaatgatcagagtcacctgctttcatcatcatttgcaatccatgatggcttgacagccgtcaggagtggtggtgttggcagtggaactgatgcgataaccatagcttcgttgagatataatgatatgaatttgctacctgaaaaccccatcgcaacttccagttgtttgggcgaatcaggaaccttcaattctctcgacgatgtgtgtggtgtaaacccatcacaaggtggaacctttgtgaaggtttacaaatcagggtcccctgggagatcgctcgacatcaccaggttcagcagctactacgagttacgtagcgagctcgagcggttatttggtcttgaaggccaactggaggaccctgtaagatcaggctggcagcttgtattcgttgaccgggaaaacgatattcttctcgtcggcgatgacccgtggcaggagtttgtgaatagtgtatggtgcataaagatcctctcgccgcaagacgtgcagcagatggtccgcggcggaggcgaccttctgtctacaactggagtgaggacactgcagggcagtgtctgcgatgattattctgcaggccacgacatgcagaatctcaccggcagcatcgcacctgtggtgcctctggactactgagaccgagatgaagaccagaaactgaagttctgaaccaaaaccggcaattcagcaccgcaggattgccgtccacgagtcttttcggttcctatgatctatcttctctcaagttgtgttggtcagaaataacctagtcgttaatatagctagatccattgtatcattatggtaatggacatgttgtacgatagctgttgtagctacgtgtagccatagcctaagctctaaatggcaggcaagaattggtctatgaaagtatggatgcaggcactcactgtagaggtgacctagccctgtagttctctatatcttctcatatctaaaagctgacggttccatgtggcgcctaaactattgaaccctgtcacctttgtcatatttttttcacctcaattcgcggttgtttgatcttgttgcatgccatacaagtcaaatttttttgtcctgtttgtagttcagtaggctgtaccctgtaggcttttgcctgttaatccccggg

SEQ ID NO: 4625 - DNA, 1362 bp, Zea Mays
aacttttcggcctaactcaatcgacaccattgtccaagctaaaaggcccaacttaataggctgccacttgccagtagaaccgtttgcctctcgcctgcatcctagtccggcggccgcacccgggcagctccggcggttccccgccgccgtcctccgtctatccccgactgcgctagagctccgtctcatgggggcgtccgaatctctcctatctaggcagcagcttcagcagccgcggcctcagtgggcggatgagatcacgacggtgtccgagggccggcgcgacgacgccgacgccgatcccctcgtccgccgtatccggtctctcaccatagctcctccgctattgagctcccaatctgaagcggaagcagagagcagcctcacggatatcctcgtcgggaagccctctaactcctcagccacctctggaaatctgaacccaaatgtcctagctgagcttttcgccatgtaccgcgaatggcaagaagagaatgccaagaaaattagccgaaaacagatccaacatggaacgtcttggtgcaggaggagatagaaaacaagatagaaacagctgatgcattggcagttaaacttctccagcggttcaattattgtcttacttacatgagatccacctcccacaatcttgctgaagtgcatccgctgcagatcgaagttggtgagtcaaagggcaggttaactgaagtcataagcaactgcgatgcattgtgtaagagaattgctgcagaaggaccagaaagcctacgatcatctgttcaacctttcatggctgctagagcggaggcagaagggagtggttcacttgacccaaaacaagagtcctgaattgtacaatctaactgctgacagcatgcgcaaagaaacttcagaggatgattagtttgtcctgaacaaatatattatataaacacgtttaggaattgttcggttattctcaatacatatggattggatgagattggaaaaaattaagaagaagtttgacttgtttgggattcaaacctatcaaatcccactcaattcacgtggattgagagctaatcgaacaagcccttataatgttggaaaacatgttttagtcttagaaaccgtctacattgacactagtatatctatcacgttaaccaacgtatcattcgaatggagaattgtatcattcgaatagagaattgtagatctttactactagacgcatagcgtagatgtagtggaagtagtcgaatgttcttgtgttcattcatcctcaagtttgttgttgattactgtcgcaataatagcagcttctccacggtgttcacacatgtggtgatgaaacgatgtaataccattgtgctagca

SEQ ID NO: 4626 - DNA, 2961 bp, Zea Mays
caaccttcccctacaagcttgcacatctccgcctcctcgctcctcttcccgctctccgaatccaccgctctccccactttccgcgaccccgacgatgagcccccccaaaagcgctgcgaggcccccggcatccctgacgagcccgaagaccggcgctaacaaacggcagcggaaggcggcgtcggcggtgccgctgggcgacatcaccaacctcctagtcctcgctgagtccccgaccccgagcaagcccaggaggacagcacgccgggccctccccgctacctctgacgtctccgcggtctcctccacctgctcctcctccgcctccgtcacgcccgcgcccaagccttcctccgccgctgtcttcgaggaggagcacagcgtggtcaaatcgccaaccatctccacagttcaccgcaggaccactggggctcaagagaggtgtaggaggaaccccgcctccgccaacaacaagggcaaggaaccggtcgctgccacggcgagctgccccccgcttgggaaatctgcaaggacccacagcaggaaaaaggatactcggcccatctccgcatcagttccctgtcatgaagaagcggcccattgcaagcacacccaacttactagaggaccttttggagaagcagagagcatactttgcagatatcgatgcctttgagctggtagaggaagaggtgtcggaatccgagctggagtaaaaaccaaagcagatatggcctttcttttttttttcttgtacagaagcaaattactggaaccaccggcgaggtatggtagcaatgtgtagctagctctacttgtaacacggggggcactaatcgctcgatatttcgtgtgcttgggaatttgttgctctggattatattatctaatatacttgtactctgtaggagagagggggtaggcaagtgtttgcaaactggttttgctactcgcagcagttgaaactgctgggtaagatgatgtctagtagaaacatgtgttgatgcaaatcagcttggaggatcttccatacgagttaaggaacggtttcttacactgcgcactatcttccatactcgaacgatcttgtgaaccgaagcctactacgacagacaaactggtgacgaaggatgatttcggacgactgaaatgttgccgaatgcatgatgccatccatcatcttgccaatggtaaagaacgctttggtgtgcaatccatgtctcttcgcaagttctgttggtcctgattggctgcagtctatcgtagcaatgcagcggcaagtgctttacagtcttttacccaagcatgtagcaaaactgaggtgtcttacgcttttatatgctgcacacagaaaactttcctggagttaaggtgcctaggggtatatcgcacttgaccggactacattctctgcagagagttggagaggttgcagatcatttgcggttagcaatgtgacaagtcagcactcttaaataacaattaaacatttaaaacaattagagtcgacatcgagaggatcatatgtatagacctaggaacagtggtaaatttctattaaactaactaaggacaatacgtaatttacctggcatacggagtaccagctccttggtctcttataaaatcaagtttctagaaaaaaaactagagtataaaatgatctgtttcgaagtaccccagtttgtataaaccagtttagacactcatgtgctcttaattacgtcttgccactttcaaggatacgatctctccagacgctaacatatacgtttaaaactagaattatttgcgggagtgagatgcagacatttcttaaccacatctgctgggacaaggaaatatagtatctacaataataaaatcaaattccactgatcgagttgcatgacgttcatatttactgttgtggctttctgagcaaatagaacataatatcattttacattctgccgtcaaagaaagagcattggggcactgataaaaaaggaaaagaaaataaaagagtgtaaatatttagaaaaacataaaatgttaggaggagtcattgacaagtaagagaaatttgaacctaaaaaacacaattaacaagtgctgcttcacacatagaacagtttaagaggagacctggaaaaaagctggtctgcaaatacaatatagattagataataccacaagctgcatatttaaatcaatgaaacaaatcaatcattgaataggcggtgttacaatacttgtttaagatttattccgtgtaattaccctctcaacacggttgatagaatacttgttgaatcggaacttggaggtgatgggtgtgtgtggagatggacgagatcagataatttgcattaataagtagcagagcaccagaccaaaacaaacatgatagaatatagatctatgtttagttttctattactgatctatcaggtaatgatctctctttgcaaccactcccgctgctgcgtcggcggtgcacgcaggagctttcctgagccaaccgtctctctctaccgccacctctgaaaaagcttttgcttagtagtgttttggtgatctaattctttaccaggagcaatgattaattgacgatgggttaaaaataggtggaagtggaacagaccttaactcaagcggtccttgtcgtcgacaagcgctgctgtatctgtatgtattctgattggcgaatcggaagcagtgttttctgattctgatggtgaaagcgtcctcttgggcctcattttgtggaaagatgggaaagaaacgggccgcagctccgagaacagaaggcgtgtagcccagcaaagcatggtttggttctcttcaagctctgggactggctctctcctcctctcttttttcaatggccaggaaaaagaaaagtagcgtaagctcaagggggggctctccatgcacctgatctcattgcaatctgcatcgctgataggtcacccttgg

SEQ ID NO: 4627 - DNA, 2754 bp, Zea Mays
gaagaacagagagttaaacaaacctatccgcgctgcaacagtgcggtgtttgaatccaatccagccagacagccgagaaagcgagcagccttgttcctatacactgtagtctagtttagctcccccctcaaaccactccacccggtccgtttcccgtcccacccgcgtcagcttcgtcttgctctgagctgccggcgacctgctagctaagctacctcgctcgcacctggagcctggtggcggtggccatggcggccctgctgggccttttcttcctgctgctgctccagctcggcccctcttcttgcagcaatgtgtacattgcgtacatgggagagaggagccccgagctgcgcccggctctggtccgggacgcgcaccacggcatgctcgccgccctccttggcagcgagcaggcggccagggacgccatcctttacagctacaggcacggcttctccgggttcgccgccacgctaacggacagccaggcggcgcggctcgccgattcgcctggggttgtgcgagtggtgcggaaccgtgttcttgacctgcacaccaccaggagctgggacttcatgcgagtgatgagtccgtcgcactcggctggaatcctctcaaacagtagactcggtgaggattccattattggtgtgctagacactggaatatggccagagtcggccagctttagagacgacggcatcggcgaggttccacggcggtggaaagggcgatgcgtcgccggggacaggttcaatgcttccaactgcaacaggaaaataataggcgcgaagtggtacatcagaggctacgaagccgagtacgggaagatgaacaccaccgacatctacgagttcatgtccgcgagagacgccgtcgggcacggcacgcacacggcctccactgccgccggcgctccggtagccgacgcgagcttcaggggcctcgccagcggcgtcgcgaggggaggggcgcccagggcaaggctggcggtctacaaggtgtgctgggccaccggagactgcacctccgcggacatcctcgctgcctttgacgacgccatacatgacggcgtcgacgtgctctcggtgtccctgggccaggcaccaccgctccctgcatacgtcgacgatgtcctgtccatcggatccttccacgctgtcgcgagagggatcgccgtggtctgctccgcagggaactccgggccttattcggagacggtgatcaactcggcgccgtggatcgtgaccgtcgctgccggcaccattgacaggactttcctcgcaaagatcgccctcggcaacaatagcacctacgcgggtcaaacgctctactctggagcgcatcctggaagaagcatgagcctagtctacgctgaagacattgcatctaacgacgcagacgatacagatgcaaggatccctgaattctactctagcgaagggaaaggtggtgctttgcttccaaacaagggctcagagatcagcttcggtggcggtggagaccgtcaggaaagctcgtggcgtcggtgtcatcttcgcccagttcttaactaaggacatcgcgtcttcattcgatgttccatgtgttcaagtagactaccaagttggaacagttatactcgcgtacactactagcatgagaaacccaacagttcagtttggctcagcaaaaacagttcttggagaagtgatcggcccagaagtcgcgtatttctcgtctcggggtccaagttctctgtccccctctgttctgaagccagacatcgctgctccaggcgtcaacattttggccgcatggactcccgccgccgccgtatcatcagccattggatccgtgagcttcaagatcgattcaggaacctccatgtcctgcccgcacatctcaggagtcgttgctctcctcagatcactgcatcccaactggagtcctgctgcagtaaaatcagcgcttgtcacaacagcgtccacgacacgtatgggtttgggatcgtgtccgaggcagcaccgtacagccaggcgaacccgttcgactacggaggtggtcacgtggatccgaaccgagctgcgtaccccggtctcgtgtacgacatgggggcgtctgactacgtgcgcttcctttgctccatgggctacaacgtctcggccatcagctccgtggctcagcagcgtgagactgagacctgccagcacgcgcccaagacgcagctggacctcaacctgccatccatcgccgtccccgagctgaggggcaggcttaccgtgtcaagaacggtcaccaacgtcggctcggcattgtcggagtacagggctcgcgtggaagctcctccaggggtggacgtctccgtgcgcccctcgctcctggccttcaactcgaccgtgaggaggctggcgttcaaggtgacgttccgggccaagctggtgaaggtgcaagggagatacaccttcggcagcctgacgtgggaggacggcgtgcacgccgtgaggatccctctggtggttcgcacgatggtcggcaggttctacgccaattcatgagctagttagttcgtgtttgtgtggtgctgtgtgttacctttcgctcaccaccggaccggtgatggtgagacggacaagatgtaacctgctaatttgttccgattctaatggcattggtgattggttggggttctttggctagaattcgaccactgattaagatgagcaaaactgaatcttttgtgtttgtaatagaccataacttcttcttgtt

SEQ ID NO: 4628 - DNA, 1866 bp, Zea Mays
ctctcccgcttccgcttcccctcagccgtcacctccccgctcccaccgccaccaatcgcactcgcagtggctgttggcgtgcgctcgcgtccaaaccaagcaaaccccacaaatcctaccttccgccggcgtcgccaccggccgtgctccctccctccggccccggttgaccctagcctcgcatcaccctaaccctacccccctcccgccgctgccagagcaggggaaaaagatgccgcgcgagatcatcacgatccaggtggggcaatgcgggaaccagatcgggatggagttctggaagcagctctgcctcgagcacggcatcggcaaggacggcctcctcgaggacttcgccactcaggggggcgacaggaaggatgtcttcttttaccaggctgatgatcagcacttcatacccaggtctctgcttattgacctggagccgagagtgatcaatgggattcagaacagcgagtacaggaacctgtacaaccatgagaacatatttgttgctgagcacggtggtggtgccgggaacaactgggccagtgggtatcatcagggtgaacaatttgttgatgatatcatggacatggttgacagagaagctgatggaagtgatagccttgagggttttgtcctgtgccactctattgctggtggaactggttcaggtatgggttcttatctattggagacactgaatgatcgatacagtaaaaagcttgtgcagacatatagtgttttcccaaatcaggattgccgtcgagcgccttcatctatcaaatcctacgtttgcacaaacaaactctttggtctccacggttatgtctgcaagcacaactactttaaggttatactccgttgactgtcgagcgccaggttaacatgatacgcaaaacgacggtattggatgttatgagaagacttctgcagacaaagaatataatggtgtcatcatatgctcgaacaaaagaagctagccaggctaaatacatctccatattgaacatcattcaaggggaggtggaccctacacaggttcacgagagcctgcaaagaatacgcgaaaggaagcttgttaactttatagactgggcacctgcaagcattcaggttgctttgtcaagaaaatccccttatgttcaaacaacccacagggttagtggtctgatgttagcaaatcatacaagcatccgtcatttattcagcaaatgcctgggacaatatgaaaagctaaggaaaaagcaggcttttcttgacaactacaggaagttcccaatgtttgcggacaatgatctatctgaatttgatgaatctcgagagataatagagagcctagttgatgaatacaaggcctgcgagtcgcctgactacatcaaatggggaatggaggaccctggagaggcaaatgttgtggcggcacttgactctaagttggtagtgtaaatataaagtgttgtgcagcaatccacgcaactgaggaagtgctgtctacaatctacattcaagtcatgttggtcatccagaccaaatatgctactgtcacatctagtagtcatcagtttgacgccgcctgcttctatagatccaatcggagtgcagccaaagtgggttttgacgttatttcgacctcaaatttgcctttagtctgtgctatgtatatttcgaaacccacttcctctggcctgttttcatttctttagggctagtttggtaacaccatttttccaagggatttttattttctcaagtgaaattagttcattttcccaaacgaaaattgaaatctcttgggaaaatgttgttcgcaaactatcccttactatatttattgagaatctcccttcgtgcgttgcctcctgc

SEQ ID NO: 4629 - DNA, 1890 bp, Zea Mays
ctctcccgcttccgcttcccctcagccgtcacctccccgctcccaccgccaccaatcgcactcgcagtggctgttggcgtgcgctcgcgtccaaaccaagcaaaccccacaaatcctaccttccgccggcgtcgccaccggccgtgctccctccctccggccccggttgaccctagcctcgcatcaccctaaccctacccccctcccgccgctgccagagcaggggaaaaagatgccgcgcgagatcatcacgatccaggtggggcaatgcgggaaccagatcgggatggagttctggaagcagctctgcctcgagcacggcatcggcaaggacggcctcctcgaggacttcgccactcaggtctctgcttattgacctggagccgagagtgatcaatgggattcagaacagcgagtacaggaacctgtacaaccatgagaacatatttgttgctgagcacggtggtggtgccgggaacaactgggccagtgggtatcatcagggtgaacaatttgttgatgatatcatggacatggttgacagagaagctgatggaagtgatagccttgagggttttgtcctgtgccactctattgctggtggaactggttcaggtatgggttcttatctattggagacactgaatgatcgatacagtaaaaagcttgtgcagacatatagtgttttcccaaatcaggattgccgtcgagcgccttcatctatcaaatcctacgtttgcacaaacaaactctttggtctccacggttatgtctgcaagcacaactactttaaggtatcctggatatatgaacaatgatctggttggccttcttgcctccttgattcccactccaaggtgtcattttttgatgacaggttatactccgttgactgtcgagcgccaggttaacatgatacgcaaaacgacggtattggatgttatgagaagacttctgcagacaaagaatataatggtgtcatcatatgctcgaacaaaagaagctagccaggctaaatacatctccatattgaacatcattcaaggggaggtggaccctacacaggttcacgagagcctgcaaagaatacgcgaaaggaagcttgttaactttatagactgggcacctgcaagcattcaggttgctttgtcaagaaaatccccttatgttcaaacaacccacagggttagtggtctgatgttagcaaatcatacaagcatccgtcatttattcagcaaatgcctgggacaatatgaaaagctaaggaaaaagcaggcttttcttgacaactacaggaagttcccaatgtttgcggacaatgatctatctgaatttgatgaatctcgagagataatagagagcctagttgatgaatacaaggcctgcgagtcgcctgactacatcaaatggggaatggaggaccctggagaggcaaatgttgtggcggcacttgactctaagttggtagtgtaaatataaagtgttgtgcagcaatccacgcaactgaggaagtgctgtctacaatctacattcaagtcatgttggtcatccagaccaaatatgctactgtcacatctagtagtcatcagtttgacgccgcctgcttctatagatccaatcggagtgcagccaaagtgggttttgacgttatttcgacctcaaatttgcctttagtctgtgctatgtatatttcgaaacccacttcctctggcctgttttcatttctttagggctagtttggtaacaccatttttccaagggatttttattttctcaagtgaaattagttcattttcccaaacgaaaattgaaatctcttgggaaaatgttgttcgcaaactatcccttactatatttattgagaatctcccttcgtgcgttgcctcctgc

SEQ ID NO: 4630 - DNA, 2556 bp, Zea Mays
aagcaaaagcccacagaacgagtgaggccaggcgacttcatactgctcgcctcgccgtctttcccccaatctgttgctcctccaagctgcgggcgatcgccgtaccccggccgccgcagggaaccccctcgccatggccttgcaggggaagaagctcatcaacaaccccgacgatgtggtgacggagttcatcgaagggttggtggagacttacccgggtctgcagtacctcgacgggttccctcagattaaggtcgttcttcgtgctgatgtcgagcgcggttcctatgacaaagttgcagtcatctcgggtggtggaagtggccatgaaccttcccatgctggatttgttgggccagggatgttgacagctgctgtttctggagatgttttcgcctctccacctgttgattctattttagctgctattcgagctgtaactggtcccatggggtgccttctaatagtaaagaactacactggtgatagactcaattttggattagctgctgagcaggcaaaatctgaaggctataagatggagatggtcattgttggagacgattgtgcccttcctccacctagagggatagctggtagaagaggtttagctggaacaattcttgtgcataaggttgctggggccgcagcagatgctggtttatctcttgcagaggttgccgcagaagcaaaacatgcatctgaggttgttggtacgatgggagttgcactttctgtttgcacattgcctgggcaaataacttctgatcgtctaggtccaaggcaaatggagcttggccttggaattcatggagaacctggagttgctgttgttgaactccagccagttgacgtagtggtagaacatgtccttaaacagatattgtcacagattaggagccactcctatcatggaacttatgattgcagcgagaaaagcagttcctgagttgcaattggtgtatggcattgctgttgacagagtctacactggcacacttatgacatcacttgatatggcaggattatctattaccattatgaagtccggcgaaagcattttgaagagacttgatgctcccactaaagctccagcttggcctgttggttctgaaggaaaccgtccaccagcaaagtttcctgttcctctaccaccatcaccttcaatgaaggatgacgagattcttgctccatctcaggagctgagcaagcaagggtgtatcctggaggctgttattgaagcaagtgctactgaaattatcaatctcatggatagcctaaatgaatgggacagtaaagtgggcgatggtgactgtggaagcacaatgtatagaggtgcaacagctattcttgaagatatgaaaaagcgttaccctatgaatgatgcagcgggaacaataaatgaaattggggcaacaatccgaagggtgatgggtggaacaagtggaatcttgtatgccatactctgcaaggctgcgtatgcaagcttaaagcagagctcaactgtcactgcgaataaatgggctgatgctttagaggcctccattgctgctgttagcaaatatggtggtgccagcgcaggataccgcacaatgttggatgccctaattcctgcttctgctgttctgaaacagagacttgaggctggggatgatcccgtgactgctttcatcgcgtcttctgaagcagcatcagctggcgctgaatccaccaaacaaatgcaagcgaaggctggacggtcatcatacatcgctccagatctcctggcctcaatccctgatcctggtgcaatggctgcagctgcatggtacagagctgctgcccttgcagtgaagaacaaagtgcacggttcaaagagctagtagcatacgcaatgcttcattgctagacccaaaatagactgacaggaaaaatcactggggcattttctcactccccttagatttggtttccgcttgtgcttttgcatgggccgagaaaaaaaatgacttccatattgtctcacccttctcacatcatacaaagagatgttcaaagagttcgtcgtccgtacaagttaagggaagctatgcttttgcactgccgtgatatctcagcatgctgtcagtgttggaatgaccattgtttaatttgcccgagtttcgttttaatggctgagcccatgctgtcagtggtgggaatgatcgttgtttattctgcccgagtcccgtttcaattgtgcgcatttcggtaggatgtttaacaaaaaaacgttgtctttgaccgaggggtagtttgcactactgttgacttgtaatgttttttatcttgatcaatggcttgctgcatggtttctttctttctgggcaagattctcgaatggaacctaagacgtctatttatcgaggttttgcatatcatgaccaaattatcttgaggaaaacttgttactcgtacttgcctttgtatgcctgaacatctaattgtttttgtggttccgcaatttgcactttgatagcccgtaaataaaatattcaaatggagagatgcctatttaaaaaaaaagaaaagcaactg

SEQ ID NO: 4631 - DNA, 2624 bp, Zea Mays
aaaggataagctccctgtgcaagcaaaagcccacagaacgagtgaggccaggcgacttcatactgctcgcctcgccgtctttcccccaatctgttgctcctccaagctgcgggcgatcgccgtaccccggccgccgcagggaaccccctcgccatggccttgcaggggaagaagctcatcaacaaccccgacgatgtggtgacggagttcatcgaagggttggtggagacttacccgggtctgcagtacctcgacgggttccctcagattaaggtcgttcttcgtgctgatgtcgagcgcggttcctatgacaaagttgcagtcatctcgggtggtggaagtggccatgaaccttcccatgctggatttgttgggccagggatgttgacagctgctgtttctggagatgttttcgcctctccacctgttgattctattttagctgctattcgagctgtaactggtcccatggggtgccttctaatagtaaagaactacactggtgatagactcaattttggattagctgctgagcaggcaaaatctgaaggctataagatggagatggtcattgttggagacgattgtgcccttcctccacctagagggatagctggtagaagaggtttagctggaacaattcttgtgcataaggttgctggggccgcagcagatgctggtttatctcttgcagaggttgccgcagaagcaaaacatgcatctgaggttgttggtacgatgggagttgcactttctgtttgcacattgcctgggcaaataacttctgatcgtctaggtccaaggcaaatggagcttggccttggaattcatggagaacctggagttgctgttgttgaactccagccagttgacgtagtggtagaacatgtccttaaacagatattgtcacaggaaactcagtatcttcctgtcacaagaggttgcaatgctgttctcctagtgaatggattaggagccactcctatcatggaacttatgattgcagcgagaaaagcagttcctgagttgcaattggtgtatggcattgctgttgacagagtctacactggcacacttatgacatcacttgatatggcaggattatctattaccattatgaagtccggcgaaagcattttgaagagacttgatgctcccactaaagctccagcttggcctgttggttctgaaggaaaccgtccaccagcaaagtttcctgttcctctaccaccatcaccttcaatgaaggatgacgagattcttgctccatctcaggagctgagcaagcaagggtgtatcctggaggctgttattgaagcaagtgctactgaaattatcaatctcatggatagcctaaatgaatgggacagtaaagtgggcgatggtgactgtggaagcacaaggtgcaacagctattcttgaagatatgaaaaagcgttaccctatgaatgatgcagcgggaacaataaatgaaattggggcaacaatccgaagggtgatgggtggaacaagtggaatcttgtatgccatactctgcaaggctgcgtatgcaagcttaaagcagagctcaactgtcactgcgaataaatgggctgatgctttagaggcctccattgctgctgttagcaaatatggtggtgccagcgcaggataccgcacaatgttggatgccctaattcctgcttctgctgttctgaaacagagacttgaggctggggatgatcccgtgactgctttcatcgcgtcttctgaagcagcatcagctggcgctgaatccaccaaacaaatgcaagcgaaggctggacggtcatcatacatcgctccagatctcctggcctcaatccctgatcctggtgcaatggctgcagctgcatggtacagagctgctgcccttgcagtgaagaacaaagtgcacggttcaaagagctagtagcatacgcaatgcttcattgctagacccaaaatagactgacaggaaaaatcactggggcattttctcactccccttagatttggtttccgcttgtgcttttgcatgggccgagaaaaaaaatgacttccatattgtctcacccttctcacatcatacaaagagatgttcaaagagttcgtcgtccgtacaagttaagggaagctatgcttttgcactgccgtgatatctcagcatgctgtcagtgttggaatgaccattgtttaatttgcccgagtttcgttttaatggctgagcccatgctgtcagtggtgggaatgatcgttgtttattctgcccgagtcccgtttcaattgtgcgcatttcggtaggatgtttaacaaaaaaacgttgtctttgaccgaggggtagtttgcactactgttgacttgtaatgttttttatcttgatcaatggcttgctgcatggtttctttctttctgggcaagattctcgaatggaacctaagacgtctatttatcgaggttttgcatatcatgaccaaattatcttgaggaaaacttgttactcgtacttgcctttgtatgcctgaacatctaattgtttttgtggttccgcaatttgcactttgatagcccgtaaataaaatattcaaatggagagatgcctatttaaaaaaaaagaaaagcaactg

SEQ ID NO: 4632 - DNA, 2523 bp, Zea Mays
ctcgcttccccagacccctcaccggcgggcgtagctagcgtacgtccatccatccgtccatgctccaccgccaccagcccgccgttccgacaagctccaatcatacgcaccaccggaccaccctcggcaaggagggacaagctcacgcgcctcgcgccctgcccggcccgacctcgagcagatcgacacatgcacgcacgacgtagacgatacacaacagtacgcgggggcgcactgacacacgcccgcactatcatccctgtcccccgtccgtccatctccccactcgtgcgagttgcgaatttgcgatgcgccgcctgagcagaagctccaaagcctcatgatggcagcacgggccagagccagcactcgcagcagctgatccgagctcgtacaggcgcgccaggcagcacatcaatgggaggaggaggcgagaagaatcttgggagcttagcttgcaatgccgaggctgtattcggaggaaggagcaggtgctgacgaggctaccgccgctgcgacagtgaggctggccaacaagatccggaagcgccgcgcggtgtcgtcgtcggggggctcggacccggcggcggtggggaggaggctgcggtccaggcggcccgcggtgcggctgccgcggcaccggaccagcgcgggcggggacatgtcggagtcgtcccggagccggcattgccgtggcagcggcaaccgtgtcgccgaagggacgctgccgtccgcgtctgcgaggaggctcgtcgacgcgttctggcagaacatgggcagcggtggtctgcttgacggggacgcggcggcggcgcgccggagcctggtcctgtggagcggcgcctccacgaaggtgtccaagaggtcgagaagtaagagcaaggtcttggaggctgatggtaagggaagtcggcgcaacggccatcctcggtggttttcagcagatctgatgagtaacggtagtgcaatggagtgcattgcgagctatggcgatactttgaacgccttttgccaacgtagtacacaaggtggtttccatgagcttgatatggttggtaccttttctcaagacgatgtttcaagatgtcctgaaaagacagtgaacctagatgatctgcagaacagcttgattgcagctaaggagctggtaaaagtacttgcccacatatggggacctggagagctgaatccgtcaagtgcatcactcatttctgctctacgttcagagcttgatgttgcccgttctcatgttagaaagctaatcaaagaacagaaatctgatgcctttgaaattgaggacttaaagttgcaacttacagaagaattggaatcgtggaaggtcaaacaaaaggagaaggttggaaatgctctccgatttgtagtttcagagctagacactgagaagaagtcaaggaaaagagcagagaagacaaataagaagttgagcattgccttagcaaacactgaagcctctttgcaggcagtgacgaaagaacttgaaagggagaggaagtataaaagaagagttgagaagatctgcaacgagcttatcagaggcattgatgaggacaaagctgaggtgcaggcactgaagagggaaactgagaaggcacaagaagagctccagaaagagcgtgaaatgcttcaacttgcagatgagtggcgtgaacaaagggttcagatgaagcttttagaagcacgggttcaatttgaggagaaaaatgcagctgttaatcagctgcgcgatgaactccaagcttatctggatactaagaaagagcaggaaccgttgaatgatccaatggaactgtcccatgcatctgaaattggcaacactgcagctgatttagttcctgacagaaatggtggaaacatcagcgaagacgcctcagaaggcagtgatatacactccattgagctaaacgtcgatggcatcaacaggacctacacctggagctacactccttcctcaaaaggcaggcagaggagcccatcaaggcatgaaccgttttcggatagagggatggatggagtgaactcgtggcgtttagagcaaagttttcgggacatggatgaagaactggagggagactgggcagaagggtgcagcaacggaatgctgaacttggatcatgacgaggagaggtatctggctatcaagaatctgagagagcagatgttggccgggtcggggttcatcctgtcacaaggtagagaaaatgctaaaagagagtattgtggcttgtaagataaactgaacaagaaaaattaaaagtaatgtgccgtatgaatcgctgcttgatgctagatccaactgttcaaggatatatatagtgatggttctctgtggattactttccccttgtaaatatcttgagctcttgaaaggttaggttacagggctggtgtgttcatgttcatgattctgatgtcttgtatgtgtgttaatgtccatttaagtgtctggaaatagtttataaaacgtgattggaaatataacacaaaaagaaaacattggtatga

SEQ ID NO: 4633 - DNA, 1583 bp, Zea Mays
cgcgaacgcgacgtccgtccacctcggcccccgctggtttgcgttcgcgcagtgactgaccacgcggccgtgcgggcgcgagacgggaccagtgagtcagtgaccaccacgcgctcgtggctaccggcttcgctcccagatcccgccgcgcgcgcgagccccgaggactgaccatggaggagcccacggagtccaggccagctggcgcggaggatctcgcgaacggcgcgaaagacccggaggggcctccgccggaggttgaggaggaggaagtggaggagccgccacgatcggcgacggcgaagcaggaggaggcgaaggaggtactagggtcggaggggtctcgcccgttcaccatgcgggagctgctcggcgaactcagggaggacggcgagacggcggtcggcggcagcaccgcgagatctgcgttcggcgacgggaacggggtcggatccgctgatgccgagggctcgtcctacagccaagatagcgcacagttttcatcacaccatgatgtagcgatggacttgataaatagtgtaactggagttgacgaggaaggacgttctcgccaaaggattctttcttttgctgctaaaagatacgtaaatgcaattgaaagtaatcctgacgaccctgatgcatattataattgggctctagtcctccaggagagcgcagacaatgtggatcccaattcgagttcctctaaagatgcattgctggaggaggcttgcaaaaagtatgctgaagctactcgacttagtccaactctttatgatgcatattataactgggctattgctattgctgatcgggctaaaatgcgaggtcggacaaaagaagccgaagaactctggaagcaggcaatactgaattatgagaaggctgtccagcttaattggaatagcccacaggctctcaataactggggtcttgggctacaggagctgagtgcaattgttcctgcccgggataaacagaccatcataaaaacagctatcagtaagttccgtgctgcaattcagctgcaatttgatttccatcgggcaatatacaacctcggaactgtcttgtatggtttagctgaggataccatgagatctgggaagccagatgtctccccaaatgagctttacagtcagtctgctatctatgttgcagctgctcatgctctgaagccaaattactcggtctatcgtagtgccttgcgactagtccgctcaatgttgcctctgccatatctcaaagtggggtatttgactgctcctccagctaacaattccatcgcaccacacggggattgggaggtatcacagttcattttgaatcatgagggcctccagcaggctgatgcttctgaccagcctccatcgcaatcccctgggcatttggacaggggcagaaagcctgtcagaataaacgttgcagatattgtttcagtgtcagcatgtgccgatttaactttaccaagtggtgctggcctctgtatagaaactattcatggtcctacgttcttgggagtagaaaactcagccatcgcacgaaacctacaagcaaagaatggggttgtttggttgggg

SEQ ID NO: 4634 - DNA, 1650 bp, Zea Mays
gccttttcccccctactctgtgcacacactcgagagtcgagactcagttgtcaccgctccccgccgtcctgctgataagattgctcacatctgctccctccccagacagcaagtgaagaatcaggttgtagaaattgtattgggtttagggttggagcagggtgttttcagaaaaaaaagaataggagagggggagggttaaatcgcgaatttctctgcttgcttgagaccacagcagtcgcaagtcgcaagtcgcaagtcccaactcaggtcaggtgaggggtaggtgaagtgggaaggcgcgcggaggggaggggaggagaggaggatggctgcagccgcggggaggaaggtggcggtcgccgccgtgcagttcgcctgcaccgacgtcgaggcggagaacgtcgccaccgccgagaggttgattagagaagcacacaagaaaggtgcaaagattgtactcgttcaggaattgtttgaggggcactatttctgccaagctcaaagactggatttctttcggcgcgctaagccttacaaaggcaatccaactattataagcttgcaaaggagctggaagttgtcatacctgtcagttttttcgaagaagcaaacaatgcacattataattcggtggctattatcgatgctgatggcgctgatcttggactctatcgcaaatcacacattccagatggaccaggatatcaagagaagttttatttcaaccccggtgacactggctttaaggctttcaaaaccaagtatgccaccattggtgttggaatctgctgggatcagtggtttccagagtgtgcaagagcaatggcacttctgggggctgaaatactgttttatcccactgcaattggatccgaaccccaggattgtaacctggattcccgtgaacattggaagcgggttatgcaaggccatgctggtgccaacttggtccctcttgttgcttccaaccggattggcagagaaactgttgacactgagcatggcaagagctcgataaccttctatgggaattccttcattgcaggaccaaccggagaaatagtgaagcttgctaacgacaaagacgaggaagtgctggtggcagagtttgacttggatgagatcaagtcgattaggcatggttgggggatattcagggaccggcgccctgaactatacaaagtgctactgacgttggatggcgagaaacaatcataaaccccggtctcacgcttaatagtggtaaggcacaggcaggctccagctccacatcaatgttagattttttttttctccttttttaccctgtccaacgatgccatgcctgcatttgtacaagccatctgcgcgtgttcaccatttcacattcagcaaaataaataattttcgtgcaatgtcattctatgtcgggggagaatttagagctccagttcatgactgcatcaatggttcctcgttaaactttgatttatgggtagcattggtctatcaaagtaggaaggtcatacctggcagaaggtgcggaatcagcatatttgattccaaatgccattcacgatggtcgatggcctttaaccgtcaaccatccactacctttggcatgtgacatgtacctttttttccatcaaaaagctcaggattcttgtg

SEQ ID NO: 4635 - DNA, 2174 bp, Zea Mays
ggacctgtcatcgttctctcccccagcctattgcctcgtttccatggcggccaccgcctccaacccgttcccgttcccctcccgtcgctcgccggaagatagcctcttctacgccgtctacccgatactactccccagccaccttcccgcgcccgcactccacgcctcgctccagtccctccacctctccctcctctcgcacctcgcccccttcctatcctcccatctcttccaccgggatcccttcacgctcaccctcccggcggacccggccgccccctgcgcgctttgcgcctcgccgcccgtgccccacctccacggcgcgctccgtttcggcgactccctccccgacgaatggatcgccgtttccctcctcttcgcgctcacccgcgccttccccgacatcgcggcccgcgcctgggactccgacggggagttcctcctcatcgaggccgccttcgcgctcccacggtggctcgacccggaatccgcccccaatcgcgtcttcatcttccgcggggagctccacatcctgccgccctccctcttccccgagacgccgtccctggaagccgcccttgccgccatctacgacgattccatcgacacccgcgctgccgacgccatccaggcagccatacagcgccgtatcgctgggctgcccgagaaggcggcggagaacctacacacagcacgcgttatcgtcccggcgcccgtggcaaaggtgctcaaggaggagccatgcctgatcgcgcgtgccatcgagggtttctacgaccgggacattgacaccatgaaacatgcggcgaggatggaaaaattcctcaaagggcctggtggggaagggattgagatagtgagaaccacagtacgcatgacgcgggcaatgtacgcacagcttgtgcagcagaactttcaggctcccagggggtacccgatgcctaggagggaggaggggccagagaaatggatggaggcagagctggggatgaagattgcctgtgggttcgagatgatgtatcaggagaggaaacggcagggcgaggaaggtaaatgtagcacgtgggatgtttacaggaagagtttggaggcaactgggtgcttggacgggctgtatcctgggtcaattgagtataagagggtcattgaagatgcaatgcaatattacaagagctctaatttgtattcccgaacaagggagatactgagtgaaccagtgcggcgaattgatgaaatcctatcaatgctgtactcaactgatgaatttaaagaaagaactggaagagcatgaagctgcgaagaagcaaagaagtcaaaagcaaagtgtccctagcagttcaaaatcccagacagacaagtttaagcttggagagattacagagtccatgcaagaattcattcgcaaaatgtccagctttgagggagccgagattcctgcagacaggagagatactgaatcagtggacctagatgtcaaccagttcttcaaggccataaaatcagttttaggtggaggttcacaagagcaagctgacagtgatgatggatttgatagaaaatcctcattgtcggacatggactttgatgattctgatgaagacgacgattttgctgaagaattaggtgacaaggatgcagatgattcttttatggaatcatattcagatgctttaaataaagagctaagcagtaccactcttgagaaaagctttgctcatgcaccacgaccggaaactaacaatgagggtccatcagatgatgcagctactggtgcagagatgactccagttgatgtagatctgaaccttgtcgagagtattctgaactcgtactcctcgcaacaaggtcttcccggtccggcttccagtctgctaggactcatgggcataaaggtccctccagatgtcaaaaagatgtgatttttgtattctagtgtacacgtgacatcttgtgaagctgggatatataggaaaaacttatcttccgttccatacctgggcggtatttgttgtgatagtacagggttgttttcttgcttttaagcaattacatttaggtcggaatattttggggtccatatgttaggtttggttggcaattaaatttaggcaggaatattttggcctacctatgttatagggttagagcaactcaacaataactaaaaagccttc

SEQ ID NO: 4636 - DNA, 2200 bp, Zea Mays
gtggctggctgtgtcctccatcctttcaaggacctcgggaatccagaaaattccggtggtcggtgcccacggacaggcgtgtgcgccacgagcccgacgaacaagggaacgaggccatttccaccggtcaaactaggagaagcaagcaaagctccccgccattagtagaatccgcccgaagtctgccccgctcttcggcctcgtcccttctctccagggccatggatgtagatgatgtgctcagtaacttgcgtgttgttggtgtgccaacaaagagtgcaatttacatatggggttataaccacagtggccagactgcccgaaagggcaaggaatgccacttgaggatccccaagagcctccctcccaaactattcaaattggggaatgggaagagcctcaggtggaccgatattgcatgtggccgtgagcataccgctgcagttgcttccgatggatcactgttcacctggggtgctaatgagtttggccagttgggagatgggacagaggacagcgcgaaagagcccaagaaggtcaagtcattggagactgagtttgtaaaatcagtatcctgtggcgcacattgtacagctgccgtcgctgagcctcgagaaaacgatggcacggtatcgaaaagcaggctttgggtttggggacaaaatcagggttcagattaccctcgtctattttggggagctttcacaccaaacacggtgattaagcaagtttcttgtggagctgttcatgtcatggctctatccgaggatggtctactgcaagcatggggctacaatgagtatggtcagcttggcagaggtcgcacttctcaaggacttcagggagctcgtgtgttaaatgcttatgcaaggttccttgatgacgcccccgagcaagtgaagattgttagagtgtcatgtggagagtaccatacagcagctatatctgaaaatggggaggtgtaagtccattagtcatcccaagggagctgttctctgctgccagtgactgttgtatacttggggactgggaagcatggggcagcttgggcattgctccctccaatctggagataatgagctgatccctaggcgagttgtggcccttgatggtatagtagttggggacgtttcttgtggaggtgtccactcttgtgctgtaactgaagggggagctctatatgcctggggcggaggacatgtgggtcagctgggagtcgggcctcagggtggcttcttctcttgctcccttaatggatccgacatgctgctccgaaacatcccagtcctggtgataccctcaggtgttcgtcttgctacctgtgggcactcccacacacttgtgtctatgaaagatggccgcatatatgggtggggctataatagttacggtcaagcgacgaacgagaaatctacttatgcttggtttccctctccggtcgattggtgtgttggtgaagtgagacgactcgccgctggaggtggccattctgctgttctgactgatgcatgttcgctgaaagagctgtgcgaattcaagctcgcagagaccgtgaacctttcaaatgctcagctaatagaagatgttgcatcgcggactggtgcggatgccttggcacgcttgtgcgagaaagtaagggagcatttggataaggaaggagaatgtgaattcctggaaaagcaagtggcagaagaggtcaacactataggcagttaggccactagcaaaacagttcaagcagtctgaggctgaagccagtctgggattaaacagggagtcatctacaattgatagcttgacctcccagtaaagttactgattcggacattaattgttgtggtgatcatggaaaatatgtgactcgtcaattgattctgattggtctgtagacctccattggtggtgagcctctcagctgcatcggggaggcgcagaggctctatatgtgtcatgatcttgttccgaactgtcaggttgctgtaatgtagccaaatggaaacctttgtatccctggaacttgaaaggcatgtacctggtatctgcagccagtaagtttggcaatctgaattcgatgccaattcctgggcgtattcgaacgtcctacgtccatgtatttatttcagttcatgtgcatctaaacaatattggtatagcatgaaatttaagtacatcaacacacatttaataggattaacagaat

SEQ ID NO: 4637 - DNA, 1626 bp, Zea Mays
cccatgcccacaaagcctttccacacaaacacaacgacgatatatgcaccttgagctttccaccccataaagacgagccagcagggccagacacttggtagtgtgtgtgtgcgtgtgacaccttaattagcttgcttggccaggcattcactgatcgatggcactactggtcaagagccaccagcaaatgttggtctcctcctccaccacctcctcgtcgtccccttcgtcggcgtcccagcagcggcacccgccgccacctcctcctccctcctcctcctgcctcaccgaccagcaacagccgtccccagccaagcgcaagaggcgccctcccggcacgccggaccccgatgcggaggtggtggcgctgtcgccgcggacgctgctggagtcggaccgctggtacaggcgttggcggcggcggcggcggcccccggaagcgcgtgttcgtgtgccccgagccgagctgcctccaccacgaccccgcccacgcgctgggcgacctggtgggcatcaagaagcacttccggcgcaagcacggcgggcggcggcagtgggtgtgcgcccgctgcgccaagggctacgccgtgcagtccgactacaaggcgcacctcaagacctgcggcacccgcggccactcctgcgactgcggccgcgtcttctcacgggtggagagctttatcgagcaccaggacgcgtgcaactccagccggatacgcggcgaggccgtggcggtagccgtgccggcgccgccgtcggcgctcccggtcatccgccccgccgtcccgcggcaccagcccacggtggcaccggcaccgccgccaccggagctccagctcctccccgcctccgcggcggcatcagcgccgctggctagcacaccgaccgcctctctgtccaccaccacaaacgcgtcacaggagcaagaaccccacgcggcggcggcggcgacgacgacgacgaagctgcagctctccatcggccccaccgtcatcgcgccgggcgccgacgctgctgcggcgaccgcctccgccgtcggcgaggaggacgactccgaggcgaaggagctgcggcgcgcgatgaaggagaaggccgcagcggacgcggcgcgggcgcgggcgcgcggggaggccgccgcggcggagcgcgcgctggacgaggcccgccgcgccaggcagcgcgcccgggccgacctcgagaaggcgtgcgcgctgcgggaccacgccgcgcgcctgctcgcgcaggtcacctgccacgcgtgccgccagcgctcgctcgccgtggccggcggccccgcggtggcctgcgactccattatcaggggaggaggaggagaagcaggcatctagctccaccacccgtgctcgtgtgcatgcattgcatataccgtatgcactgccttgtagatctagctaagctaattcgtaatgtaggacggccttgtcggtcgtgtcgtgtggccattactgcattgaatgcaaccatatgcgcccgcttggtttctactttctagggtgctacaagttgcaacgttgtttggcctagtaaaagtatgaatgagatcatgcacgtcaaaataacctcaaaggcaaaggctgatttgatgaccaacgatcacgggttaaa

SEQ ID NO: 4638 - DNA, 1393 bp, Zea Mays
tgccggaccggacaccgtcgagcgtctgcaccgcacctgcctgctcgcttcgagtctttactgctgtcacccgttcccatctggctgtctacctggtcgaccctgtggtttacaacatgctacatgaagatcctggcaatgtaagttactcagctgtaggtgggttgtcagatcaaataagggaactcagagaatccattgaattacctcttatgaacccagaattgtttctccgtgtcgggattaaaccgccgaagggcgtgctgctctacggtccacctggaactgggaagacgctcctagctagagccattgctagcaacattgatgctaattttttgaaggtggtgtcaagtgctatcattgataaatacattggtgaaagtgcacgcttaattcgtgaaatgtttaactatgcacgtgagcatcagccatgcatcattttcatggatgaaattgatgccattggtggccgaagatttagtgagggcacaagtgcagatcgtgagattcagaggacattgatggagcttctaaatcagttagatggattcgatgagcttgggaaggtgaaaatgatcatggcaaccaaccggcctgatgttttggatcctgcactccttcgacctggtcggttggacaggaagatcgagatcccactgccgaatgaacaagggaggatggaggtcctcaagattcatgcagctggcatcgcaaagcatggggagattgactatgaagctgtagtcaaactagctgagggcttcaatggagccgatatgcgcaacttgtgcacagaagccggcatggctgctatccgagcggagcgtgactatgtcattcacgaggacttcatgaaggctgtgcgcaagctgaatgatgccaagaagctcgagtccagtgcgcactacagtgctgacttcggcaaggattgaacggggtatcagtgtatcacctgatccggagctgttctgatcatattgcaaactgtgttaggctgtattcatcttatcctggatggaagaactctcatccagacgccctgggagcaagagcaagcaaactcttgatttttctaaattctatctgatatctgatagattccaggatggttgtggagggaaatttggcagttggatagattccaggatggatgtggagggacatctggcagttgggtcatggatgtagtctgtagacgtccaaattcatgtgaagctcttgttcttgctttttatctctcaatacagggtgcgttcttttgcttatggtatggatacatactcctttacattattttaggatatgaaaaaaaaatcaaagaaggctatttttaatatatattattatattatcatagtagtttataaaattagaaagaattcatctgaaa

SEQ ID NO: 4639 - DNA, 2044 bp, Zea Mays
cgaggccacaagcccacaaccaagccgcaatgtaaaaaatctgccgcaatagaacgaacaccagaacagaaccgcagaacgcaaccgccttcagccttctcccatcccacggacgagcgccacacggcaccccactgcgaggcaatcgccaacccgcactgcaccactcgcgcctcgcgatcaccgctccgaactggaaatcaaatggcgccgtcgccgctgtgttccgcttccccacggccgcttcgagccccaggccagcctccccgagacgtccgctcgccgcggacggtcgtcgtggccgcgggcacccgtgtgagcggagcggaggcccgcgcgtcgctggtgctggccttggcctcgcatgcgctctccgcctcgcagcgccgcttcgccgagctcgccgatgaggccgccaagtacgccttcccgtctggccgcttcgagccccgcaccctcgaggaggccctcatgtccgtgcctgatctcgagacagttccgtttcgcgtactgaagcgcgaggcagagtacgagatcagagaagtggagtcatacttcgttgctgaaacgacgatgcccggaagatctgggttcgatttcaacgggtcatctcagtcgttcaacgtgctggcatcatatttattcgaatactgcctctgagcaaatggaaatgacaacacctgtttttactcggaagggtgagtcaaacggccaatcaatggacatgacgaccccagtgataacaaaaaagtcagctggtacaaataaatggaaaatgtcatttgtgatgccagcgaagtatggttccaatttgcctcgcccaaaagatccttctgtgattatcaaggaggtgcccagcaaaatagttgccgttgcagccttttcaggtccataatattgtacttctgtcatacccatttcatagctgtatgtgattaagaagctatatattcagagtcaagtacataatttataggtacaaaattttaaatcttttttcagtatttgtaatgaaaaaaaacagaaatactctgtatcaattttctgtgccttttcttctgttgattactcaagatcctttttgctgcagaaatcataatgatagataattaatctactgaaacatttgtatggagcgtaccgttttttatcactaaccacatgccttttgtttttagtcaggaaatagtttagaacgataggagttgttgtgttccttcccaattcaaaacaccaacacgatctctaatatagaattactttcatgatgacacagatcaaaccagattttctcaagttgttattttgaaatgattaatgagctctatgtatttaccatttgtcttacagagtagccattacaattcttttttgttcacaatataataaaagcatataagaactcttttaacttcaaattttattggctggagaaagttttcacaacaataagcatctcatttgtttttaatattctgatgctacaatattgagacgcttagctctctgctaaatgaaccatttctcttcattctttgttggttcattggatatggtcagttatgaagtcatattgatactggcgtgcaatctttgtcaaccatggtaccattgtcatagtccacactcctttgtgtccgtacaggtttggttactgatgatgatataaaccagagggagtctaaattgcgcgaatctctccgtaaagataccacatttagagtgaaagatgattcggtggtggaagtcgcacagtacaatccaccgttcacacttccattcacaaggagaaatgaaatagcattggaggttgagaggaacgatatagccttatgatgtcctagattaacaaataaattattggcatttgagagtgtatgcaaatgcccatcgtccctaatgcatatatgtataatttctatctggcatgttctgtatatatgtagacatgttaattatcgcatgcatatattattgtattggaaactaaataataagagcaaaaaatgttgtgcgttcgagcccgcgcagggtcgggctggag

SEQ ID NO: 4640 - DNA, 1922 bp, Zea Mays
ctaacattccagctcccgcgccgctctaccgtcgtcgcttgagctctctcgctggcggaccgcccccctcatccctgcggtcacgcgcgacctccatgacctccaccgctgcaggtgcaggaagcggtagcttgaaccctccgcattcgaaccctagcggcgatggcggccctaggatccggtcgccgccggggaaagggaataagcccgtcgctctcgccgacatcactaacactgggaagcccaacgccgccagatccatcaccgtccccgacctcgttaaggagaacaccaagttgctgactctgctcaacgagaagacaaagattattgacctcagcagggttgagatatacaagctccgtcttgccctgcaagcatcaaagcaacagaatctacaccttacacaaaccaattcgcagatgcttgcggaaataaacacagggaaagatcgtattaagatgctgcagcatgagctttcttgtacaacagcactgcttaaagtaaaggattcagagcttgatagaaagaaaaacgctggtaatgtacagcagaagggagtaaaatctcaggtcttgaaaaccaaagcttccacagtagcagtagaggctcaccacgttggtgactcagtaaccagtggtgttgaacaccatgtggttgaatctcaatctgccgtatcatcaaatactgtctgccaggagccaccacaagatggaaagcaaaagagaatgcctcaacggagaaggtcttcaagactgaaccaaggttcctgtgagatcaggggagtatctcagaacacactgcatgagaaccctgtagtgcctgtagctccttccactttaagtcttgagaaacagtatggacaaaccactggaaaacatatgaagtcactgcaaaatgagtgcagtgcaactgtgcatgaagtaataatggcttcagaattcgagaaaactgagataaatgagctaccacaaaaaacagatctgaaggagataccagaagcatgttccagtgaaactgaagttcagtctcataaaattggtgataaggccttcaacagtaaacaaaaccatttgacaggaagccaatcatctttgtcattcaataccgttgacacccccgagccaccagaagacaacactgtcaagcggtgctcaaaaaaacggtcatccatagaggatgtaaatgccaaactagacacgattaccagtgagccattgcgacatgaagaaaagagaaaatctcgaaggaaaatatctgcaagactgaattcagtatcttctgagcacacagatatcgttgttgagactgagcacaaagatgttattgtttctttggccggttccacttcaaatgtctcaatggagcagcggacaaatcaagagcaggatggtgattgtttctcaaggaaatccaatgaaaatcagatattagggaggaggtctctaagacgagctgctgaaaaggtcgtctcttacaaggagatgcccttgaatgttaagatgcgacgaccttaactgccaggaggatgaccatggtgacatgttgtagcttgctgtcctgactagccttaagcaggtatccttctgtttttttgtgtgctccagaatcagtgattgcttgcacatctcgttctacttcaaacgaaccaccaaacagtggcgaagctagagcaaacttgaaggttgtacaattgttttgtgggtgcatagacatcatgtgatcgttgtgtatgtaagatgaaagtttgttctttataattagttctgcactttttagactccaacagcgaactcgttaaatataggggttggtcagctcctttctcttttcaacaagagactgtaaaaagtctgtaatacctaaaattctattttaggaaatgtcttctaaaaatgggttccccactttattctttttgt

SEQ ID NO: 4641 - DNA, 1376 bp, Zea Mays
ggttttttttttcccgcgcgcagcacgggcttgcctgctagtcccacaagccgccggcaccggcgcacggggagcagaggcagagcagcgctcgccgcagcaagcgtgccctgcacacaacagaccagccaacgctccagcggcagacgacggcagcaggtccggccaccttccgcgcctcgccccggccagtggcgttcacgccttccgccatgaaggccgccgcggtccactccgtcccgccgccgtccgccgtgacacttgtgtcagtggtggcgcggcgcgcgctggtgccggcggccctgcgcggcaacgcgcggcgtggcgcggcgctggtggcgtccgccgcgcccgatggccagatgaggaggagcccgggcccggcagtggcgaagttgaccgacgtgatgtcgcgccccgtgcaggtggccacgccggggcagcggctctcggaggtggacgacgccttcttcgccgcgcggcagtactccggcctgctgcccgtggtcgacgacgacggcaggtgcgttggcgtgatctccaacaaggacaaggccaaggcgcccaatgggatggagtcaactgtagctgaagtcatgacatctcctgcgataacgctgacactctacaagactgtcttgggtaaacaagctgcagcgctgatgctcaaggagaaggttcacaggataccggttgtgaatgagcagcagcacgtgatcggaatcgtgactcgctccgacgtgttccaggctcttgaggccaccagcaaagcatgggagtgagtcagtgaggtacggtaggcttgttctcgccagatgttaccccctttatttgtgtagtgatctcagcagagagtatagttatgctaccaatatggcgagaagaggacagaaaaagctaggtgtttatactggaatcgctgcaatacaagacaaataatggtgtaaatttatggagttactgaaacttatacgggctgattggttcgccggccgcgctaagccgggcgggtgcgagcctggccagccaggtaaccaaacatgtgattgcataaagtcaatgcatacgatggctcaggattaaatggtgcgggtaaccaatcacatggataaagaaggtatttatgaaggatgacgaactgttcgtcactacatgtaacacacaatagatagaatagattgtatgtcctttaggatttagacatgtacaagatacatcactatcggaattcggctctttgccgagtgtcaaatgttttatcgagtgttttttattttcgccactcggcaaaaaaagtgtcaaatgttctttaggttttgtaagagtttttcgacaaaaaataaataaataaaataaaagaaagtctttcaatccat

SEQ ID NO: 4642 - DNA, 1568 bp, Zea Mays
cagttggtagccacgcgcacggggacggggttctccctttgctgtcgcccccgcctccgattccgcgatgataacccaccatccctccctgatccgcccatctgtcctcaccctccgtgccgacgtcctccgtcggcgcccaacactgcacgccgtcgcctccgcgccgcctccccgattgtggtctttgcgcgccaccaccggtggaacttcgcccgtcagtggcgatggaggcaaacgcgctgtgccgcttcccacgcgtgggcccgccctgctcggcttcgtgcgtagcaacttcctcccgcttgctctcattggtgggatcatattgggtcttctagatcctactcttggatgccttgcacacaaatactccctgtcaaagtacagcacttttgggatattcgttatctcaggactgaccctgcgcactagggagcttggtgcagcgttagaagcttggcctgctggactatatggactaggatctattttgctgtttacaccctttcttgctcagtttattatgcaagttcagttcttcccccctgaatttatcactgggttagctatgttttgctgcatgccaacaacactatcaagtggagtcacactaacacagcttgttggtggtaactctgcacttgctcttgcaatgacagttgcatccaatttacttggcattataatttgttggagggggggcctctacagactgcagccgccgcgtgatggagggggagcagctcacgctcgagcagagggccgccggtactgttcatctgcatgaatagtaccacgtctccccagccaacagcccgacggcgcccaagcgtcggagttctggtcctggacccgaaacctaccactcgtgctacctccgtaaccctagatccataacaaatagttagataagtttgactcagggcaaagctaaatcgacttaaaatctgaaacttgctgagtattttttattagtaatttttaataaagtaatttctgatcaaaggcttgctccagtgaaatgaactacacctttaatttcaaacgttcggttcactgtctagattatgaatgagccttttttctatgtacaaataatttattgaaaggtgaaaaaacattctatgctgagcaatctggtcattcttctttgtgatcatggaatcaggtacctctttctcttgcaaaatacattagcaatggtgttggggtttccttgcctactgagcaattattcaaaagtcttgtcaccagccttctaatccctcttattatagggaaggttgctcgagaaacctcaaaaggtattgctgattttgttgatggaaatcgacaaggcttttcagttgcaagtgctgttctcctcagcctagtatgtctctaatttgaacatatgccagttgacatgttatttacttgctctgtagctcccttgatttgtccttcagcatgtcatgcttttgggtccatatatatagtgcttcactgcttccagcccaattacccatcccttttggcgaagcgggtacaagagggaaactgatgcatgcataaacctatcctga

SEQ ID NO: 4643 - DNA, 2188 bp, Zea Mays
gtccggttttcagttggtagccacgcgcacggggacggggttctccctttgctgtcgcccccgcctccgattccgcgatgataacccaccatccctccctgatccgcccatctgtcctcaccctccgtgccgacgtcctccgtcggcgcccaacactgcacgccgtcgcctccgcgccgcctccccgattgtggtctttgcgcgccaccaccggtggaacttcgcccgtcagtggcgatggaggcaaacgcgctgtgccgcttcccacgcgtgggcccgccctgctcggcttcgtgcgtagcaacttcctcccgcttgctctcattggtgggatcatattgggtcttctagatcctactcttggatgccttgcacacaaatactccctgtcaaagtacagcacttttgggatattcgttatctcaggactgaccctgcgcactagggagcttggtgcagcgttagaagcttggcctgctggactatatggactagtatgaccttatgtttgttctgtggctgccagacttagggcatgtttggtttgtggctaaatgtgccacactttgcctaaggttagtcattcaaattgaataactaaccttgggcaaaaaagttaggcaaagtgtggcaattgaggcaacaaaccaaacatgcccttacctattctaatatcattctgtggcacaactataagtatgttggaataaagttctcactgccgtttgatccaaggcataattcaaggaaattccatgccattgattttctggcatttatttcttaccaggagtgctaattgcctttctgattatttttttcagttcctatacttctattggtcatcaatggagcacccagcacctgcaataagtttgctaatgtattatattattgtatataattgcagggatctattttgctgtttacaccctttcttgctcagtttattatgcaagttcagttcttcccccctgaatttatcactggtatatgggtcaagcacatgcctgcttttcatgatggattttctgtcttcattccaccattttttgttgccatcgattaactcatacttttgtgctccttatagcttgtttttttggcatcttacagggttagctatgttttgctgcatgccaacaacactatcaagtggagtcacactaacacagcttgttggtggtaactctgcacttgctcttgcaatgacagttgcatccaatttacttggcattataatttgttggagggggggcctctacagactgcagccgccgcgtgatggagggggagcagctcacgctcgagcagagggccgccggtactgttcatctgcatgaatagtaccacgtctccccagccaacagcccgacggcgcccaagcgtcggagttctggtcctggacccgaaacctaccactcgtgctacctccgtaaccctagatccataacaaatagttagataagtttgactcagggcaaagctaaatcgacttaaaatctgaaacttgctgagtattttttattagtaatttttaataaagtaatttctgatcaaaggcttgctccagtgaaatgaactacacctttaatttcaaacgttcggttcactgtctagattatgaatgagccttttttctatgtacaaataatttattgaaaggtgaaaaaacattctatgctgagcaatctggtcattcttctttgtgatcatggaatcaggtacctctttctcttgcaaaatacattagcaatggtgttggggtttccttgcctactgagcaattattcaaaagtcttgtcaccagccttctaatccctcttattatagggaagactatagtgccatcttgaaatatctgaagcttcctggagacacttatgatggcttgttctttgtcaggttgctcgagaaacctcaaaaggtattgctgattttgttgatggaaatcgacaaggcttttcagttgcaagtgctgttctcctcagcctagtatgtctctaatttgaacatatgccagttgacatgttatttacttgctctgtagctcccttgatttgtccttcagcatgtcatgcttttgggtccatatatatagtgcttcactgcttccagcccaattacccatcccttttggcgaagcgggtacaagagggaaactgatgcatgcataaacctatcctga

SEQ ID NO: 4644 - DNA, 2466 bp, Zea Mays
cagttggtagccacgcgcacggggacggggttctccctttgctgtcgcccccgcctccgattccgcgatgataacccaccatccctccctgatccgcccatctgtcctcaccctccgtgccgacgtcctccgtcggcgcccaacactgcacgccgtcgcctccgcgccgcctccccgattgtggtctttgcgcgccaccaccggtggaacttcgcccgtcagtggcgatggaggcaaacgcgctgtgccgcttcccacgcgtgggcccgccctgctcggcttcgtgcgtagcaacttcctcccgcttgctctcattggtgggatcatattgggtcttctagatcctactcttggatgccttgcacacaaatactccctgtcaaagtacagcacttttgggatattcgttatctcaggactgaccctgcgcactagggagcttggtgcagcgttagaagcttggcctgctggactatatggactagtatgaccttatgtttgttctgtggctgccagacttagggcatgtttggtttgtggctaaatgtgccacactttgcctaaggttagtcattcaaattgaataactaaccttgggcaaaaaagttaggcaaagtgtggcaattgaggcaacaaaccaaacatgcccttacctattctaatatcattctgtggcacaactataagtatgttggaataaagttctcactgccgtttgatccaaggcataattcaaggaaattccatgccattgattttctggcatttatttcttaccaggagtgctaattgcctttctgattatttttttcagttcctatacttctattggtcatcaatggagcacccagcacctgcaataagtttgctaatggttagctatgttttgctgcatgccaacaacactatcaagtggagtcacactaacacagcttgttggtggtaactctgcacttgctcttgcaatgacagttgcatccaatttacttggcattataattgtacctctttctcttgcaaaatacattagcaatggtgttggggtttccttgcctactgagcaattattcaaaagtcttgtcaccagccttctaatccctcttattatagggaaggtatgtggttattcatatctttgtactccatgccataccttactatttcatttcaatacaataatactgcacccattatgttcagatctcctttcagtttaatctttggatgtaaaaacaacagggcttattctgaatctcatgtaactacctttcatggggcctgtttgtttcggcttctggcagcttctggtcaccaaaagctgctgcggactgccaaacgctcagcttttaagacagcttctataaaattcgttggggcaaaaaccatccaaaatcaacataaacacataatcagttgagtcattgtgatagtaggaatccgtcactttctagatcctgagccctatgaacaactttatcttcctccacacgtaatcgtaatgatactcagattctcctcacagccagattctccccacagctagattttcagaaaagctgatcagaaaaaagctgaaccaaacaggcctatgatcaactgataagcatgatttgtttgtcgaatgtttaggagcacaatttaggcaagtattcatttcttttagtagattatcagccatgaaccacctaactacaatatatataaataaaaaactcgacctgtggggctaagacaccccccatgacattatattaagaaacacagatcgagaaaccccctcgaacccctgtcccacccagacacagcggcaccgtagcctgaccgaggccggaccttggacctgtgctttggtgtgggacagatgagaggacttttttaaccacaactaaaattcgctctcacggaaagtcgaacccaggacctaaggagtgctactcggaccacctaatcaactcaactagatgccctttcacatctgactacaatatgcaaagtataatttgaactcctctaccctaagtgcttataatgttctgtttattttgaatttagtccctctgtttcttaaacaagaaataattaaattcaccatatatcccccatgttttccttaaagactatagtgccatcttgaaatatctgaagcttcctggagacacttatgatggcttgttctttgtcaggttgctcgagaaacctcaaaaggtattgctgattttgttgatggaaatcgacaaggcttttcagttgcaagtgctgttctcctcagcctagtatgtctctaatttgaacatatgccagttgacatgttatttacttgctctgtagctcccttgatttgtccttcagcatgtcatgcttttgggtccatatatatagtgcttcactgcttccagcccaattacccatcccttttggcgaagcgggtacaagagggaaactgatgcatgcataaacctatcctga

SEQ ID NO: 4645 - DNA, 3002 bp, Zea Mays
ctgccgaaccgccgcctggttccctcctccgctgcctgcttgccgctggcctggttccctcctcagcagcggcgggagccattgctcccacgcgagccttgcactgcaaaacacgggaggaaaagaaatccagaacctaccaaacagcaaagtgggtagaggcaaggcaagaaaaggatgcggttatctactcccgctcgcacatgcttcccatccaccttgccgccttcgcaactaccgcctctgctgctgctgccgtctcggccaccccaccgtctcgcgtccgccctctctccccgctcggcgccgcggcgccgcgggctcccttcccctcctccgcccgtggtctccgccatgcgccagcgcggtcgccgcagggccgcgctccctccggccgctgccggcggcggcggcggcggggagctcgctgcccccgattcccaggagaagagaggtggtacagacctcaagacactagctacaaggttttggaaagtcgctgccccctactggtggtcagaggataaaactcaagcaaggctgaggcttgctgctgtgtttgctctcacattaggaaccacagggattagtgttggatttaacttcctcggccgtgacttctacaatgctcttgctgataaggatcaagagaagtttaccacacaactgctctactatctgggtgcctttgctggaggaattccgttctttgtcttgagagactatgcaagagaaactctttctttgcgatggcgatcttggatgacaagttattatatgaagcgttactttaaaaacagaactttttacaagattcaatctcaatcaataattgacaatccagaccaaaggataaatgatgatctcagcgcattcactggaacggcacttgcattctctctcacacttttcaatgctgctgtggacttggtatcattcagcaacatcctctatggaatctatccaccattgtttattgttcttgttgtgtactctcttgggggtactgctattagtgtcttccttggtaagaatttggtcaacttgaatttcatgcaagagaagaaagaagctgattttcgttacggacttgtccgtgttagagaaaatgcggaatcgattgctttttatggtggtgaggaaaatgagttacaacttttattggatcggttcaggagggcttttgagaacctaagtgaattgctgatagcttctcggaatctggagtttttcaccaatggttatcgatatttaattcagattctgccagctgcagttgttgctccaatgtacttctcagggaaaattgagtttggagtaataaaccaatcggtgtctgctttcaatcatattcttagtgatttctctctcattgttttccaatttcagtcaattagtgcattctcagcagtcatcgatcgtctaggtgagtttgatgatctattggatggaaacgagtcctctcaatcatctcaacgtgatagcattgatgggatcaacattgttttcaaaagcagtggtccttgtgttcctagttctaatggatcgctaacacagtctgatccatgcatggttctggaaattcgtaacttgacattgttaacaccaagaagtggaaatgttcttattactggcctcactatggaactaaaagacaaggaccacctactggtgatgggacctagtggaagcgggaagacgtcactgttacgtgctttggctggcctctggactagtggcactggggagatcatataccacgtgagaggttctacgcagcttcaaaaaccaaatccaagttctgataaaccatccagcatgaatttaaagggcgaagaagaatcgttgcaaagttccaagcaaagaagagataatggcatattcttcgtcccacaaaggccgtatatggttctgggaacacttcgtcaacagttgctctatcctacgtggactgaagaggttcaacactcaccagataatgatgataaaaactcagatcctcttccttttctgtccgaagtctccacatcagatctggtcggtgccaaatccgaggtgccctcgacagctgaactgatcgaagtccttgaggacgtcaagctgggttacatattgcctcgtttcaacggcttggactctacccatgactgggccagtgttctttcgctgggggagcagcagcgtctcgcgttcgcccggctgttacttgctacacccactttggtcctgctggacgagtcgacaagcgcactcgatgaagcaaacgaggctcatctatacagtcagattgaagctgccggcattacctacgtaagcatcggccaccggaaaacacttcacaagttccacaacaaggcgctgtacatttccatgtctgattcgacggacaccaatccacgcaactgggagctaaagcccgcggacaagcttccagctgaggagccatcgcagttcccttcatgataatctcagcatttgtacccctggttgctgcttcctcatttttcgtccgttatttggcccccaatcagaagtatggctcaactgtaatgtaccgccatagtgctgcaagctgaagttggactgtttcaggatgatcgtcaaggttgctgccatgcatgctacgacgacccgggccgccggacatgatagctctcatgtgcactcagaccttagagaacagaacagtatagaatgtacataactcggatgcaagtacttatggtcttggtgttggtaatcgttgatctgtactacgctcttaatgctctgattcttttgttggatgatgaagtgctaggaatttcagttctgactataggagtgtgctaacttgggtcccccccttttttttttgttgcgttcgcgtggaatgttcgatttaatggcccgtagcaggccgttgggcggggtctcgagtgcaactacggcccgcattcttctcgttctctctcaaagaagaaagaaagaaagaaagaaagggaagtgaaggcacacccgtg

SEQ ID NO: 4646 - DNA, 3065 bp, Zea Mays
cggggacccacgcgtcagctacttcagcggtcaagcaactgtagccgtagcctcccgcggtggaactgccgaaccgccgcctggttccctcctccgctgcctgcttgccgctggcctggttccctcctcagcagcggcgggagccattgctcccacgcgagccttgcactgcaaaacacgggaggaaaagaaatccagaacctaccaaacagcaaagtgggtagaggcaaggcaagaaaaggatgcggttatctactcccgctcgcacatgcttcccatccaccttgccgccttcgcaactaccgcctctgctgctgctgccgtctcggccaccccaccgtctcgcgtccgccctctctccccgctcggcgccgcggcgccgcgggctcccttcccctcctccgcccgtggtctccgccatgcgccagcgcggtcgccgcagggccgcgctccctccggccgctgccggcggcggcggcggcggggagctcgctgcccccgattcccaggagaagagaggtggtacagacctcaagacactagctacaaggttttggaaagtcgctgccccctactggtggtcagaggataaaactcaagcaaggctgaggcttgctgctgtgtttgctctcacattaggaaccacagggattagtgttggatttaacttcctcggccgtgacttctacaatgctcttgctggatcaagagaagtttaccacacaactgctctactatctgggtgcctttgctggaggaattccgttctttgtcttgagagactatgcaagagaaactctttctttgcgatggcgatcttggatgacaagttattatatgaagcgttactttaaaaacagaactttttacaagattcaatctcaatcaataattgacaatccagaccaaaggataaatgatgatctcagcgcattcactggaacggcacttgcattctctctcacacttttcaatgctgctgtggacttggtatcattcagcaacatcctctatggaatctatccaccattgtttattgttcttgttgtgtactctcttgggggtactgctattagtgtcttccttggtaagaatttggtcaacttgaatttcatgcaagagaagaaagaagctgattttcgttacggacttgtccgtgttagagaaaatgcggaatcgattgctttttatggtggtgaggaaaatgagttacaacttttattggatcggttcaggagggcttttgagaacctaagtgaattgctgatagcttctcggaatctggagtttttcaccaatggttatcgatatttaattcagattctgccagctgcagttgttgctccaatgtacttctcagggaaaattgagtttggagtaataaaccaatcggtgtctgctttcaatcatattcttagtgatttctctctcattgttttccaatttcagtcaattagtgcattctcagcagtcatcgatcgtctaggtgagtttgatgatctattggatggaaacgagtcctctcaatcatctcaacgtgatagcattgatgggatcaacattgttttcaaaagcagtggtccttgtgttcctagttctaatggatcgctaacacagtctgatccatgcatggttctggaaattcgtaacttgacattgttaacaccaagaagtggaaatgttcttattactggcctcactatggaactaaaagacaaggaccacctactggtgatgggacctagtggaagcgggaagacgtcactgttacgtgctttggctggcctctggactagtggcactggggagatcatataccacgtgagaggttctacgcagcttcaaaaaccaaatccaagttctgataaaccatccagcatgaatttaaagggcgaagaagaatcgttgcaaagttccaagcaaagaagagataatggcatattcttcgtcccacaaaggccgtatatggttctgggaacacttcgtcaacagttgctctatcctacgtggactgaagaggttcaacactcaccagataatgatgataaaaactcagcagatcctcttccttttctgtccgaagtctccacatcagatctggtcggtgccaaatccgaggtgccctcgacagctgaactgatcgaagtccttgaggacgtcaagctgggttacatattgcctcgtttcaacggcttggactctacccatgactgggccagtgttctttcgctgggggagcagcagcgtctcgcgttcgcccggctgttacttgctacacccactttggtcctgctggacgagtcgacaagcgcactcgatgaagcaaacgaggctcatctatacagtcagattgaagctgccggcattacctacgtaagcatcggccaccggaaaacacttcacaagttccacaacaaggcgctgtacatttccatgtctgattcgacggacaccaatccacgcaactgggagctaaagcccgcggacaagcttccagctgaggagccatcgcagttcccttcatgataatctcagcatttgtacccctggttgctgcttcctcatttttcgtccgttatttggcccccaatcagaagtatggctcaactgtaatgtaccgccatagtgctgcaagctgaagttggactgtttcaggatgatcgtcaaggttgctgccatgcatgctacgacgacccgggccgccggacatgatagctctcatgtgcactcagaccttagagaacagaacagtatagaatgtacataactcggatgcaagtacttatggtcttggtgttggtaatcgttgatctgtactacgctcttaatgctctgattcttttgttggatgatgaagtgctaggaatttcagttctgactataggagtgtgctaacttgggtcccccccttttttttttgttgcgttcgcgtggaatgttcgatttaatggcccgtagcaggccgttgggcggggtctcgagtgcaactacggcccgcattcttctcgttctctctcaaagaagaaagaaagaaagaaagaaagggaagtgaaggcacacccgtg

SEQ ID NO: 4647 - DNA, 1499 bp, Zea Mays
ctttctgccccgacacgccctccaaaaatccgcaagccagaacccaacccccctttccccgtccaacgtcctctagccgcctcgccgaactctctctcacacacacacagtctctctgctccacgctcgccgcttttccgctccacccctcctctctttctccctccctctctttctctctcctgccccaaccaaccaatggaggctctcgcgggcgccgcatcctcctccgttctccccgcgcgccacccgccctcccgcgtggccgcgcagtccctcgcgctccgccctagccgctgcggtcccctccgcgcggttagcgccggcggtgtcagtggcaaggacgacgcccacgccgccaacgggtctcccgtcctcaagctgaatagcgattccagtctaaatggagtcctaccgattgcagctgacaagtcacagaaggcttcatcaactaacgttagtactgactctagtggatctagagctggcctgtttagaacacccatatcaggtggtgtgcagagtgcaactttcgcccacggtctacctccgccggctttggctgttcgcaatttgatggaacaggcgcggtttgcccacctgtgctctgtcatgtctggcatgcaccaccgccgtactggatatccgtttggttcacttgtcgactttgctaacgattcaatgggccgtgcctggatggagtggactgtcgaacgcgcgagtcaccatatttggtgatgtttaccctttgccagctgaacaacaggaatgggcacataagcaatatgtagcaaaacatcagcagtgggcatcacagcagtggggaaacttttactattacaggatgcacaacataagtgacatatacttcatcgggggcttcggaactgtcgcatggatagatgttaaggagtatgaaacgattcaacctgacaagatagcagttgatggtggtgacttgcaaagtttaaaggagttgaacgctattttctctaaaccacttcgggaggtcctatcatcagaaggggaggttgatgatgctgcgcttatatcagtagatagcaaagggatagatatacgggttcgacagggtgcacagttcaatattcagaggctagcatttgatgtccctcataaggttgagactctggaggaagccaagaaagcactccacaagataatcaaagacaagcagcaaataaagtgaagttgcaggagctggctctacccatttttctggtggtgtaaggtttcattgcaaccggaccaaggattacgtaatggtagcaggtagcatgatacaagtgaaaacgatggctgtttttttaaataatgagagtctcgctctccagctgtggtgaagattgtatatatgctcgtgttgccttattaataattattattgtgcggttgcttcttgaggaaatcggaccttcttgttctctatttccggcttctggctggctacctgggtaccagcatctttttttaaagataat

SEQ ID NO: 4648 - DNA, 1536 bp, Zea Mays
ctttctgccccgacacgccctccaaaaatccgcaagccagaacccaacccccctttccccgtccaacgtcctctagccgcctcgccgaactctctctcacacacacacagtctctctgctccacgctcgccgcttttccgctccacccctcctctctttctccctccctctctttctctctcctgccccaaccaaccaatggaggctctcgcgggcgccgcatcctcctccgttctccccgcgcgccacccgccctcccgcgtggccgcgcagtccctcgcgctccgccctagccgctgcggtcccctccgcgcggttagcgccggcggtgtcagtggcaaggacgacgcccacgccgccaacgggtctcccgtcctcaagctgacaagtcacagaaggcttcatcaactaacgttagtactgactctagtggatctagagctggcctgtttagaacacccatatcaggtggtgtgcagagtgcaactttcgcccacggtctacctccgccggctttggctgttcgcaatttgatggaacaggcgcggtttgcccacctgtgctctgtcatgtctggcatgcaccaccgccgtactggatatccgtttggttcacttgtcgactttgctaacgattcaatgggccacccaattttttcgctgtcacccttggcaatccatacgaggaacttactcgctgacccaagatgcacgcttgttgtccaggtgcctggatggagtggactgtcgaacgcgcgagtcaccatatttggtgatgtttaccctttgccagctgaacaacaggaatgggcacataagcaatatgtagcaaaacatcagcagtgggcatcacagcagtggggaaacttttactattacaggatgcacaacataagtgacatatacttcatcgggggcttcggaactgtcgcatggatagatgttaaggagtatgaaacgattcaacctgacaagatagcagttgatggtggtgacttgcaaagtttaaaggagttgaacgctattttctctaaaccacttcgggaggtcctatcatcagaaggggaggttgatgatgctgcgcttatatcagtagatagcaaagggatagatatacgggttcgacagggtgcacagttcaatattcagaggctagcatttgatgtccctcataaggttgagactctggaggaagccaagaaagcactccacaagataatcaaagacaagcagcaaataaagtgaagttgcaggagctggctctacccatttttctggtggtgtaaggtttcattgcaaccggaccaaggattacgtaatggtagcaggtagcatgatacaagtgaaaacgatggctgtttttttaaataatgagagtctcgctctccagctgtggtgaagattgtatatatgctcgtgttgccttattaataattattattgtgcggttgcttcttgaggaaatcggaccttcttgttctctatttccggcttctggctggctacctgggtaccagcatctttttttaaagataat

SEQ ID NO: 4649 - DNA, 1182 bp, Zea Mays
agccacagttacatatagctttgtttggtcagtgtcccgagtcacagcatgctgaacatcgtcacagtccgttgtgggcactgcactagcctgctgtcggtgaacttgagaggactcatccaatcacttcctgtccagaaccaccactactcccagcagcaggagaatttcaccgtccaaaatatgggttttactgaaaattaccctgagtacgcaccttcgtaccgcatgccaacgacgctgtcagcgaaaggtgatctggatcatatgctgcacgtgcgcggtaagcttattgattcatacatgcatgtgtatgctactgctctatatattcttctatgttagaaccggccggttgtattcactacagataaaggtgatctgacctattatttgatatctgaagtgctgcccttccttattcaataatgtgtttccttgattccttaacaatttcccggttgatgtcatattagtgttgcaatgggtttacagtagttcaccttagcctttttagtagatcaagagcatatcaccttttgagacagtaagacgccttttcactttttacctattttacaagaaagtaggtcagaggacccaagtcttttgctgtaaaattatactttgactccttgctcagtttgtttgtggttgagttagtagatgagctaacaataattatttcatctacataaattagcatgcagactaatatcccagcttgtttgaaccaaatagtgaggcatctgcaactaaaagattgaagccaagttcatgtagttttcttatcattcttgagtgctagtcccttggtgcttgttttagcccatagagtgacttctcgagcctacaaatatatttcaaaggtcttgttggatcattgcgactaggaggttgtctcatatacacctcttcttcaagcacccaatgcaaagaatgcattctgaatgcctatttgtttcatgctccatatttgagagattacaagtgataggatgactctgattgttgttggtttgataactggacaaaatgtatcaagataatcaatagcatacttttgctttgtgacaagtctagctttaagtctatgcactaaattaaaccatcaacctttctcttcactttgaaaaccatctactatcaatgagatctattcctttccattatgcttggtaa

SEQ ID NO: 4650 - DNA, 666 bp, Zea Mays
gctacctctcttcgatgataaggttttgtggagaataattgatggtgtatgatgtcactccttttatggatgagcatcctggtggagatgaggttttgctagctgtaactgggaaagatgctacagctgattttgaagatattggccacagtgattccgcaagggacatgatggagaagtaccacatcgggcagatagatgcttcaacaatcccagcaaagcgaacttatgtgcacccccagcaagcgcccagccactcagacaagaataatgatctcctcatcaagatcctgcagttccttgtgcccattatgatcctgggccttgcatttggtatacgtcagtacaccaaatcagagtagtactgttcttgaagacttgcctttggagtctgttttatggtaatggtttggatgagaacagttcagtaattgcttagtgtatttgtcaggtggatgttatctcattggtcatatactatgtattatggacatccatgtgttgccgaaatgtgctcttttccccatgaaccgaggcatacaagatgaattctgactcttccatgaaccgagtagttgataccagattattgcagtaatgtttgttttgtgtatgcgcacttggatgtcgcaataaacagaaccaaaccataaactacgttcatcg

SEQ ID NO: 4651 - DNA, 1475 bp, Zea Mays
ccggcagaaagcagaagttttaaagacaccggggcctgcgtctgcgtctgcttggccccccccggtaacagcagttatcatccccatctcccgccgtcccgcgtgctgatacttgcttgcattgcctgccgtttcccccgagccaacgacgacgttcgacggccgtagccaagaaggtatctcgcccaaacaaaggccgtcaagccaccatggccgtgtccggcgagaagccgccaccgccaccgccaccggcaaggaagctcatcctagcgctgcttacatgtctgtcgtcggcgctgctgtacaggcagattcagccgctaccgcccaagatccccggcacgccgggcggcccgccggtgacggcgaccaggacgaggctcagcgacggcaggtacctggcctatctggaaaccggcgtcccgagggagaaggccaagcacaggctcgtctttgtccatgggagcttgcgcaagagctgggcgtttacatgttgtccttcgatcgccccgggtacgccgagagcgacccgcacccggccaggaccgaggagagcatcgccctcgacatcgccgagctcgccgacaacctgcagctgggtcgcaagttctaccttgctggcttctccatgggcggcgagatcatgtggagctgcctcaagtacatcccacacaggctctccggcgtggccattctcggccccgtaggcaactactggtggcccggcttgccgtcgaacgtgtcgcgggacgcctggtaccagcagctccctcgggaccagtgggcggtctgggtcgcgcatcacctgccgtggctcacctactggtggaacacccagaagctcttcccggcctccagcgtcatcgcctacaaccctgccctcctgtcccaagaggacgagatgctcatggccaagtttggctatagagcctacatgccgcagatcaggcaacagggggagcacgagtgcctgcaccgggacatgatggtcgggttcggcaagtggagctggagcccgctgcagctggagaacccgttcgccgacgccgacgccgacgatggccagggggcggggaaggtgcacctgtggcacggcgccgaggacctcatcgtgccggtcagcctgtccaggtacatcagccagaagctgccgtgggtcgtctaccacgagctccccaagtcgggacatctcttcccgatcgccgaggggatggctgacatcattgtcaagtccctgctgctcggagacgatcatctgtcgtcgtcggcctcacagcctcctcattctccatgaatccaggtcgtcacgtgtagtccgttcgcatttcgttgcccgtctctcactgtttctgtaaagggaccgatgctgcaggattctctagcgttgtagctaggatgctctgtttttttaaataatggaactaagttttagcctatatatatatatcatctgagaatgttacataatgttggtc

SEQ ID NO: 4652 - DNA, 3565 bp, Zea Mays
cacacaccagaacaaaaacgagacgccagatcaaaggccacaccaaatcccctccagcacagcaggggaagccgcggggcaccacagaccacgagcgcagccgcggaggccggagacgtcggcgacgcgcgcgcggtcccaccccgtcgaggggactcggccggagcgggagagtcaccgccgtgtggaccggcggctggagcgctctgcctgtggccaatgtcggtggagagaggcccgccagcgaaatcgcccagcctacgggactgattgggcttgaagttgtggcgcgtacgagagatgcctcatgccagagcttctgttattagagactgaagttctgcaagcgcgtgctgctgctctggagttttagcagctgtgttgagtggttgggagccatggagtcacggatggatcagtacgaggttttggagcagattggtcgcggcgcctttggtgctgccatcctcgtcaaccacaagacagagaaaaagaagtatgtgttgaagaaaatacgtcttgcaaggcagacagagcgatgccgcaagtctgctcaccaggagatggctcttattgctcgcttgcaacatccttacatcgttgagttcaaggaggcatgggttgagaaggctgctatgtttgcattgtgacgggatactgtgaaggtggcgatatggctgaattgatgaaaaaagcgaatgggacatacttcccagaggagaaactactgagatggtttgcgcaattggcattagctgttgactacttgcattcaaactttgttttgcatcgagatctcaagtgctcaaacatatttcttaccaaagaacaggatattcgtcttggagattttggcctggccaagactttaaaggcagatgatctagcctcttcggttgtgggaacaccaaattatatgtgcccagagttgcttacagacattccctatggattcaagtcagatatatggtctcttggatgttgtatgtatgagatggctgctcatcgacctgctttcaaggcttttgatatggctggactgataagtaagataaatcgctcctccattggccctttgcctactttctattcttcatctatgaaaacacttatcaaaagcatgttgaggaagagtcctgaacatcgacctactgcatccgagattataaaaaatccatacctccaaccttatgtgaatcaataccgtccatttgctaatatattacatcctggtcgatcaccagagaaacctggcaccgattcacggagcagtcagaaaagtatgtctgggagtcagtgtagtagcatttctggaactggcagtgatatggatagcatacaatcaaatgaaagaaacacgtcaggactagcttcaagttccagcaacaccattgataccgagggtgctgaaactactgaacttcagagacataaagatactgcttgtcctggactcaagagacaagattcatcaaaatccgtacaagataatcaacatcctggacatgagaataagcaaccaaagataattaagaagatactaacaactctaagagaggagagcaaatttagggaaagcaattctcctgttagagctagccgtgtaaagctaaattcacctagcaatagagaacgctcatctgacgactcaaagcaaagtgatatttcctccagttcaaggtctagtgaagttatgtcacatgaatcagcaaatgcaagctgtgaacctgtcaaacgaggacatgcatctcctcccttgaagcatttgtcaccaattgttgagcattctccgaaggttaaaattaaagtagatgagctattacatccacaccttgccaagcaggttggagaagttgttgatgcagctgcagggaaggttaagaacagaacaccgcccatttttattaaatgcaccagtattcctactcggaggcaaggagtagcaagtccaagccgtcaacacactggggtaaagcgagctcacaataaggtcatggcagagcatgcaaggaatccttgtcagcatctccatagtccaagcaacgctcttgtgaaacttccaagtgttccaatggttcctccaagtcatctagaagatcttaagagaaaaccagacaatacacgagcaaaatctgctcctcctagggctttagcaaccaaggaagacaacagtgcttgctccagttctacgattggtaatgctgaaaacaccaaccagtctgaaccgtctgaacctgactcaccaacttatttggtctcatcctgcaaatgtttgatacctgacactatcatacaaaagcacggcataacaagtaaaaaaagttcagaaatcatcacaaccaattgtgagaagaaaatgactagtaatggtgatcttagtctaagcgcagccatggtgcaatcttctgatattcctgaacaagagtttatttgcaaggatggaatgctctccagtcaggtgggtcagtgcagtgaaacagttactgtaccaagcgatgaagacaagttcacagtgcgggaactgctttcatcagtaccagatctttgttccttggtcccaacaacaatgatgaacactgagccaggaagaggacccactctcacccagtcatcagagaaaccatcgggtcctcatttaaatcctcctccagttgaggacattatacatgtcataagccacagcagtttccatgtgaatggtgagcaggcagtaaaagaaactggatcagagagcattgatgttgacaaacgtcttaacatggtaagagaagagataggtgtaagaagcaccgagccaaacctcataccttctggacctatagattctgatacggtgaagccaaatgtagtagaagctaatattacctttcagaaaccatccagtacagatgccataaaactgccaaccataccggaaggaaattttagtactctggagaccaacaatgggtttaagcaggaagcagctccggctaaggaaatactagatgtgacatctttcaggcagcgagctgaggctctggaaggtctcttagaactttctgcagaattactggaacacagtaggctggaggagcttgcgattgttctaaagccatttgggaaggccaaggtgtcccctcgagaaacagcaatatggttggctaaaagtttcaaaggcttgatgaatgacgaagcaagccgcagttcaacgtgagtacgcgtagcttttgtgccaccctttttactttggttgatttctgcttgtgctctgaagatgctatggttgtcttgttcatatctggcttcttggtatcgtgtgtcggtgtttccatttcgatagttattcattctttacagcacatgttgtaaatagcccagatttgtgaacagaaaataatacatgccagaaatggtgttaatttacatggttgaagtaacagagactaatttgatcaattattgttttgcctacgtgctcctctgaaactatcagaattctacgagaaaaggtacaaaattgtgttgttgcatttgttgtcagtatacttagtttctcaactactcttagaacatcccacaccac

SEQ ID NO: 4653 - DNA, 3762 bp, Zea Mays
acacaccagaacaaaaacgagacgccagatcaaaggccacaccaaatcccctccagcacagcaggggaagccgcggggcaccacagaccacgagcgcagccgcggaggccggagacgtcggcgacgcgcgcgcggtcccaccccgtcgaggggactcggccggagcgggagagtcaccgccgtgtggaccggcggctggagcgctctgcctgtggccaatgtcggtggagagaggcccgccagcggtaaggtccctgtcccgagcggtggcggttggtgggaactgtgcgcggtgcagttgataaacttctagctttcctgtgagggacgggcgaccttttcccgtgcgtgcgtggggtaggttttcttcaattttgagcggcggagcctgcactgaagactgaagctgcttgagtcacgcctgttccgacgatttttgcagaaatcgcccagcctacgggactgattgggcttgaagttgtggcgcgtacgagagatgcctcatgccagagcttctgttattagagactgaagttctgcaagcgcgtgctgctgctctggagttttagcagctgtgttgagtggttgggagccatggagtcacggatggatcagtacgaggttttggagcagattggtcgcggcgcctttggtgctgccatcctcgtcaaccacaagacagagaaaaagaagtatgtgttgaagaaaatacgtcttgcaaggcagacagagcgatgccgcaagtctgctcaccaggagatggctcttattgctcgcttgcaacatccttacatcgttgagttcaaggaggcatgggttgagaagggctgctatgtttgcattgtgacgggatactgtgaaggtggcgatatggctgaattgatgaaaaaagcgaatgggacatacttcccagaggagaaactactgagatggtttgcgcaattggcattagctgttgactacttgcattcaaactttgttttgcatcgagatctcaagtgctcaaacatatttcttaccaaagaacaggatattcgtcttggagattttggcctggccaagactttaaaggcagatgatctagcctcttcggttgtgggaacaccaaattatatgtgcccagagttgcttacagacattccctatggattcaagtcagatatatggtctcttggatgttgtatgtatgagatggctgctcatcgacctgctttcaaggcttttgatatggctggactgataagtaagataaatcgctcctccattggccctttgcctactttctattcttcatctatgaaaacacttatcaaaagcatgttgaggaagagtcctgaacatcgacctactgcatccgagattataaaaaatccatacctccaaccttatgtgaatcaataccgtccatttgctaatatattacatcctggtcgatcaccagagaaacctggcaccgattcacggagcagtcagaaaagtatgtctgggagtcagtgtagtagcatttctggaactggcagtgatatggatagcatacaatcaaatgaaagaaacacgtcaggactagcttcaagttccagcaacaccattgataccgagggtgctgaaactactgaacttcagagacataaagatactgcttgtcctggactcaagagacaagattcatcaaaatccgtacaagataatcaacatcctggacatgagaataagcaaccaaagataattaagaagatactaacaactctaagagaggagagcaaatttagggaaagcaattctcctgttagagctagccgtgtaaagctaaattcacctagcaatagagaacgctcatctgacgactcaaagcaaagtgatatttcctccagttcaaggtctagtgaagttatgtcacatgaatcagcaaatgcaagctgtgaacctgtcaaacgaggacatgcatctcctcccttgaagcatttgtcaccaattgttgagcattctccgaaggttaaaattaaagtagatgagctattacatccacaccttgccaagcaggttggagaagttgttgatgcagctgcagggaaggttaagaacagaacaccgcccatttttattaaatgcaccagtattcctactcggaggcaaggagtagcaagtccaagccgtcaacacactggggtaaagcgagctcacaataaggtcatggcagagcatgcaaggaatccttgtcagcatctccatagtccaagcaacgctcttgtgaaacttccaagtgttccaatggttcctccaagtcatctagaagatcttaagagaaaaccagacaatacacgagcaaaatctgctcctcctagggctttagcaaccaaggaagacaacagtgcttgctccagttctacgattggtaatgctgaaaacaccaaccagtctgaaccgtctgaacctgactcaccaacttatttggtctcatcctgcaaatgtttgatacctgacactatcatacaaaagcacggcataacaagtaaaaaaagttcagaaatcatcacaaccaattgtgagaagaaaatgactagtaatggtgatcttagtctaagcgcagccatggtgcaatcttctgatattcctgaacaagagtttatttgcaaggatggaatgctctccagtcaggtgggtcagtgcagtgaaacagttactgtaccaagcgatgaagacaagttcacagtgcgggaactgctttcatcagtaccagatctttgttccttggtcccaacaacaatgatgaacactgagccaggaagaggacccactctcacccagtcatcagagaaaccatcgggtcctcatttaaatcctcctccagttgaggacattatacatgtcataagccacagcagtttccatgtgaatggtgagcaggcagtaaaagaaactggatcagagagcattgatgttgacaaacgtcttaacatggtaagagaagagataggtgtaagaagcaccgagccaaacctcataccttctggacctatagattctgatacggtgaagccaaatgtagtagaagctaatattacctttcagaaaccatccagtacagatgccataaaactgccaaccataccggaaggaaattttagtactctggagaccaacaatgggtttaagcaggaagcagctccggctaaggaaatactagatgtgacatctttcaggcagcgagctgaggctctggaaggtctcttagaactttctgcagaattactggaacacagtaggctggaggagcttgcgattgttctaaagccatttgggaaggccaaggtgtcccctcgagaaacagcaatatggttggctaaaagtttcaaaggcttgatgaatgacgaagcaagccgcagttcaacgtgagtacgcgtagcttttgtgccaccctttttactttggttgatttctgcttgtgctctgaagatgctatggttgtcttgttcatatctggcttcttggtatcgtgtgtcggtgtttccatttcgatagttattcattctttacagcacatgttgtaaatagcccagatttgtgaacagaaaataatacatgccagaaatggtgttaatttacatggttgaagtaacagagactaatttgatcaattattgttttgcctacgtgctcctctgaaactatcagaattctacgagaaaaggtacaaaattgtgttgttgcatttgttgtcagtatacttagtttctcaactactcttagaacatcccacaccac

SEQ ID NO: 4654 - DNA, 1582 bp, Zea Mays
ggccttcccccctcattcacttctgcctttcctcatctgcccgtcgtcgtatcccccggtccgccggtcacctcgacaaacggcgaagggcggcaaaatgctgcagtgcatctttctcctctccgattccggggaggtgatggtggagaagcagatggcggcgcactgcgtggaccgcgctatctgcgcctggttctgggactacgtcgtcgcccacgccgccggcgatccttccaaagtcttacaggttgtggtgtcaccaacgcattacttgtttcaaatctatcgcaatggtgtaacgttcttggcatgcacccaagtggagatggccccactgatggcagttgagtttctctctcgcgtggctgatgtcttgacagattatcttggagatctgaatgaagatataatcaaggacaactttgtaattgtgtatcagattttggatgagatgatggataatggttttccactcacaactgagccaaacatcttgaaagagatgatcaccccacctaatattgtgaacaaaatgttgaatgttgttactggcaagagttctacccttggcagcaaacttccagatgcagctgcttcttttgtaccttggcgaagaacaacagtcaaggatgcaagcaatgaagtctatgttaacatagtcgaggaacttgatgcatgtgtgaacagagagggggttctcgtgaaatgcgaagcatacggtgaagtccaagtaaactgcagcctcccaggccttgggaatcaaatcagatcctatcatttgttcctcccgacgggcagttcaagctcatgagttacagggttcagaaactgaagaagacaccgatctatgtgaaaccacaattaacatcagattccgggaactgccgcgttagtgtgatggtcgggattcgaaatgatcctgggaaacctattgattcgataacagtgcagttccagttgccccctcttattgtttctgctgatctgactgcaaactatggcacggttgacatccttgccgacaagacctgtttgtggacaatcgggcagataccaaaagacaaagcaccggcactctctggaaatttacgactggaggaagggctcgcacaactgcatgcattgccgacatttcaggtgaaattcaggattatgggagttgccctatctggccttcaaattgataagctggacgtgaagaacacaccgaacgctccgtacaaaggttttagagcccagactcaagctgggaagtatgaggtcagatcgtaggtgcttgcaggggggcagctgttagttcattcttgtagaaaacgaatgatgctgcggacctggctcatggcctgttaacacattgttatgatcatcagttgagggttcacggccagctgcatttgggtcgttgcatttgatgggaggtgccattgttctttgttcaggtcaataggtgtcctgtacctgtacctgaatcagattatcctctgttgtgtgaaagcaacagaatactgcgaccctaggcctatctagataaaggttttggattctggcaccttgggttataaaattcacttgattaaaaaaa

SEQ ID NO: 4655 - DNA, 1672 bp, Zea Mays
ggccttcccccctcattcacttctgcctttcctcatctgcccgtcgtcgtatcccccggtccgccggtcacctcgacaaacggcgaagggcggcaaaatgctgcagtgcatctttctcctctccgattccggggaggtgatggtggagaagcagatggcggcgcactgcgtggaccgcgctatctgcgcctggttctgggactacgtcgtcgcccacgccgccggcgatccttccaaagtcttacaggttgtggtgtcaccaacgcattacttgtttcaaatctatcgcaatggtgtaacgttcttggcatgcacccaagtggagatggccccactgatggcagttgagattatcttggagatctgaatgaagatataatcaaggacaactttgtaattgtgtatcagattttggatgagatgatggataatggttttccactcacaactgagccaaacatcttgaaagagatgatcaccccacctaatattgtgaacaaaatgttgaatgttgttactggcaagagttctacccttggcagcaaacttccagatgcagctgcttcttttgtaccttggcgaagaacaacagtcaaggatgcaagcaatgaagtctatgttaacatagtcgaggaacttgatgcatgtgtgaacagagagggggttctcgtgaaatgcgaagcatacggtgaagtccaagtaaactgcagcctcccaggtgtgccagagctgaccatgtcctttgctaaccctgcaattatcaatgatgttaccttccacccctgcgtccgattcaggccttgggaatcaaatcagatcctatcatttgttcctcccgacgggcagttcaagctcatgagttacagggttcagaaactgaagaagacaccgatctatgtgaaaccacaattaacatcagattccgggaactgccgcgttagtgtgatggtcgggattcgaaatgatcctgggaaacctattgattcgataacagtgcagttccagttgccccctcttattgtttctgctgatctgactgcaaactatggcacggttgacatccttgccgacaagacctgtttgtggacaatcgggcagataccaaaagacaaagcaccggcactctctggaaatttacgactggaggaagggctcgcacaactgcatgcattgccgacatttcaggtgaaattcaggattatgggagttgccctatctggccttcaaattgataagctggacgtgaagaacacaccgaacgctccgtacaaaggttttagagcccagactcaagctgggaagtatgaggtcagatcgtaggtgcttgcaggggggcagctgttagttcattcttgtagaaaacgaatgatgctgcggacctggctcatggcctgttaacacattgttatgatcatcagttgagggttcacggccagctgcatttgggtcgttgcatttgatgggaggtgccattgttctttgttcaggtcaataggtgtcctgtacctgtacctgaatcagattatcctctgttgtgtgaaagcaacagaatactgcgaccctaggcctatctagataaaggttttggattctggcaccttgggttataaaattcacttgagtatagaatctcttttttttgttataagaaaaaaaatctcttttttgttag

SEQ ID NO: 4656 - DNA, 1232 bp, Zea Mays
ggagctaaaattttgaaggagaaccccagaccacctcggcccacggacccacggaccatagcccagaaaggaccaaggtggaagaaacaaaacgaaaggcggtgtcagctgctcctccacttcccgtgtttctaactccggtggctccaccactagcaacccgtgcagcgagcccaccccgaccactgccatgtcgaggcgcggcgactgggtctacgagaacaacggacctgcgtggccatcgccggcgccgattactgtgtcgtcgcggcggacacccgcctctctgtcggatacagcatcctcacgcgcgaccactctaagatctgcgacctggctgacaaatgtgtactagcatcttctggctttcagggtgatattaaagctctgcacaagaacctagctgccagagaattgctataccaacaccagcataacaaaaggatgagctgccctgccatggcacagctcctctccaataccctgtactacaagcgcttcttcccatattacgccttcaatgtgctcggtgggcttgacagcgaggggaaagggtgtgttttcacctatgatgcagtaggttcctatgagagaactggttatagtgctcagggaacgggatctactttgattatgccagtcctggacaatcaactaaaatcaccaagtcctctattgctccctgccagggatgctgtcacaccattgtcggagtcagaggccatcgatctagttaaggatgtgtttgcatctgcaactgagagagacatctacactggagacaagttggaaattgtagtcatcaacaaagtcgggactaagcgcgagtacatcgacctgaggaaggactaagccaacgcttcagttgtgctgcagctgtcatttgcttcggacatgtttcctagtctggggatttatgtctaaagccgttgcttgcatagaaacatatgttattacttgcatatgtcctgtaccagggttcagtcagcttgttttttttttgttgaaacaaattgcttggatattgaagcggtacttactggcggaaagtctatatttggttgggagcttaacattaatggcctcatccgaaatgtcacaatcacaagtctctttatatctcttctactcattcggattcgaattgccttttgtctttaaagatctttaacttttatgtagtacctcccttttaaattatatgatgtttttagtttcttttagtatattgt

SEQ ID NO: 4657 - DNA, 1239 bp, Zea Mays
ccgtccaatccaggtagtccgagccagcgaaccaactattcgtttgcttttcgtcttcgtcctctctttgcccagttgtcggtcgcccgcgccgtcgtctccgctccgccggccttcctgcgaaaccctagcgaggcgagcgagagagaaactagcggccatgttcggctacaggaaggctgacccggacctcgaggccggcgggtcctcgctgctgtacccgggaatgacggagagccccgagctgcggtgggcgttcgtccgcaagatctacgtcatcctagccgtccagctcgccatgacggccgcggtctccgccttcgtcgtcaaggtgcccgccgtctccaacttcttcgtctcctccaacgccggggtcgcactctacatcttcctcatcatcctgcctttcctcgtgctgtgccctctgcgctactaccaccagaagcatccggtcaatctgctgctgctcggcctcttcaccgtcgccatcagctttgccgtcggcatgacatgcgctttcactagcggaaaaatcattttggaggctgccattcttacagcagtggtggtgatcagcttaactgcgtacactttctgggctgcaaagaggggtcatgatttcaacttcctcggtcccttcctatttgctgctatcatggtgctcatggtgttttcactaatccagatctttttcccgctgggtaagatatctgtgatgatatacggtgggttggcatcgcttatcttctgtggatacatcatctatgacacggacaatgtcatcaagcgctacacctacgatgaatacatatgggctgctgtttcactctaccttgacgtcatcaacctgttcctgtctctgctgcagctgctgagggcagccgatagctgagctcgtcaagctttcacttcgatcttgttctcacatacatctgtgtatatcacaaactctgtaatggtcatggatactccaatttataactatactctgtcggtgttaccttggttcaaatggtatgtctggctttaacggatacccatgagagttttaagagcgcggtcaatagctcagctgcttacaaacgagcttggataaaaatcataagctgtgcagtaacagtacatctgtacttgtcttgatcaattatttgcaataattatttatgattttgcaccatgaggtatctgaccagcacaagtggtgctgtttcctattttttttttttttttttttttttt

SEQ ID NO: 4658 - DNA, 1105 bp, Zea Mays
ccggactctcgaagagaagctctgcagtctgcaccgcatcgaccatcgccggtaagcaacaagagagccccaccgatggcggaggaagctgcatccctggaggcgccgccgccgctccacaatccctcactgcgaaaatcctcccttgacgatgagacccgcgccctcgtcgtccccgacgccgccgccctcccggcgtctcccccctccgccgtcgaggctaacttcgcgcgctacttcgtcgcagattgtgtgtggttggtttagctccagcccatgttgtgtttaaagaggaaggagtcatatccactgttgacttcaatgtcggcaagtcagatcgcagtgagatgaaagtcacaggaaaacggaaaaggaatgcacaacacttgcaagaaaattcggcattgtgcaaagtttgtgtaaatgataaatcttttattgtgagatgctgtgtgaaaggttcccttttggagatcaatgaaagattgatcaaacaaccagatcttcttaataccgctgctgacagggaaggatatatagcagtcttccagccgaaaccagctgactggctcaaaattaaggataaattccttagttatgaggactacaagaacttgagaggagtatgctgacacccaaaagaagatgtttcgaacatgaaggcagcgcttaggttcgactcaaccattcgtgtgatgaaatctttactgctccagatattcgcagttcgatagaagcttcatcacatagctcctgagacgcaaacatgtgcgctggactcacttgaacctcgtgcactgggctggactcattttgctttagttatgagtggatgaatggatgtcggcctatacaagatgctaaggtcctgaagatgttgctttgtttattctgtcagaaatttgatgtataagtactgattcacacattacctcccagtgtaataactgatgaactggaatctaattatcaaagattttgttgtcctccaaattatcaaagtaaaagtggaacttaaaacaaaaacaacgatgaccattgcgtcgactgaatattgttcacagttgggagttgggatcaaagagcaggtacaggattgggccac

SEQ ID NO: 4659 - DNA, 962 bp, Zea Mays
ctcacagcctcacatacatacgcggtgccgccccacggatacgcaaccccgcgggtcgcgggatcaaggagccagagagcgggacgcagcgagcgttccgccagagatcgagaccgtagctagggtttgaggcgccgggctgcggtggacgagatgtcgacgccggcgaggaagcggctgatgcgggacttcaggcgcctgcagcaggacccgcccgccgggatcagcggcgcgccgcacgacaacaacatcatgctctggaacgccgtcatattcgggccggatgatacgccgtgggacggtggcacgttcaagcttaccttgcagtttacagaagattacccaaacaagccaccaactgttcgatttgtctctaggatgtttcatccaaataaaccagtggagtcctatatatgatgttgctgcaattttaacttctatccagtccctgctgtgtgatccaaacccaaactcccctgcaaactcagaagcagcaagactgttcagcgagaacaagcgggagtacaaccgcaaagtccgtgagatcgtggagcagagctggacagccgactagtgcataaggatgctcgtcgtgcccgataggggcacaataagaaagcgtgaaaaaaaaaacacacccactccttgtgtttctggttcgccaggcttgtcgaaacattgaagaaccccagtgattggtttgtagtctgtcgtcgtcgttctgcccccatcaagagccccggttgctcatggtggtggctgtcgtaatgtagcggttgttgacctatcttctcatgaattgaaaggatcctgcccatgtacaaaaattatagcgtgggaatggttgtttgacggaccgtgttgctcttgctttgtgggttgagtttgacagggacagagcacactcaacttggaacagcaaggcagacaaggtcgatctcgaagtgagatccgatttttgg

SEQ ID NO: 4660 - DNA, 1744 bp, Zea Mays
cacagaacagagctcaggcctcagagagacaccgcttcagcagcagaagaaggctactggctacaacaagtcaacaagactgcagtggcagtagcgatgatggtgaaggaagaggagatgatggcagaggcaggaggaggacgaggctacatggacctgcttggcctcggcgaagaggactacctgctgtgcctgtcccctccctcctacttcactcccagtgtcgtctccgccacggccaccaccactgccgccgcgtcggcatcaacctgctgcgcggcctcctacctggacctggacctggctcccgcttaccaccacacgctgagcttcggtggccaggaccaggagcagcagcaccacggagacgacggcgccttgggcttccagcactacggcggcgatcacgcgatcccggcggcggcggcggctgttcagcagaagtccagcccgaccaccgagtgctcctcctccctctcgtccatgtcgccctcgccgcccgcgacagccgtctccgccgccgtctcctgccccaagccacaggctttcaagaagaagaaggcggggtcaaggagcagtgcgtctgccgccgctccagctgctacgaacaagaggcccagggtgaggagggagaggctcggggagaggatcgtagctctgcagcagctggtctctccgttcggaaagtctgatacggcttccgttctgcacgaggcgctggggtacatacgcttcctgcacgaccaggttcaggtcctgagcacgccgtacatgcagatgcagcgccagccggcctcggcgcacgtcccggagagcgcggcggggacggtggtggaggcgcaggagcagcccgacctgaggagccgaggcctgtgcctggtgcccgtctcctgcacggagcacatcgccggcaacgacagccacggcaacggcgccgacctctggtcgtccgtgctgctgccgctgccgctgccaggtggtggtagtcacccgagccaagggcgcttggcctagctgcccgcggacacgcttgctttacggattatgcttatgccagggtttagggctttcagtaggcgcttttggggctactaatctatccattcccggccgtactccgtctgtctaaaagtaaacttttggggagccgggtgctgctgctgctgcttttggtgggaaaaaaaaggcgcagggatccatattgcaagtggttgtggacgaggcgcagggtagaacagaagaagacagtggtctgaggatgccgagatctttgggcacgcacgaacgtgaatgtccctgtgctgtcaccgcctcccggcagcggcaggcattgaatgaaggctacctcctccgccgatgttgcctgctcgggagtcgtgcggcgacagctccggtatccgattttctctctgcttgtcgctcctactccttggaagttggaactctgcacaaaccactgcaatctcatgcagtgcccccttttttccaccccgaagctcatgacgacgcacatcggagacgacaactagtcggagacttgtgtactgtgacagtgcggtgttcatctgatgatacgacagtactaggggtcggcttccataactttagtggttcagaacaggctagaccatgtctgatcaactgattaagtttagtccgttgataaataatacctccctccgttcagatatacgatgataaatctagatacacctataaaacacacatattaaagattatatga

SEQ ID NO: 4661 - DNA, 2226 bp, Zea Mays
tgatcataaccttgtctgtggagtgtggacatatatttctgcagggaaaggatgtgaggaggttctgaacttggaatgcaaccttccaagctccccagaatggcctgtaggtcaatggatagtttccatctgtgcagctcactgtgataaaacaagggcaatgtgcttttgtgggcctgggacaaaatacccagatcgtcctgtggcagaagcttgtggttttaaaacaattttacctgcaaaacctgatggtccaaagcttactgattggaaaacacctgacctggaaaacatacttacaacaaacagcagtaagttaggatggtgtaatgtggtccctgaggacgcatattcatccaaagtgaagtttaaagaagaatgtgattgcaaatatgatggtctctgggggcagttctgtgagacacgtgctgaatgcagctgcatcaaccagtgctctggacatgggcattgccgtggtggtttctgtaaatatcccatcagcatattcgcttgcatatgactggccctcgtggctccagacaccagtgaatttaccagatctgaaaactttgaacagtaccaccattggtgttaaggccgttgttcagaaaaaaaggccactgatatatgtatatgatttgccagctgagtttgacagtcatcttcttgaaggacgacattacagattccagtgtgtaaacagaatatatgatgacatgaatagaactatatggacccagcaattgtatggtgctcagatagcacttcatgagagcattcttgctagccctcaccgcactcttaatggggacgaagctgattatttctatgtgccagtgcttgactcatgtctaataactagatccgatgatgctccacatcttctattgccgagggacctgcgccgaaggagctaccatgcacttgagtactatagaatggcacatggtcacatagctcagcagtatccttactggaaccgcacttcgggaagagaccatatctggttcttttcatgggatgaaggtgcctgctatgcaccaaaagagatttggaagagcatgatgcttgtccactgggggaacactaacacaaaacataagaattcaacgacagcttattgggcagataactgggatgatattcctttggataagagaggcaaccatccatgttttgatccaagaaaggatctagtgcttccggcatggaaggaacctaacccaggggccatatggttaaaactgtgggcaaggccaaggaacaaccgtacaacacttttttatttcaacggtaatctaggttcagcatacgaaggaggccgtccagaagacacgtatagcatggggattcggcaaaagctagcagctgaatttggttccacaccaaacaagcagggaaggcttggacggcagcatgcggccgatgtgacagttacctatctacgaactgaaaaatattatgaagaattagcaagctctgttttttgtggtgtcctgccaggggatggctggagtggccgtatggaagatagcatgcttcaaggatgcattcctgtaataattcaggatggaatttttctgccatatgagaacgtgctcaactacaatagttttgcagtccgcatacaggaagatgacatcccaggcctcataagcacactccgaggaataaacgatacgcaagtagagtttatgctgggaaatgtccgccagatgtggcagaggtttttctatcgagactctatattgttagaggcgcaaagacagaaaaaactcttctctgaagaggcaccctggtctgttgaggtatcgaaacttcctgatgacgacgatgtctttgcaacgtttatacaggtattgcattataaactgtacaatgacccttggcgtcaagatttcctgcaaacaaaggatactcggctgccgaacatctgttcaagaacttcctgaagcatttagtcaggcagcattgcaactgtaaagaataagcatatattcttaggaacaaaagtacaaaactgtagatatttcttgcattctggacaattgttcttttgactgatagcccaatttaattagaccatttcctgaaaaaaaagaaaagaaaaatgcactgttttcatctatcaaaacatggatagcatacatcgcatttacagctctggtgtttgcaatcccaagctacatcgatttttaccgagaaagaattggattttgtcgtcca

SEQ ID NO: 4662 - DNA, 3468 bp, Zea Mays
gttaccgtttcggcgtttcgtttcattccgtctttgtcctcgcgtctgctccggtcgcaggaggcaggatcgctcggctgctccgtcctccgtccgcacggccccgctccctgctgccgccacgcgaccatcgccgcagccacctcaccgagcacccccgtgcgccggtcctgccaccgagccctccacgaccccgtggccgcgcccggccccggtcgcaccgcgctccgctggaccccagtaccatgtctccaagatccactctgaccttgtaggaacaccaattccaacgattctgacggctcgcgctttcatcgaagagttgatccttgtcaggcttgtgatccgcagccgcctctgtctgatcctgctcagctctcgccagccgccgctccgccggaggcctcacgctcctcaccgcgtccgtgcttaccctgaccccaccctcacttggctcccttgaactacggcgtcatcatcgacgccgacagcaggggaagcgcgtctccgcctgatgcccggatgatagtttgaccatgttcgcaatccgttcgacgaaatgccctgtggcatttgtgggcgtagctggcaccttggtggtgcttatcaccgctgtccatgtgttcatggtgccaatacttcctgcctccttctattacttcggttctcgcagcagtataagccacccaaagaatgtcctcccagccgtcgaggtggttgactcgcgcctcaaggggtgtttcccttctgattcatatggtgctgtggcattccgaggcgcgccatggaaggctgagattggtcgatggcttgctgggtgtcatgctaactcttcgtctgttgatgttactgaggccatgggtgcaaaacgctgcgtgaaagactgcagtgctcgtggtgtttgcaactataatctgggagagtgcagatgctttcatggatattctgctctgtgagtgacctaggtgaaatgggaactgaactactgtgttaaacttatgtgatcataaccttgtctgtggagtgtggacatatatttctgcaggtgaatggattgttctttgaactttctatggttttggccttttgggtttactaaaaaacaactatttcatttaaaaaatggaagaacatgagagtgcgaactgtagaaaggtggcatatatattgtttccttgctaatgttagatttcaataacatttaaatttgtagtgatgtattcctaatcaagactcctcacaatatggcttcattgatacagggaaaggatgtgaggaggttctgaacttggaatgcaaccttccaagctccccagaatggcctgtaggtcaatggatagtttccatctgtgcagctcactgtgataaaacaagggcaatgtgcttttgtgggcctgggacaaaatacccagatcgtcctgtggcagaagcttgtggttttaaaacaattttacctgcaaaacctgatggtccaaagcttactgattggaaaacacctgacctggaaaacatacttacaacaaacagcagtaagttaggatggtgtaatgtggtccctgaggacgcatattcatccaaagtgaagtttaaagaagaatgtgattgcaaatatgatggtctctgggggcagttctgtgagacacgtgctgaatgcagctgcatcaaccagtgctctggacatgggcattgccgtggtggtttctgtaaatggatattttgggattgattgcagtatcccatcagcatattcgcttgcatatgactggccctcgtggctccagacaccagtgaatttaccagatctgaaaactttgaacagtaccaccattggtgttaaggccgttgttcagaaaaaaaggccactgatatatgtatatgatttgccagctgagtttgacagtcatcttcttgaaggacgacattacagattccagtgtgtaaacagaatatatgatgacatgaatagaactatatggacccagcaattgtatggtgctcagatagcacttcatgagagcattcttgctagccctcaccgcactcttaatggggacgaagctgattatttctatgtgccagtgcttgactcatgtctaataactagatccgatgatgctccacatcttctattgccgagggacctgcgccgaaggagctaccatgcacttgagtactatagaatggcacatggtcacatagctcagcagtatccttactggaaccgcacttcgggaagagaccatatctggttcttttcatgggatgaaggtgcctgctatgcaccaaaagagatttggaagagcatgatgcttgtccactgggggaacactaacacaaaacataagaattcaacgacagcttattgggcagataactgggatgatattcctttggataagagaggcaaccatccatgttttgatccaagaaaggatctagtgcttccggcatggaaggaacctaacccaggggccatatggttaaaactgtgggcaaggccaaggaacaaccgtacaacacttttttatttcaacggtaatctaggttcagcatacgaaggaggccgtccagaagacacgtatagcatggggattcggcaaaagctagcagctgaatttggttccacaccaaacaagcagggaaggcttggacggcagcatgcggccgatgtgacagttacctatctacgaactgaaaaatattatgaagaattagcaagctctgttttttgtggtgtcctgccaggggatggctggagtggccgtatggaagatagcatgcttcaaggatgcattcctgtaataattcaggatggaatttttctgccatatgagaacgtgctcaactacaatagttttgcagtccgcatacaggaagatgacatcccaggcctcataagcacactccgaggaataaacgatacgcaagtagagtttatgctgggaaatgtccgccagatgtggcagaggtttttctatcgagactctatattgttagaggcgcaaagacagaaaaaactcttctctgaagaggcaccctggtctgttgaggtatcgaaacttcctgatgacgacgatgtctttgcaacgtttatacaggtattgcattataaactgtacaatgacccttggcgtcaagatttcctgcaaacaaaggatactcggctgccgaacatctgttcaagaacttcctgaagcatttagtcaggcagcattgcaactgtaaagaataagcatatattcttaggaacaaaagtacaaaactgtagatatttcttgcattctggacaattgttcttttgactgatagcccaatttaattagaccatttcctgaaaaaaaagaaaagaaaaatgcactgttttcatctatcaaaacatggatagcatacatcgcatttacagctctggtgtttgcaatcccaagctacatcgatttttaccgagaaagaattggattttgtcgtcca

SEQ ID NO: 4663 - DNA, 2348 bp, Zea Mays
ccgcgtcgaccgaccgcaggtgcctttcctcggtgttactatggagttcatcggcagcggcaaggacgtcgtcaagaagatccagctggtggcggccggcgggctgagcaccgagctgccgtcgtcgtcgtcgtcgagaggagaaggggacgcgctgccggcgctcctggtcaaggctccgtcccagaccgtcgccggcttcgactgcgtcggcgccgacgacgtcgccgtgtccctgcacgagatggacgacaaggtggaggagctgcagggccgcccgggaagcaacaaggacactgccatcagagcctacgacgacgcgcacgtcgtcccgtactccgtctcgctcagcatgccggcgtcgccgtcggggttccacctgtcgcagttcatgcccgtggcgccgaccgaccacgtccatcgtcctgaacctacggcgcgatcgccgcggctggtcaagcagacgcggttccactcgcagcccatcgtcctgaacatgaacctgcacccgtcgtcgtcgaccaacaagaacgtcgacgaggcgcggcggtgggacagcgcgcgcgacaagcggttcgacccgttcaagaccttctcgggccgcctcgagcggcagctgtccaacctgcgcggccgcccgcaggaccccgtcgacggcgtatcgtcgtccccggactccgaggaggagaccgatcaggtccccgccgccgaccgctacttcgacgccttggaaggccccgagctcgacacgctcagggccacggaggtgccggtgctgccgaaagacgagaagtggccattcctccttcgcttccccatcagcgcgttcggcatgtgcctgggcgtgagcagccaggccatcctgtggaagacgctggcgtcggcgccggcgacggcgttcctgcgcgtgagccccgcggtgagccacgcgctgtggtacgtggcgctggcgctgacggcgctggtgtcgtccacgtacctgctcaaggtggtcttctacttggaggcggtgcggcgcgagttctaccacccggtgcgcgccaacttcttcttcgcgccgtggatcgcgtgcctgttcctggcgctgggcgcgccgcggctggtggtggcggagatgcaccgcggcgtgtggtacgcgctgatggcgcccatcttgtgcctggagctcaagatctacgggcagtggatgtccggcgggcagcggcgcctgtccaaggtggccaacccgtccaaccacctctccgtcgtgggcaacttcgtcggcgcgctgctgggcgccaggatgggcctccgcgagggccccgtcttcttcttcgccgtcgggctggcgcactacctggtgctcttcgtgacgctgtaccagcggctgcccaccaacgtgacgctgcccaaggagctgcaccccgtgttcttcctcttcgtggccgcgcccagcgtggcgtccatggcatgggccaagatcaacggccagttcgacaacggcgcccggatcgcctacttcatcgcgctcttcctctacatgtcactggcggtgcgcatcaacttcttccggggcttccgcttctcgctggcgtggtgggcgtacacgttcccgatgaccggcgcgtccgtggcgacgatcacgtacgcgacggaggtgaccaacgtgctgacccgggcgctctccatcgggctgtcgggcatctccaccgtcaccgccgccgggctgctggtgaccacggtgttccacgccttcgtcctcagggacctcttccccaacgacgtgtccatcgccatcacgaggaagaagcccaagttcagcaagatcctggcgcaggtccgctcgtccagctccgacatgaaggagctcgtgctctccctctccaacaagccggcggcgcagtccgactgcggcgacaccgagaccgacccgtccgtgaccgccaaatcccgagccgagccgtgactgctagctcaaaaaaaaaaaaacctagctaggagccgctcgctcgcggttccagtcgtctcgtctcgtctcatgtatatctgctggatcccttagctagatgtacatacatacatacatgtttttttttctctgacgaaggagagagaggtcgccgacgcgacgagcaggggtgcagagtgcagacacgcatccttcatccttggagcatttcagtgatgatgaggatatcgcgtgaggaaaaatagtactccttaatgtagatctaccgaccatgtactatgtaattggcgtggactacttatgtaattaagaataaagcgtgaacatgttgtggcctttaaagttttggaccatcaaccgcggccagtccgcgtatcgtcgtcgctgttgccgttccgac

SEQ ID NO: 4664 - DNA, 2383 bp, Zea Mays
cgagagcttggatcctagcaaggcactaccactaggcagcagcgacctgaccaggtgcctttcctcggtgttactatggagttcatcggcagcggcaaggacgtcgtcaagaagatccagctggtggcggccggcgggctgagcaccgagctgccgtcgtcgtcgtcgtcgagaggagaaggggacgcgctgccggcgctcctggtcaaggctccgtcccagaccgtcgccggcttcgactgcgtcggcgccgacgacgtcgccgtgtccctgcacgagatggacgacaaggtggaggagctgcagggccgcccgggaagcaacaaggacactgccatcagagcctacgacgacgcgcacgtcgtcccgtactccgtctcgctcagcatgccggcgtcgccgtcggggttccacctgtcgcagttcatgcccgtggcgccgaccgaccacgtccatcgtcctgaacctacggcgcgatcgccgcggctggtcaagcagacgcggttccactcgcagcccatcgtcctgaacatgaacctgcacccgtcgtcgtcgaccaacaagaacgtcgacgaggcgcggcggtgggacagcgcgcgcgacaagcggttcgacccgttcaagaccttctcgggccgcctcgagcggcagctgtccaacctgcgcggccgcccgcaggaccccgtcgacggcgtatcgtcgtccccggactccgaggaggagaccgatcaggtccccgccgccgaccgctacttcgacgccttggaaggccccgagctcgacacgctcagggccacggaggtgccggtgctgccgaaagacgagaagtggccattcctccttcgcttccccatcagcgcgttcggcatgtgcctgggcgtgagcagccaggccatcctgtggaagacgctggcgtcggcgccggcgacggcgttcctgcgcgtgagccccgcggtgagccacgcgctgtggtacgtggcgctggcgctgacggcgctggtgtcgtccacgtacctgctcaaggtggtcttctacttggaggcggtgcggcgcgagttctaccacccggtgcgcgccaacttcttcttcgcgccgtggatcgcgtgcctgttcctggcgctgggcgcgccgcggctggtggtggcggagatgcaccgcggcgtgtggtacgcgctgatggcgcccatcttgtgcctggagctcaagatctacgggcagtggatgtccggcgggcagcggcgcctgtccaaggtggccaacccgtccaaccacctctccgtcgtgggcaacttcgtcggcgcgctgctgggcgccaggatgggcctccgcgagggccccgtcttcttcttcgccgtcgggctggcgcactacctggtgctcttcgtgacgctgtaccagcggctgcccaccaacgtgacgctgcccaaggagctgcaccccgtgttcttcctcttcgtggccgcgcccagcgtggcgtccatggcatgggccaagatcaacggccagttcgacaacggcgcccggatcgcctacttcatcgcgctcttcctctacatgtcactggcggtgcgcatcaacttcttccggggcttccgcttctcgctggcgtggtgggcgtacacgttcccgatgaccggcgcgtccgtggcgacgatcacgtacgcgacggaggtgaccaacgtgctgacccgggcgctctccatcgggctgtcgggcatctccaccgtcaccgccgccgggctgctggtgaccacggtgttccacgccttcgtcctcagggacctcttccccaacgacgtgtccatcgccatcacgaggaagaagcccaagttcagcaagatcctggcgcaggtccgctcgtccagctccgacatgaaggagctcgtgctctccctctccaacaagccggcggcgcagtccgactgcggcgacaccgagaccgacccgtccgtgaccgccaaatcccgagccgagccgtgactgctagctcaaaaaaaaaaaaacctagctaggagccgctcgctcgcggttccagtcgtctcgtctcgtctcatgtatatctgctggatcccttagctagatgtacatacatacatacatgtttttttttctctgacgaaggagagagaggtcgccgacgcgacgagcaggggtgcagagtgcagacacgcatccttcatccttggagcatttcagtgatgatgaggatatcgcgtgaggaaaaatagtactccttaatgtagatctaccgaccatgtactatgtaattggcgtggactacttatgtaattaagaataaagcgtgaacatgttgtggcctttaaagttttggaccatcaaccgcggccagtccgcgtatcgtcgtcgctgttgccgttccgac

SEQ ID NO: 4665 - DNA, 2663 bp, Zea Mays
tgttttcttgtggttctcgcgtgctactgtgctgagaggggaccaggaagaatccgtcgtccggccggctcgctctctgccggccatgacgagcgccaataaggcgaagctccagctgcaggagagggtcccgctcccccgcacggcgtggaagctggccgacctcgccgtcctttccctgctcctggccctcctcgcccgccgtgcgtcctcgctggtgtcgtcgggcggcacggcggccgcgtgcacgtggtgctgggtcgccgcgctcatttgcgaggcgtggttcacggtggtctggctgctcaacatgaacgccaaatggaaccccgtccgcttcgtcacgcaccctgaacgcctcgccggatattgggcgggcgacgacgagctgctgccggcggtggacatgttcgtgacgacggcggacccgaagctggagccggcggtggtgacggtgaacacggtgctgtcgctgctggcgctggactaccccgcgggcaagctgtcgtgctacgtctccgacgacggctgctcggcggtgacatgctacgcgctgcgcgaggccgccgagttcgccaagctctgggtgccgttcaccaggaagcacggcgccaaggtcagggcccccttcgcgtacttctcctcctcctccggcggcggggcggcggagcgtggcggtggcggtggggccgccgacgccgacgccgagttcctgcgcgcttggacgtccatgaagaacgagtacgaggagctggtccgccggatcgagagcgccgaggagaagtctctagtccggcgcggcgacggcgcgttcgccgagttcgtgggtgctgaccgcgggaaccacccgaccataatcaaggtcctgtgggacaacgacagcagcaagagcgagagcgatgagcaggcggcaggggatggagtcccaagcctcatatacgtctcgagggagaagagccgcacgcagccccaccacttcaaggccggggccatgaacgtcctgacgagggtgtccgcggtgctgaccaacgcgccgatcatgctgaacgtggactgcgacatgttcgccaacaacccgcaggcggccctccacgccatgtgcctcctcctgggcttcgacgacgaggtccacagcggcttcgtccaggcgccgcagcggttctacggcggcctcgcggacgaccctttcgggaaccagatgcagaaagttggacacggaattgccggactccaaggcatattttactgcgggacgggttgctttcaccgcaggaaagtcatgtacggcgtgccaccgggctccggcaccggcgccaccaaagcagattcaccgtcctacaaggagctacagaagaagtttggcagttcgaaagaactgatcgagtcggcgaggagcatcatcacgtcgaaagaagcgccagctgcggtggcagatctaacgagccgcgtcgaagtggcgaagcaagtctctgcctgcagctacgagacgggcacgagctggggtcaggaggttggctgggtgtacgggtccatgaccgaggacgtcctgacggggcagcgcatccacgccgccggctggaggtcggcgctcctgagcccggacccaccggcgttcctcggcggcgcgcccaccggcgggcccgccagcctcacccagtacaagagatgggcgacgggcctgctggagatcgtcctcagccgccacaacccgttcctcctctccgcgtccaagcgcctccgtttccggcagtgcctcgcctaccttgtcatcgacgtgtggcccgtcagggcgcccttcgagctctgctacgcgctgctcggaccctactgcctcatcgccaaccgctccttcctgccaaaggcatcggagcccggcttcgtcgttccgctggcgctgttcctggcctacaacgcgtacaacctgggcgagtacgtggactgccggctctcggcgcgcgcctggtggaacaaccagcggatgcagcggatcacgtcgtcctccgcatggctgctcgcgttcctcaccgtggtcctcaagacggtgggcctctcggagacggtgttcgaggtgacacgcaaggagcagcagcagcagcagggctcgcccgacggcgacggcgccgacgccgacccggggcggttcaccttcgactcgtcgccggtgttcgtcccgccggcggcgctcgcgatgctgagcgtcgtcgccgtcgccgtcggagcgtggagggcggtcaccggtggcggcggcggcccgggcgtcggggagttcgtgtgctgcgcctggcttctgctctgcttctggccgttcgtgaggggcctcgtcggcggcaggggaagctacggcatcccctggagcgtcaggatcaaggctgccctgctcgtggccgcgttcgtgcacctgtccacacgcaagtaacttgcccggccccggcgtcgactcaccactgctactgctgcggaaggttttcatgtcagagacccgtaataatgcagacaacagcatgttccgcctaagatttgtacacaactctctgcttccactgcttgtatagaattcttgctcaagattacaagtcgaggccagtggtcggcgatagaaacagcgagtattattttatcctactcccaccagttcctgagcgtcgattctgggccgcgtctga

SEQ ID NO: 4666 - DNA, 2793 bp, Zea Mays
aatctaccataatgtgccaggcgaagctagacactaacaccttgtctgcgagtgtgtcgtctatatatatacacgatcacgtaccagtaccaactggttccgtctgtgttttcttgtggttctcgcgtgctactgtgctgagaggggaccaggaagaatccgtcgtccggccggctcgctctctgccggccatgacgagcgccaataaggcgaagctccagctgcaggagagggtcccgctcccccgcacggcgtggaagctggccgacctcgccgtcctttccctgctcctggccctcctcgcccgccgtgcgtcctcgctggtgtcgtcgggcggcacggcggccgcgtgcacgtggtgctgggtcgccgcgctcatttgcgaggcgtggttcacggtggtctggctgctcaacatgaacgccaaatggaaccccgtccgcttcgtcacgcaccctgaacgcctcgccggatattgggcgggcgacgacgagctgctgccggcggtggacatgttcgtgacgacggcggacccgaagctggagccggcggtggtgacggtgaacacggtgctgtcgctgctggcgctggactaccccgcgggcaagctgtcgtgctacgtctccgacgacggctgctcggcggtgacatgctacgcgctgcgcgaggccgccgagttcgccaagctctgggtgccgttcaccaggaagcacggcgccaaggtcagggcccccttcgcgtacttctcctcctcctccggcggcggggcggcggagcgtggcggtggcggtggggccgccgacgccgacgccgagttcctgcgcgcttggacgtccatgaagaacgagtacgaggagctggtccgccggatcgagagcgccgaggagaagtctctagtccggcgcggcgacggcgcgttcgccgagttcgtgggtgctgaccgcgggaaccacccgaccataatcaaggtcctgtgggacaacgacagcagcaagagcgagagcgatgagcaggcggcaggggatggagtcccaagcctcatatacgtctcgagggagaagagccgcacgcagccccaccacttcaaggccggggccatgaacgtcctgacgagggtgtccgcggtgctgaccaacgcgccgatcatgctgaacgtggactgcgacatgttcgccaacaacccgcaggcggccctccacgccatgtgcctcctcctgggcttcgacgacgaggtccacagcggcttcgtccaggcgccgcagcggttctacggcggcctcgcggacgaccctttcgggaaccagatgcaggttatattcgagaaagttggacacggaattgccggactccaaggcatattttactgcgggacgggttgctttcaccgcaggaaagtcatgtacggcgtgccaccgggctccggcaccggcgccaccaaagctctggcagcagcagattcaccgtcctacaaggagctacagaagaagtttggcagttcgaaagaactgatcgagtcggcgaggagcatcatcacgtcgaaagaagcgccagctgcggtggcagatctaacgagccgcgtcgaagtggcgaagcaagtctctgcctgcagctacgagacgggcacgagctggggtcaggaggttggctgggtgtacgggtccatgaccgaggacgtcctgacggggcagcgcatccacgccgccggctggaggtcggcgctcctgagcccggacccaccggcgttcctcggcggcgcgcccaccggcgggcccgccagcctcacccagtacaagagatgggcgacgggcctgctggagatcgtcctcagccgccacaacccgttcctcctctccgcgtccaagcgcctccgtttccggcagtgcctcgcctaccttgtcatcgacgtgtggcccgtcagggcgcccttcgagctctgctacgcgctgctcggaccctactgcctcatcgccaaccgctccttcctgccaaaggcatcggagcccggcttcgtcgttccgctggcgctgttcctggcctacaacgcgtacaacctgggcgagtacgtggactgccggctctcggcgcgcgcctggtggaacaaccagcggatgcagcggatcacgtcgtcctccgcatggctgctcgcgttcctcaccgtggtcctcaagacggtgggcctctcggagacggtgttcgaggtgacacgcaaggagcagcagcagcagcagggctcgcccgacggcgacggcgccgacgccgacccggggcggttcaccttcgactcgtcgccggtgttcgtcccgccggcggcgctcgcgatgctgagcgtcgtcgccgtcgccgtcggagcgtggagggcggtcaccggtggcggcggcggcccgggcgtcggggagttcgtgtgctgcgcctggcttctgctctgcttctggccgttcgtgaggggcctcgtcggcggcaggggaagctacggcatcccctggagcgtcaggatcaaggctgccctgctcgtggccgcgttcgtgcacctgtccacacgcaagtaacttgcccggccccggcgtcgactcaccactgctactgctgcggaaggttttcatgtcagagacccgtaataatgcagacaacagcatgttccgcctaagatttgtacacaactctctgcttccactgcttgtatagaattcttgctcaagattacaagtcgaggccagtggtcggcgatagaaacagcgagtattattttatcctactcccaccagttcctgagcgtcgattctgggccgcgtctga

SEQ ID NO: 4667 - DNA, 1153 bp, Zea Mays
tgcagattcactattttaactctcgtggcaacgaaatgacacgttagttcataaaaccaaatacgctaactttttctgatcggcatccaacgacgcaattgacatcccctcgcctaccccagctctacccgcgacgaagcatcaccaggaaggatgacgtgctcaatggatctcccggccaagggcgggttcagcttcgacctgtgccgccgcaacagtatgctggagaagaacgggctcaaactcccgggattcaggaagaccggaacaaccatcgtcggcctcgtctttcaggatggggttgttcttggggcagacacaagagcaactgaggggcctatagttgctgataagaattgtgagaagatccactttatggcgccaaacatttattgttgtggagcaggaactgctgctgacactgaggctgttacagacatggtcagctcgcagctacagctgcaccgttacgcaacgggtcgcgaatctagagtcgtaactgctcttacactgctgaagtcacatctctttaggtatcaaggccatgtcagtgctgcccttgttcttggtggagtggattgtactggaccgcatcttcacactgtttatccacacggctccactgatactcttccttttgccacgatgggttctggatcccttgctgcaatgtcagtgtttgaatcgaagtataaagagggcctcactagggaagagggaatacaactggtgtcagaagcaatatgtgcaggtatcttcaatgacttgggtagtggaagcaatgtggatgtctgcgtgataaccaaggggaagacagaatacttgagaaaccaccagttgccgaatcccagaacttatgttagttcaaagggatatagcttcaccaaggggcagactgaggtgttgtccgcaaagatcacacatctcaagcagaaggttgaggtcactgagggcggtgatgctatggaggagtgatcctgtatgcttgcatccagataaatctcaaatccgaaagtcattgagttatcttctgacgacagttgtgggccagtggcccaaagcatgctgagggcagccatggctctcagggcatcgtgtgtatgcttgttgaggttcctatgctctaggctcactcaaatctggaatcactgag

SEQ ID NO: 4668 - DNA, 1209 bp, Zea Mays
atcccaaggtcatttcggttaatctccacacgcatcgcggacacggagacttgccttccttttggtgcggaaaaagaaagagaggagaagcgaaggaggttctcagttggagcggctccctctccccgcgcgcgccaccgcctccgatccgagcagccgcctacagtcaacccattcaacctcaaatgttccttgtgaggtatcatgacagaacagcaggaaggtgttagcaagagctcttcctcaagtattagcagcagcactcaggagagtgaggaggaactgaccatcggtacccttataaccgaagcaacaaacacaacaaacagtgccaagagtcttggaaagcgcctttcacacttagattcgatcccgcacactccacgtgttaatgggaaaattccagattttaataatgcgacaattgatcatgaatcattattagaaagattaggcacttatggcttagctgaatatcaaatagaaggagatgggaattgccagacttaataggtcgtcgggagggggagtactattgcttcaatccatcttctacttagtttttcgagctctggcagaccagatattccgcaatcctgactatcacaaacatgtgaggaaggcggtagtgaagcagctgaaggagttcaggaaacactatgaaggttatgtgccaatggaatataaggtttacttgaagaaaatgaaaaggtctggggaatggggtgatcatgtgaccttacaggcagctgcagacaggtttgctgctaaaatatgtctgttgacatcgtttagagacacatgcctagttgagatagtccccagagatgccactccaacaagagagctttggctaagtttctggtgtgaagtacactacaattcattgtatgcagttgaagatcttccaacacggaaaactaagaagaagcattggctgttctagctcgccaggctttggtgatttcttggtatgctattggtcttctctttgtagtccagcagcatctgtaagcctgcttagttatgcctttgtttgttgtaagttgtaacttgacctggaatcaaattcatttaagatcatgcaaaatacagtgagctcttgcttcgtccttggctgaaatatttccagcacatagtaaacatgttttcagggacctattttttattttttttggggggggggggggggggtattttgcttcgtag

SEQ ID NO: 4669 - DNA, 2145 bp, Zea Mays
atgacactttatccaaacaaacaaacgaaggaaaattccagcacccttgctccatcttattcaagtgatagcctgtctggtgcagatccagagaactcacaaccacttctgggcagtgcctcaacaacacttgctacaggtaccaatgaatctgatgacagtactgatttggatgttctattggctgagggtgagggagcagtgaatttgaaaaacaaaagagggccaagaagggggggtgatttcacatttcgtgaagccttagtaaaggcggacttctggctactgtttgttgtttacttttgtggagttggcacaggagtcactgttctcaataacctggctcagattggaatgtctgttggtgctaatgatacaactattttgttgtgcctctttggcttctgcaactttgctggccgtatctttggtggatctgtctctgaatatttcgtaagactcattccgcagaagagtattctttaactatgagaagaggatacggcttctcagccctcctgagaagatatttgagtactttgcttctgtgaggaacccagaaggggaagtttacatgttgcctggggacttgatgagagcagtagtccctgtttttcctccatcagagtccaccatagttcgtgaaggaagattaagaggggagcggagccctggagagttgcattgtgctccatcggagttctttatgctgttagacactaatagtgacggtctcatctcctttgccgagtaagtgaaatgagctttagaaaaatgttggcccaaataattgtattctgaatattgaagtggagattcgcactcctgaatgaatactgtcattaagttgctgtaagaaagccttgaaaatctgtaggtgtttatctagcacctgttcaggataactgatgtactgtatatatcaataaatcattatgtgacgccacaggtatgatgcatatgttgaaagtcatggtgcaatgcattagctatttgccatctgatgatgcattgttgcagacatattatattattggcctctcagttacctgtgttgttttgacaggtacatcttttttgtgacattgctcagcattcctgagtcacatttcactgcggccttcaaaatgtttgacgttgaccacagtggggtgatagacagagaagagtttaagaaagtaatgtcactgatgcggtcctttaacagacaagggtccactcataaggatggtttacgtattggacttaaagttggccagcctgtggagaatggtggggtggttgagtacttctttgggagtgatgggaacgagcctctacactgtgtcaggttctcaaattttttgaaggagttgcatgacgagattattcgattggagtttagtcattatgatgtcaagtcgtctaaaactataccagcaaaggattttgcattgtccatggttgcttctgctgacatgaaccatatcaacaagctgcttgatagagctgatggtttggtcaaggagccagatctgaaggacatacgcatcacctttgaggagtttaaggcatttgctgacttgcgacaaagattggagccactgtcgatggctatctttgctcatgggaaagtgaatggattattgacaaaggaggatctaaaacgtgcaacacaacatgtttgtggtgtcaacttaactgatagagtggtagacatcattttccatgtgttcgacacaaatcaggatgggaacctgagctcggaagagttcttaagagcattagaaagaagagaaactgctattcgtcaaccaacaataccaggtccatggggttttttgtcttgctggttcagtggtaggaagtgttcacttaaacaggtggtgctctgatttggcccctacttgatcctcactgaatctgtcatccaccttcaattgtcatctcccgttgcaggaggtaatcacgaagcagtgcctagctgatcggtaaaacgactttgttgtacatgtcgtctccgagtccgaagcttgcctagcagtagcagctgtaattgtaagtagtgtcagccctaggactgaaccttgtgttattctcatatgtaaatcaaaccccatacgatttaaatatatgatatctgttggcgttgactggacgtcaatc

SEQ ID NO: 4670 - DNA, 1024 bp, Zea Mays
ctcgccatggagggcttcacgggtgcgcacgtttcttctcgcgtcatctccgcttgcgccgcccctagccccaccgtcgtcctccccgtgaagccgccggttgagacgcccccctctcgtgttgcctccatgtccgcgcagatatgcctcgctcgccaccccgtcgtgttcctccccgagacaccgtggccagcctctagcccgcgctcttcctcgtcacggcgatgccggcttcccggaccccttccggcttgcttccatgccttcgcttcggtttgttctgagaggctacacttcctctatgagtcaaggttggccgtcggcaagagctccgaagggttccaggcgctgcagcaatctacaccagggccagcttcgcgtccacttctgcacaggcgagtgcggctaattgttccaagtttaagcttcacctctagtcatgggtaaagagaagttacacatcaacattgtggttaatggccatgtcgactctggcaagtcgaccaccactggccacctgatctacaagcttggaggcattgacaagcgtgtgattgagaggttcaggatgttcaggttgagcttgagaaggagaagcaagaaaaaacaaaactttgacaagtgttggataacttgaagacggaatcagaaacttcaagggtaaaacattatgaggaaatagaagttgtaaagatgacatcacaagaaatgcacgtcctcctttgttaaccgctaaacttcaaccagggccagcacaatccaaggccataaagtttttaagcccccaacagtgaattattgtagtatgtttcttttttgaaaattggttgttggttgaactatgtcgggttgttttatcaatagttggttgttagtttttcacaagtaggacttagtggctccaagtttgttgatttttgttactagtagccttaagttttgttgaacaatgttgcttcttgctagatgtattgtgacctatgaattggaatttgtctgccacaattttggtcattggatatgt

SEQ ID NO: 4671 - DNA, 968 bp, Zea Mays
gccacaccagctatataaacacagctgctctcctgctccctttcccttccccccttccgttccgttccgatttgacgagttggtggctgctatagattcactccacccctctccatttctgataagtatccagctagctaccagtgtatgcaccaggcagcagcagcatggcggagtgcaaggacgacgacagcggccggcggtctccgtcgtcgtccatggacagcagcacccaccccccggcgctctccaccgcgtcctcggcctcccgccgcccgccggagaggagggaccagctcagccccgacctgcagctagggctcagcctgtcgccggcgtcctccgccctcctggtagcggagacaaacaacagcatcgtcccttctacgccaaggaaccaagcactcccggattggcccccgatcaaaccgttccttagaagcgccctgactgcctcggcacgccgacggcgaacgctgttcgtcaaggtgtacatggaaggcgtcccgatcggccggaagctggacatgctcttgctggacgggtacagcagcctcctagcgaaactttgccacatgttcaaggcatctatcacttatgctgacgctgtggagtaccatcagcgggttcctcacgagaaggccgcgcatgttctcacctatgaagaccatgatggagactggatgatggttggggatgtaccgtgggagctctttctcggaagcgtaaagaagctgaggattgcgagaaccgacaggaaagattttgctgaacagagtggagtcgtgatgctgaggctatactaaccgtgtacagtgtactgaagaaacgccagccttgctaccatccctgcaaaattaaattttggtattttatgtttcctttcctgtttctttgactgccttgtaaataccatggttatttgttaaagaacaagcaatttgcatggaaaatattatagttccaag

SEQ ID NO: 4672 - DNA, 1837 bp, Zea Mays
atttttgtttttattttttagttttagtcgacggcgacggtggtgggagacgggacgggaggcacagccgcggataaataaagcgggggaggcgagctcccctgctagaccgacgacgtggtgtaccagcaatccatcggtgcggtttgcagcctggactggccaaggtcaaatttcctggtccaggtgttggatgactctgatgatgctaccacttcggcacttatcaaggaggaggtggagaaatggcagcgagagggtgtgcgcatagtataccggcaccgggtgatccgggatggctacaaggctggaaacctgaaatcagccatgaactgcagttacgtgaaagactatgagttcgttgtcatcttcgatgctgatttccaaccacaggcggacttcctgaagcgcaccgtgccccatttcaagggaaaggatgacgtcgggttggttcaggcgagatggtcgttcgtaaacaaggatgagaacttgctgaccaggcttcagaacataaatctttgcttccacttcgaggtggagcagcaggtgaacggggcgtttctcaacttcttcgggttcaatggcaccgcgggagtctggagaatcaaggcgcttgaggagtctggaggatggatggagaggacgacggtggaggacatggacatagctgttcgagcgcacctcaaagggtggaagtttctctttctaaacgatgtcgagtgtcagtgtgaattgccagaatcgtatgaagcgtacagaaagcagcagcaccggtggcactcaggtcccatgcaattgtttaggctctgctttgtggatataatcaaatctaagatcggtttctggaagaagttcaacctcatattcctcttcttcctgctccggaagctgatactacccttctactccttcaccctcttctgcgtgatcctccccatgacgatgttcgtccccgaagccgagctccccgcgtgggtggtgtgctacatcccggcgacgatgtccatcctcaacatcctcccgtccccgaaatcgttcccgttcatcgtcccgtacctgctgttcgagaacaccatgtcggtgaccaagttcaacgccatggtctccggcctgttccagctggggagcgcctacgagtgggtcgtcaccaagaagtcggggcgctcctccgagggcgacctcgtggccctcgtggagaagcactccaagcagcagagggtaggctcggcgcccaacctcgacgcgctgaccaaggagtcgaagggcaccgaggaggagaagaataagaagaagaggaagaagaagcacaacaggatctacaggaaggagctcgcgctgtccttcctcctgctgaccgcggccgcccgcagcttgctgtccgcccagggcgtccacttctacttcctcctgttccagggggtttcgttcttggtcgtcgggctcgacctgatcggcgagcaggtggattgatagcagttgaataatgggttatatatatatatatatatatatattttcgcttgaagaaatcctcgcaggcatcatcaaattcaaagggctctttgtgaagggaagagcgtcgccttcttggatgcggaaaccttgggtccctgttcctgttccaggaggggtcggaaacgtggggagctgtgtagataggtatagcttggggtttagcctgcgagatgcttttgttcttccaggtttcgattcttttgtaagaatatttgtgcccctacatgcaagggctcttttgtttttttctttttttgacagactttaccttcaaatgaagataatacttgtgttccattccatctcgctactacatgccgtg

SEQ ID NO: 4673 - DNA, 899 bp, Zea Mays
aattctcggaagccggccgatgtcgagtccaaaattgcaaaaatctctgccgtgcctctcgtctctcttctcaggcgccacgcaaaacgttctccgttttccctctccggatccggcccgcgggggccaggagctaccgatgatccggaccgcaacggtgcgagcgcgtctcctcctatcgcgctcctacgtagcacaggcacaggcagcttctcgctggcctctcgtccgctggaaggcttcgcatcttggatctgtacgctctttctatcagatggacattacaaggcaatacaaaaataaaagtttgactgcaagagggtgccatagctcccctgagagtcaaggtgaatggttgggaactgatcactgaaggtggtgttctgaaattacatagaacatggaaggtgaagaactttgttaaaggacttgagttctttcagcttgttgctgctattgctgaggaagaaggaggtttaacaagtaatgatttcatccttgctgcgaagatcaatcatctcactttagacggcattataaggaagaaagctaaatagccaatgtctcagaagcaactcaaatatgcaacttatatttgtttggaattttgtatgcgcagcgatggagaagccaaatgttgaggacacctcgccctgagtgagattaacttgctgaaatgtagtgccttattcagtagctcattttaccttgttattaattagtaatttgcatgagtagacgttgaatccatcattgtacttggttacctacttaccttgcctgtcagttttggaaagacacatggtcgagtaaacataccgatccattgccacttgctaaaggatgtttgaatgcactagagctaatagttaattggctaaaaattactagtgaaatta

SEQ ID NO: 4674 - DNA, 915 bp, Zea Mays
cccgttgccaattctcggaagccggccgatgtcgagtccaaaattgcaaaaatctctgccgtgcctctcgtctctcttctcaggcgccacgcaaaacgttctccgttttccctctccggatccggcccgcgggggccaggagctaccgatgatccggaccgcaacggtgcgagcgcgtctcctcctatcgcgctcctacgtagcacaggcacaggcagcttctcgctggcctctcgtccgctggaaggcttcgcatcttggatctgtacgctctttctatcagatggacattacaaggcaatacaaaaataaaagtttgactgcaagagggtgccatagctcccctgagagtcaagaattagcaatgaaaagctgtgttccatgcaactctaaggatttaggtcccatgtcagaagattctgctaaaaagttgcttgaacaggtgaatggttgggaactgatcactgaaggtggtgttctgaaattacatagaacatggaaggtgaagaactttgttaaaggacttgagttctttcagcttgttgctgctattgctgaggaagaaggtcaccatccagatcttcatcttgttggttggaataatgtgaaaattgatgtttggactcattctgtcacgatggagaagccaaatgttgaggacacctcgccctgagtgagattaacttgctgaaatgtagtgccttattcagtagctcattttaccttgttattaattagtaatttgcatgagtagacgttgaatccatcattgtacttggttacctacttaccttgcctgtcagttttggaaagacacatggtcgagtaaacataccgatccattgccacttgctaaaggatgtttgaatgcactagagctaatagttaattggctaaaaattactagtgaaatta

SEQ ID NO: 4675 - DNA, 1460 bp, Zea Mays
tccggaagaaacaaatcctgttcgctcttcttgtcgagaccagaccaccgtatactggagagaaagaatcctccctcgcctccccaccccgccccacccatggcctccgccgccagcactgccgccgccgccggggccccgctgcgcctcctctcatcctcttccaaccgtatctccaagcccttccttccccgcccccaccgcctcaccctctcctcccccatctccttccagcgcctcacagcccggtccgcggcctccccttccccatccaccgccacctcgtccccgtccggctctgtcgacccggcgcaactgccccccgcgctacgcgacatcgtcggcctcttccagtccgtcccggacgcgcgcacccggtacaagcagctccttgcctatgccgcgcgcctgccgcccatggacccggcgctcaagaccgacgccaaccgcgtccggggttgcgtctcacaggtctgggtccacgccgagcccgacgagggcgacgccggccgccgcagcgtcaggttccacgccgactccgacgcgcagctcaccaagggcctcgccgcgctgctcgtgctagggctctctggcgcgcccgccgcggatgtggccagggtgcccgttgacttcatcgagctgctcgggatcaggcagagcctctctccctccaggaacagcggcctgctcaacatgctcagcctcatgaagcgcaaggcacttgagatcgccggtggtgactcaacgtcaagtcagcaatctgtccaagaggttaccagaccgcgtctagtgaacgggaaagagcctgaatttgcagctttcgaggtgcaagaaaaggaaaaggaaaggccacaggatgcagagaggcgcgacgaggatgaacaattgggtcaacttctaccacttgatgcagaagtgaatggtgctgcgggcggtgggaggaaggagaggataagggagagtttggagagggcactttctccggtagagttggagattgaagacatatcacacctccacaagggccatgctggcgtggctgggaccaatggggagacacatttcaatgtgagggtggtgtccaaggagtttgaggggaagagcttgctcaagaggcacagggctgtctatgatctcctgcaggaggagctcaagaccgggttgcacgccctgtcaatcgatgcaaagactccatctgaagtttagcacaaaatcgctggtgttctccatgttcgggcatcaatcggtcctatttcccaacaattttctcaacaatgttcggtcaatcattaggtgttaaacatatccatggtagagttggaactttgaatggtggcgagtcctatttgatgtatgggtggttggcatccaacttaaactgtccattttatgctagtacggaagtgctatcatacttgtgttgctaagttgcttcatataatttaaaaacgaaatagcgg

SEQ ID NO: 4676 - DNA, 1896 bp, Zea Mays
gactactcacaaggccggagttctggaccctgatgcatactcggtagtcggtacgcacgagtattgcacgtgacaaggcctgtcactgtcagccatctgacgagggaaaaaaaacaagcaactgatgacggccgctgccgttcgatttgagagccaccgattaacccatccatccacctcgccgccgccggagagtatggttgagcggcggtacaccgaggaggaggaggccctcgagatcaagtccctccgccgcatcatcgccgcctacgccaactatcaagatgctgcagaaagggatgtcgagagatatgagcggtcattcaaaatgcttcctacagcgcacaagaaacttcttttccacctcggtctgaagtaccaaagtctgagatggtgtatatccatgaatgcatcttttatcatgaaaatgcttgaggcgtttgaacctccttttgacatgagtcagtatgtagatgatgatgttcatgctcatccatcaatcttgcatgaccatagtcatatggattgcactcattccagcgagaggggtgattgctctataattgctatctccagaagcaatttatcattggatgagcagcatgatagtcccaaagaatataccaagagacatgaaccttcaagagaaactgataataataagggaggggaagatcacatggcaggctgctcccagcctgttggcaacatggggatgtctcaaggtgcaggcattgcatgtaatggtgataaaaatacgggtgcagcagcttatttccaggataaagatgtctctgcatcttctgctattgaaaatgtagcactgcggcactgcacagcttcatcgctcaagttaaatgttcctccaattgatgttgacaaggtaagatgcatagtaagaaatatcgtgagagattggggtgatgagggtcaaaaggaacgtgatgagtgctataagcccattcttgaggagcttaatcgcctttttcctaaccggagcgatcagaggcctccttcatgtcttgtccctggtgctgggcttgggagattggctcttgatatatcttctctggcactcaagaagctaatgagtggtccatatatccttggatacatagcaactgcaattctctttctgacaacgatcaacttcgtcctgtttcatttcctgacattcatccctcaaggtatcacagagggattttcaatgtgcgctggggactttgtagaggtctacagcgaggaaagccaagaatctgcatgggatgctgttgtaacttgctttttcctggatacggcacacaatatcgttgaatacatcgagatcatatcaaaagttctcaaggatggtggggtctggattaacttgggtccccttctgtatcactttgctgattcatatgggccagatgatgatatgtctattgaattaagtttggaagatgtgaaaaaggttgcttaccattatggatttacaatggaggtggagaaaatgatcgagactacttacactgcaaacatgaaagcaatgatgcagaatcggtaccgtgcagcattctggacaatgaggaaagatgcgtctcggtcaaaagcttgtaagcctcgttgaagtgaagatcatccatggcggacgatcagttcgtgccatcattattcactgttgtattcaaactccacacaggccgtgccagaccaagttagatagatatatcagatgagctgcctgattcacagaatataattggcttaacataggaaaggaggtgctgagccacgctagctagctcatccttttctcctatatcacagatattcaaactgtactatgaactctgtaagaatgagcaataaactaagcagacagaagttaaaaatagaagtaacagaaatttagaa

SEQ ID NO: 4677 - DNA, 5797 bp, Zea Mays
gactactcacaaggccggagttctggaccctgatgcatactcggtagtcggtacgcacgagtattgcacgtgacaaggcctgtcactgtcagccatctgacgagggaaaaaaaacaagcaactgatgacggccgctgccgttcgatttgagagccaccgattaacccatccatccacctcgccgccgccggagagtatggttgagcggcggtacaccgaggaggaggaggccctcgagatcaagtccctccgccgcatcatcgccgcctacgccaactatcaagatgctgcagaaagggatgtcgagagatatgagcggtcattcaaaatgcttcctacagcgcacaagaaacttcttttccacctcggtctgaagtaccaaagtctgagatggtgtatatccatgaatgcatcttttatcatgaaaatgcttgaggcgtttgaacctccttttgacatgagtcaaagcaatttatcattggatgagcagcatgatagtcccaaagaatataccaagagacatgaaccttcaagagaaactgataataataagggaggggaagatcacatggcaggctgctcccagcctgttggcaacatggggatgtctcaaggtgcaggcattgcatgtaatggtgataaaaatacgggtgcagcagcttatttccaggataaagatgtctctgcatcttctgctattgaaaatgtagcactgcggcactgcacagcttcatcgctcaagttaaatgttcctccaattgatgttgacaaggtaagatgcatagtaagaaatatcgtgagagattggggtgatgagggtcaaaaggaacgtgatgagtgctataagcccattcttgaggagcttaatcgcctttttcctaaccggagcgatcagaggcctccttcatgtcttgtccctggtgctgggcttgggagattggctcttgatatatcttctctgggttttgtaagccaagggaatgaattctcatattacatgctgatctgttcaaatttcatcctgaaccacactcaagaagctaatgagtggtccatatatccttggatacatagcaactgcaattctctttctgacaacgatcaacttcgtcctgtttcatttcctgacattcatccctcaagtgcaggtatcacagagggattttcaatgtgcgctggggactttgtagaggtctacagcgaggaaagccaagaatctgcatgggatgctgttgtaacttgctttttcctggatacggcacacaatatcgttgaatacatcgagatcatatcaaaagttctcaaggatggtggggtctggattaacttgggtccccttctgtatcactttgctgattcatatgggccagatgatgatatgtctattgaattaagtttggaagatgtgaaaaaggttgcttaccattatggatttacaatggaggtggagaaaatgatcgagactacttacactgcaaacatgaaagcaatgatgcagttattggatattcggcccgactggttgtatatgggttgggttagtgcaacttttgaaagttcagttcagaaaaagctacggcgagaagccgagaagactagttgcggccgttggcccgccgaagcccaatcattcgcaggagacctcgtcgctggtttgcctccaaatgtgctcgccacgatcgcagccgtagaggaagacgcgggccttttttttgtctctttctctttctctacctgccgcgcgccggcgccggcggtcaaggtgaagttcttctctttatgtatcgtcatgaacaaagttatgtggtctttattagtaggtcaaggtgaagttcttctctttatgtatctatatcagcttagctgtgatatgcgtgtgagtcgtaaatttcgatatatgaaagtctgttcttgcatccgatcaggaattgtgaacatctctttcttcatatgcctctctttcgtgaaattggggatatgtctttcgtctagatttacttctgttcggctgctccgctggcggctgctgctgttcatgctcatgcacttggatgtcatgaattataaaccaaagatttgggaattatttaactatggaagccatgaattctatcctcattagggacacatgtttatattagaattcatggatcaaaagaataactaactagctgatagatagctgatagatatatggattaaatgatagatttaataaaaccatcagattggatgtgaggtatggatttatttaattcagtgttttccttaaccgagcaaggcctaacactttgcgtggatttaacttgaatcggcgaactctgtgccgcggttatcgctaaggctgaagtattctttcttggggcagttgaacgtgcgtactctaggatcattctttggattactctgaccgccggtgttgttgaccgctgaagctcccgtgcattgctgagtcaatttgactccgtatgccggccagagacttcaggaagactgaaacattagcattggtggtaagaggaaaagatggccatgccaagagttccagggcagcagctcctgacgccaaggagtatgacgaatacgaggaggagcacaccgagccttttgcggaagctgcgacgacctttacattggcagcaactaaataatggactgagttagctgacaataggccatttgattctatcccatgtttggtgcatgtagtgtatcatgtttcgtttaccatctctattgtcatgatcagagctctggctatcttttcaagaccatgctgagtgtacagaacttggacaatctttggcggacttcggaaaggcgattaagcttttgggctcttgtgaaggagatttgatggaaaaggtgttttctgaagttggttcaaagtcagagatgttgtcaataaagctgcaaagagaggcaatcagagcagatggacagacacaattgagccatgaaatagctttggagctaagtcagaggagtgctgctgctggactaaggccgattggagcagtggtcttcatgcaacggggtgtcctgaaggtttgcttgaggactactgacagtacagttaatacatcagagattgcaaaggcatatggcggaggtggaaaacgaagttcgagttcattcactctaagaatggatgagttcaacatctggacttcagtgaactcatgaattgaactggagaggtcacatagtgttcatactgtgggaactcgcaaccagctcatctgggcatggattccctcagtggtgaacatgtgaagatggggtggtctttttgtgctccggtatgagaggaaggaaaacaaaatcttagtctaacctaccatgttgatatgagcttacaggagaataatctcttcgatatgaatgactggagagcaatttggaggcataatgcttaagccgttcaagagaagatttgatgcctttaaatgaaaggtttgctggtacatcaaaagacgtattttatgctctttctaatctttctccagtagacctatgtgcttaattttagagatgataagggtggtgcgggccgaagatctgtcatactcctaggggccaattatagcttacacttatgttgttattagttttgaatgctgaacatacatggagatgggtagctcagctcagcttggatataacttggtttctatccaaactaatactttgctccatagggaatgcatctggcaacggaaattgttgtcaagctccagtagcagaaaggatcatcttcaattattgtaatcctgctccttaataatacattcttggatcttgctctgggcttaaaaaatctgcatcaccaaattgttcctcgttgcgaacatttatgtaatacagaaccttagaaactggaaatgtttattccattccggtaatttgggaatgatctgtgttaaaatcctttttaagtgtcataccacgcactatttttctgttcctcaactctatcgatcccataacctatttctgttaactggttactaaggacatgtacaatcccataaccaaattggtgggtatgcaatgcgtcaatgaaaaaaccatttcttcagtcctgtaatgttgttccgattgcgtcaatgaaaaaactgtaatttttgaccggggagatggtagcactagcatgtggggattaaagttcctaaatgttcagtactgtcctaaacacttgttttatcttttttgagtggaagtccgacgtccgagaggggctcgccattgggcttggcatgggcacagtcatgctgctcctcttctgcggctactcgctggtgatttgatatggctctaagctgatcctggagatggtgtacaccggagccaagtttctcaaattgaccatggtgttgtaaatttgatcaatgaagaagattcaagaattaccgttttactggattgccatgggatttcgccattcagatttccaatgcaaatgatgaggtcgtttatcactgtggttcaagaaaactacccgaatcgtcttggggtattgtttgtcatccgccttcctccagttgtcagagttattgcacagacatttcttcaagatacaaaccaaccaaggctgactacaagttaaagatgctctgtaaaaaggaaggatcagtttgactatatctttttgctggtagattgcaatatcacatggtatccgtggagatgaggacgacattgcctccaagtctgctccaccggcatccatcgacggtgcaaggtacggattcgagcctccggtccttcaatctagccaccaggtagattcgtctcagtggtggtcggattcatctcgacggtggtcagatccagcagatagattgatggcaaagaggacgactccatgtccaggcgtactccccgccttgcatcgagattgctaggtcataatcgaagggtttacagggaggagatctgaacatagctcttcaatcccaaagttaacatcgttggtaaaccccttctggtgttacctcacaaatatcactaaagtcattttagctttttgctgctccttatgtgcttcagattcagcaagaggttaccataattcttactgcttgcaagcccttttagaatattactgctgcgaggttcttgcaaagtccttgatgaagaagtcgaaggaaaaaatctacatgtttgatggcgtggatcagaaaaatgaagttatatctgtgatccagcaacaacttggtttccgtcgctgcccaaacttcagcagaggcgatctaagaagaagcaagcgtatcggctcatgttctgacggccgtgttcacgtggtagattggatcctcccgtccagacaacctgatagaacgacagtgtataagaacagggctcttaggacgccttttgtcaagttgggtcataactctaccctgagaattgagatagatgatcatgtggtgcaagatattgagtccctaatctttgatgacacacataacaaatggtaagcgtctccgtggatggagcctgaagtatattcaaattcaaggcatgccacaaagcatctcgcgtgtgggatgctccggcgtgtggaaagtagaaaagccaaataaatgggtacatgtacagcaggcgtgagttcttaaatactcagattccttgtccataggcaaatgcatagttcatacgaatcagagtacacgatgcacacaacttgatgtctctatcgttgttttcaacatgatgaacatgcgaatttcgtggtattaattgggaccgtctgatttctcaaagaaaataacaaaaagaaaagaaaagaaca

SEQ ID NO: 4678 - DNA, 2719 bp, Zea Mays
atgcttcatgatccactatttcgccgtcgccgcaaaatcctccgacctcgctcgcgccaccgaaaaccaaacgaggaaaaatgccgtccccgtccctcctcctccgcgctcctcctctctgcccctccccgtcccaccccccgcgccgcttcgctcccccctccctcatcacctcgtctccgcctgcccgcctcctccctctgcgcctgccctccgccgcgtcccgccacacgcctcgcgccggtgacacgcgcgtgcccgacgacctcatcccgatcgcgcgctgctacgagggccgccttgctcgactcgagctcgccggcgccgcgcgccgggaacaggccgtcgcggcagcggccgcggccggcggaggggcttcggcggaggaccacctcgccgccggctccgacgccatggtcgtcgaggcattcctccccgggccccatggcggtgggacgaccgcttcctccacgcgagtgattttgcaagccaaggaagttaaagataaggccagtaagatagagaaacagttcggatctgattttttctttgcaaatcaacctgattcagagagtatgttggctatggcctttaagcaagttgtaattcagcggctctcaaactttcggctcgaggtcttccccccaggttcagagagagacttccaagattttggcaaaccccgaaaggggtctttggattgtagtatcagctcatcagatggaaaacttctgtcttctcttgctgaggccattttctcctgtgtcattgaggatgtcagaaaaaatcattttgggagcataggcagtttttttcagaagcgacagctcaactgctcaatggattcctcagtttgtatacacaaaacttctgaggcagaagtagtgaaaaatgctaagaggtgtctggagatcgttagtttaatgaagtcttctcatgaagtacgtgaaacaaagaatggatggtggccacctccacatcatgaaagtttggtgaagattgggggtcctgagttagtgctttgggccaatgagtacattcctacttataagctgcaaattaatgccaacgcattggagaattctaatcttgaagttgaaggtctttatgagttagaaagtaataggcgggaagttctcttaacccactcacaactggtggaactagggaacgttctagacatgtactttgaagatcaattcacattaccaggcaaaacattccatccttattggaatccagatctgtcaaagattaaaaagaacaatggttacttgaacaaccttttcacttttttggctgggacctgtatttttctttttgtcaccatctttgctcagttatgctggcctcaatcctttagagacaaaaggctattcaaggaaagttcaaatgcctcattatctcagaactattgttccgatatcaagtctctttataacagtgaggtacaagcttattgcatgtcacttgttaagaaaatgaaagactcgtatggctgccctggtgatgtaatggttgattctcacattggagcatgggttggagaactacctaactgcttcaaggcaatcagtagtgaggatgctgctgcttctggctcttttcagtatcctgacactcttagccaagaaaatcaatcccagccagtgccagttaatactaagatgtctcatttggaacaaaatgatagaacccaggaatttcctctgcagaatattgctagttttcaggtggtcatgtcagaagaaggtaaagtagtgggatttcagccaactaacctcccagctgtgaaccattgggcaacaaacccactagcaacacttctgtatcaaggacggtcactttctccaggcattatagaacccaggctcaaaatttctcgtccagctaaggctgccccgatcgaattattgatgtcagtaaatcaagattccttttttgctttggcaaggcctgttgaagacccaaggtagcagagcgagcttcctcagattgattctactgcaagattgtgaacagttccaaagatgtgaaacgaaacaaatagtggcagctgagcctgaacaggatttaacaaggtgcctgagttatgagaaagaaatcgactaatgggccccatcattttaagtaagatgccggaggagtggtggtggctgacgtgaagaagaaattccactagtatcccgtcggagtgcaggaggagcgatcggaggggcacaacaaacgtgggaaattgggcacccggagactatgacccataagccctccagctctctatggttgaacacttgaactataaagtcttatattcagaagtatctaccgagtaggatcaaacaccattcgagtactttcttgggagaaaccatgaccactcttcaaatcttcaagtcttctatatttgtcaccatactatgaagagtctgttgtgcaattctgatgtttttttcgaagaactttgaacgcatcgtgatgatatctatcccgtggcacctaagcctaaaattggcttacaccaagccaattatagggtctcctaagttaattatagggtcttgaacatccttcaaattggctaccctgtgtcagctacagggtcttacatccttagtgatattgatgagtaatgatcgcttgttattttttttttttttggtaaaaataacccttggcaatttcatacgttggtctttcaatgttgaataacagttcccga

SEQ ID NO: 4679 - DNA, 1355 bp, Zea Mays
acttcagccatatccaaatcatcaaagcaaatgtccattttccttacgtaacttatcttccttatcctatctccatcgccccatttcctatcctcccagccgatcccctctccctcacggcgccctctcccatggccgtcggccctccccgccatggacgtcgctcttccttcctacaccgccatggcagtgcctccctgcagcagtccggtgaccgggccctccccttcccacgtcatgctggtgccatgtcttctccctcaccggccaacctcgccagccaccaggaaggtgtctccctctcggcagctcccatggccaccatcagccctagctgcgcttgccctggttccagcagctcgacgccagcccctctcaatcttccatcgctgccgctcagcttgtcccagatatattgatgttgacaattggaaatccatgtagcaaataaatgattttggaactagggacaggtcagagtctagagcatgttcattccacacattggaggtggattttcctcaattggagatattgacaaattggaaaaaatgtgacttgacctgtgctgcaacaaccttaaactaggaggggcttctaattcttcatctctaccaacagtcctctcctgttactttttaaaccaataactttttcaagtttgtgcagatgcacacatccttgagccaaaatagaaaaaaaatcatagaagagttctttggctgtcacgtgattcaagagtattaatgatatacaaaagtttgctttatggcaagtcaagtaaccaccaattttgggcaatgacagggatgtgcagtggtggtctcttaaaagaattttgtgttccagcgtagctatttccactgcaaactatcaaatcattacaaactggcattccatggcttccactagttgagtccccatgataaccaatccttgttatcatatacttcttcaagtttgacgtcagcaacgtggtcatggtgaccggcgggaggaacaccgggcgtgtaggagtgatcaagaactgggagaagcacaagggcagcttcgaggtcatcgacgtgctgcttggaggcttttgcatgctatttctagttttctcttatttgttgtacaagaaaacatagaatggaattcaaatttggtggtcgcaaaagtgtggagacttgaattcatataaagttaggcttaacattagtgcaaaaagttgtattttagttttgatttagagtacacttatgtatgccttgtttgacaatacttatttatgatatattgaatggtacctattgtaatcgtctattattgtaggatattcgagacagtttgataaatactttatgacttataat

SEQ ID NO: 4680 - DNA, 1161 bp, Zea Mays
cagatttccccccttgcctcctctcccaacccccacccttggtaccttagcttttggtactcggtatgcgtcgactgcaaggaaacataccattaattgcattccagcttcagacgaggttgggaaatagaagcgcacagaggattaacaacagacaaaccagttatctttgttcttgtcaatcaatggcgtaataagggccttgagaacatgtttgagcatgaagaactatttggtggcagttggattggagcatattctgctttgtgcttttcttgtggctactttgcatatgaccaactggacatgctccgttaccggctgtacaatggatggattcctggaattctcatgcatcacttgatcctactcatttgctttacactagctctgtataggaatgtcacaatcaactacctaattctctcccttgtatgcgagctgcactccatatttttgcatgtaaggaaagtgaggcgaatggttggatttcgagatttcgacagaacaatggtgaagctggaatggttactcaactggactacctttgtgacagcaagggtgatatgtcatatcttgataacttacaagctcgtcgctgatgctcacaaatttgggaagggcattgagcttccactagctcttcttggtatggcaggaatgaatctgctcaacatatttctagggcttgatctacttaaagcattcacacgagaaagaaaccagcagagccatcaggattgaatgtgcttttcttgatggtggtgtactcaaaattttgagaaggctgtagttccgttcaagtagggcagagagatatgtttaagtcttaattagcaactacactggaggcaatttttgtatgcattctttatgtataccaaaatgtactaatgctaagatctctaccagaaagggttgttgctagtattttcatccatgtaggtataatattcattagcagaatgcaggcgggtacctggatgcaggatttacatacatattgcaattagaaagaagtgtgtcaaaacctttggtctcaactccctaacctcatgtaaagtaaacccgaaagcaaaaccttgtggattggccctgtgaggctacaatgctcttatttatctttttaatagttgataatttcttgctgcaaagcaaata

SEQ ID NO: 4681 - DNA, 1672 bp, Zea Mays
ctgtcagtaggtgaccggcgcatgctacgtacctcctcggatcctactgcaaatgtcccctggtcgtccacacaaaaaccgtagtgtactggagtagcgtagcgaactagtcatcatcactggtcgtaccgtacgctgggccgctagccgatgcgcaccgcggcaccggcacggtaaactcgagtgcctgacgcgaccgagacggccgaaacaccacgccagttcgcagcccaaaacgagcggaaacaaccaccaaaaaaacccgcactgctccagccgcgatggaacagtcccagacgaaacaagcctggtggtagtgggtaccttgccgttgccggcctggccggctggccctcgtgtgcgttcctcgctcgatctccctccttcggtcaaaagccaacatgacaacacacgagtctgggtagctgtcccccgcgcggctcgccccctcgctcctcggcgccgctgccggcccgcgcctgcgcctgcggctcgcgccctctatacctccgcccgcccgtccccctcgtgccgctctgcctgccccccgcattccgcgccgcctcgccaccgaactgggaggaatctgcggggaagggggatatggggtcgccgggtgcggggagcagcggcggccacgagtgctccttcaagttcctcctcatcggggactcgggcgtcggcaagagcagcctcctcgtcagcttcgtcgccgcctcctacctcgacggcgacatcgcccccaccatcggtgtggattttaaaatcaagttccttacagttggtggaaagaaactaaagttgacaatatgggatactgtatatgatgtcacaaagagagaaagtttctcaaatttggctgatgtttggactaaggaaatagaagcaaactcaacaaacaaagactgcataaaaatgcttgttggaaacaaagttgacaaggatgatgaaagaatggtcacaaaagaggaaggtcttgcttttgctgaagaatatggatgtctgtttcttgagagcagtgcaaaaacacgagaaaacgttgagaaatgttttgaggaacttgcattgaagattcttgaggtgcctagtctcctagaggaagggtcttcttcggttgtcaagaggaacatcctgaaacagaagcaggaaagtgatgcaaagaacggtagtggatgctgtcaatagatgtatgtgctgatccacaccacacggttggctttcttcgtgtgagctgccctgattgtctgctgtacatgttcttgtgagtaagaagggcgagcataattgatttgtacaaaggacatgtcagtttggtgtcatagttttcctcatctccagtttagtatagcaattttgttgtcgccctagcaatggtaatatggaatcctctctctacagtattgctatctggccggctggcccttagaaaccgggaccgtggaacttgttcacattcctcgttccagaaatgttcgttctgttccaaaaacgtgggaacaattttgtttccgtagtgttaaaatcttgtttaaggattagtttggcaacttcattttttcatgggatttctaattttccttgaaaaaatggacaaaaaaatggactaatttccttgagaaaatagagtttccaaactagccttaagtatgtatgttcctatcctcgaccttag

SEQ ID NO: 4682 - DNA, 1479 bp, Zea Mays
cttcgcttttaaattcgagaagcaaaaccgcgacctcgccggagaacaatggccaatgcactgccaggccagaaaaccggcgaggtcacggcgacgcagaatccgttcgagttccatgtgtacgggccgcgacacctgtcgtcccccagctggtgggatctcctccgttcgagctgggggtgtacctgctggagctggaccggcaggacaagcgcgacgagcgcaccgcccttgcgccgcagtggtggcgccacttcatgtacaggctctcccagacactcgtcgacgagcgcgacggctccatctacggcgccgtgctcgagtgggaccgccgggccttgctggctggctacgcgccgttccgccccgccggcgccccggccgccgtcgtggcgctccgcggcacgctgctgagcggggccacgttccggcgcgacgtcgtggacgacctccggttcctggcctgggacagcctcaagggctccgtgcggttcgccggcgcgctggccgcgctgcggtccgcggcgcgcaggcacggcacggggaacgtgtgcgtgggcgggcactcgctgggcgccgggttcgcgctccaggtgggcaaggcgctggccaaggaaggcgtgttcgtggagtgccacgtgttcaacccgccgtcggtgtctctggccacgagcctcaggggcttcgcggagacggccggcgagatgtggggctacgtgcgcgcgtggctgccctacgtgggctcggctgcggcggcggacgcgggcggcgaggccaaggaagtgtcgctggggcgcgccgggacggccaagtggttgccgcacctgtatatcaacaccaacgactacatctgctgctactacaccgacactgcggccgggacggcgaccgtgacggccagaggagggagcgggggcagtaaggttgctggaggggacggtggcatcggcaagccggggctggcgaggatgttgacggtgtccaaggggccgaccaagttccttgatgcgcacgggctgcagcagtggtgggctgacgatgtggagctgcaggtcgccctcaaccacagcaaactcatcgaccgccagctcaggtcgctctatgccgcgcagccggcctcgccgcaagtgaaccagtaggctgtgtagctctgtagcagctcacaaaacgctgagaaaaaaacgcaacgctagcatgatgctgttgatggattggactccgctgcgtgatggtccgctgagcgcacggatgatgagcgttccaaacatttcggatttgaaacagttgtgggcttgtggcaaatttaaaaaattcaaaaagtgaatttcaaaataatacgactccgctggggatcgaaacccagaatctctggttccgtagaccagcgccttatccattgggctacggagtcatttttgttttgaattgttaaccagattttatgtccttttgcacctcatacaaatttatcacgaattt

SEQ ID NO: 4683 - DNA, 1058 bp, Zea Mays
ggcaaaaaaaaaaaaagaaagaggagagcagagagagcgggagatcatggagctctgcgtctctaccactgcctccgtccgcgccaccgccgcgcccatatccttcgccccgccccggcgaggcgcgtctgcttccaccgccctcccgctccaccgccgaatcccaactcgaggctggtgttgcgccagcgcggccgtgcctgacccggcgccctccgaagagctcgcatccgcctcctacaccgtcgtcgtcgcggacaagcccgattcgcctgccgatgacaaggtcgacgaggttagcgccgcgcctagtggctccgcggaggcgcccgtagcagaaccggtgtcatcagaggcgtccccgtccccgtccacggatgacggcggtctggatgagatactaagcaagttgaacattgaagtgactccgattttaatcctcactggatctggtgcctttgttgctttatggatcctatcttctgttgtttctgcagttgattcagtccccctgctcccaaaattgctggaattagtaggaactggttactcaatttggttcaccgcacggcatctccttttcaaggaaagcagagatggcatgtttgcaaagttcaaggatatcaaagagaggatcatttgatctaccatcgatatctggtcacgtgtttaggctttacagcctgcttattattaggttttctcccctttcaaatattactgaaggggtaaagaaggtcgtatatctaatttttcttctcacggggtctgtcattaggcttctcaagtttggctagtgtgcttcttcaggtcactctcgatgttttttactcaatcctatgtgtatgctgccgaataaagctttaaaaagatgaatgcaattagtatgttctcgctcctatgcaagttttgaaatccagtgtccagtaaacatttcagataccatatgttaagctcgagccttctgtgagaccgacggagctgcagctcaacttagctgactttcaacgatgctattcctttctttttgaaatcctcatttgtaatgtagcaagcac

SEQ ID NO: 4684 - DNA, 1978 bp, Zea Mays
ccgctctccactggtctctctcctcctgtttccgcactgcagtggcctagccggcgtcgtcctccccctctctcgctcctctgtcctcccctctccacttgagaagaacacaattaggaaaaaaaggcaaaaaacatttaccttttttctatctgtatattatctgaataaatcaagaggaggaagaggggagggagcgagggagggggaggagtagcaaatccagactccatagcaaccagctcgcgagaaggggaaaagggggaggaagagcttcgcttgtgtattgattgctcgctgctccagtccctgcattcgtgccgtttttggcaagtaggtggcgtggcaagcatggtgccgggctatgactgcgccgcctccgtgctgctgtgcgcggaggacaacgctgctattctcggcctggacgacgatggggaggagtcctcctgggcggccgccgctacgccgccacgtgacaccgtcgccgccgccgccgccgccgccaccggggtcgccgtcgatgggattttgacggagttccccttgctctcggatgactgcgttgcgacgctcgtggagaaggaggtggagcacatgcccgcggaggggtacctccagaagctgcagcgacggcatggggacctggatttggccgccgtcaggaaggacgccatcgattggatttggaagattcctctccacgtatgagttccctgaaggcagagcttggatgactcagctcttggcagtggcttgcttgtctttggcttcgaaaatcgaagagacttttgtgccactccccttggatttgcaggtagcggaggcaaagtttgtttttgagggaaggaccataaaaaggatggagcttctggtgctaagcaccttaaagtggaggatgcatgctgttactgcttgctcatttgttgaatactttcttcataaattgagtgatcatggtgcaccctccttgcttgcacgctctcgctcttcggaccttgtcttgagcaccgctaaaggtgctgaattcgtggtattcagaccctccgagattgctgccagtgttgcacttgctgctatcggcgaatgcaggagttctgtaattgagagagctgctagtagctgcaaatatttggacaaggagagggttttaagatgccatgaaatgattcaagagaagattactgcgggaagcattgtcctaaagtctgctggatcatcaatctcctctgtgccacaaagcccaataggtgtcctggacgctgcagcctgtctgagtcaacaaagcgatgacgctactgtcgggtctcctgcagtatgttaccatagttcttccacaagcaagaggagaaggatcactagacgtctactctaattgtggtacgcttcaggtgtgctcctcaccgctctaggagtttttgattggttcaaacatcttaaatttagtttggccgctggaggattatggtttagtcaagtagttgctgaatggaacaacaaaacacgcacactacttggtccataaagacaagaaaataactggcagcgtcccgcgagccagcgctgcaatccagttcatgcaagaccctagagtccagggggggtgctggtgtaggtagagagggaacaaggcattcacatacgccgtagagatgagagagcctctcgtatgttttgtacttttgctccttcagtttgcaatgaactatataaacaaggattgccttggggcagtgaacatttgtcggatgaaaagaatcaaaaaggatgggggtcggcagaggaatagaacaatttgatatatttccataaactacagatatgtttcctttttcataatgatgagctatcatttttgttgatggtaacatggtatttggcgtcccgttttgtttgcatcaggccattggttgattgcttccaatgtaccttcattgattatccaatttttgtttgcattgggccattagttgattacttc

SEQ ID NO: 4685 - DNA, 1818 bp, Zea Mays
ggcacctcccgtttcctgccctcttcttgttcttcttcttttttccctaccctccgccgttgctctgcaaggcacgtcctgcacgcgccagagctaggcgataaactggaaaggagcgcgcagcgcaggcttcgggctcctgtctccgccgcggcgtcctctcgctttttttttttttgcttcttgggaagcacaaaggctcaggtctttcaggacttgcaggctctgcgcagcgcgatctgattgtgaatgaaacctgcaaaggaatagtccatcacaatgctaaggttgcttcccgactgaccacattgcgcttgttttagcctctggttatctcgtctggaaaaaaaaacccagacatctgaccgggtcagacgatacaacccatatacgtacgtcgagtcctcagagttcaattctacctggaccatcgcacccatcttggcccagagtacttccgcgccgcgctacgaacgaggccatccgccgccacacgccgtcggccatgccgcagaggtcggaggcgggcactgctggggagggcgacgaggagcagcggctgcgggctgctctgcgtcacctgcaggcggaggcgggggtgctggagcgcctggtatacaagcaccggaaccagcaccgcggcgccgcctatttccaatacctcctcaaggtgaggagggacctgaagcttctgctcggcgccggcctcgctgaggttctcaacgccgtgttcccagttctcgcatgccgcaagccggccaacacgatcctcgtccccaacaatctaagaagaaacctgttgcaaaccacagccatcaccagaggcttttgggtgtagcccgcttgttatcccagatgtctgaacctgttatgaaggcagcaattcagataacatttttacttgctagatcattcttcgttgatctttgcacggctgtgctttctttgcttgcacgagtaagggtcctgatccaacagatgttacttgatgttgtgtctatatacaataaggtcactgatcttactgaaaggaagcaggctgttaagattagcatcagtggagtgcaggctttcagagagtactacccctctatgaatgatgcatgtacagttctggagtgtgtatggataaaagataaattcgttttgcatgaaaaggttaaagatatctctcaggaaacccaagttgagaatcagaagtgctgcggtcctgaatctacagtccagtatgaaacaattgcactgattagtgaagattctacatagcggaagtcctcctggcactggagtacttgcacacgctcggtatcatataccgcgatctcaagcctgaaaatgtccttgtccgggaggacgggcacatcatgctctcggacttcgacctctctcttcgttgtgctgtcagtccaacactgatcaggtcctcaaaccctgacgcagaactgcagaagcgctcaggaagagcagccaaggctactgtgttgagccagcctgtgttgagccgtcctgcatcactcaaccgtcgtgtgcagccccaaccacctgcttcggcccacgcctgttctcctccaagtccaagaccaagagagaccggtaaccaaaaccagaagttgccaccccgatcagcccttggcctgagctcatagcggagcccagcgatgcacggtcgatgtcgtttgtgtgctatattgtttttccgttggtagatttttttgaggggtacttttacactttcttaaagttcacatctgtaattcagcaagtcctgattgtactgatctcctgcaatgcctttgcaaaacattgtcattttttttg

SEQ ID NO: 4686 - DNA, 2171 bp, Zea Mays
actctctctcatcagtcatcgccaccccgaccaccgtcacgcggacctctctcctcttcccctcaaaaccccacgaaatcgccgaaagcaagttgcggccgcagcccgcagtgaacacagccccgcttctctttcccccaacttgttcaatcccccttctcccctcccggagcgcaagagaagctcgcattcctggtggtttctcctcccatcatccgtcctcgatctgagcgttgtctgcttccctgcctccctccctccccttgcccagatggccgccttccgtgtcttctaaatcttccgccgcatcaagcttccctcacctgtcggctgtcctgctgctgctgctgccaatggcgaccaagggaggcaacgcgaggggcgtcccggtgggggtgctgctggtggccgcgctcctcctttgctccttggctccggcttccgcgtcctcgtaccccgcaagggtggtgagcgggttcctctccaatgcggcttcggcggtggtgaagcggctgtggtcgctcaaatccaccaccaagatagcgagcgggggcaagtcgatggtgaagtacgagggcggctacaccgtggagacggtcttcgacggcagcaagctggggatcgagccctactccgtggaggtcacccagggtggcgagctactcgtaatggactccatgaacagcaacatctacaggatggcgctgccgctgtcccgatatagcaggccaaagcttgttgctggttctccagaaggatttcctggtcatgttgatgggaagctgcgagaggcgaggatgaaccatccaaagggatttacagtggacgacaggggtaacatctatgtggctgatgccatgaacatggccattagaaagatcagtgatacaggggttacaactattgctggggggaaatcaggcagaggagggcatgttgacggaccaagtgatgaggcaaaattttctactgattttgaagtccgttacattggcagtagctgctcccttctggtgattgacagaggaaaccaagcaattagagagattcagctccactttgatgactgtgtgtaccagtatgaagctggttttcctctaggagtcgcactgcttctcgctgccgctttctttggctacatgcttgcactgctccaacgccgagttttagggatgtattcaaatggagatgaccacgagagcccagtaaaagcaaaattaaccagcattccacctccataccagaagccactgaagccttatgttcaccccctgctaattccaaatgacgacgaacctgtgaaacaagaggaggaagaagggctcttcacgtcaattggcaagcttgtgggtggagcaaaatcatcaattgcagagatcattggcgccgcattctccagaaagaagcgagtgaacgttcatcatcatcagctgggtaggccaacctcctggccagcacaagaaagctatgccatcccgcgggacgagaccccaccgccgctggacacaagggcgcccacccctcgcaaaaactacgccttcatgtccaaggagccggagaagatccaccacatccggcacggccggcctcagttacatggctggaccggagaggcagcacctcagcagcagcagccgcagcaggtgcgtcaccaacagtacgtgcaacaccacaggcagtactcggccgggccgcagacctactacgagccgagctgcgatgcaacgaaggagatcgtcttcggagccgtgcaggaaggggacaccagccgccgtcccgtggagatcaaggccgtgaaccatggggacgcggcgccgtacgagcagaacgggctgcgattccgcagtagttatagcgtgcgctacaatggcaataactagtcgaggagcacttctgtagctgtaactgtaaggagaggagcgatagagagagcagtcgaggggagtacaatctcctcattgacaagtgcaacagaaaagctggaattttggtagaagagcttggtgataatggtcattggactctttactggcggtgacatatataaatatagcgtgtatttttcttgttcttcttgggtctacttctatttttaataaatcaccttgcgtataggcctatctttaataaacaaagtgtgtatttattattttatcaactgtttttcgttt

SEQ ID NO: 4687 - DNA, 4841 bp, Zea Mays
acggccgcgggctgcgtcccttccgcgataggtcggctcagccacagcatatgtctgtgcctggttcagcgtctgcggccgcaccgccgcctcaggctggcgctgctccgccggcgcagccgcagcagccgtccggtgcggcctttaccaaccagaagctgacgacaaatgatgcgctcgtctaccttaaggcagttaaggataagtttcaggacaaacgggagaagtacgaggagttcctcgaggtcatgcgcgacttcaagagcgagaggattgacaccaatggagtgattgtccgtgtcaaaacgctgttcaacgggtaccctgaactgatccttgggttcaacgccttcttgcctaagggctatgcgatcaagctacaagaagagaagaaacctgtcgattttgtggaagctatcaatttcgtgaacaagataaagaatcggtttcagcatgatgaacaagtttacaaggcattcttggacatcctcaacatgtaccgcaaggataataagtctatccaagatgtttaccatgaggttgctatgctgttcaaagaccataaagatttgcttgaagagttccagcacttcctgcctgatacttcagtggctccacaagcagtggcctcaaagggtggtttggttaagcgggaggacaggagctctttagtgcctcctgcaaataagatccttcacaatgataagagggacagagtttacctgtcacatgctgaccgtgattttagtgttgaccgtcctgatgtggagcatgatcgccagagaagacgtcttgataaagacaaagaacggaaggtggaaagggacagaagggattatgagagagaagacaaggatggtgaacatgacagcagagacctggagctaggacagcgtaagcgaaagcctttttcaaggaatatcgaggataatgtaggtgctgagacacaccaaggaggccccagtgagaatcatggaatccacagtgtatctgcttcatcatatgacgataaggatgcgctgaagagtgtatacacacatgagttccatttctgcgagaaggtgaaggaaaagctggagcatgaagcttaccaagagtttttgaaatgtctacacatctatagccaagagattatcacaagaagtgaactgaagaacttggtgaatgatatactccaacattatccagatcttatggaagggtttaacgaattcttggagcattgtgaaaatatagatggatttcttgccggtgtcttcaacaaaaggccaagcacgagggctgttaaaactgaggataaagaaaaggatagagatcgggacagggaggacaaggatagagatcgggaaaaggaaagagaaaaggaacgagaaaggctcgataaaggatcaacattcaattcaaaggaaggttctagtcacaaaccttctatgttctctggcaaagagaagtacaacctatccaaaccaatatcagagcttgatctctcaaactgtcaacgctgcactccgagttaccggcttctacctaaaaattatcccatgcccccagccagcaacaggactgatcttggagcttctgttctgaatgatcactgggtatcagtgacatcaggaagtgaagattattcatttaaacacatgcggaagaatcagtacgaggaaagcttatttagatgcgaggatgacaggtttgagttggatatgctgttggaatcagttaatgcagcgactaagcgtgttgaagagctgatagagaagatgcaggacaactcagtcaaacctgagagcccaatacgcatcgatgaacatttgactccgttgaacctgaggtgcattgagcgactgtacggtgatcatggtctggatgtgatggatgttctacgcaaaaatgctagtgttgcattgccagttattctaactaggctcaaacagaagcaggaggagtggtcaaggtgtcgatcagatttcaacaaagtttgggccgaaatatatgccaaaaattatcacaagtcacttgaccatcgtagtttctatttcaagcagcaagatacgaagaacctgagcacaaagtctctcctgacagagataaaagaaattaatgagaagaaaaggaaggaagatgatgtgctccttgccattgctgctggaaataggcggcctatagttcccaatatgtcattcgagtatatagactcggaaatccatgaagatctacataaaatcattaagtactcctgtgctgaagtctgcaactcttcagatcaattagataaagtgatgagagtatggacaacttttctggagccagttttgggtgttcagcaaaaacatgggtctgaggatcctgatctagttaagaccaagagccgaacaacaaaattgggtcttgcaaatgtgagagaaagcaataccatagctgggattgtctccaagcaaagcaatggcgatgaaagtgaacaagatcgaattgcccgtaaaggtgaagaaccatcaaacgctatactaaatggaagagtgcatggtgctgtctctgcagatgaaacactttccctgatcacacaaaacattgcttctaccgagcgaccagcagaaaatgctgctgctgttaggactgagcaacataaggcgaacttggtacttacgccaggcatgaatgcttctagaagttctcatgatgcagttgaggtggctggtgaaggcaagactggcaatgaaacattgctttctgccgagggaggggagaggttgggaccatctttaaatggcaccagcgagggaattaaagggcgcctaaataatgatggttctgtgccccacacttcaaaagttgaaagagaagagggtgaattgtcgcctaacggagattttgaagaggaccattttgttcctttcgaagatggaacatctaaaggaaaggaagattctacaagcagaccattccatggtaggcctggggaagtggtaccctcttctgccgaggcagctggtgagaatgatgctgatgctgatgacgagggtgaggaaagtgctcagaggtctactgaggacagtgaaaatgcttcagaggcgggtgaagatgcatcgggtagtgaatctggtgatggtgaggaatgctctcgtgaagatcatgatgaggaagaagaggatatggatcacgatgatcaggatgcaaaagctgaaagtgagggtgaggcagaaggaacaactgaaacacatgatgtggaagggggaatatcactaccactttcagaacgctttctgtactcagttaaaccacttgccaagcatgtacctacagctttacatgatcgagagttctcacgtgtattttatggaaacgattcattttatgtgttgttcagactacatcagattttatatgagagactactttcagcaaaaactaattctttcactgctgaaaagaaatggaggaattctaaggatacaaaccctcctgatttatatgcaaagtttatgagcgcgctgtacaacttgcttgatggttcctctgacaacaccaaatttgaggatgactgccgagctattattgggactcaatcatatgtcctctttactttagataaactgatttataaagttgtgaagcagcttcaagctatagcaacagatgaaatggacaataagcttctgcaactatatttatatgaaaaatcaagatctcctgggaggttctttgacctagtttatcatgaaaatgcccgtgttctactccatgatgagagcatataccgatttgaatgttgctcgagtccgacaaggttgtctattcagctgatggaatatggtcacgaaaagccagaagtgactgcagtatcaattgaaccaaatttttcttcgtatctttttagcgagtacttgtgtagtacgccagacaagaaattatctgaaggcgtctaccttggaaggaataagcggaaatattcaaataatgatgaaccttcagattctttgaaggcaatggatggtatcaatgttgtgaatggtcttgaatgcaagatatcctgcaagacctcgaaagtttcatatgtccttgatactgaagatttcttgttccggcttcggaagagaaggaaaattttgcggggcgggaatgtgcccgaccgtttgcagatttcatcaatatctgctgcaaaagtgcagcgcttcaataggttcctatccaaaccataggatcatttggcatacaaatgtatcgaaacctgttgctggggtcccagctgcttggcttgaacaatgattccatcgacgtcgcggagtcccctttcggaataacagatgggaagacatagggtaaatacagcaaagcgaagcgagcatgtaggccacagtagtcagtctgttgttccgaaagatgtgtatatatgtattagcagcatgattgttctgattatctttttactgattttcgatggtaggtctattccatcaagtatttaactaatcatttgttgctgttggtataggtcttttgttcttttagccgtcgttttgcattgaagatatgtagccaaaattaaaaacctgtgtcgaacagttatgtagtcttggctccattaatcaaacggacaccgtaatttcttggagccttttggtgaggttgccagcaacctctcttgtgtatccaattcaattgaagtataggatgtgtgttacttcttgatgttgtgtaaggtggccgaaattagtggacgtgccatccactatttttactattagattagaacatatctataaaatctagagaatgtgtaaaccgtttagtcttgttcgccatattgattatcattttaatgtattggcatggatggatggaaa

SEQ ID NO: 4688 - DNA, 1605 bp, Zea Mays
caaattcccttctccctcacgtctctttctctccccaagccgccgcctccctgccgttccgtggagcaccaggccagtgccgttccgatggtcattccaagccagtgccattctcctttggccgtccctgctccagccgtgagctcacccaggccacggcctcgtcgaaccgcacagcccctgcgctccttccccagccgcgcttagccctatcctccctgctcgatctccttcgagccgtaacggctccctggcgtgtccggctccctgcccctctccatggcgtcgcccagctctagctcgccccccctctgatctgtgcgcaggggtttcttccatggcgagctcccctgcaaacttcatctagccgccggccgagtttctttggtggtcgcttacccccagcatcggccagagcttgctgtcattccccaacaaacatgtggttgtaggtgagagatttcagaagtctgttggacgaagaaaagagaagtgaaatttgtgcagcgcccgtcaggtgttaggtttaatagatattgtgtctaccgtgtgagggaatcgtgccagcttcctttgggtttgggactgggagctccatcgctctatgatgggtcggcagttttagtgtctcacacgcagtggccacgggatttttcaagtcacttggtcgtggaagggcttcttattgcagtcatagtgttccagctctccaggaagagctacaaaccaccaaagaagccactcactgaaaaggagattgatgagctatgtgatgagtgggagccagagctgctatgccctccaatcaaggagggggccacaatagatgctccaacattggaaagtgccgttggaccacatacgattgttgattgttgatggtaaagaagttgtgaactttgcatcagcatgaggtctggagtctagacacagcattgcaaactgaggtttaatcatcttagcaactacggtacgtgaccctgagcgcgtgattgttgcgaaacaacgaccacctcggtctacaccttaaaggtttgcgcgacatggcttttcatagtgctcaattggatctatcccctgagcataggagaaaagtatcaatctgtacagtggatccaagtattctataaagcatgtatcctccaatttcccacaagcgagaatggcatgatatgatggatgaaatggctgttgcggtcaattgtctttcaaggatcaattgtctttcaagaaccacacttatgtattggtttgtgtgcagttcaagctctgcaaggtgaggtctgttcagtttggccagaaagtcatcccctacctgaacacctacgacgaccgcaccatccgctaccccgaccctctcatcaaggccaacgacaccatcaagatcgatctggagaccaacaagatcatggacttcatcaagttgtatttgccctttcatagacttcatcaagttatatacttagttaggctcaatgttagcacaaacagttgatgagcaagtttaaatttagagtacacttatgtatgagttattatttgacaatacttatttatgagatattgaatattatttatctatattatattaattatagtgttatt

SEQ ID NO: 4689 - DNA, 1037 bp, Zea Mays
gcgcgtagcataactccttgtcctccagtcctcctcccctccgcggcttctcgcagtgcttcgtgaatcctaaattcacgccgatccgacgcgaatcgatcgagaggcaggaggcagcacgattcggatcgagacgagcgccatgaacccgagaggttgtcaggtgatatccacgaagaggtggagactcataacagaatgctagaccgaatggggagcgacatggatacatcaaggggctttctctctggcaccgtgggcaaattcaagacggtattaagcgacatcagaaacaattattgctactatgcagttcatctgccctttgtgcccttcttgagatgattcatgtcatgtgtaaacgaacatgatacaggtgttcgagaccaaatctactggtttactacttgaccaggtagaatcatccacggtgaaagttttgtggggctgggcgtgttcaagaacattctgaaaatggacgtgctgatctggtggtgccgtgccgcgtatatatatactcatgagtagcagagtatgctgatgtgggttccgtgaacaccgcagcgtgttgggtcgaacctctctctgctacaggaaattgttgtccgttcctttggcatgatatgtgtgtatggagggagtatgtacatgtggtattaccgtactagtaaggtcctctttagaagcaattattttttagctaagagagattagcttcttagtttttaacaaactaataatttaattcttataaactaaggtatataccggtatgtttggaatcacttcaatttctataaaacagttttttaaaaaaactgggtgcatctaaacatgtagtacgtggaatctcgaccacagagatgtatctactaggtttccttgtggctgggactcgacttgtttgagcactgtgtgaggtcgacacgtgtctctcccccgcatctggcaagacggatccagatgaaaggaatgacattgtggctgcaccaagagcaaccggtataataacacttgacaaggagtattatatgctt

SEQ ID NO: 4690 - DNA, 2927 bp, Zea Mays
gttcgttttggtaacagtcgctagcgaaaaagcatccgcccacctcccctcgtctctctcgcgctccgccgccgcgcaaaactgtctggtgatgacgaacgccgccggtacggcccctcacccgactccgccgacgccgctccaacaacaacagcatcagccacccaaggaccagcagcagaaggcgctggccttgaacgcattccgcctgaaggggatcggcgaccgcatcaggttccacctgaagggcatgagcgtgcccccagtcgccgagttggcccacctcatctacgcgttcgccagagggattgacttcgcggtctcagctggtgatattcctctgacagccggtgacatacccgagattctgagaaaggtatatgagctgaggaaagaaacaattatacaatcttcgcttatgatactagcgatctcttgcaagaatgcttgctccaataaatggtttcaacctgcagattccagagacattcttagaatggtcaatgagctctctggcaacttctgcacgtccacaggccaggcagctagtgacagcactgtgcttgaaattatatcacaaataatgccaaggtattaccctcggttgaagtttgagcgcctaatcacttctattgaagcaaaggttggctatgatatattaatggctgacttctttattgagaggagcctatctcgagatgaaaagattagactaattgtcgtacaaaaggaaaatttagatgcctcatcatgtgtctcaagtccaccacatgtgagctttttggtcaatgggaagggtgtggacaagaggactaatgtttcaatggaacaaggaccccagttacctactgatatcaccaaaatgctcaaatatggggctaacattatccaaggtgttggatattttaatgctaattatatcatagctgtagcagttgtgaacgatttgacatccttcagtgctccaaaactggatgactatgcacaacctatcactgtttatcctgcagattctgatgtacttgagggaccatcaagagtttccctaaattgtcctataagttttaggcgcataaaaactcctatcaaaggccgtctttgcaaacactatcagtgttttgattatgataattacatggagatgaactcaagaaaaccaaactggcgctgtccatattgtaacacctcctcaagcttcactgacctacgtattgaccaaaagatgatgaagatactagaagagactggagatgatgtcactgatgtccttgtatttgctgatggatcttggaaagttgttccagctcaggatgaaaaatctgatagacatagaggtgacacaattcagcaggctggagatgctgtagaaactggttcaccttctcgagatgtcatagatctgataaatggcaatgatgatggtgatatgcaaatggattgggcatcggctccagaagattcaaagcctgtgttgaatagtcaagatttgtctgtatcagactatcttacagatttccctatgacagctcagacagaagatctgaatcgaggggatggaaataatgggggaagcaacatggcttccacttcacgtcaaaatttgttactacctcctactagtgggctgggctcaagttcattagggaccttggaatctattctacctcaaaatgttctgcaccctgttatcacagatgcagtctctccttctcttgaaacctcttcagcatctggcatgcaacatgtttcacaggaaacacattgtggaactgtacagctgcagccacaaataggtccagtacatgggtccgaagtgagaaggcttcctatacctagaaatcccaggagagagccaataggagtacaggggttgacggttccaccacagaatcctgggtcatcaacaaggttgcagccaaatattctcaattgtccacctcctatcccgctatctagtccatcctcttcaacttaccaagcacatcaagtgaagaatccagacagtgtcattgcttcaaggaacagtggtagtgggccattaccaaggactcctagcgtcgctgctgcatcattgcacctacagtcgacagcacgggatattcgcaacacatcgagccatctacccagtcgagttgttggtctgcctgcgccacacctcatgggtgcacgaccaccaccaggaatttcagtgcaggctggaggagcgaacgcctacagaactatgcaacagactccaactatggatccactgaggcacacacggatgagcatgaaccaaacagcactggctgctgccggccaaaccaccgctgccgcgtatgtccgaccaacccaagcagacatccaaaaccatctctttcctgtgcagcaaagccaggcaccacgatcgcaacaagtgccacgaacaacaaccccgcctctacagcgggcgccaccgcacctgcaacctcccagtgtaccaccgactgttccaagcacacctcaggctggaccttcgcatggtcttccaccggagctccctgtggatgatagctggcgccccacgggacagatgagagggagtctgacaggcaatgcttacagttctgcaattaggcactatcggggccattctgagcagcagcagggcgagcctcggcctcccaacacttcaggcacaaggttcgctctatggcaaatcaagatgagggacattcttactcaaactgaagtcgatgacactcttgataagttcagtaaaaaagatccaaaatcttggacccatgaggagaagattgtaaggccgtgactcaaattcaatttcatctttcaaataatattttgcaaggttgtttacaagagaaaaatacatctattttatggctcaagctagagttgatttgcatgtctaaggatttgacaagaaaaatgcatatgaagatgaattt

SEQ ID NO: 4691 - DNA, 3050 bp, Zea Mays
gttcgttttggtaacagtcgctagcgaaaaagcatccgcccacctcccctcgtctctctcgcgctccgccgccgcgcaaaactgtctggtgatgacgaacgccgccggtacggcccctcacccgactccgccgacgccgctccaacaacaacagcatcagccacccaaggaccagcagcagaaggcgctggccttgaacgcattccgcctgaaggggatcggcgaccgcatcaggttccacctgaagggcatgagcgtgcccccagtcgccgagttggcccacctcatctacgcgttcgccagagggattgacttcgcggtctcagctggtgatattcctctgacagccggtgacatacccgagattctgagaaaggtatatgagctgaggaaagaaacaattatacaatcttcgcttatgatactagcgatctcttgcaagaatgcttgctccaataaatggtttcaacctgcagattccagagacattcttagaatggtcaatgagctctctggcaacttctgcacgtccacaggccaggcagctagtgacagcactgtgcttgaaattatatcacaaataatgccaaggtattaccctcggttgaagtttgagcgcctaatcacttctattgaagcaaaggttggctatgatatattaatggctgacttctttattgagaggagcctatctcgagatgaaaagattagactaattgtcgtacaaaaggaaaatttagatgcctcatcatgtgtctcaagtccaccacatgtgagctttttggtcaatgggaagggtgtggacaagaggactaatgtttcaatggaacaaggaccccagttacctactgatatcaccaaaatgctcaaatatggggctaacattatccaaggtgttggatattttaatgctaattatatcatagctgtagcagttgtgaacgatttgacatccttcagtgctccaaaactggatgactatgcacaacctatcactgtttatcctgcagagaggctgcgttgaacccaggacctttggctttggctcagtgggaaggcttctcaccactgaaaattctgatgtacttgagggaccatcaagagtttccctaaattgtcctataagttttaggcgcataaaaactcctatcaaaggccgtctttgcaaacactatcagtgttttgattatgataattacatggagatgaactcaagaaaaccaaactggcgctgtccatattgtaacacctcctcaagcttcactgacctacgtattgaccaaaagatgatgaagatactagaagagactggagatgatgtcactgatgtccttgtatttgctgatggatcttggaaagttgttccagctcaggatgaaaaatctgatagacatagaggtgacacaattcagcaggctggagatgctgtagaaactggttcaccttctcgagatgtcatagatctgataaatggcaatgatgatggtgatatgcaaatggattgggcatcggctccagaagattcaaagcctgtgttgaatagtcaagatttgtctgtatcagactatcttacagatttccctatgacagctcagacagaagatctgaatcgaggggatggaaataatgggggaagcaacatggcttccacttcacgtcaaaatttgttactacctcctactagtgggctgggctcaagttcattagggaccttggaatctattctacctcaaaatgttctgcaccctgttatcacagatgcagtctctccttctcttgaaacctcttcagcatctggcatgcaacatgtttcacaggaaacacattgtggaactgtacagctgcagccacaaataggtccagtacatgggtccgaagtgagaaggcttcctatacctagaaatcccaggagagagccaataggagtacaggggttgacggttccaccacagaatcctgggtcatcaacaaggttgcagccaaatattctcaattgtccacctcctatcccgctatctagtccatcctcttcaacttaccaagcacatcaagtgaagaatccagacagtgtcattgcttcaaggaacagtggtagtgggccattaccaaggactcctagcgtcgctgctgcatcattgcacctacagtcgacagcacgggatattcgcaacacatcgagccatctacccagtcgagttgttggtctgcctgcgccacacctcatgggtgcacgaccaccaccaggaatttcagtgcaggctggaggagcgaacgcctacagaactatgcaacagactccaactatggatccactgaggcacacacggatgagcatgaaccaaacagcactggctgctgccggccaaaccaccgctgccgcgtatgtccgaccaacccaagcagacatccaaaaccatctctttcctgtgcagcaaagccaggcaccacgatcgcaacaagtgccacgaacaacaaccccgcctctacagcgggcgccaccgcacctgcaacctcccagtgtaccaccgactgttccaagcacacctcaggctggaccttcgcatggtcttccaccggagctccctgtggatgatagctggcgccccacgggacagatgagagggagtctgacaggcaatgcttacagttctgcaattaggcactatcggggccattctgagcagcagcagggcgagcctcggcctcccaacacttcaggtgcgcgaaggcctcagtaactgccagacattgcggcgttgccctgattatcaagcagggcttgggcagctaatttaccaagagattttaatttattatcatagctaatttggcgctatgatgatctatgttagtgtaggtaggggagcctagtgagtagtgatagtgctctgcttgtctacaacgcactctgatgttaaattagtagtatcaggtgaaccatttgtgtacccaatatggaacgtggattttttatgctaatgttttgcctgtgtaattggaccgattttcatgtgaaattcctgaacgattcccatgaaaatgaacaggta

SEQ ID NO: 4692 - DNA, 5237 bp, Zea Mays
ccgcatccgcgccgcgctgttgagaggagggagacgcgaggaggaagaagcaggcaaacaaagcagaagctccgtcccatccccggcagtcccctccatccaagtgatttcaggtatcagctaccgagaaacggagaaggtgaccgcacctcacgcaattcgcccccgccccgccgtcctttccctcctctagggttgtcttgtgggtgcctctgcttcccaccctaggggcaggtccagggccggtccttcttctcgccccgcccccgctgctctcttctctgctgctagagttaggttagtgttcggcgctggggggaggggcgtcctcctccctcgccgtcgccgccaatgcctcccggcggtaggcgcggcgccaagcagcggcccaactggaccagggaaccccagctaggtgacctcgtcctcgccaagatcaaggggtacccgcgttggccagctaagatcagcaggcccgaggaatttaatcatgagccaacgccaaaaaagttctttgtctacttctatggcaccgatgagattgcttttgtaccgctggcagatcttgaggaatttactgagaagacaaagaatgatctgttagaccgagctccaaatatgaaagttaaaagaaaatatgttcaagtatttaatgatgctgtggagcagatctgcaaggcctacaatgagttgccaaaaacatctgaagctgcaaatggagcattgcctgatcagagtgaaaagccttcagagcaccttgtgaggtcacaggatgttggtgagattccaggattgggacaaatggaaggtgatagccctactgattactcgcatacttcagcgaaaaggccagggaccgaggaggatgtcaaagatgatggtcatgaaatatgtgatcattctttagcagtttatcaaaagaaaacatctttactagaggatcctaagcatcccatgacaaagaagtctgctgcatccaagtcttctcttgacatttacatggaacaggagcattcaccaacatctgtccgtgctgaaagggaggctgaagaggtgaaaattgaaaaagagagctgtcccctagatggttttattttggaacctaacttggaggtagtttgtgcccttgaagtgccaaagaaatctaaatccaacaagccgttgaggaatgctgaaaggaaggaaaacaaacgtgctggtattggtagccctattgaaaggattgttgctgaggctgcatctgatgttgtattaaacatgagtgctgacaaagagagcagagaatttaagaagtcaaaaatcatgacaaaacaatcactaactactgattcagagaaaatggattataataaaattgtgcatggcgggcctgacgagcaattgactggaaaatcatctgcagggttttcttccaataagaaatcgctgccagatagtgggcagcacaagatggacagtagtgctgatacacgtccgggaaaaaagccaaggcttatggacagggctggtgaaacagataagacagttgacaagagtgagatgaagtcaaacattgattatggaaagcattatgctgtgaaacatgagcggcctacctctatggaaacgtgtaaaaacacgattcttaagaccagtaccagcgatgatagggcactgagatcaggtggtgttgtatcacccatatcaaggcttcattctgaggtcatggaaccagcatgtggttctgtgacactgtcaactgttgctgattctgttaaaaagggttccagcatgaaggaggatgcctcacgtgttgataggcaattggtgaaacctaagagaagagcatgtcgttttgatgaagatgaggatgaaggacagcgaacaccacttcatagaacttctgctaaatctctctctacacatatagtcccaactgagaaagcaggtattcggggaaaattttcttctcatgttggcaatgtttttggaaaaaagttaggccctgcaagagaagagaaatcaaggagtgttaggatgtcacctgtgaagcatgagccaattttttcttcaccgagtcaggataaagtgcatgctagacaccaggtagtcgagaaaagactgatcacagggttggttgagactcctgctgtcattggtaacaaaatgagcctggttgatggcaaatcctctgctcaagtaaaaatgccggcatcctctgaggtgaagaaacttcgtagtagttcttctaaaccatcacacctaacatctgggaactcccattcccgaaactatcctgccccagaaaagatccccttgctgccccaaccagaagaaacaaaggctaaatctaagctagctacgtctgttgagcataaggtgggcaccactttgtcaactgaacagagtgggaagcgggatcacttgaaagaggaaagatccagttatgttgataaagcagtttcttctgaacctaaccctggctcggccaagtcaataaaacatcttattgcagctgcccaagcaaggaggaaccttatggcttctgttcatgcaaaatttgatgggtcttcgactgataatgctgatattacgtccacaccatatggtttgccgggactaagccctagtcctgttttccgcattccatccccacccagaattgcttttcccgggagtcctggtcaacgtattctgaaaagcccaatagagtttgacaatggtcatggaaagagtcccaaatctaggcaggccagcggttcacctagtggtggtactgatgcagctattgctcgtgatgctttggagggaatgatagagactttatcgaggacaaaggatagtataggacgtgcaacacgccatgcaattgagtgctctaaatatggcattgctggagagattgtcgagcttctcatacagaaattgcagagcgagcctaattttcatcgcagaattgacctcctttttcttgtagattccataacacagtgttctcattctcagagagggcttcatatgttcccactgttcaagcggcattgcctcgtcttctcggtgctgctgctccacctggagctggtgctcgtgaaaaccggcgccagtgccttaaagttttaagattgtggcttgagagaaagattatgccagaagacatactccggaagtacatgggcgacattgaggtgccaaatgatgatactagcactactttaatgttgaagcgaccatcccgtgctgaacgttctgtagacgatcctattagggagatggatgacatgcttgttgatgaatatggaagcaatgcaacttttgagctttctggaattttatcatcaaaagtgtttgaagatgatgaagacttccctaaaaataatgggtcatcaccatttgtttcacaggcacggcctgttgaaaatgatgtcatacgaaaaactgaagatactattgctccagtatatgttgaggaacacattattatagtagagaatgtaactactgatgctgctatggaagatgctttagagttaccaggcaacaaacaacagactgatggagctgtccttattgaacacgactctattcaagatccaggttcagagcaggcaattgaccagaatgactttccctctctacccgatggccctccaccgcttccgtcagattcaccaccacctccacctcctttgcctccttcaccaccacctgttacaccgccgcctccgccaccacctccactttctccagcttcaccacctccgccaccacctcccccactgccatctggaccacctcctcagcctgctccaccacctctggcaacccaggtcacacctcttccttctattcctccgcctgttccttcatctccaccatcattgagttatcagcctccagctcctgagtactttgtgacggccaatggtgatcaattaacccagatgacaggaaatatattgattcaagctattggaaatgcaacaaccttcattcctagtggaccagttaatggacaagctgcggttaattttgttacttcgatgcaggcagaatatggaaacaataacatatttatggcaccacaagcttctaatgtcatttccaaacagtcagagccattatccatccgaggaacattggcggatggcatctggtaacttcagcccagatggccagcataattggctagccggtggcggagcattaccttgctcagaagggccatatgtgcaggatggatattcaaggtcaaacattgacagatcttcaattaatcctatgaaccatcaacatactgttctgaatcatttgccgtatggagcaccactaccaggccatgttccgcagatgctaccagccaggtctgatgtccacactcttaattgctggaggccctcttgatagagttgtaaactgaacttctttatggttttaacgtggaaagctcagaacactggaggcaatttgaattgagtgcaacaattcatggctttgttagtctgtgagatgcacttgcctcattgcctgggtgtaacgatgagatctgccatagtatatggaatggacattttacaatgtaactagtcttggcaacagcatccagcagactaatctctcttagtgtctgaagaacgatagccgaacgatgacagggtttgatttgttgatgcgtcgttttggttctcacccgagccagtttttgaagtgaaagcaataataatgttgttggtgcaccgctgaggtgtttaggttttactgctggtttggtgttgggtgatggttcctatcatctcactaaacaagattgttgactgtacatctgggagggaggtgatctgggatattgaggtgggtatcatcatgtgacggcgaggcacttggtgccaaatcgtactgaattttgttatctgggtctcagtctgctgcttttgtcccgcccgtattcgtttattcccgcaggggcaggggcaggaccctgttggctggccaggccacatatcctttttagtcccaagcaagttggagagccacacagtatatattatataaataatagtgagacatatttttttatgagattacttaaaagcaaatcatctctcgtcgtcgtgatacatggtttgttttcctcttttcgtcgtcctactcctgccttaccacaagcaggcacggaaggctgcacgggcaagcattttgcttataaagttcagggtgctgcagatgttggccaatttctaatcttgatacattattggccg

SEQ ID NO: 4693 - DNA, 1480 bp, Zea Mays
gcctatctcaaattcatgggcttgtggacttcggagagatgggacccattcggtgttctcgttgcaaagcgtacataaaccctttcatgaaatttgttgaccaagggaggcatttcatctgtaacttatgtggattcagaaatgatactcctagagactacatgtgcaacttagggcctgatggtaggcgacgtgatgctgatgacaggcctgaattgtctagaggaacagttgaatttgttgctacgaaggaatttctggttcgtgatccaatgcctgctgtatacttcttccttattgatgtctctatgaatgctatacaaactggtgcaactgctgcagcttgcagtgctatttctcaggctatttcagatctgccggaaggtcctcggacaatggttggaattgcaacatttgattctgctattcacttctacagtcttaaacgtgctcagcagcagcctttgatgctcatcgttcctgatgttcaagatgtatatacacctcttcagactgatcttattctcccagtttctgagtgccgggacaatctggagcagttgctagaaagtatcccaagcatgtttgagaataatagggttgctgattctgcttttggagcagctatgaaggctggcttcctggcgatgaaatctaccggcggaaaacttctggttttccaatcagtgctgccatcacttgggattggttctttatcagctagggaagctgaaggtagagcaaacattacaactggtgacaaggtatgcattgttgcatacttgcatatacttattttgtcttactaacaatggcacattgtaaatacgatctaactccatatatttgtttcatcaggagctcatgttccttttatcaagaatacccagttaaaatactaataaccttgtgtgattcataggaagcccataaacttttgcagcctgttgacaacaccctcaagacaatggcactagaatttgctgagtatcaggtctgtgtggatgtattcctcaccacacaatcctatgttgatattgcttctatatccgttgtgcctcaaactacaggtggccggtctggtcaagaaaaagcaaagggtggtaactgtcttgtctcttgggagattgttcaaaggacaaaggccactggaatatggaggtcttggggttctcaatcttcaaagattaggttgggatttatgtattcggtggctatggctacaaagaacagatactgctcggccatgggagggcttcctattcaggttctgagaaattctcaagccctatttgcagcagcaatgcacatcatagttggcaatgggaaggacactaaattctggactgaccggtggctgaatggcagttcagttgctgaattggctccaaacttgttactggctgtttccacaaaaaggtgcactgtttctcaagctttaaacaacagaagatgaaggatataagaggggctctcacag

SEQ ID NO: 4694 - DNA, 1629 bp, Zea Mays
atggcgtcgtcgccgcagccgccgccgccgttcgccgcgcaaaaccctaccgcgcagggctcgggccaggggccgccaggctccggggtgggggctctccccggggcgttcgccaacctccagatctcccgcggcgcggccccgccgcccggcgccccgcgggggctcacgccgcagcaggcaccgcccaccttagccgcgcgtccgggccccccaccgtccgctgcccgtcccgccttccctggcagcccgcccgcaccgccattcgtgcgggcgccgacaccgtcaacttccgcctcgccgccctttggcggacagcctggggtaatgtcccagccgccgccaccgttcggagggcctccaggtgcgtcgtctcagccgccgccgccgttcggtgtcccccccggggtggtgtcccaggccccttccctgtttggaggccctcctgcgacggcatcgcaggcgtcttcgccttttgttggtcactctgttgctgcgtctcaggcggcaccattcggtgccccccctgttgcgggttcgcatcctccacccttcggtgggcctcctggagcggggcctcagccagcaccgccattgcggcagacattcgctggccagcctgggccaatggccgcagcggcagcttggacgcagccacctccacctagctttggagccccgcaacagcctccaccaccattcggttcgcggccagctgggcagccgctctttgctacacaatcagcgcctgcggcacaacaactgccattcatggggccacccagggtaaatgccccggcgtttggacctccgtcttggcaaactcagggagctgggtctggtgcaatgcagccacctttgagaatgccaggcattcctggtagcatgcagccaaacacactaggaccccctggcaccccgactataccttattctccacatgctggaacccaggtatcaaccccgtccaaaattgatcctaatcaaattccacgtcccatgcgtgaatcatcagtcatcatttatgagacccgtcaaggtggccaagcaaccattcccccggctgcatctagtgaatttattgtgaaggacactgggaactgtagcccccgtctaatgcgctgcactgtgaatcaaataccatgtactggggatctcttgactacttcgggcatgcctttagctctgatggttcaacctttttctcttcctcacccatctgaggaacatattcagcttgtggacttcggagagatgggacccattcggtgttctcgttgcaaagcgtacataaaccctttcatgaaatttgttgaccaagggaggcatttcatctgtaacttatgtggattcagaaatgatactcctagagactacatgtgcaacttagggcctgatggtaggcgacgtgatgctgatgacaggcctgaattgtctagaggaacagttgaatttgttgctacgaaggaatttctggttcgtgatccaatgcctgctgtatacttcttccttattgatgtctctatgaatgctatacaaactggtgcaactgctgcagcttgcagtgctatttctcaggctatttcagatctgccgttgcatcccaacctgggctggtgccgtaggcaa

SEQ ID NO: 4695 - DNA, 2217 bp, Zea Mays
aacgcaagaaagaaccatgcgaaaacaaaaccagacgccgtgcccgtgcccgtgctctcctatcccacctacccgttgtcctgccctgccccgtccgtctcccacggtttccgcgtcccacccatcccttccacactttctcacccccgcccttctcaccccccgaaaaaattcccccggaaatcagagacgcgaatccctccctcgccccacgtccgaggtcgctcgccaattcgatccgcctcgtcgtcgcccgcccgcccgtccgccggtcgaccttgactgctccgtcgcacgtggcgtttcgcagcgcggaatctaccctgggttgggttgggagatccggggaaacccttgttcccgggcgctccgggctcgaatctcgctgcagacgggcaatgtgagcgctctccatcggagagggacgatctgcggggcggttgttggccgggtgaatcgtgcggtgcggggttgcgggaatggagcacgtgatcggagggaagtttaagcttgggaagaagatcgggagcggatctttcggggagctctatctcggtgtcaacgtacagagcggcgaggaggtggctatcaagaatctgtaaaatcaaggcatcctcagcttcattatgagtcaaaactatacatgcttctccaagggggaactggaattcctcatttgaaatggtttggagtggatggggagtacaatgtcatggtcattgatcttcttggtccaagcctcgaagacttgttcaactactgcaacagaaagttttctcttaaaacagtacttatgctagctgatcagatgatatctagggtagagtacatgcacacgagggggtttcttcatcgtgatatcaagccagacaacttcctcatgggcttaggccgtaaaacaagtcaggtttatgtcattgactatggccttgcgaagaagtatcgggacctccaaactcatagacacattccatacagggagaacaaaaacctcacaggaacagcacgatatgctagtgtaaacacccatcttggagtagaacaaagcaggagagatgacttagagtctcttggttatgtgctgatgtacttcttaagaggaagccttccttggcaaggcctgaaagctggaacgaaaaaacaaaagtatgacaaaatcagtgagaagaaaatgctaacctcaattgaggccctgtgtaaatcttatccatcagaatttgttacatatttccattattgccgctctttgcaatttgaagataagccagactacagctatttgaagaaaaattttcgggatttattcatccgtgaaggttgccagcctgattatgtatttgattggactgtatcaaggcaagctgcggacaataacagattgcgactgagtgggaagacaggtgggttggtgggaccatctgtggatcgggctgaacgagctgcagcaaaacaggatgttccacatagattcactggtccagctgatgcattggctaaaagaaccggctctggttctggtcattatggagaacacacaaagcacagaactctgttggattcccttatggcatccaatatgcgcaatggaagcacatcaaggaaggctcttctgtcaagcaaccgaggttctggagaccccagtgaaccaaatcgcagcagccacctagttccgaccaccaccagcagcagccgtccatcgaccaatcaaaggcttcaccactcaactggacttgagggcaggaccccatcatttccaaaacctggaagaatcggctatgatgatcccacaatgaggagttttgaacgccttactattagcgcagagaggaggaaatgaatctttggaagagcaaacgatctgagctgctcccggcgagtatacttcactgaatggattctgtgctgtgcatggtgctgagctctgcacatagcggtgctcgttgattcttggcacagatgatttgagttatgtacattcgtttaactcttccaaaaggttagcgaagcattttacaccccgctatgagggaccggggatcggctgcaatgtttaagccgtggtgatttaagatgatgttgactctaatacttatataatgacaatgaaaaaaagttccctagactagcattacatttgatgtgtttgtgaaagtaggattttcatctatgcaatggagtatagcagataactgtatgcataaggtcccgttggatcaa

SEQ ID NO: 4696 - DNA, 2094 bp, Zea Mays
tttttttttgagagaaacttaaggaccttcaaaataaataaataaaagattcttgacctttttaatccgtcaaacttaaatttaccgatccttgaagagcataagcgccgcatccgcccgcagtccaatgtgacgacatcacgagttcacgacatactgacattcggcaattccttccctccaaactaccgaagtctacttccattccttcctttctcctttcatatacccgcgtcgcccacgagcccgccgtgccgacagaggtgtggacctcgccggagcagaggctatggggccaccgcagccagccaggcccggcgtcatcaacatcgaggcctgcgcgcggccgatcgccgtcgaccaccgcatcagccttccctactacttccgcatcgcgggcagcctcctccgacaggctaatatatatcggaacgagagtaacttcctcgacctatatgtcatccttctgagatactcgagcttgctgtgtgaaacaattccgaggcatcgtgattaccatgccttcaagttaagagaaaaggcattttttgataaacttgttgatgttatcaaagaacttgagacattgaagccagttgtgcagcggcagattgccgatcataacagaggaggtactgtggaatctaatatgaatagtctaaatggagacaatggtacaactcataggatagagcagcatactccaagctcttatactccacagccatttgtaggtagcactaatggagcatcgcaaaaatccttccatgctgggagacaagtggcatcattactgagtgtccagaaacaatatatgaatctaccatatccaaaagaagaaacactagctagacactccatattaggacctaacggtcttaatggtcgatggaatgggcctgttactggaattaaggttcagtatccaagcaattttgaattaacacaaaacgatataacaagtttagtgccatccatcttgaaccaagatgatccgcaaggtcccagtactgcacctccacctccagatagcccctccaatgacaatgacgatatgaaatctgttctctctcttgatgatggtcgatggtctgtatcagcagacgaacacacttcatttacttctgctaatttggaagaagagttgttacagttgaatatcaaacaaccttctcctccaccagttctggcagaggtacaaagaccaatttctccatcaagagttgctgatccaacaccaggacttccgacctcgggaactgcccgttttcagaacttgcatgttccgatcaagttgatggattgttttctaagggttgccgagtcaaacaccaaaagaagcttagaaacctgtggggttcttgctggtaccctgaaaaatagaactttttatgtgacaaccttaattatcccaaagcagaaatcgacatctgttacgtgtgaagctacaaatgaagaagaactatttgaagttcaggacatgggctcactgttcactcttggttggattcatacacatccaacacagtcctgcttcctttcttccgttgacctccacaaccattattcttatcaggtcatgctgcctgaagcaattgcaatagttatggcacctactgacacaacaaggtggtatgggcgtgatccatgattgtcaagagagaggtttccatcctcataaggcacctcttgatggttcgccaatctacaagcaatgctcccatgtgtacatggacaccgacataaagtttgatatgattgatctccgagaacgatgagagcctaacttttttgggtttattttggagcccatactgtagttaaatcaagttgctgcctttttcttagtcgtgctgaagatttgtggattcttatgtatgctgttgtacatagctattgtattgtatagagaaaacaattgagtgaatgatatcagtcattgctgctttgttgcgattcatcccatatcctcgcgaggcacgtttgtgtggcaagatgaagtgatgtctagattttataccatgccaattctccatacttgaatatttgacttgaagagcactaaatatcactgattgttaaagctctattatc

SEQ ID NO: 4697 - DNA, 2724 bp, Zea Mays
catctcataaatcccccgccctctcctgaccacggccccgactggagactgctgttcccctcgaccctcgtccgtccgtccgtccgtcacctgacggctcccaaaccctaccccgcagatccctccccttcctctacccccgcctcgccgccggtcttcgtcacccgtcgccgtgcccgtcggcgcggtgttaagggtccgctacgctgcacctcgcggggagaaaggggtgggcctcggggacctccgccctccgcgcaaggagcgtgaagagagacgcaagagactaaagagagagcagcaggatgatgggtcaaggctacattcccagcagattaggaatgattatgctcctcaacccaaaagacatagtcgcattaaagaggcacctcagggctggctggactgccctgcatttggggaaccaatagataaaatcataccatctaaagttcctcttgacgaaacattcaatgagtcagtgcctcctgggaagcggtactcctcaaagcaactagttaacaaacaaagaaaagctggccgcgaaataggtctggtgattgatttgacaaataccacccgatattattcaccagcagaatggacgaagcaaggtactaagtatgcgaagattgcatgcaaggggagagatgctgtacctgacaatgaatctgttaataagtttgtctatgaggcaatgatgttccttgatcgacaaaaacaatcaaagaatcctaaatatattctggttcactgtacccatggtcataatcgtacaggtttcatgattattcattaccttatgcgcacacacgtctcttgtgttgctgaggcgattagtatatttgctcaaaggcggccacctggcatatacaagagggactatattgaagcattgtattcattttaccatgaggttcctgacaatatgatgatagcatgccctccaacaccagaatggaagagaccagatgatctcgatttaaatggcgaagctaagcaggatgacgatgatgacaatggtgatcctggaccactgcataatgaatcagaggataaagtcatcaccaatgacgatgtgttaggggatgaagtgccatatgaccagcaagaagctttgcgtgtcctatgttatcggttgcttgaaatgcctcttggaagggggcatgcacactttcctggatcacatccagtttctcttaacagtgaaaatctgcaactacttagacagcgatactactatgctacatggaaagctgacggaacacgttatatgatgcttataatgagacatggttgtttcttgattgatcggaattttagctttagaagggttcagatgcgctttccccataggagcctccaaggtctgcaagatatgaccttgattgatggagagatgattatagacacagtaccagattcaggcttgaagagacggtacttggcatatgatcttatggcgcttggctcagtgtccaaaactaggttgccattttctgaaaggtggaaaatgctggaagatgaaataatacagccgcgtaataatgagaaaggccttgagcgtggtgctaagagcaatccgttgtacaaatatgacatggaactattttcggttaggagaaaggctttttgggtgctattaacagtaaaaaaggttcttaaggtgtttattccatcgctatgccatgatgctgatggccttatatttcagggctgggatgatccatatgtaactcgtactcatgaaggtcttctaaagtggaaataccctgagatgaattctgttgactttctgtttgagcttacaaatgataatcgtcagctggttttcctatatgagagaggaaaaaagaaacttatggatggtgctcggatatcatttactgatgatgtagatccatcttctgtcgctgggaggattgtcgagtgctcttggaacaaggaagaacagtgttgggcatgtatgcgtattagatctgataaatcaactccaaacgacatcaacacataccggaaggtgatgaggagtatcacagataacattaccgaggagaagcttctcgaagagactgatgagataacgctcctgccgatgtatgccgataggatgaatgttcgtgttcatacaaagatggcacaacacaggcgaagattgccaccacagtgctagtctcgttgctagagtgctgggtcgctctcctagccagcggctggcttctgtagctgtgtaattagtagaggtttcagtagcccccccccccccccccccctatgatgatggccagccaactaattctttgcacttcatttgtgtcttgtcccctgccctcacacctacctgtataggcttccctgtaaattgtgtgctctatgttcctccatattctcccctatggttttatttttcatgggtgtagaatagcgtttaacaaggcgggtggtgttctatgtaggcgttgccatctctcggtgctgcctcgtgctagaataatgtagggtgtactggcgataccatgtggttgcgatatatggcttggttttagtgttttggtttgtgcgcacctgatccgatcctttgtccaacgaagattttttccccttatttttgggtaaaaaaggacgtcaatgttaccactctatggtatagtgcttttttgttcacatggttagatcatgtactgcgtggtccattttttctctttagtgtccgccactttgtgg

SEQ ID NO: 4698 - DNA, 2919 bp, Zea Mays
ctgctgttcccctcgaccctcgtccgtccgtccgtccgtcacctgacggctcccaaaccctaccccgcagatccctccccttcctctacccccgcctcgccgccggtcttcgtcacccgtcgccgtgcccgtcggcgcggtgttaagggtccgctacgctgcacctcgcggggagaaaggggtgggcctcggggacctccgccctccgcgcaaggtcattgaatgaccttctatacgaatatggatttgaatgcatcaccggtgcctgacgatgatgagcaacagccttatgatgattcagttgaggttgggtatgctcagacggaacatgttgaatctgctgttgcaacattgcgccgggagcgtgaagagagacgcaagagactaaagagagagcagcaggatgatgggtcaaggctacattcccagcagattaggaatgattatgctcctcaacccaaaagacatagtcgcattaaagaggcacctcagggctggctggactgccctgcatttggggaaccaatagataaaatcataccatctaaagttcctcttgacgaaacattcaatgagtcagtgcctcctgggaagcggtactcctcaaagcaactagttaacaaacaaagaaaagctggccgcgaaataggtctggtgattgatttgacaaataccacccgatattattcaccagcagaatggacgaagcaaggtactaagtatgcgaagattgcatgcaaggggagagatgctgtacctgacaatgaatctgttaataagtttgtctatgaggcaatgatgttccttgatcgacaaaaacaatcaaagaatcctaaatatattctggttcactgtacccatggtcataatcgtacaggtttcatgattattcattaccttatgcgcacacacgtctcttgtgttgctgaggcgattagtatatttgctcaaaggcggccacctggcatatacaagagggactatattgaagcattgtattcattttaccatgaggttcctgacaatatgatgatagcatgccctccaacaccagaatggaagagaccagatgatctcgatttaaatggcgaagctaagcaggatgacgatgatgacaatggtgatcctggaccactgcataatgaatcagaggataaagtcatcaccaatgacgatgtgttaggggatgaagtgccatatgaccagcaagaagctttgcgtgtcctatgttatcggttgcttgaaatgcctcttggaagggggcatgcacactttcctggatcacatccagtttctcttaacagtgaaaatctgcaactacttagacagcgatactactatgctacatggaaagctgacggaacacgttatatgatgcttataatgagacatggttgtttcttgattgatcggaattttagctttagaagggttcagatgcgctttccccataggagcctccaaggtctgcaagatatgaccttgattgatggagagatgattatagacacagtaccagattcaggcttgaagagacggtacttggcatatgatcttatggcgcttggctcagtgtccaaaactaggttgccattttctgaaaggtggaaaatgctggaagatgaaataatacagccgcgtaataatgagaaaggccttgagcgtggtgctaagagcaatccgttgtacaaatatgacatggaactattttcggttaggagaaaggctttttgggtgctattaacagtaaaaaaggttcttaaggtgtttattccatcgctatgccatgatgctgatggccttatatttcagctagaacattttgtcgtggatgtgtaattggtggaccaaattttaaacggtgctggatatggaactcctctccctagtgtgacccctaacattctttggctgggatgatccatatgtaactcgtactcatgaaggtcttctaaagtggaaataccctgagatgaattctgttgactttctgtttgagcttacaaatgataatcgtcagctggttttcctatatgagagaggaaaaaagaaacttatggatggtgctcggatatcatttactgatgatgtagatccatcttctgtcgctgggaggattgtcgagtgctcttggaacaaggaagaacagtgttgggcatgtatgcgtattagatctgataaatcaactccaaacgacatcaacacataccggaaggtgatgaggagtatcacagataacattaccgaggagaagcttctcgaagagactgatgagataacgctcctgccgatgtatgccgataggatgaatgttcgtgttcatacaaagatggcacaacacaggcgaagattgccaccacagtgctagtctcgttgctagagtgctgggtcgctctcctagccagcggctggcttctgtagctgtgtaattagtagaggtttcagtagcccccccccccccccccccctatgatgatggccagccaactaattctttgcacttcatttgtgtcttgtcccctgccctcacacctacctgtataggcttccctgtaaattgtgtgctctatgttcctccatattctcccctatggttttatttttcatgggtgtagaatagcgtttaacaaggcgggtggtgttctatgtaggcgttgccatctctcggtgctgcctcgtgctagaataatgtagggtgtactggcgataccatgtggttgcgatatatggcttggttttagtgttttggtttgtgcgcacctgatccgatcctttgtccaacgaagattttttccccttatttttgggtaaaaaaggacgtcaatgttaccactctatggtatagtgcttttttgttcacatggttagatcatgtactgcgtggtccattttttctctttagtgtccgccactttgtgg

SEQ ID NO: 4699 - DNA, 2081 bp, Zea Mays
atcttcttttaactggagcagcagagaactgaaaagtgcccgcctctcgctcgcatcaggaaatcaacgactgagtctccacgactgtcggtcacttcggatggcggcaccaccggaggggaatgtccgcttaggcgaggggtgggacgaggacgacgtgctggagccgcagccgctggaggtcatagcgccggatgtcaagtccaagaagcgcaatccggcgcccggagttcgggttgttggtcgccggatctacgatccagagaatggcaagacctgccaccaatgccgccagaagacaacagacttcgcagcggcgtgcaagcaagtcaagaagaagggtccgtgcccagtcaagtattgcctcaagtgcctccttaacaggtatggcgagagtgccgaggaggcggccggcaaggaggactggatctgtcctaagtgcaggggcatctgcaactgcagcttctaaagaagaaaggcgagatgccaactgggataatggcccacatcgccaaggcttccgggtgcacctctgtccatgatctccttaaaaaggggtcagatgtggtttctgctgcacaggcgattctcaaggtgaatggtagtgacaagggcacaaagagatcccgagggacagatgctgctgctgaggtggcgactgaaaaggatgtaaatataggcattgatatcaatacagttatagcagatgaaggagatgaaaatataggtgttgatctcaattcacttccttctgttgataccaagaaaaggcagaagcggcagaagctcaagcacaggacaaagaaggatcctgctgatgcaacgtcacatggagtcaatactgaaccattgcagatggatgggaaccttgattttctcaatagtaaaactgtgcgacccaggggtaccccagtcactaaaattgcaggcgcagagcttgatgacgaggatactggggctgcaattcagtttatagaattctgccgtgcatttacagagatttttcaaataaagaaagggcaaccagaaaaaattcttcaagatttagttggaggccgtgaacttcggtttgtatcctcagttgttgctgggtttcatataaatttgttatctgtcattcaagaaggaaaggggaagaagcctctggcttacacaagagacggagatgcatgggtaattgatattggcaaatatataagtgaatcagcttctatatcaaaagggtttcctctcaaccatatcaatcaggggatatcaggatataaaaacttgagcccttcttgtaagctgcgtgttctgaattttctttgtgatgagaccctctctactgacaagctgaggaactggattgacatgcaaaatgacatagctgctgaaccagtgaatgctgctagagaaaaggcgcgtgctgcaaaagaaatggtaaaggagctaaaggaaaggctaaaggacaacatgaacaaaataattgtttcaccaaatgaagcagcagcctctaacagtgaagcaaataagtatattatttcccaaataaaggaggcacaggaagtcaagcgtgcagccataaatgacatggcaactatggagaagcaaggaggtttttggaccaagcctctgatggtagagaaaggggcagcatattggaagttagatggttactgtgataactcagcaatattgcttcaagagtatggtggcgatgaattaatggcaaataaagacaagtggtttatgtttactgaagacgaggagaaaataattgaaaaacatttagccactaggtaatgagtttgtcttgccacgtttggatgtgtttctacctttccaatgatggtgaacttctcttttgttgcttgtatatcatgaaatttatctgttggaaaccctatctgtattttcttctgttgttgatcctccaactattgctatcaaaaaccattttatgtagtagcatcctaacaaatgtggcatacaattcattccagtatacctgaactattgtgatcaatgaactccaacatgtaacgaatgattagagttgacaatcagtccttctacggataccttgcttccagagaaaa

SEQ ID NO: 4700 - DNA, 1399 bp, Zea Mays
gcaacagtagccccatcctcctcgttggtcgtcgtcgccgcctcacagcctcgcccctgaccccgcccggcgccagatgcatacgaccaggaggtcagcgcccccgcctagcactagccgcatccagcctggtggttagcacctcacctcactctagcctccagcctgcacctacaagggccccacaggcagcgcccctgcctggtagccagccacagtcggctaggcggtcaacgcccttgcccgccgcccatgccacacaccggcatccggccagccactgcttcactgtgctccagtagatggtgtgacgcccccatccctcgctctcgctcttcctggctctgatctgatccaccttctgcgttagggtatgggtgacgagtggcactcgatttgctgagttcggatctaattttcttgttgtcgacttgtgcagctcgattgcttaccggcaatggtgcagtccatcgtctccatcgacaagatttgtgccatgcttgaggttcatggagcatgattaccacattggctagtggcacaacatgcctacgtatctaatatttaatggtgcaattactatgctcgtgttctctcattgctatgtttgtcatcatctgtaggaggttgtcttaggtcactggaatcaacatgggaaacctgttgtgcagaatgttttgtagtatgtttttcataaggttcctcttcatactacatgcttttctttctgatttcaaaaatgcattacacaaataaaattaccatttatatgtctgtatctaatatttaaggcataagaaaaattagcataggcaaagaaatgggtcaaacctcatgttgagactactaagatggtaatacccatttgttcatgtagttcaatttattatgttttatcttgggcttatagttggctaacattattactttctatgattgaagaagtggattcttgttaagcagaaattggttgtcctcaagaaaatgtagaatctcatgtacaaaaggtatcaacaagatgttaataaattgaacctcatattgagactgctaagatgaaatggatttctattaaggagaaattggttgtcctcaaggaaaatgcaggaccttacgtacaaattggttgtcttcaaaatgttggtcttgtagctgcaagcctgcaacaaagagaataaacaattgtggtgatgctacacatgtagaagtagcaatgttggtcttgtaactcccaagatttggttattgatgaatgatatctatgataatatattgctaagtgtatgtgatgatcatttattgttgtttaattataatgagttgtgccttttgtgctacgttggcattggtgatagttaaaaactaaaatggccttggttggccaaatgtgatgaacaaa

SEQ ID NO: 4701 - DNA, 3333 bp, Zea Mays
gtttgcagttgtggatgaaaagagctgacagtaggatgttgacttgtagctgtttagatgacaccggatgaaaatgacgaaacagcattaatttggtattctcacaaaaaggaaaagttcctcagactgtcctctgtctctaaagtcattcctgggcagagaactgctgtttttaggaggtttctacgccctgagaaggactatctatcattttcactcatatacaagaacggccaacgttcccttgatctggtttgcaaggatcaagttgaagttgaagtttggttttcagcactcgaggcattaataagttcgtgccatagaaattcttcagttgatgaacacaaggatagagtatcattttctgatgatgtatcatattatcgagatggacatccgtatgattcaacactagatattgcttcaagtatatcacgtagttttaacacagcagattattgccgaggcagttcttttagtttcagaagatcagatgctggatctgatcgtgcaaatatgataagaactagtggtgcagatagtactcgacttagtatttccagtgcccctagctcttccagtcagggttctggaacagatgacatagaatcccttggtgatgtctatgtatggggtgaagtttggactgatgcggccccatcagatggacacacaagctcgtcttgctcaaaagtagacgttttgatcccgaagcctttagaatcagatgtcgtcttagatgttaatcagatagtatgtggttcaaggcatgttgctcttactaccaggcaaggggaggtgtttacatggggcgaggaacttggtgggcgccttggtcatggaactgatacagatattagtcgtcccaagcttgttgagtcactatccgtgaccatagttgattttatttcatgcggagagttccatacctgtgctatatctgcttctggtgatctgttcaactggggggatggctcttaccgtgctggattgcttggatacgacactggggctagccattggcttccaaagcgtgtctcagggcccttggaggggcttcaggtactgtctgttgcatgtggctcgtggcattcagctctgatcacatcaactggaagactttacacatttggtgacggaaaattcggtgctcttgggcatggaaaccgtgaaagcgctgcgtacccaaaagaagtggaagccttgaatggatttagaactgtcaaagttgcatgcggagtctggcattctgcagcaattgtggaggcctctgttcagacaggcatgaatgtggtgtctaagaagctgtatacgtggggtgatggagataagaatcgtttaggccaaggggacaaagaagctaggctgattcctacctgtcttcaagctcttcttgagcacaattttcatcagctgggatgtggacagaacatgactgttgcccttgctacatccggtcatgtgtataccatgggtagttctgacaatggtcagctcggaaatccaaaatctgatggtaaacatccttgccttgtcaaagacaaactagctaacgagttggttgaggagatctcatgtggagccgcccatgttgcagttctaacgtcaagaagcgaagtatacacgtggggactgggtgccaatggaagacttggtcatggtgacctcaacgacaagaagacaccaactattgtcgaagcacttaaagatcggcatgtcaaaagtatatcatgcggctcaaacttcacaacatgtatctgcatacataggtgggtgtcaggtgcagatcagtctgtttgcacaggttgtaggcaggcatttggtttcacgaggaagagacataattgctacaactgtgggctagtacactgccatgcttgcagttcaagaaaagtgctcaaggctgctctggcaccaactcctggcaagccgcatcgtgtatgtgattcatgtttcctgaaactgaagaatgcagacaccagcagcagcaatgcgaacagaagaaatgccgctactcgtcgctctacggacagcagagaaaaaccagaaataaggcctcccaggcttgtggcaacaccgtcagcagagccaggcaagtacatggaggtaaaagcatctaagagcgatatgaaacctgcagattcgatcatgaaggcatcacaagcttcggctctactgcagttcaaagatcttggttttggtgcccaatttggtgggcttcagcctatgggaatgccaccggcattagctatgtcacctgcgataccggcattttctttggcacctccatctccatatacaaagaaaatgaaatcacctcctacttctgctatcccccagagctctaaagtcgatgttgatcacttgcagaagtcaaatgacttgctgaatcaggaagttctgaaattgcaatctcaggttgaggatttgaaacaaaagtgcgaagcacagcacgagcagcttcagaaatcagataaaaaagctaagtcagttgcctctatggccactgaagaatcctcgaaacgtaatgctgccgtggagtttgttaaatttcttgataatgagctcaagggtattgcagataaacttcctgttgacgttgccgacagcttgaaagctttgcaaatgcgaacacagtcactactgagggaacaatcaggtcaccccttagagctcgtgaatccaatggaacgtgatcatcttcacctgtccagtggtggaagtggaagatatgatttggtcactcataagtcaggaggtgtaggttacctgacaatgtctcaagatggcagttctgccagtggctcagccatgtccatcacgagtgaatccccatcccatcgtttcatggaaaacagttcaaaggcccatggtgattttgccccgaagcagggtacccatggagaggtccagttaattgagcagtttgaacctggcgtatatgtgacacttatccaactaaaggacggtaccaaagtattcaagcgggtccgattcagcaagaggagattcgcagagaatcaggctgaagaatggtggagggaaaaccaagagcgggtcttcaagaaatacagccacccaactcatgcaccacatggaaacacaacttctcacgaggaagagcatcattcatgatctccaaatcaggtccacacaggtcgtcatgtaggaggtttatcacgcgaaatagggtaacacaggacttattattgttttgttcattattttcttgtaaattgtagattactgttgccctttttttgttccttttaccctgttcaacccccttctgacaaaggtattcatttccaaagccaactaaattgaggttca

SEQ ID NO: 4702 - DNA, 4155 bp, Zea Mays
caaacgccacctttgttgattgtgagatcagatgaggaatgtcctgagacgttggcgcatcatgtgttggtgaaggttagaggagaggaagatctctgagtaagaagaaacaccacaatagaaaaatcagttgtctccacaaaacgctcggactcgtatagccggtccttctctctgcgttctcccttgggctcccacgtccgcctaacaagccgccattctcccctccgtctggagagaaagagagattcacctctcttcccagggccgccagacgcaagaagaacttctaacggagttgtggatgaaaagagctgacagtaggatgttgacttgtagctgtttagatgacaccggatgaaaatgcccttattactctaaagaaaggtagcaagcttatcaagtatagccggaaaggaaaacccaagatccgttctttcagactttctagtgacgaaacagcattaatttggtattctcacaaaaaggaaaagttcctcagactgtcctctgtctctaaagtcattcctgggcagagaactgctgtttttaggaggtttctacgccctgagaaggactatctatcattttcactcatatacaagaacggccaacgttcccttgatctggtttgcaaggatcaagttgaagttgaagtttggttttcagcactcgaggcattaataagttcgtgccatagaaattcttcagttgatgaacacaaggatagagtatcattttctgatgatgtatcatattatcgagatggacatccgtatgattcaacactagatattgcttcaagtatatcacgtagttttaacacagcagattattgccgaggcagttcttttagtttcagaagatcagatgctggatctgatcgtgcaaatatgataagaactagtggtgcagatagtactcgacttagtatttccagtgcccctagctcttccagtcagggttctggaacagatgacatagaatcccttggtgatgtctatgtatggggtgaagtttggactgatgcggccccatcagatggacacacaagctcgtcttgctcaaaagtagacgttttgatcccgaagcctttagaatcagatgtcgtcttagatgttaatcagatagtatgtggttcaaggcatgttgctcttactaccaggcaaggggaggtgtttacatggggcgaggaacttggtgggcgccttggtcatggaactgatacagatattagtcgtcccaagcttgttgagtcactatccgtgaccatagttgattttatttcatgcggagagttccatacctgtgctatatctgcttctggtgatctgttcaactggggggatggctcttaccgtgctggattgcttggatacgacactggggctagccattggcttccaaagcgtgtctcagggcccttggaggggcttcaggtactgtctgttgcatgtggctcgtggcattcagctctgatcacatcaactggaagactttacacatttggtgacggaaaattcggtgctcttgggcatggaaaccgtgaaagcgctgcgtacccaaaagaagtggaagccttgaatggatttagaactgtcaaagttgcatgcggagtctggcattctgcagcaattgtggaggcctctgttcagacaggcatgaatgtggtgtctaagaagctgtatacgtggggtgatggagataagaatcgtttaggccaaggggacaaagaagctaggctgattcctacctgtcttcaagctcttcttgagcacaattttcatcagctgggatgtggacagaacatgactgttgcccttgctacatccggtcatgtgtataccatgggtagttctgacaatggtcagctcggaaatccaaaatctgatggtaaacatccttgccttgtcaaagacaaactagctaacgagttggttgaggagatctcatgtggagccgcccatgttgcagttctaacgtcaagaagcgaagtatacacgtggggactgggtgccaatggaagacttggtcatggtgacctcaacgacaagaagacaccaactattgtcgaagcacttaaagatcggcatgtcaaaagtatatcatgcggctcaaacttcacaacatgtatctgcatacataggtgggtgtcaggtgcagatcagtctgtttgcacaggttgtaggcaggcatttggtttcacgaggaagagacataattgctacaactgtgggctagtacactgccatgcttgcagttcaagaaaagtgctcaaggctgctctggcaccaactcctggcaagccgcatcgtgtatgtgattcatgtttcctgaaactgaagaatgcagacaccagcagcagcaatgcgaacagaagaaatgccgctactcgtcgctctacggacagcagagaaaaaccagaaataaggcctcccaggcttgtggcaacaccgtcagcagagccaggcaagtacatggaggtaaaagcatctaagagcgatatgaaacctgcagattcgatcatgaaggcatcacaagcttcggctctactgcagttcaaagatcttggttttggtgcccaatttggtgggcttcagcctatgggaatgccaccggcattagctatgtcacctgcgataccggcattttctttggcacctccatctccatatacaaagaaaatgaaatcacctcctacttctgctatcccccagagctctaaagtcgatgttgatcacttgcagaagtcaaatgacttgctgaatcaggaagttctgaaattgcaatctcaggttgaggatttgaaacaaaagtgcgaagcacagcacgagcagcttcagaaatcagataaaaaagctaagtcagttgcctctatggccactgaagaatcctcgaaacgtaatgctgccgtggagtttgttaaatttcttgataatgagctcaagggtattgcagataaacttcctgttgacgttgccgacagcttgaaagctttgcaaatgcgaacacagtcactactgagggaacaatcaggtcaccccttagagctcgtgaatccaatggaacgtgatcatcttcacctgtccagtggtggaagtggaagatatgatttggtcactcataagtcaggaggtgtaggttacctgacaatgtctcaagatggcagttctgccagtggctcagccatgtccatcacgagtgaatccccatcccatcgtttcatggaaaacagttcaaaggcccatggtgattttgccccgaagcagggtacccatggagaggtccagttaattgagcagtttgaacctggcgtatatgtgacacttatccaactaaaggacggtaccaaagtattcaagcgggtccgattcagcaagaggagattcgcagagaatcaggctgaagaatggtggagggaaaaccaagagcgggtcttcaagaaatacagccacccaactcatgcaccacatggaaacacaacttctcacgaggaagagcatcattcatgatctccaaatcaggtccacacaggtcgtcatgtaggaggtttatcacgcgaaataggacatggcgaagaacaataacgatcaaacaggagaagtggaccggagacgacgatgaagcaaggaggtgagacgaggaaccatagctggacgacgacgatgtggtatgctggtcgtggtcacaatggagatctagacgacaagttggagtcacggtagtgctgcgggttgaggttgtcaccttccaggacggtggtctgaggtcgcgatagtggatggcaagtcgtggttgttgcagcaatcgggtcgaggccatgccaacctccaagacggtggttcgagatcgcggctctagacaacgtcggggtcacaacaacgctaagggtcgaggtcacatcgtcctcctggccagtggtccgaggttacggtggagctttgtcgcagtaggtactcgaggtcgtgggctcatagtggctttgatgaattcgctgatgcgctgttgggggaggaaaagacaggcggatgtagatggaggaaatgagcgaaaaattgtttgtgctatgttttttgttgtagaaatggcgcacaagtgtatttcgggagtagctctaggttcctaaacgtagggagaaaattgggttgggtagga

SEQ ID NO: 4703 - DNA, 2115 bp, Zea Mays
aatagtcatgtgcgctcgacgcgtcgcgtgcctctctctccgctccctctgacttgttcgcttgccgtcctcgctcgcggcaaagctgcagcgtgtctcggctccggcgcgccaccgctcgggacgcccgacggatccgctcccgcgtgcgctcgatatcccttgcttcaacggtccaagtcaacccccccaccaaatcgccgatcgcagcgtgcacagctcttcttcaatctgcaggattgcagccacgcacaagtcgtagctgctcgctcaattgtacttcagatagcatcttctttgattgtcctcttctgcatactcttgttgatgtttccttggaactttgagctttggaagatgccaaggagaacaggaaatgctgcttcgaccaaatcagttgaattggtcaaacaagaccaaatggagtttgatcatcctgatgaggtagatgaagaggaagaagttgagtatgaagaaattgaggaggaggttgagtatgaagaggtagaggtagaggaggaggaggaggaggaggaggaggatgaaattgaaggtgtgcgtgaagttgatgctaatcatgacagtaaaatagtggatgatgatcccaaggatgggaatgaaaaagaaaagcatgctgagcttcttgctcttcctcctcatggagctgaagtttatgttggggggctttcctctgatgtatcttctgaagatctcaaacaactatttgaatctgttggagaagttgcagaagtgcgaatgcgaggaaagggggataacaagacatatgcttttattaatttcagaactaaagagatggctttaaaggccatccaaaagttgagcaataaagacctaaagggaaaaaagataaaagtttcatcctctcaggctaagaataggctttttattgggaatgtaccccatgattggacacctgatgatttcaaaaccgcagtggaagaagttggtcctggagttttaaaagttgatctcatgaaggcaccaggctcaggtcgcaataagggttatggctttattgaatactacaaccaggcatgtgcagagtatgctaagcagaagatgtctactccagaattcaaactagatacaaatgctcctactgtcagctgggcagatcataagaatgctagtgaagctacatctacttcacaggttaaatctctatatgtcaaaaacctccccaagactgttactcaagagcagctgaaaaagctgtttgagcatgttggagaaatcacaaaagttgttattccacctgcaaaatctgggcatgaaaatcggtacggttttgttcattttaaggaacggtccatggttatgaaggctctgaagaacactgagagatatgaacttgatggtcagctgctggattgttcacctgcgaaacctcctgctgataagaaggatgatactggatcatctcctactgcaaaaggacgtccattacccccaagttatgccccacttggatatggactagcgggagcttataatccacttggaaaaggactggcaggtgcttacaattcccctggaaacggactggcaggtgcttatggcgtgctttctgctcatgccgcacagccaatgttgtatgctccaggtgcttctccaggttcaacaatgatcccaatggtcctaccagacggccgtcttgtatacgtaccacagactgcagggcagcagcctctgcatgtgacttcgcctctgcctcagcaaggcggtcgtcgattcggcggcggtggcggatccagctccggcggaaagcgacagaggggagatgaccgtggcagtaacagcaacagtagccgcaggggctggcaccgtccgtattgatgtttgcaatgccgctgatttgcaattagaagttagaacccagcaattagcatatttatcgcagtaccatgctggaaactgtactttgaattatttgtttttcctgtgtgcttcgtagcaggcctgccctaaaaagaacgatagtaccggaaggggcaaatgtagtggtaatatactctatacatttgtaaccatctccatcctgccgttgaccgtcttaggttattaaaataaatatatttcttccgttctttttta

SEQ ID NO: 4704 - DNA, 1077 bp, Zea Mays
tttacctcaatttggtgcttgaatatgtgccagaaactgttcaccgtgttattaaacattacaataagatgaaccaacggatgccattgatttatgttaaactttatatgtatcagatttgtagagctttggcttaccttcacaactgcgtaggagtgtgccacagagatataaagccacaaaatattctggtgaacccacatacccatcagctgaagttgtgtgacttcggcagtgccaaagtcttggtacaaggggaaccaaatatttcatatatttgttctagatactacagagccccagagctcatatttggggctactgagtatacaacagctattgacgtgtggtctgctggttgtgtacttgctgagcttcttctaggtcagatcttccacaaaagaatgccatctgaagctgtagattttgtgtctcggcttctgcagtactcaccaaacctccggtgcacagcattggaggcgttaatccatccattctttgatgaactgcggtacccaaactcacgtctaccaaatggccgttcccttccccatctcttcaattttaaacctaatgagttgagaggagtaccagaggagtttgttgtgcaattgatccctcagcatgctaagaagcaatgtgctttcttaggagtttgagaaagcagttcaattttattccagaaaagaaaaaagagagaggatgcagcagttgagaggttacctgagtattgattacttacgttctgtttaaccgcacagtagcattagcctacagtattatcgactaggcaacgtgtgctgttatctttcacgacggcttttacatcgcaatgttctaccacggtggtgggatctttttcaccacattctgtaaagcagaagaagacgtaaatcgactggtcacccgttcttgtggtctgtatattggtctcccccaatcttgagaacacgttcttttgtttttggagatggattcatttcgtatctgtatcactatcaccaaatgaaacaagaactcatgtattcttgaactggattcagttacatgagagtcaaaccatgtcctttctctaag

SEQ ID NO: 4705 - DNA, 952 bp, Zea Mays
aaaagtaaaataggttgcaaaaacagtggaacttattaaagcaaaaggaggaacagtcacaagggagccaggccctgtcaaaggtaatgcttcgagtgggagatcttgatcgtgctataaatttctatgagaaggcatttggcatggaacttcttcgcaagcgagacaattctgagtacaagtatacgattgcgatgatgggatatggtccagaagacaaaaatgctgtattggagttgacctacaactatggggtgaaggaatatgataagggaaatgcttatgcacagattgctattagtactgatgatgtctacaaaactgcggaagcaattagagtaaatggtggacaaattactcgtgaacctggcccattacctggcatcaccaccaagataactgcatgcacagatccagatggctggaaaacagtgtttgtcgataacatagattttctgaaggagttggaagaatgagctttgctagagatctcaacttggtacatcaagctccatacggttgcaccccgtgagttccatgcatgacctgcaaaatctttgtaaagccacagcctcaaactgaggattgtagataggtcgtccaatctacggcatcatcgcaattgatagttgatagagcattagattttccttgcagatctatatagatgcgcaaccgtttttgtattatgcattttaatgcataagttcaatggaaatgattcatgggtaagaaaatcgtcttctttcaagcggcaatataagggctggtttggtgacttgaatagcaagtgatttatttttccatgaattctctccaatttcattgtcaacaaaccacaaaccagctctgaagtattagagctaccataggctcttagggctagtttagaaatcttacgctcttagggctagtttagatttctatagattaatcctacaggagatttatt

SEQ ID NO: 4706 - DNA, 1570 bp, Zea Mays
atacggtactagctgacttaacagaatatccatcagtattctacaatgatcaatacagatcattgatccctttcatgtcatggtctattcaaaaggaaaatccacttctgagattaacagttgagaactgtgagttgtccagtattggtgtgattatacttctggactgcctcacaaatgcgaagcaactccttgatgtgctatctattgcagacaatcatctagggagtcctgtggcagctgcattggccagattcttgggttcacatgtacgagctttaaatgctacagatatcggcttgggaacagtaggcttccaaatacttgaggaaacattgccaacagaagtagctctttcccacatcaacatcaggaggattggcctgctggtggacaaggaggcccccgccctggtcctggtgctgctgctacagctccagcaccagcaccggttgctgctcgcccataggctttagcttttcgaccgtgttgaaagtcttctgcccacgcagtttcggagttgtcgcctatgggtgaaaaacaagaagatggaaaatacaagcactctgtggatctcccgaaaacaacatttgagctgagagcgaattctgtacagcgggagctagagctccaaaaattatgggacgataatcaggttctgaaaagggtttctgaggaacactgggtgatcttcacatgggccatgcgctcaataaaatcctcaaggattttataaatcgctacaagctgcttcagaatcataaagtgtcctttgttcctggttgggattgccacggccttctaatagaactaaaaggcaagttcatttgtacaaaggtctatattctatttgttgcccaagtcttatctgcattactaaatgctattcacgtttgctattttaaaaattgaattttgagaatcttcatgtatttagaggttgtatttgtatatgatgctaatctccttattgtcgcacatgttcacgctggagaaggtggcttgtgcgaacgaggcgtggcaatcgatgagcagtggcaaacccaaaaatcttcaaaagcctaggcaaaagtagtaactaaagatacatcaccttgtccagtttttctgcttttacttcgactatatgtcattgtgccacaaaaaacttgtttcatcgacttatgatgagtcttctcaattgtttcttgaatatgcttttttagaaccaaattgaattttacaaggtgcaatattgattagaaaaaggtgtgatgctgactgggaaagcgctactcccttgtatgaattagctggtcgatgattttgtttcccatcctttttaatttcttgacatccgtttgttcattggggagcacatatgtagaatgatgattaatgtttttaaatattaatagattttatcataatatattgccgccgtaacaacgtacgggcatacaactagtcattgaagaagtcaaaaagatgagagaagcacggtaagagacagagagacaccatgagaagttctttgagttcgaaaagtgtaagcttgagatggaacagactaaacttgaattggagcgag

SEQ ID NO: 4707 - DNA, 1702 bp, Zea Mays
gtccgctcaggcttcttatgtttcagattctcctgcaaccgtttggtgttgttttggctgagttagaagctccgtccaggataaacgatgctccataaattatgaagcagatgcccccgccacctaaggatttggagattgctatagttcggagctcgagctgcccttcgatcgaaccaagaacaaccctgctgccctcacaacatcaaagtttggtatcagcaagatggagcttctcaaggcatgcttttgtagggagtgactgctgatgtagaggaactcatggatgaagatcattgatccctttcatgtcatggtctattcaaaaggaaaatccacttctgagattaacagttgagaactgtgagttgtccagtattggtgtgattatacttctggactgcctcacaaatgcgaagcaactccttgatgtgctatctattgcagacaatcatctagggagtcctgtggcagctgcattggccagattcttgggttcacatgtacgagctttaaatgctacagatatcggcttgggaacagtaggcttccaaatacttgaggaaacattgccaacagaagtagctctttcccacatcaacatcaggaggattggcctgctggtggacaaggaggcccccgccctggtcctggtgctgctgctacagctccagcaccagcaccggttgctgctcgcccataggctttagcttttcgaccgtgttgaaagtcttctgcccacgcagtttcggagttgtcgcctatgggtgaaaaacaagaagatggaaaatacaagcactctgtggatctcccgaaaacaacatttgagctgagagcgaattctgtacagcgggagctagagctccaaaaattatgggacgataatcaggttctgaaaagggtttctgaggaacactgggtgatcttcacatgggccatgcgctcaataaaatcctcaaggattttataaatcgctacaagctgcttcagaatcataaagtgtcctttgttcctggttgggattgccacggccttctaatagaactaaaaggcaagttcatttgtacaaaggttgtatttgtatatgatgctaatctccttattgtcgcacatgttcacgctggagaaggtggcttgtgcgaacgaggcgtggcaatcgatgagcagtggcaaacccaaaaatcttcaaaagcctaggcaaaagtagtaactaaagatacatcaccttgtccagtttttctgcttttacttcgactatatgtcattgtgccacaaaaaacttgtttcatcgacttatgatgagtcttctcaattgtttcttgaatatgcttttttagaaccaaattgaattttacaaggtgcaatattgattagaaaaaggtgtgatgctgactgggaaagcgctactcccttgtatgaattagctggtcgatgattttgtttcccatcctttttaatttcttgacatccgtttgttcattggggagcacatatgtagaatgatgattaatgtttttaaatattaatagattttatcataatatattgccgccgtaacaacgtacgggcatacaactagtcattgaagaagtcaaaaagatgagagaagcacggtaagagacagagagacaccatgagaagttctttgagttcgaaaagtgtaagcttgagatggaacagactaaacttgaattggagcgag

SEQ ID NO: 4708 - DNA, 716 bp, Zea Mays
ccgttgagataaaaaatattccgaaccggggcgcatccccttgtgctagctacccccacgacctcgagttctagaagccgtctgctccgccatctgctcgtcctcgatgatgacttcaggctccgcttagactttcaatcttgggcgacagagcacagaggcgccatcgtcagcggcagaagatgccctcttatcgatagtagggaggcaggctcaggttaaccaaaaacttgcgcaagcactcagatattctctgtctttaatgagtgatgcagctaagaaacttcaagatactgcctctttgtgctacacagatgaagatgttgtcgacggtttcaagctgactcaagtggctcgttccttggacgagttagctgaaacgttagaagttactgcaattgactgtcaggtctcgatgatggatccaacaactatattagaagctggctatggtagcgaagatagtgcggtgtgggaggacgtattccgtgaccgagaaataatgaatcagccattggaagcggagacactagctgagcactgtgctaagtgggggctgaattacaatgagatcagggatagatctgtgtaacatcttctagtgtagtgcttttgtaacactagctatgcttttgtaaggtgaacttgatcagtgtaacaccgacagtgcttatgtaacactggctatgctattgtaatgtgtaagaactatgttg

SEQ ID NO: 4709 - DNA, 1174 bp, Zea Mays
tgattgcaaaatcactattagacttcaaaacagggatgtcaagagtatggtatcagcaggattgacagcgctctcatgttcttcgtatgatctaccacaagcagcatctggacagaacaccatgaaaattctgtgcatcggccatggtggcggcagcttaccattgtttttggctagcaagttcagaggtgctaccatccacattgtggaaatcgatccggtggttgtttcagcatcagttgaatccatgggtttccccgcgtcacccgttaaaggcttatcgcccgagtccatgctaccttccgacgccgacgacctattatggggaggcatacacgaccgcgtcttcctgcacacagcagacgccgaggatttcattggcagcgacggcaacgagtatgacatcgtcttcatcgacgcctacgacggagacgacgtgttccctcgcaagctctgggacgtggacggggcgttcatgaagagcctagagaagagagtgcaccccgtccacggcaccgtggtcgtgaacctgcactccgactcagactccgaggccgcggaaggcaacgccgacttccagagcgcgcttcccatgggcaggcacgtctcccaggtctgcagggcttacatgcagcacttcggggtggccttcacggccgcggtcccgtggctctgcaacatcacgctcgtcgcctgccgcgccggcgggatggcgggcggcgcgcgccgggggctgagccgcagggatctcgtccttggcaagcttctgtccaagtccgacacggtggagcgcgcgctgggcctgccgttcccgtgtctgccctacatcaagaacggcttcacgatgccgactgatatcaaagactacgcttgctgcacaaaggaaatggccggaaacatcctgcaggcccgggttggagcggctgttgcggtgcacaaaagactcgactactgtgattccggcaaccgtatgagagaagtcgtggccgccgccgccgcaggctcaggggcgcgcacgtgaggtacattaaactggacgcatggcaggccacgagatgcttgcggttgccgatagaggcctttaccctcaagccgtggttgcattcgaagagtacttatcatcatgggtcatcgatctcgatcgagctccttttcttacaaaatcaacaacgag

SEQ ID NO: 4710 - DNA, 3021 bp, Zea Mays
atatacacagtgtctcggagttgctcttacaacccgtagacagtcgcgcaaatgttgcgagcggccgcgtcgaggtgcgcccgcggcgccgtccggcggctgtcgtcgtctgcggtgatggaggcttcaccagtcgccgtggggtcgcggtggcagtctctccttgacgagggtgactggtcgtaccatcgggagtggtggggcgaggaggacggccccggcgagggcgtgcagaccgtcttccgccgccactccgagtgcggcaacggcgtcgtctccgtctccgcctaccctgcttcccttccggctagtgagcattggccagccatggagagatggcttcaagagagtaattcaagactatacccagaatcagccagctctgaccagtttaaggtactaggctaccagtggcgagtgatgcgttttaatgaccatacacggcaaagcactgcaaaagtgatgacatgttataggacttcgggtcagagatcattattcttgatgcagcaaccacatgttttagctgttccttatgtcaagagtatggtatcagcaggattgacagcgctctcatgttcttcgtatgatctaccacaagcagcatctggacagaacaccatgaaaattctgtgcatcggccatggtggcggcagcttaccattgtttttggctagcaagttcagaggtgctaccatccacattgtggaaatcgatccggtggttgtttcagcatcagttgaatccatgggtttccccgcgtcacccgttaaaggcttatcgcccgagtccatgctaccttccgacgccgacgacctattatggggaggcatacacgaccgcgtcttcctgcacacagcagacgccgaggatttcattggcagcgacggcaacgagtatgacatcgtcttcatcgacgcctacgacggagacgacgtgttccctcgcaagctctgggacgtggacggggcgttcatgaagagcctagagaagagagtgcaccccgtccacggcaccgtggtcgtgaacctgcactccgactcagactccgaggccgcggaaggcaacgccgacttccagagcgcgcttcccatgggcaggcacgtctcccaggtctgcagggcttacatgcagcacttcggggtggccttcacggccgcggtcccgtggctctgcaacatcacgctcgtcgcctgccgcgccggcgggatggcgggcggcgcgcgccgggggctgagccgcagggatctcgtccttggcaagcttctgtccaagtccgacacggtggagcgcgcgctgggcctgccgttcccgtgtctgccctacatcaagaacggcttcacgatggttcactgacatgcatgggccgactgatatcaaagactacgcttgctgcacaaaggaaatggccggaaacatcctgcaggcccgggttggagcggctgttgcggtgcacaaaagactcgactactgtgattccggcaaccgtatgagagaagtcgtggccgccgccgccgcaggctcaggggcgcgcacgtgaggtacattaaactggacgcatggcaggccacgagatgcttgcggttgccgatagaggcctttaccctcaagccgtggttgcattcgaagagtacttatcatcatgggtcatcgatctcgatcgagctccttttcttacaaaatcaacaacgagtcacatgcacccgctcgagaacgcacccgctcgagaacgcgttagtcaaagaacgaatagcgtgcctgccgaccgaccgatacagcgccaagtggctggctggttccatattatcacgatgatatatataaaatggagacacgtgactacgtgaggccaggcctccctcgacgaagaaacatccccgccttttcctctgcctcatgtgagtgagaacagagaagccgagggagatcggaggatgctgctgaggagctcgtccacgccgttcccgctccccttcctctcctcctccctgcacctccgccgcgccttctccgacgcccacctcccctccctccacccgccgtcatccacccccaacgacgccggcaggaccagcaaccccggacgcggcggcctccacacggagctctccttctccgtctacaacaccttcggcaagggcgaggccgtactcgccccgctggcgtcgccaccccgctcccagggacaggaagggggtcggcagcctccgccgactgtggtggtgcagccggagcacccggaggtgccgctgttcctcgccaggggcctcgggatcgaccgcatcgcctccggcttcttcaccgcgggcgccgacttgaaaggctgcggagccagcatggaggagcagcaggacgaggctgtggccgcgctggacgcgcagtacaagaccatggtcgacgagcagcccggcaacgcgctgttcctgcgcaactacgcgcagttcctccacgaggcgaagggcgacaccgcaagggccgaggagtactactcgcgcgccatgctcgcggatcccagcgacggcgagatcatgtcgcagtacgccaggctggtctgggaggtgcaccacgacccggagaggtgcctcggctacttccagcagtcggtgcaggcggccccgttggacagccacgtcctcgctgcgtacgccagcttcttgtgggagcaggacgacgacgactgcggagaccaagggacggcgggtggagcggcggcacaggagcgcgccgcgggaacagggcaagccatggagctggcgtccgcggccgtctgatcctttccactcctgacaggggacagcgcaggcgcgctatagcaaaatgcagtataaaatgcatggcgtatcaacggttataaagtatgaaatataaactgaataataagaataaaagaactcatgcggatatatacaaggtggagtggtgcggtgtaaaagtgtgttttctccctgaagaacaagccaattattctaattatctatgtcaattgtcaaattatatgttctttcggtggctacattagta

SEQ ID NO: 4711 - DNA, 985 bp, Zea Mays
ccattttctagtttattttatgagtctgctttcgtgtggaaagctgcaaaagaggaacttcgcaacgaagaggaagaggagcctgaaagtgctctggaggcattagaaaggaagcggcaaaaggaaatagaggaatggcggaaacaacagatagctagtggagaagctcaggaaaatgccaattttattcctgttcgtggtgattggcgtgaccgtgtcaaacgcaaaagggctcaagcaaaaaatgagtcaaaagatgacattgttgctgcatctttaggtagttccgaacagcataaaggacctcctgatctagcagagctctccaaggatcttcctactggttggcaggcatacttggatgagtatactaagcaagtctattatgggaacaacctcacgtcagagacgtcctgggagcggccaacaaaatgaaaatctacagccttgtgcggtcacgaacagtaggcttaatttaaccatgtagatggtgctgtacaatgggcagatcaattttgttgtagatatctcctggagttttaaaagaacgaacagaagtgccaaggatgtttagagaatgaaaacggaaagtgaagttcttataatgaattaatgatgctcagtttctagttttctatcttcgtgctacgagaagctccaacatgatctattttgatgattggagagcacatagtcactcaaatttctttcatagttttcatttctagggctcttattattcgtttgtaagaaataattggtgatgtagtttgtaaggaataaggtgatgttcttcctcaagctttcatttttagagctcttgataatgataaggaccttgtacgtgttttatttgacctaacaagccattttacataggttggtgtactatcttcatttttttaaagattggtagcgtgattcctcaataaggtaatgtagtttgtacggctatatgcagtagattgtgtaaaatacaataggg

SEQ ID NO: 4712 - DNA, 3705 bp, Zea Mays
gctgtttagatctgataggtcgtggcggagacgaagaagagaaccgaagaaggttccctcacttcccttgcctcgacgcgcccaaccacgccacgaagccacgcgcccgccggcggctcacctttcccgtcccttcaccttccccttccccttctccgttcggtgaaactgcgggagaccctcgcggcttccccacctcgacctccaaactctaaccacagacgcatcgaaaaccctcggtgcccggccgatggggaggaggaaggagcgccgcctggctgccatggccgcggcgggccgcagggtcaagctggacctcttcctcgatctcccccccggggaggcatcacataatgatggaataggaggtgaaaaccgtgaccaacagactgtggttcccacttcatcttcagataaaaaggagaatcctctagcattgcttgggcaatatagtgatgatgaagaggaaaatgaggaaacaacagatcaacccactgatgaagctaagaggagtcctggagatgctagtgctaagttatctagtccgtgtgtggatacagctggtaataatggcgtggcaagaactgaaccatcggtttctgtcggtgatcaacaagaagcacctcaagctggtgatattaagaactatacccaaagtgttacagaaaacactattgctcccgagccaattctacaagacgagaatgtgaaatcaactgaatctgttcctgattcatctggcatgcaaattgttggtgaagtcggtggaaattggagagcaataatgcatgaacagagtaatcaatgttattactggaacactgttactggagaaacgtcttgggacataccaaatggattagcttcaggagctgcgactgcatctgttccttctgatgtgggctattcaatagaagctcaagcccatgttcttcctcacagcacacttgaagcgtacccaagtgacatgtctgtcgggaatggcacatcaacttttgctaattttggaatggcatgtggaagtgcacaggttactcaagatgcttacgcttatgctgctcctatcgccagtcatgagcctatggacattgatcccttgtatcttgcaaaatatggtgatgatttgctgcaaagattgaacctgttggaaaggctctgtggcttgaatgaaggtcttgaattgataaggagagaaatcgggatacggatatcagactgcaatgcactttcatcgtatgggtcttctttgctcccgttgtggatgcatgctgaggtgcaccttaagcaactagactcttccatttctaggatggaaatgagctaccatgcagatacagaacataggaattctaagacagaggttgttgaacacaatgcacctgatggagctgacctgacaacaccctccaatggtgaggctttgaaatctgaggttagtcctgggattactatcgatgaaaatgtggagattgataagccaacttcgatattatctgctcaggattcacaaggtagggatattgcagcagttcctccaaaagttgaatctgacaatgaccaagatatggatgtggaaatggaagttgatgaagataacgtcgaagagcaggcacattgcagttctgtacctaaaaaggagcatcctccatcagaacagttgagttcaactaatttgccatcatttgaagatcctacacctgaggataattctgtccctccgcctccaccagaagaggaatggattccacctccaccacctgaaaatgaaccagctcctccagaccctccaaaagagccagctgcatcatatgttcaggtggatgccattcctcagccatatatcgctcaagaaaatgttgggtatacaatttcaggaatggagtactatggtattgtaggtacagaaggtacaaatgccaattactatatgcaagtgagtgagcctcatgtccttcaagcacaacagcattcttattatgcaccagtatctgggagtggcgtatctgtttctgttgatggcacatctattgccccagaatcttattatacccatccttcagtcactatggctgccagcgcagtagcagctgaacattctgtatactatgcttcatcaatctctgccatttctagcagcgcagcagatatcaaaacaagctcagcttctcttgtttctgcaaatagcaattcagatctcaaaggtcctgataaacttatatccaatgatgcgagtattgtacctttgacccaagctgtagtagcaacatcaggcgcaggaacgccatctgtcctgggaagttctacacagccttctagcagtactaaaaatctgaccaaagttactcgtaacaagaagcgggctgttggtattacctcgtctctgaggtctaataagaaagtttcaagtttggtggataagtggaaagctgcaaaagaggaacttcgcaacgaagaggaagaggagcctgaaagtgctctggaggcattagaaaggaagcggcaaaaggaaatagaggaatggcggaaacaacagatagctagtggagaagctcaggaaaatgccaattttattcctgttcgtggtgattggcgtgaccgtgtcaaacgcaaaagggctcaagcaaaaaatgagtcaaaagatgacattgttgctgcatctttaggtagttccgaacagcataaaggacctcctgatctagcagagctctccaaggatcttcctactggttggcaggcatacttggatgagtatactaagcaagtctattatgggaacaacctcacgtcagagacgtcctgggagcggccaacaaaatgaaaatctacagccttgtgcggtcacgaacagtaggataagggcatgtttgtttggaattctaatgtgttcggattatataatccaatatattttgaactacttaggctctgtttatttcccttctagattatataagctgaattatggtgaaaggttaagagggtaaaataacacattgggatcataaataaactaaaataagctactcaatactagcttatttcagcttatttatggtcctacagtgatattttatcctcctaccctttttattataatccaacttatataatcgagtaaacaaacgtacacttagttcaaaaatattgaattatataatctggccagattataatctcaaacaagcatgtcttaatttaaccatgtagatggtgctgtacaatgggcagatcaattttgttgtagatatctcctggagttttaaaagaacgaacagaagtgccaaggatgtttagagaatgaaaacggaaagtgaagttcttataatgaattaatgatgctcagtttctagttttctatcttcgtgctacgagaagctccaacatgatctattttgatgattggagagcacatagtcactcaaatttctttcatagttttcatttctagggctcttattattcgtttgtaagaaataattggtgatgtagtttgtaaggaataaggtgatgttcttcctcaagctttcatttttagagctcttgataatgataaggaccttgtacgtgttttatttgacctaacaagccattttacataggttggtgtactatcttcatttttttaaagattggtagcgtgattcctcaataaggtaatgtagtttgtacggctatatgcagtagattgtgtaaaatacaataggg

SEQ ID NO: 4713 - DNA, 3939 bp, Zea Mays
ggtggatcgtgtaaaatagggaagcggcactgtcatctgtttggcactgtcatctgttccctagtaccccgcaaataggggaggcatcacataatgatggaataggaggtgaaaaccgtgaccaacagactgtggttcccacttcatcttcaggtgggtttcatcaatttccttccaagggatatgtaaagaagacatacctatggattattgaacataaatatggtggaaatttggatttgtgtacaagcttgtattcctccgcaaatctggttctgagatacatgtagggttgctggcctgcaaggaacattgagtaaattctactgagctgccactgtcaaaactgagtgaatgcctatgggcaatttctcatttggcagcatctaagcatggggatttctggatgtgattgttccctcctcggttcgtatgtctctttctttgtatgtagcttctaacctggtcttatttatggccagttttctgttaactttacgttaataattttaacaatacagtattctatttagtttttacaacaccattgatttcattatgtatgcttgagaaaagagcttcactgtattttgccacaccacaaaaccctttttatttctgaagatttcatgtaattttaatttcagataaaaaggagaatcctctagcattgcttgggcaatatagtgatgatgaagaggaaaatgaggaaacaacagatcaacccactgatgaagctaagaggagtcctggagatgctagtgctaagttatctagtccgtgtgtggatacagctggtaataatggcgtggcaagaactgaaccatcggtttctgtcggtgatcaacaagaagcacctcaagctggtgatattaagaactatacccaaagtgttacagaaaacactattgctcccgagccaattctacaagacgagaatgtgaaatcaactgaatctgttcctgattcatctggcatgcaaattgttggtgaagtcggtggaaattggagagcaataatgcatgaacagagtaatcaatgttattactggaacactgttactggagaaacgtcttgggacataccaaatggattagcttcaggagctgcgactgcatctgttccttctgatgtgggctattcaatagaagctcaagcccatgttcttcctcacagcacacttgaagcgtacccaagtgacatgtctgtcgggaatggcacatcaacttttgctaattttggaatggcatgtggaagtgcacaggttactcaagatgcttacgcttatgctgctcctatcgccagtcatgagcctatggacattgatcccttgtatcttgcaaaatatggtgatgatttgctgcaaagattgaacctgttggaaaggctctgtggcttgaatgaaggtcttgaattgataaggagagaaatcgggatacggatatcagactgcaatgcactttcatcgtatgggtcttctttgctcccgttgtggatgcatgctgaggtgcaccttaagcaactagactcttccatttctaggatggaaatgagctaccatgcagatacagaacataggaattctaagacagaggttgttgaacacaatgcacctgatggagctgacctgacaacaccctccaatggtgaggctttgaaatctgaggttagtcctgggattactatcgatgaaaatgtggagattgataagccaacttcgatattatctgctcaggattcacaaggtagggatattgcagcagttcctccaaaagttgaatctgacaatgaccaagatatggatgtggaaatggaagttgatgaagataacgtcgaagagcaggcacattgcagttctgtacctaaaaaggagcatcctccatcagaacagttgagttcaactaatttgccatcatttgaagatcctacacctgaggataattctgtccctccgcctccaccagaagaggaatggattccacctccaccacctgaaaatgaaccagctcctccagaccctccaaaagagccagctgcatcatatgttcaggtggatgccattcctcagccatatatcgctcaagaaaatgttgggtatacaatttcaggaatggagtactatggtattgtaggtacagaaggtacaaatgccaattactatatgcaagtgagtgagcctcatgtccttcaagcacaacagcattcttattatgcaccagtatctgggagtggcgtatctgtttctgttgatggcacatctattgccccagaatcttattatacccatccttcagtcactatggctgccagcgcagtagcagctgaacattctgtatactatgcttcatcaatctctgccatttctagcagcgcagcagatatcaaaacaagctcagcttctcttgtttctgcaaatagcaattcagatctcaaaggtcctgataaacttatatccaatgatgcgagtattgtacctttgacccaagctgtagtagcaacatcaggcgcaggaacgccatctgtcctgggaagttctacacagccttctagcagtactaaaaatctgaccaaagttactcgtaacaagaagcgggctgttggtattacctcgtctctgaggtctaataagaaagtttcaagtttggtggataagtggaaagctgcaaaagaggaacttcgcaacgaagaggaagaggagcctgaaagtgctctggaggcattagaaaggaagcggcaaaaggaaatagaggaatggcggaaacaacagatagctagtggagaagctcaggaaaatgccaattttattcctgttcgtggtgattggcgtgaccgtgtcaaacgcaaaagggctcaagcaaaaaatgagtcaaaagatgacattgttgctgcatctttaggtagttccgaacagcataaaggacctcctgatctagcagagctctccaaggatcttcctactggttggcaggcatacttggatgagtatactaagcaagtctattatgggaacaacctcacgtcagagacgtcctgggagcggccaacaaaatgaaaatctacagccttgtgcggtcacgaacagtaggataagggcatgtttgtttggaattctaatgtgttcggattatataatccaatatattttgaactacttaggctctgtttatttcccttctagattatataagctgaattatggtgaaaggttaagagggtaaaataacacattgggatcataaataaactaaaataagctactcaatactagcttatttcagcttatttatggtcctacagtgatattttatcctcctaccctttttattataatccaacttatataatcgagtaaacaaacgtacacttagttcaaaaatattgaattatataatctggccagattataatctcaaacaagcatgtcttaatttaaccatgtagatggtgctgtacaatgggcagatcaattttgttgtagatatctcctggagttttaaaagaacgaacagaagtgccaaggatgtttagagaatgaaaacggaaagtgaagttcttataatgaattaatgatgctcagtttctagttttctatcttcgtgctacgagaagctccaacatgatctattttgatgattggagagcacatagtcactcaaatttctttcatagttttcatttctagggctcttattattcgtttgtaagaaataattggtgatgtagtttgtaaggaataaggtgatgttcttcctcaagctttcatttttagagctcttgataatgataaggaccttgtacgtgttttatttgacctaacaagccattttacataggttggtgtactatcttcatttttttaaagattggtagcgtgattcctcaataaggtaatgtagtttgtacggctatatgcagtagattgtgtaaaatacaataggg

SEQ ID NO: 4714 - DNA, 1583 bp, Zea Mays
aaatatttctttgatcttcttcatgtgtatccagaaaagaaaaagatagtaaagcatatgcttatatatatagtagatgcttatgcatgcatgtcggagtacatatgtactacttacttatagcagtagcaagctacaaatgcatatggtagctaggtgttggatgcatggattgctgctgttccggcgatcttccggccagagcatgagatagatcgatcgatcgagagtactaccggccggccagagcatctgctactgttccggcgatcttccatcagcggatcagcggagcccctgctgagctgtgagctgtatgcatggcatggccacccctgtggcgcctcttctccatgatgagcctcaagctgctggtatcttactcccagggacaacccagcattcagatcaaacaaactctgactctagagttggagagcttatactgcctaatggggatacttatcgtggcgcgttatcgggcaacacgccacatggcccaggttgttatatctggtccgatggttgtgtttatgagggtgattggaggagaggcctcaggcatggccgaggcaagacgctgtggccaacaggggccacctacacaggtgactactccggtggctacatttatggtcagggaacgtataccgccgggcttaacagttacaggggaggctggaagctgaatcttaagcatggccaccttggcctacagacatatcccaacggagacacttttcaaggttcttgggtgcatgggcaaatgcaggggcatggcacctatacctgggcaaatgggaacacttatgttggcgccatgaaagatggggtcatgtcaggcaaaggaattctcacatggaacaatggagattcatttgaagggaactggttagatggtgccatgcatggctatggaatctacacatggaaggactctggctactatgtaggaacctggacaaggggggtcaaggacggaaaaggcacgttctatccaaaatgccgtgggattccggttaccgacatcgacgatttaagaaacagaggtgtactgcctggtgctgaaagccagactcatggttcccgtatccttcactctgcctcatcggacatggcagacatggtggctagcagaaatcaggactctgtaggtatttcatctgttagaagcttgaattttgagaaaactcgctccactaatgtgctactggaaagaaggtggagccttggagtggctattgaaaaattcctcggtcgcgaaaccaatgaaagttctgcaattgaaagatgtgaaaacaaggctgattccaaccttcctatactggaacgggaatatatgcaaggtgttctcatcagcgaggtcgtggtggatgcaagcttctcgaatccattaaaaagggtatcacgccgccagaagaaaatagtgaaggacataaagaaacctgggcagacaataattaaaggacataggagttatgatctgatgctcagtctgcagcttggaatcagtgtcaacaaaatgcgaaggagaactaggtggcggctttctgtcatctaaaagtaattgtagagcataactg

SEQ ID NO: 4715 - DNA, 1715 bp, Zea Mays
caaacctcaaccgacactccccgtggggggcggtgccgtcgccggcgactcgccaattttgatttgaagaaaagaaaccaccagccaccacgcccgcggccgtcagccggaggtgaaggtatacagttggaaagattacacctattcagagacgtgaagtgcgagcttctgattatggttccagagcaagtttctggatgaacttccccaaaaatggttcacgacttactccttcacatcatgctgataattttaaatggaaagactactgcccaatggtgttcagaaatttgagggagatgttcaagattgatgcagcggattatatggtttccatttgtggaagtgacgcacttagggagctatcttctcctggaaagagtggaagtgtcttctttctatctcaggatgatcgatttatgatcaagactctacggaagtctgaagtgcaggttcttctacgaatgcttccagagtattatcaccatgtccgtacctatgagaacacactcataactaagttttttggcctccacagggttaaaccgtccagcagtcaaaagttccggtttgtagtgatgggaaacatgttttgcactgaacttagaattcaccggaggtttgacttgaaaggttcatccttaggccgctcaacagacaaagtaaaaatcgacgagaacacaacactgaaagacttggatctaaactattcattttatctcgagccttcttggcggcagactttgcttgcgcaaattgagaccgatagcaaatttctaaagcagcacgcaataatggattatagtttgcttcttggcgttcatttccgggctcctcaaagcctacggacacaggcatcctttcatcaagcaatcctaccagataggctggctgttctttcagaagaaggtgctctggaggaggatgttttgaacagtcctgaaggactggttttggttcagcgagctagtgatcaaaatgatgttgtcattggttcccatataaggggggcccgtcttcgatcatcaagtgcaagttttgaggaagtagatctcttgcttccaggcaccgcaaggctccagatccaacttggggttaacatgccggccagggcaaaacagacggttgaggatgatgacagtgaagataatggtcaggtgtatgatgtggtgctgtacctgggaataattgatatcttgcaggagtacagcataaggaagaagattgagcatgcttacaagtgcatccaatataactcattgtcaatatctgtcgtggaacccagtctctactcggagcgcttcctgaaattcattcaaactatctttcctgaaaattcataaaataaaatccagtaattcttcacctacaggagcaaagtgaaagaaacattgttcagtgtgcattgtggccctttgcaagtatgcttttgctacgtccttgattgattctctttctttacacatgttgatcatggttcaaattttacataatagaaggtgataacatactctgtccgtccatacttttggaagcagcagcagcacctgctgtcatccacgagctaagcatatagaagcagcagcacctgccagagacttatccatccatgtccctatattcaaacttcaatacagtttatagtgcaaaatagtgtttcgaataatggatacggtcattttaagatttgcttggatattcacctcaatccacat

SEQ ID NO: 4716 - DNA, 3071 bp, Zea Mays
caaacctcaaccgacactccccgtggggggcggtgccgtcgccggcgactcgccaattttgatttgaagaaaagaaaccaccagccaccacgcccgcggccgtcagccggaggtgaagcacgcaattcattacaaaagggtcccctgccaagatccaacactcatgaattgcaacaatacggatcggagacagcgagcagatctcgcggacttgcaattcccctgctgagctgtgagctgtatgcatggcatggccacccctgtggcgcctcttctccatgatgagcctcaagctgctggttgttatatctggtccgatggttgtgtttatgagggtgattggaggagaggcctcaggcatggccgaggcaagacgctgtggccaacaggggccacctacacaggtgactactccggtggctacatttatggtcagggaacgtataccgccgggcttaacagttacaggggaggctggaagctgaatcttaagcatggccaccttggcctacagacatatcccaacggagacacttttcaaggttcttgggtgcatgggcaaatgcaggggcatggcacctatacctgggcaaatgggaacacttatgttggcgccatgaaagatggggtcatgtcaggcaaaggaattctcacatggaacaatggagattcatttgaagggaactggttagatggtgccatgcatggctatggaatctacacatggaaggactctggctactatgtaggaacctggacaaggggggtcaaggacggaaaaggcacgttctatccaaaatgccgtgggattccggttaccgacatcgacgatttaagaaacagaggtgtactgcctggtgctgaaagccagactcatggttcccgtatccttcactctgcctcatcggacatggcagacatggtggctagcagaaatcaggactctgtaggtatttcatctgttagaagcttgaattttgagaaaactcgctccactaatgtgctactggaaagaaggtggagccttggagtggctattgaaaaattcctcggtcgcgaaaccaatgaaagttctgcaattgaaagatgtgaaaacaaggctgattccaaccttcctatactggaacgggaatatatgcaaggtgttctcatcagcgaggtcgtggtggatgcaagcttctcgaatccattaaaaagggtatcacgccgccagaagaaaatagtgaaggacataaagaaacctgggcagacaataattaaaggacataggagttatgatctgatgctcagtctgcagcttggaatcaggtatacagttggaaagattacacctattcagagacgtgaagtgcgagcttctgattatggttccagagcaagtttctggatgaacttccccaaaaatggttcacgacttactccttcacatcatgctgataattttaaatggaaagactactgcccaatggtgttcagaaatttgagggagatgttcaagattgatgcagcggattatatggtttccatttgtggaagtgacgcacttagggagctatcttctcctggaaagagtggaagtgtcttctttctatctcaggatgatcgatttatgatcaagactctacggaagtctgaagtgcaggttcttctacgaatgcttccagagtattatcaccatgtccgtacctatgagaacacactcataactaagttttttggcctccacagggttaaaccgtccagcagtcaaaagttccggtttgtagtgatgggaaacatgttttgcactgaacttagaattcaccggaggtttgacttgaaaggttcatccttaggccgctcaacagacaaagtaaaaatcgacgagaacacaacactgaaagacttggatctaaactattcattttatctcgagccttcttggcggcagactttgcttgcgcaaattgagaccgatagcaaatttctaaagcagcacgcaataatggattatagtttgcttcttggcgttcatttccgggctcctcaaagcctacggacacaggcatcctttcatcaagcaatcctaccagataggctggctgttctttcagaagaaggtgctctggaggaggatgttttgaacagtcctgaaggactggttttggttcagcgagctagtgatcaaaatgatgttgtcattggttcccatataaggggggcccgtcttcgatcatcaagtgcaagttttgaggaagtagatctcttgcttccaggcaccgcaaggctccagatccaacttggggttaacatgccggccagggcaaaacagacggttgaggatgatgacagtgaagataatggtcaggtgtatgatgtggtgctgtacctgggaataattgatatcttgcaggagtacagcataaggaagaagattgagcatgcttacaagtgcatccaatataactcattgtcaatatctgtcgtggaacccagtctctactcggagcgcttcctgaaattcattcaaactatctttcctgaaaattcataaaataaaatccagtaattcttcacctacaggagcaaagtgaaagaaacattgttcagtgtgcattgtggccctttgcaagtatgcttttgctacgtccttgattgattctctttctttacacatgttgatcatggtaaggatttccggattacgtatcccagtggtgctatccactagtagtggataactgtaccttgccctattaatctgagttgatgacgattctaccgtctacttcaaattcacactgtctaaacaatgttttgcacattcacttattcataccagtaaattcagccttagggctggtttggttttgtgacaaagggagattgaaggagaaataaactaatttctccctcagtgtcatccaatccacctgtgatttctagtcaccaaaccagaccttagtgtaccttgaattccacgtccattgtagtattgtatgtgtaaaaatgtccattgtagtattgtatgtgtaaaaatgttttgcacaaaatgtattctctgtgggtaaatttagcttttagatttttgg

SEQ ID NO: 4717 - DNA, 3099 bp, Zea Mays
caaacctcaaccgacactccccgtggggggcggtgccgtcgccggcgactcgccaattttgatttgaagaaaagaaaccaccagccaccacgcccgcggccgtcagccggaggtgaagcccctgctgagctgtgagctgtatgcatggcatggccacccctgtggcgcctcttctccatgatgagcctcaagctgctggtatcttactcccagggacaacccagcattcagatcaaacaaactctgactctagagttggagagcttatactgcctaatggggatacttatcgtggcgcgttatcgggcaacacgccacatggcccaggttgttatatctggtccgatggttgtgtttatgagggtgattggaggagaggcctcaggcatggccgaggcaagacgctgtggccaacaggggccacctacacaggtgactactccggtggctacatttatggtcagggaacgtataccgccgggcttaacagttacaggggaggctggaagctgaatcttaagcatggccaccttggcctacagacatatcccaacggagacacttttcaaggttcttgggtgcatgggcaaatgcaggggcatggcacctatacctgggcaaatgggaacacttatgttggcgccatgaaagatggggtcatgtcaggcaaaggaattctcacatggaacaatggagattcatttgaagggaactggttagatggtgccatgcatggctatggaatctacacatggaaggactctggctactatgtaggaacctggacaaggggggtcaaggacggaaaaggcacgttctatccaaaatgccgtgggattccggttaccgacatcgacgatttaagaaacagaggtgtactgcctggtgctgaaagccagactcatggttcccgtatccttcactctgcctcatcggacatggcagacatggtggctagcagaaatcaggactctgtaggtatttcatctgttagaagcttgaattttgagaaaactcgctccactaatgtgctactggaaagaaggtggagccttggagtggctattgaaaaattcctcggtcgcgaaaccaatgaaagttctgcaattgaaagatgtgaaaacaaggctgattccaaccttcctatactggaacgggaatatatgcaaggtgttctcatcagcgaggtcgtggtggatgcaagcttctcgaatccattaaaaagggtatcacgccgccagaagaaaatagtgaaggacataaagaaacctgggcagacaataattaaaggacataggagttatgatctgatgctcagtctgcagcttggaatcaggtatacagttggaaagattacacctattcagagacgtgaagtgcgagcttctgattatggttccagagcaagtttctggatgaacttccccaaaaatggttcacgacttactccttcacatcatgctgataattttaaatggaaagactactgcccaatggtgttcagaaatttgagggagatgttcaagattgatgcagcggattatatggtttccatttgtggaagtgacgcacttagggagctatcttctcctggaaagagtggaagtgtcttctttctatctcaggatgatcgatttatgatcaagactctacggaagtctgaagtgcaggttcttctacgaatgcttccagagtattatcaccatgtccgtacctatgagaacacactcataactaagttttttggcctccacagggttaaaccgtccagcagtcaaaagttccggtttgtagtgatgggaaacatgttttgcactgaacttagaattcaccggaggtttgacttgaaaggttcatccttaggccgctcaacagacaaagtaaaaatcgacgagaacacaacactgaaagacttggatctaaactattcattttatctcgagccttcttggcggcagactttgcttgcgcaaattgagaccgatagcaaatttctaaagcagcacgcaataatggattatagtttgcttcttggcgttcatttccgggctcctcaaagcctacggacacaggcatcctttcatcaagcaatcctaccagataggctggctgttctttcagaagaaggtgctctggaggaggatgttttgaacagtcctgaaggactggttttggttcagcgagctagtgatcaaaatgatgttgtcattggttcccatataaggggggcccgtcttcgatcatcaagtgcaagttttgaggaagtagatctcttgcttccaggcaccgcaaggctccagatccaacttggggttaacatgccggccagggcaaaacagacggttgaggatgatgacagtgaagataatggtcaggtgtatgatgtggtgctgtacctgggaataattgatatcttgcaggagtacagcataaggaagaagattgagcatgcttacaagtgcatccaatataactcattgtcaatatctgtcgtggaacccagtctctactcggagcgcttcctgaaattcattcaaactatctttcctgaaaattcataaaataaaatccagtaattcttcacctacaggagcaaagtgaaagaaacattgttcagtgtgcattgtggccctttgcaagtatgcttttgctacgtccttgattgattctctttctttacacatgttgatcatggtaaggatttccggattacgtatcccagtggtgctatccactagtagtggataactgtaccttgccctattaatctgagttgatgacgattctaccgtctacttcaaattcacactgtctaaacaatgttttgcacattcacttattcataccagtaaattcagccttagggctggtttggttttgtgacaaagggagattgaaggagaaataaactaatttctccctcagtgtcatccaatccacctgtgatttctagtcaccaaaccagaccttagtgtaccttgaattccacgtccattgtagtattgtatgtgtaaaaatgtccattgtagtattgtatgtgtaaaaatgttttgcacaaaatgtattctctgtgggtaaatttagcttttagatttttgg

SEQ ID NO: 4718 - DNA, 3203 bp, Zea Mays
caaacctcaaccgacactccccgtggggggcggtgccgtcgccggcgactcgccaattttgatttgaagaaaagaaaccaccagccaccacgcccgcggccgtcagccggaggtgaagggtcccctgccaagatccaacactcatgaattgcaacaatacggatcggagacagcgagcagatctcgcggacttgcaattcctgttttatcttcttgccgcagcccctgctgagctgtgagctgtatgcatggcatggccacccctgtggcgcctcttctccatgatgagcctcaagctgctggtatcttactcccagggacaacccagcattcagatcaaacaaactctgactctagagttggagagcttatactgcctaatggggatacttatcgtggcgcgttatcgggcaacacgccacatggcccaggttgttatatctggtccgatggttgtgtttatgagggtgattggaggagaggcctcaggcatggccgaggcaagacgctgtggccaacaggggccacctacacaggtgactactccggtggctacatttatggtcagggaacgtataccgccgggcttaacagttacaggggaggctggaagctgaatcttaagcatggccaccttggcctacagacatatcccaacggagacacttttcaaggttcttgggtgcatgggcaaatgcaggggcatggcacctatacctgggcaaatgggaacacttatgttggcgccatgaaagatggggtcatgtcaggcaaaggaattctcacatggaacaatggagattcatttgaagggaactggttagatggtgccatgcatggctatggaatctacacatggaaggactctggctactatgtaggaacctggacaaggggggtcaaggacggaaaaggcacgttctatccaaaatgccgtgggattccggttaccgacatcgacgatttaagaaacagaggtgtactgcctggtgctgaaagccagactcatggttcccgtatccttcactctgcctcatcggacatggcagacatggtggctagcagaaatcaggactctgtaggtatttcatctgttagaagcttgaattttgagaaaactcgctccactaatgtgctactggaaagaaggtggagccttggagtggctattgaaaaattcctcggtcgcgaaaccaatgaaagttctgcaattgaaagatgtgaaaacaaggctgattccaaccttcctatactggaacgggaatatatgcaaggtgttctcatcagcgaggtcgtggtggatgcaagcttctcgaatccattaaaaagggtatcacgccgccagaagaaaatagtgaaggacataaagaaacctgggcagacaataattaaaggacataggagttatgatctgatgctcagtctgcagcttggaatcaggtatacagttggaaagattacacctattcagagacgtgaagtgcgagcttctgattatggttccagagcaagtttctggatgaacttccccaaaaatggttcacgacttactccttcacatcatgctgataattttaaatggaaagactactgcccaatggtgttcagaaatttgagggagatgttcaagattgatgcagcggattatatggtttccatttgtggaagtgacgcacttagggagctatcttctcctggaaagagtggaagtgtcttctttctatctcaggatgatcgatttatgatcaagactctacggaagtctgaagtgcaggttcttctacgaatgcttccagagtattatcaccatgtccgtacctatgagaacacactcataactaagttttttggcctccacagggttaaaccgtccagcagtcaaaagttccggtttgtagtgatgggaaacatgttttgcactgaacttagaattcaccggaggtttgacttgaaaggttcatccttaggccgctcaacagacaaagtaaaaatcgacgagaacacaacactgaaagacttggatctaaactattcattttatctcgagccttcttggcggcagactttgcttgcgcaaattgagaccgatagcaaatttctaaagcagcacgcaataatggattatagtttgcttcttggcgttcatttccgggctcctcaaagcctacggacacaggcatcctttcatcaagcaatcctaccagataggctggctgttctttcagaagaaggtgctctggaggaggatgttttgaacagtcctgaaggactggttttggttcagcgagctagtgatcaaaatgatgttgtcattggttcccatataaggggggcccgtcttcgatcatcaagtgcaagttttgaggaagtagatctcttgcttccaggcaccgcaaggctccagatccaacttggggttaacatgccggccagggcaaaacagacggttgaggatgatgacagtgaagataatggtcaggtgtatgatgtggtgctgtacctgggaataattgatatcttgcaggagtacagcataaggaagaagattgagcatgcttacaagtgcatccaatataactcattgtcaatatctgtcgtggaacccagtctctactcggagcgcttcctgaaattcattcaaactatctttcctgaaaattcataaaataaaatccagtaattcttcacctacaggagcaaagtgaaagaaacattgttcagtgtgcattgtggccctttgcaagtatgcttttgctacgtccttgattgattctctttctttacacatgttgatcatggtaaggatttccggattacgtatcccagtggtgctatccactagtagtggataactgtaccttgccctattaatctgagttgatgacgattctaccgtctacttcaaattcacactgtctaaacaatgttttgcacattcacttattcataccagtaaattcagccttagggctggtttggttttgtgacaaagggagattgaaggagaaataaactaatttctccctcagtgtcatccaatccacctgtgatttctagtcaccaaaccagaccttagtgtaccttgaattccacgtccattgtagtattgtatgtgtaaaaatgtccattgtagtattgtatgtgtaaaaatgttttgcacaaaatgtattctctgtgggtaaatttagcttttagatttttgg

SEQ ID NO: 4719 - DNA, 3223 bp, Zea Mays
caaacctcaaccgacactccccgtggggggcggtgccgtcgccggcgactcgccaattttgatttgaagaaaagaaaccaccagccaccacgcccgcggccgtcagccggaggtgaagcacgcaattcattacaaaagggtcccctgccaagatccaacactcatgaattgcaacaatacggatcggagacagcgagcagatctcgcggacttgcaattcctgttttatcttcttgccgcagcccctgctgagctgtgagctgtatgcatggcatggccacccctgtggcgcctcttctccatgatgagcctcaagctgctggtatcttactcccagggacaacccagcattcagatcaaacaaactctgactctagagttggagagcttatactgcctaatggggatacttatcgtggcgcgttatcgggcaacacgccacatggcccaggttgttatatctggtccgatggttgtgtttatgagggtgattggaggagaggcctcaggcatggccgaggcaagacgctgtggccaacaggggccacctacacaggtgactactccggtggctacatttatggtcagggaacgtataccgccgggcttaacagttacaggggaggctggaagctgaatcttaagcatggccaccttggcctacagacatatcccaacggagacacttttcaaggttcttgggtgcatgggcaaatgcaggggcatggcacctatacctgggcaaatgggaacacttatgttggcgccatgaaagatggggtcatgtcaggcaaaggaattctcacatggaacaatggagattcatttgaagggaactggttagatggtgccatgcatggctatggaatctacacatggaaggactctggctactatgtaggaacctggacaaggggggtcaaggacggaaaaggcacgttctatccaaaatgccgtgggattccggttaccgacatcgacgatttaagaaacagaggtgtactgcctggtgctgaaagccagactcatggttcccgtatccttcactctgcctcatcggacatggcagacatggtggctagcagaaatcaggactctgtaggtatttcatctgttagaagcttgaattttgagaaaactcgctccactaatgtgctactggaaagaaggtggagccttggagtggctattgaaaaattcctcggtcgcgaaaccaatgaaagttctgcaattgaaagatgtgaaaacaaggctgattccaaccttcctatactggaacgggaatatatgcaaggtgttctcatcagcgaggtcgtggtggatgcaagcttctcgaatccattaaaaagggtatcacgccgccagaagaaaatagtgaaggacataaagaaacctgggcagacaataattaaaggacataggagttatgatctgatgctcagtctgcagcttggaatcaggtatacagttggaaagattacacctattcagagacgtgaagtgcgagcttctgattatggttccagagcaagtttctggatgaacttccccaaaaatggttcacgacttactccttcacatcatgctgataattttaaatggaaagactactgcccaatggtgttcagaaatttgagggagatgttcaagattgatgcagcggattatatggtttccatttgtggaagtgacgcacttagggagctatcttctcctggaaagagtggaagtgtcttctttctatctcaggatgatcgatttatgatcaagactctacggaagtctgaagtgcaggttcttctacgaatgcttccagagtattatcaccatgtccgtacctatgagaacacactcataactaagttttttggcctccacagggttaaaccgtccagcagtcaaaagttccggtttgtagtgatgggaaacatgttttgcactgaacttagaattcaccggaggtttgacttgaaaggttcatccttaggccgctcaacagacaaagtaaaaatcgacgagaacacaacactgaaagacttggatctaaactattcattttatctcgagccttcttggcggcagactttgcttgcgcaaattgagaccgatagcaaatttctaaagcagcacgcaataatggattatagtttgcttcttggcgttcatttccgggctcctcaaagcctacggacacaggcatcctttcatcaagcaatcctaccagataggctggctgttctttcagaagaaggtgctctggaggaggatgttttgaacagtcctgaaggactggttttggttcagcgagctagtgatcaaaatgatgttgtcattggttcccatataaggggggcccgtcttcgatcatcaagtgcaagttttgaggaagtagatctcttgcttccaggcaccgcaaggctccagatccaacttggggttaacatgccggccagggcaaaacagacggttgaggatgatgacagtgaagataatggtcaggtgtatgatgtggtgctgtacctgggaataattgatatcttgcaggagtacagcataaggaagaagattgagcatgcttacaagtgcatccaatataactcattgtcaatatctgtcgtggaacccagtctctactcggagcgcttcctgaaattcattcaaactatctttcctgaaaattcataaaataaaatccagtaattcttcacctacaggagcaaagtgaaagaaacattgttcagtgtgcattgtggccctttgcaagtatgcttttgctacgtccttgattgattctctttctttacacatgttgatcatggtaaggatttccggattacgtatcccagtggtgctatccactagtagtggataactgtaccttgccctattaatctgagttgatgacgattctaccgtctacttcaaattcacactgtctaaacaatgttttgcacattcacttattcataccagtaaattcagccttagggctggtttggttttgtgacaaagggagattgaaggagaaataaactaatttctccctcagtgtcatccaatccacctgtgatttctagtcaccaaaccagaccttagtgtaccttgaattccacgtccattgtagtattgtatgtgtaaaaatgtccattgtagtattgtatgtgtaaaaatgttttgcacaaaatgtattctctgtgggtaaatttagcttttagatttttgg

SEQ ID NO: 4720 - DNA, 2043 bp, Zea Mays
tgctgcggtgctgcctagtcttgccttctaccaagggtgtgccacacatcaaacaccattgatagatagatactgatgactgcttccttggaacaatctcctatttaaaagctgtgtgcataccaggcactcaggcagcacaaaggtcgacgagttaggaaggatggcctttctggtgccgtttctgctgggtctttcctctgtcctcgccgcgtggatctactctgaattcctgggatacagggcatcatcgtctcatgaaaaagtccactcggatgttcacgtcggcgataaaaccatcaaagaaaatgacagggcggtcctacttgaagaaggtgaatctaaaccgccatcgacaaaggcacccaacatgtctgccagagccaaattaatacggtttattacgttggacgagtcctttcttgttggaaaccgcgccacactgagagccatagctgaattcggcattattcttgtttacttttacacctgtgatcggaccaacatatttgcagagagcaagaagaactacaaccgcgacatgtttctgtttctttacattcttcttgtcgtcgcatcaacgattacctcactcaagaagcaccctgaaaattcagtagtttcaggaaagaccgttttctatcttaatcgcaaccaaactgatgaatggagagggtggatgcaggtcttgtttctgatgtaccactatttcgctgcctcggaaatatacaatgcaatccgtgtgttcattgcttgctatgtctggatgactggatttgggaatttctcatactactacaagaagaaagatttcagtatcgcaagatttgctcagatgatgtggagggtaaatttctttgccatgtcctgttgcatggtccttgacaatgactacatgttgtactatatcgctccgatgcataccctgttcactcttatggtgtatggatcactgtttgttctcaacaagtacaatgagatcccatcagtcatggccattaagatcgcaggctgcctcttgactgtcattctgatatgggaaattcctggtgtgtttgaaattttctgggcaccatttacgtttctgctaggttacaaaaacccagagccttctaagatgaacttacccctgttacacgaatggcgcttccgctctggccttgatcgttacatatggatcattggaatgatttatgcttactttcaccccaacgttgaaagatggatggaaaagctggaagaatctgagactaaggtgagagtgttaatcaagggaaccattgttacagcttccttaatggccggctatctgtggtacgaatatatctacaagctggacaaacatacatataacaagtaccatccctacacgtcgtggattccaataactatctatgtctgcctacgcaattgcacccaacagttgaggagtacccatttgtctctttttgttattccgaacggacagccaaagttgcttctatctttcttaccagattatccgatgcttaactttttgcttactacgacgatatttctgtcggtatcattccgggtgtttaagctcacaaacgtactgaaagaggcatttatccccaccagggacaacaagtgtctatatcaaaattttattgctggagttgcagtctttgcatgcctatattgcagctcattattcttcaaaacctaccaacagtatagctgatacatagactctaaatcttagctatctcatgtagctcaactcagaaagcacattgtttttcctgggatggagaaattccaagtaattaagtgaacttgttaatttgtttcttttgtatgtatttccaagtaattgcgtgtttttagagacatccatagtcgtgtccttagttttggtggttttaactgcctatgtaaacaaaacaacaagtcttgtaaaatcagttctatagtagtgttctactttagttaagctttactcttacgagttcactatatttccgcttacataatatttcagttgtgtagtgctcatatgaaaatgaatctgaacgagat

SEQ ID NO: 4721 - DNA, 2608 bp, Zea Mays
ggaaacggactaccagcgctgagccgttccgtttcttttcaatcttggcgttttgtctccattcaatagggaaagggatgtttcgcttgaggctttcctttgtgcctgtgtcttctctgtagctttcaagagaataaaaatttggagcttctctcgcaccagcgtcctttccttcttccttggtttcatgctgacaactagggctgatcttcaggacggcctgttcttggttcggttcctgagagcgattgatagcgccagacggagtttcttctttaggagtcgtgcactatgggtaattgctggtttaaggggaatccatactttaacagggtttcttccaatgcaaccaaagcaggtacgactatttattactttggtttgatctctgtgatgatgtaactgcaactgtagtatgcagaagtttcatatatttgtttgatgccctcaatttagacattaacgaaactgctgctatgtgtgtgttctctcgtcttgatagaatcagggaccatgtccctgctcttgtttagtccaattacggctatttcagtactgaatattttcttcacaaaaaatcagtcctaatgttcaatcttatccaacccaatgattcttttttccctaaccttgacagttgattttatgattattccatgtaatgatcagatacttttgttctgccgtatgaaattcttgttcatcttttggtaacttatttacaaagtttctgaataatctgcaccctgtatttcagtccccgtacttgacttgtctatttgttttctgcagaatctcccaaaattcagagcccctcggagagaactgaaaaggaggattgccagctaccatccaacccgaaagaggtggaggcgctgagaaaggatacagctcgcaatcctttgatagcgttcacatttgaggagctcaagagaatgacaaaaaatttcaggcaagattcgttactaggcggtggtggatttggcagagtctacaaaggttttatcaccaaggatctccgcgaagggttagagatagaagagcccacaagagttgccgttaaggtccatgatggtgacaatagcttccagggccatagggagtggctggctgaggttatatttcttggacagctctctcacccgaatttagtgaagttgatcggctattgttgtgaagatgaccacagggtccttgtttacgagttcatgcctctaggaagtgtggagtctcatttgttttcaagtaattcttatcctattcttgacagattgttgattggttttatatagtttcttgtcattttgtcataacactgactatggtatatccacacatggcattcatgcaaattctcatactcataactgaaaagaatcgattgaaaacgagcataaacctgtccctcactcctatcctgaaccagtataatttaacttgcttcgagtggcagcattataaatttctgcatgacctatgtggtcagttctgcattattatttgtccatttgagatccaccagtgtatattatcagatcagtggagtatttgttttcataatgcaggggttatggtgccacttacgtggtcgatcagaatgaaaattgcgctcggtgctgcgaaaggacttgcttttctgcatgaagctgagaagcccgtcatctatcgggacttcaagacatcaaatatattactagatgaggaatataatgcaaaactatctgactttgggcttgcaaaagatggaccagttggcgataagtcccatgtttcaactcgtattatgggtacctacggttatgctgcaccagagtacattatgacagctatggtgttgtactactggagctcctcacgggccggaagtcactggacaagtcccggccagtcagggagcagatgctggcagactgggcactcccattgttggcacagaagaagaaggtgcttggcatagtagacccaaggcttgccgaggactacccagtgaaggcagtgcagaagacggcgatgctggcgtaccattgcctcagccgcaacccaaaggctaggccgctgatgcgcgacatcgtcgcgactttggagcctcttcaacagctggaggagacccctggagacagcgtggcagtgacacttgaagggacttgaagcagtgttccattcacagctcacatcacagtcacacacagctctggaaaactcgggtgccacgtacttaactatgcatgataatagtagctagctagtgttcttgatatgcaggatgatttcttgattgtttaattaatccatggagacagtagctttgttcagcagaaagttagtgtgtatctcagtaggacggttcatgtgtgtgtatccaggtgttcagtcctggcgtagcgaactccctggcatttcggatgcgggcaagtctgtgcaatctgtatttgcaatgcttgttgcccgcagaggaagcttgcttaccagtgtttgtaacctagtattgtgcagttcatgatctatgcatgttgaataatgtgtgtgtatatatatatataacaggtataacgggagcactgagcttccaatagttaaagaaagcctaagccgaccaaccctgcaacct

SEQ ID NO: 4722 - DNA, 615 bp, Zea Mays
ggatcacgatctagcctacactacagcctacaatggtcgttgccttccatccgaccttaccggcctacccttcctcttccaatttgctactgatctcccctgttatcgtcggatttctcgtgacggtgagtccgtgacacgccggcgccatggcgagcaggtgcctagcggctgcatcggaggccgccgtcgtcttcctcatccggcccatcctcgccatcgttttcgtcttcaccctcatcctcctcggctggtacgtggcgtggacgacggtgctggtgcacgtgccgctggtgcaggagatcgccggcctgcgcccgaagaagccctctaaacccaagccagccaaccgcggccgcgtcgccaagttctaccggaaccaggccgaggccgcacaaagctgggaactggatacttggatagggatggaagaaaaataaagccaatatcattagcaggatcaatctggtttatctagtaaaaacgggctgtgatcgaaatagtttatgtatcctttcttatttaaaccactatcatgggtatgtattccggaaaaatggctatctgaaaagtcttatattttgatttaccttgctgtctctttgcaccctgaag

SEQ ID NO: 4723 - DNA, 3611 bp, Zea Mays
gcaaggcagcagaatagcagtagcccatgttgttgaggacaggtcgcctgtaggccaaccgaccaaagggccacagcactacagcaggccggccaacacgactccgagttggaggcgacctccgctcccctcttcctccctctttccgactttccctccctactcgcccccgcgccgcgccaatcttttttccctcttgacggcgcacataaatccgcgccaaatcgtcaaaccaaaaccaggccgcgcccgcctcgtcagtcctcagtcctcactttcgggccgagctccggatatccagcggcggcaatggcagccgaagccagcgccgtccagcagctcgctggcctcctggaccaagaatgtgcatcagggctacccaacagagacattattgcgtttccttaaagctagagagtggcatgtgaataaggctcacaggatgcttgaagattctttgaattggaggatgcaaaatgaaatcgatagtatattggagaaacctattatcccagtagatttgtatagatcaattcgtgatacacagcttattgggttatcaggatactccaaagagggcattcctgtatttgcagttggtgttgggctgagtacatatgacaaagcttcggttaactactatgtgcaatctcacattcagatcaatgagtaccgagatcgttttattttgcctacagtgacaaagaagtatgggagacctattaccacctgtataaaggttctcgatatgactggtctgaaattgtcagcactacaccaaatgaagattgtgactgcaatatctacagttgatgatttgaattaccctgaaaagactgagacctattatatagtaaacgctccatacatattttctgcatgttggaaggtcgtgaagcctctgttgcaagagagaacaaggaagaaagttcatgtgttgcgtggctgcgggagagacgagcttctacagatcatggactactcctccctcccccatttctgcagacaggagggctcgggctcatccaaacattcgtcaggcgacgccgataactgcttctctctcgaccacccgttccaccaggagctctacagcttcatccaggagcaggcgctgaaccaggagctcatcaagcagggctccttgcacgtgaaaatccccgagcaggaccctgaggacgcaaagatcgtggaggtcatcgaggccgagttccacaagcttggcgtgcagaacgggtccgccaatggcatcgaccaagcatagcacctttgtctaataaggccagcctgattcaaccgagacgttgcttgccacttctgatgcaactaatcctactgtttaatttttttggtggggtgggcccacccccattgctgtttcctggggggaggggggggggggggggggtgattggtattggtggtatacatagcaaagtcatttgcagatccatccatgatgcaggactgagatagacgatatcacctgtgtaaacttgcagatttgcaatgtgtcctcatctcatatgtatgctgagttgagatgaaatgaataaatcatcctacaagttttttttgagtcatcttcagaattgtgttgtgctcagtcagaaaagtaaccatgcgtttctgtgccgattcttgctagccctaattaatataaggcgaaacagataatgcctatccattggagggattagaggaaggttctccccttagaaagattgtgggtcaccaaacaaagggtaaacgaaccgaaccgaaccgtgcatatcaacaacattacaacaaagtaagcatgctcttggttggcagtagttaccacttgataaaaagaagagggagaccatgtgctttggcttcctctctgagccatctttcttgctctagccttaggccttagcaatggagatcagcgacgagcagaggatgcaagtggagtgccagcgccttccgccttcctggcaaggcaacggatcagacgccgatgtcgaagtggatcatcatctgtggccgtcaaaagatggccctcttccaatattccttaagtttgagaacgtggagtacagggtgtcaggaggcgagaggaagaggaccagcatcgggaacgagatcctcgtcgacccgtcgctgctcctcctcgacgagcccacctccggcctcgactccacgtcggcgagcaagctcatctttatcctccagcgcctggccaagacgcggaggacgatcatcacgacgatccaccagccgtcgagccggatgttccacatgttcgacaagctgctgctcatctccgacgggcacgccatctaccacggcaaggcccgggactgcatgcaccacttctcctcgctgggcttcgtcccggagatccccatgaacccggccgagttcctgctggacctcgccaccggcaacctcgacgacatcagcgtccccgaggcgctgcgcggctcgccggacccgcaggagttcaggtcccaggtcatcaggcacctgcagctcaagtaccgggcgggcgccgaggctcccgcggggagaaggacgcccactgagcagctgcgtctggcggtgcgggcgcataacaaggaccgccgccggcggagcatcggctggctccagcagttcgccgtgctgtcccggcgcacgttccgggagcgcgcatccgactacctggacaagatgcggctcgcgcaggccgtcggcgtggcgctcctgctgggtctcctctggtggaagtcccagaccgggaacgaggcccagctgcgggaccaggtcggtctcatcttctacatctgcatcttctggacgtcgtcgtcgctcttcggctccgtctacgtgttccccttcgagaagctgtacctggtcaaggagcgcaaggcggacatgtaccggctgagcgcctactacgccagcagcacgctgtgcgacgccgtgccgcacgtcgtgtacccgccagggcaccggggagctgctgggcgccgccatcctcagcgtcaagagggcgggggtcatggcgtcgctcgtgctcatgctcttcctcctcaccggcggctactacgtccagcacatccccaagttcatccgctggctcaagtacgtctccttcatgcactacggcttcaacctgctgctcaaagcgcagtaccacggccacctcacgtacaactgtgccagccggggcggctgccagcgcctgcagtcgtcgccgtcgttcggcaccgtggacctcgacggcggcatgcgcgaggtctggatcctgctcgccatggcgctcgcataccgactcctcgcctacttctgcctcctcaagcggatcagcctcacgcccttgtgatcatccacctaattaaattggggcgcaatttcgcatgcctgtgtgaatgattattcatgggaaatgcctgcatggcgatgtgtatcaggctatcagctatactttgcagactgctgggcctaatttacgaggtgtatttgtctgacacaagttttagaagaagagtgaacaatgacatagcatttttagattatataagtgtttatgctagccgttcctagttataagttgcatttttagctttattaataagatcatctagattttgataaac

SEQ ID NO: 4724 - DNA, 3978 bp, Zea Mays
gcctggtggagtgagaatcaaaagaaagtgccacttgcaagttgcaacagaattattgcctcaataacatgagaatgtgcatcagggctacccaacagagacattattgcgtttccttaaagctagagagtggcatgtgaataaggctcacaggatggtgattgttaacactgcagttttccttttcaattttcatattgatgaaccctaaaggcctaaagtaaatgttacattacccggggaaaatttcttttgctagcttgaagattctttgaattggaggatgcaaaatgaaatcgatagtatattggagaaacctattatcccagtagatttgtatagatcaattcgtgatacacagcttattgggttatcaggatactccaaagagggcattcctgtatttgcagttggtgttgggctgagtacatatgacaaagcttcggttaactactatgtgcaatctcacattcagatcaatgagtaccgagatcgttttattttgtgacaaagaagtatgggagacctattaccacctgtataaaggttctcgatatgactggtctgaaattgtcagcactacaccaaatgaagattgtgactgcaatatctacagttgatgatttgaattaccctgaaaagactgagacctattatatagtaaacgctccatacatattttctgcatgttggaaggtcgtgaagcctctgttgcaagagagaacaaggaagaaagttcatgtgttgcgtggctgcgggagagacgagcttctacagatcatggactactcctccctcccccatttctgcagacaggagggctcgggctcatccaaacattcgtcaggcgacgccgataactgcttctctctcgaccacccgttccaccaggagctctacagcttcatccaggagcaggcgctgaaccaggagctcatcaagcagggctccttgcacgtgaaaatccccgagcaggaccctgaggacgcaaagatcgtggaggtcatcgaggccgagttccacaagcttggcgtgcagaacgggtccgccaatggcatcgaccaagcatagcacctttgtctaataaggccagcctgattcaaccgagacgttgcttgccacttctgatgcaactaatcctactgtttaatttttttggtggggtgggcccacccccattgctgtttcctggggggaggggggggggggggggggtgattggtattggtggtatacatagcaaagtcatttgcagatccatccatgatgcaggactgagatagacgatatcacctgtgtaaacttgcagatttgcaatgtgtcctcatctcatatgtatgctgagttgagatgaaatgaataaatcatcctacaagttttttttgagtcatcttcagaattgtgttgtgctcagtcagaaaagtaaccatgcgtttctgtgccgattcttgctagccctaattaatataaggcgaaacagataatgcctatccattggagggattagaggaaggttctccccttagaaagattgtgggtcaccaaacaaagggtaaacgaaccgaaccgaaccgtgcatatcaacaacattacaacaaagtaagcatgctcttggttggcagtagttaccacttgataaaaagaagagggagaccatgtgctttggcttcctctctgagccatctttcttgctctagccttaggccttagcaatggagatcagcgacgagcagaggatgcaagtggagtgccagcgccttccgccttcctggcaaggcaacggatcagacgccgatgtcgaagtggatcatcatctgtggccgtcaaaagatggccctcttccaatattccttaagtttgagaacgtggagtacagggtgaagatgaccttgaagaaccccctcacagcggcgagagtggcgtttgcgtcccagacgagggcagaccagggcagcagctgcaagcacatcctcaagggcatcgctgggagtgtggaccctggcgagatcctggcgctgatgggtccatctggcagcggcaagaccaccttgctcaagatcctggggggcaggcttggtggcggcgtcaagggccacataacctacaacgacactccctacagcccctgcctcaaaaggaggatcggatttgtgactcaggacgacgtcctcttcccacagctgacggtggaggagaccctcgtgttcgccgccttcttgaggctccctgcttgcatgtccaagcagcagaagcgcgacagggtagacgccatcatcgccgagttgaatctagagaggtgccggcacaccaagatcgggggagcgttcgtgaggggggtgtcaggaggcgagaggaagaggaccagcatcgggaacgagatcctcgtcgacccgtcgctgctcctcctcgacgagcccacctccggcctcgactccacgtcggcgagcaagctcatctttatcctccagcgcctggccaagacgcggaggacgatcatcacgacgatccaccagccgtcgagccggatgttccacatgttcgacaagctgctgctcatctccgacgggcacgccatctaccacggcaaggcccgggactgcatgcaccacttctcctcgctgggcttcgtcccggagatccccatgaacccggccgagttcctgctggacctcgccaccggcaacctcgacgacatcagcgtccccgaggcgctgcgcggctcgccggacccgcaggagttcaggtcccaggtcatcaggcacctgcagctcaagtaccgggcgggcgccgaggctcccgcggggagaaggacgcccactgagcagctgcgtctggcggtgcgggcgcataacaaggaccgccgccggcggagcatcggctggctccagcagttcgccgtgctgtcccggcgcacgttccgggagcgcgcatccgactacctggacaagatgcggctcgcgcaggccgtcggcgtggcgctcctgctgggtctcctctggtggaagtcccagaccgggaacgaggcccagctgcgggaccaggtcggtctcatcttctacatctgcatcttctggacgtcgtcgtcgctcttcggctccgtctacgtgttccccttcgagaagctgtacctggtcaaggagcgcaaggcggacatgtaccggctgagcgcctactacgccagcagcacgctgtgcgacgccgtgccgcacgtcgtgtacccggtgctcttcatggccatcctctacttcatggccggcctccgccgcaccgtgccgtgcttcttcctcacgctcctcgccacgctgctcatcgtgttcaccagccagggcaccggggagctgctgggcgccgccatcctcagcgtcaagagggcgggggtcatggcgtcgctcgtgctcatgctcttcctcctcaccggcggctactacgtccagcacatccccaagttcatccgctggctcaagtacgtctccttcatgcactacggcttcaacctgctgctcaaagcgcagtaccacggccacctcacgtacaactgtgccagccggggcggctgccagcgcctgcagtcgtcgccgtcgttcggcaccgtggacctcgacggcggcatgcgcgaggtctggatcctgctcgccatggcgctcgcataccgactcctcgcctacttctgcctcctcaagcggatcagcctcacgcccttgtgatcatccacctaattaaattggggcgcaatttcgcatgcctgtgtgaatgattattcatgggaaatgcctgcatggcgatgtgtatcaggctatcagctatactttgcagactgctgggcctaatttacgaggtgtatttgtctgacacaagttttagaagaagagtgaacaatgacatagcatttttagattatataagtgtttatgctagccgttcctagttataagttgcatttttagctttattaataagatcatctagattttgataaac

SEQ ID NO: 4725 - DNA, 1313 bp, Zea Mays
aaagaatacaaactaaaaagcatgaaagagataataaaaaaaatttgtaacgaattgtttgaaacagtgaacgggcccatatgcaggagaagaaggcccggttgtggtgcgctccctcgaccgaacagccccgactgggctatattcgttctcccggcgtgctccgtctctcctctcagcgcgacgattacggtaacgccgtcgccgccctacggctcagatcttcgtcgtcatcttctccggcaacgagcacccaaagatggtggtccttcaaccagatcggttcctgagcgagctgacgagcatgtacgagcggagcacggagaagggctccgtctgggtcaccatgaagcgatcaactctcaagggcaaggcacagttgcggaagatggagaataaggggcaggaggtagagcacaggtgcctcgtccgcgcctccaatggcaagaagaacatctccacctcggtttctctaaaggagtacacaaagtttcaagcttcatacgcaacagttcttaaggcccatatgcatgctctgaagaaaagggagaggaaagacaagaagaagactgcagatgctgagaaggcaattgagaccgcacccaagaagcagaagaaagcatcttcaaagaaatcttcagggtccaagtcataaggcgctcacagaactcagtgtgtcttctcctttatgttgtttaccgccagactaattagagtgtcgtgaagttttacttatctggtttttattcgaattcgtgtctggaagatgaaagcctgtgaatacacctttatagagccgtgtcatcgatgctaacattttttgaagcagagttttgaggtgaatgtgaggcgctgtgctgccctgattggcattaacgaaaatgcacaagtttgaacttttattgcataaaggtaatggagtttgttagggaacatcttcgtcgctggaatgggaatagaatggattactatgtgatttgtttggttcacccgtggtagcagggtggacggtagtgcaaatgcgcaatcgtttgcagctcaaatcgggcgtaatcggagtgcttgatgatctggatgatcaacatcccaagcaagatattagaagccttgatgaatacctacaagcacgtgcaaaagtccaaggcataagataaaactaaggaccacaactcaactgaacaatggctccaatcaaacttttttatcccgatccgagagctccacagcttggatggaaccgagtgggtgaggtttggttagtcgaggatccgtcacgatccaccaccaaacgcgacaaaagacttggcaaaaaa

SEQ ID NO: 4726 - DNA, 1552 bp, Zea Mays
gttgaaactggtaagtatagtaaagaattccgtttcttcgccctaaccttttcactgctccagcgaaggccgccgccctcagcaacggcatcagcgtcttcccctccctcgtctcgtcaatcccctcgcgccctctcctccggtcctccgcacacggcacaccgtccggtgaccctgcaatggaagggcgccgctcaaatgaagtatcatctgccgaagctgtcttggtgggagcattgtcgtctggtgtcaatgtaaggacgttcattttgatggcataattcctgcagcatattccttattgatgtcaattcagctttagtcatgtttgttttgagtgcaatgtagtgtgttttgttgtacatcatgtcattatactgaccgtctgtttggttccatgggactaaactttaatccctcccttttagtctgttttagtccctaaattacttaaaatatggggactaaaatggaataaatcatatttcctcccctctttagtcctattttttttagtaatttagggactaaaaaagagggactaaagtttagtctcttggaaccaaacatgccctgagcctcattttcaaccttagtcttgcctctgcatgattttggcactacacgcgttgatgagaaaggaaagtttaattcatgctactttattgtgtaggctcccacgtggtttgtgctcaagattacgtttttgctccttgcattgtgttttacggctatgcttgctctagcattttcgtcgaagaactttgtaatcgttgcacatgttcttctgctggtgactattggaaccgtgctatttgtgctgcttaacaggtttctggctgaagttgggctcgtgcctgttgaacagcagatgaaggagatgggcatccacaaaacagaagccacagatgaagacaagagaaattaatcagtgacaccttttttttttgatatggaaagcagtttaacattcaatggacagagtgacattatctctcatgatagaatcagcactcacttcagagacatgaagttcagacaccacaattttgcacagatgaccatacatctttgtacgtacttccaaatggaaacccaggtcgaaatctgtagtgaaaagggatgtagctgcaagcagagcacatcaagcctgctttccctcttccttgggcttgctcttttttttttacttggtgtagcagaagcatgagcaccagggaaactgaaacaagaactccattgccagagaaatcaccaatacttttgtttggagaagtgtgcccaagggatttgcatgcaatgtaacccttacatatacgacatggatgccgtttatcagtggacattaggatttatggtctttgtgcaatatatatggtcgtgtcagactatcgttcctttcatttattctttattaaccctcataaacctgattgtgagaagtcatgatggcttttgattctttgaaggtcgattgaaatgttggaaaagccttccggatggaaagcatatgttctttagctgccgatgggtaaccttttggtcgttcagg

SEQ ID NO: 4727 - DNA, 2578 bp, Zea Mays
atagggtttagacttcacagttctcctgcctaccccgtccctccccaagcgcgccgtctagggtttcacagccgtgccccgatccattcgagcgccccgcaccgccgccatggagtttgacgaatacgagtacttggagaaggcggtagagcccgctcccccacaggccaatggttccggctccggctccggcgagaaggaccgcggctcgcgccgccgcgagggcggcgaggaccgcatatcgaagcgctctcgctcgggggaggaccgcgaccgggacaggcaccgcagcggccgggagcaccgtgaccgggacaaggatgacgtgaaggaggagaggagccgcgaaagccgcgggaaggacagggacagggaagggagagaacgggagaaggagaggggtgacaggcaccggctgagagagagggaagtggaacgggagcggaggagccggagccgctcggagcggcgccgtgccgaggaagaggagatggttagggagctggagcgggagcgcgagcgcagcgagcgacatcactatcgcgaccgtgatgtcaggcgtaggaaagatgacggggcagagccagaagttgatccagaaagggaccagaggactgtatttgccttccagctatctttgaaggcagacgagagagatgtttatgagttcttctcaagggctgggaaggttcgtgatgttcgtcttatcatggaccggaactcaagacgttctaaaggagttgggattgcacactgaaatttaataatttggtctacctgctgggattatcggcaatttacaagtttctaggcaataaagggggcacccaagaaccaagttcgaaaacctccactagttttgatcaaaatgcctgaagttttctgtgaaaatttgaaatatcttaacatatgatgccccacttattgtttttcttttcttttacaggaagacaactttttttggatgctttgatgattgtactaaacatatatctcaattcacaggtacattgagttttacgacgttatgtctgttccaatggcaattgctctgtctggtcaaccgctgcttggacaagcagtgatggttaaaccatctgaggctgaaaagaacttagttcagtcaaatgcgacatcaggtggtgcggcttcaggtggagcaagaaagttgtatgttggcaatcttcactcaaatattactgaagaccaattgagacaggtatttgaaccatttgggcaagtagagcttgtacagcttcctgtagatccaatgactggattgtgcaaaggttatggttttattcagtttgcacggcttgaagatgcaaaagctgcacagagcttgaatgggcagcttgatatcgctggcagagttattaaggtttcagctgttaccgatcatgtgggaatgcaagctagtggagcaactactggagatttagatgacgatgaaggtggaggcttggcactaaatgcaagttccagagctgctctaatgctcaaattggacaggagtggtactgcgaccagcttaactcgtggtattggtgctgctggtgtggctgtaccagctacttctgttattggggctccaggagctgcttctcttctaccaccaacagttgctgctgttggatcagttcctggggcacctgtgcttcctgttaccactcagaatgtgaccatgtctacacctacagaattcttgttgcttaaaaacatgtttgacccagcattggagacagatcctgattttgacttggatattcgagatgatgtccaagatgagtgttccaagtttggtgcagtgaagcatatttttgttgacaaaaatactgcaggctttgtgtatctgcagttcgatagcgtgactgcagcagcaaaggcccaaaatgcccttcacggaagatggttcgctgggaagatgattacagcgacatttatgtccgctctggagtacagtacgaagttcccaaacttgtgagcatatgccgggaagagttggccagacctgcatagttcgtttggagtattcgcaagtgctgtatcgttggatggtagacgaacaccttattgattgtatgacagggtagttgcagcaccgggcgtcactatcagtacaatgcttgatgtactttatttacggcgtcgcagtgaccaaaccttatttttgtccaccgaatgaaatgccctatcatctccaggcttgttggcatatggttgattttctggacgatcaccataacacatttttgtcagatttccaatgtgctttattttttattctcttatgtttcaggatgttttgatatgttcttgctttcaccaagaagtttgccatttcaatccgtttcattttattttattcgactgatacagtttattgtttttctgttctcttttagggctagtttgacatccacatttttccatgggatttctaatttttcaagggaaaatgaactaatttcttttgggaaaatgaaaaacacttggcgaaacgaggtttccaaactaggccttaacaagaaattcaccggcgaaggaaaacaacaacaagctccaaagaatgtgtctt

SEQ ID NO: 4728 - DNA, 1602 bp, Zea Mays
agtcgcacatatgggcgtacgatcgagcggcgatcaagttccgcggcgtggaggccgacatcaatttcagcttggaggattaccaagacgacatgaagcagatgtgccacctgagcaaggaggagttcgttcacgtgctccggcggcagagcacggggttcccccggggcagctccaagtacaggggcgtgacgctccacaagtgcgggcggtgggaggcgcgcatgggccagttcctcggcaagaagtatgccggtcgtacgtctacttgggcctgttcgacaccgaggaggaagccgccagggcgtacgaccgcgcggccatcaagtgcaacggcaaggacgcggtgacaaacttcgatcccagcatttacgccgaggaggaggtcgcgccggcggcggcgacgggcggcgccgccggcgacgagcacaacctggacctgtcgctgggaagctcggcggggaacaaaaggggcagccttgacggcggcggcggcggcggcggcgacgacaagtcctcggaccagcgcgtccccatggcgttcgacatcgactggcagacggccgcacgtcggagcaccaaggcaaagctcctgagcaacggcgatccggggaccgcggcgggaggcctttccctggcgatcggcggcggaggcgggcactggcctccgcagctgcagcatcagcagcagcagcagaggctccacggcgccaggaacaacggcggcggcacgagctggccgccgccgccgcacccgtgcccgccgccagtaccggccgccgccgcgaccgcagctgcagcatcatcacgattccatccctacgttgttacgagtacgacgcaaagcccggccggctgggtccagaagaatgggttccattcgctggccaggcccacgtagaccaagaaccaggactgggcgttcgtccttcgatcgtattccacggcgaaggtccatcatttgacccaagggcaaacggctcgtcgatccaccgatttacaccccctccccctttctttcccttttccattctctgtgttcttgattgggtgagacatggatccgaggatggatgggcctgctgcccccctgctgtaaatgaggagtttccgggaagaagacgagtgctttggtaggcgactaggcgtcgcgtcaggcagtgcgtccttttgccgctttttgttctctctcccccccttctgcattcactcaccaatcaccattggcaagcaccgatgaatggtggcatggggtgtcaacatcgcagctcattttgtttggtctcatgttgcatcactcgctgctgcacgcacgatgatggcctgctgcactgtcgtctgctgagctgctactgtcttcgatacgtgtgggtctcgcgctcgtgtaaaccttgtttctaattcgggcactgcaataactgtgggagaagagaagacgacccgggggaggccgaccggcggttaccttcctcgccggatgggacgagaccgtaccccacgccgtcatcttcatactatgtggatggatggctacattgccggcaagtgcggccactgtgcgcacagctcgcgcgcaggaagaaaagttgctagataatgctc

SEQ ID NO: 4729 - DNA, 1572 bp, Zea Mays
aacagcccaccacgtgaccacagacagccagatggctgagagcctgagacgggcgacgcccgcacgcccgcacaagctgctccgggctccgctgctaggctagggtttggactttggattggagccgcaccgccgcaccgccaccgcagccgccgcagtgccgcacagccgccactcccgtcttggtcttgcggccagtcgccctcgggcctcgaccatcagcccctcgcccgctcgccgagacaccgagtcggcatcgaccgtcgtcgcgtctccgaggtccagcgcctagtggcccagctccaagcctccagccatcggcgcccgccctcctccgccgagacgccgagtgccgagcgcccgagcaccccggtccccagcgcccaacaagctagcaggctgcaggtatgcgctctttgttgatgcgtccaaggagttgagctgaatgcccagaaggctagcaggctgcagaaactgaaggaaaaggcggcattcaggaacccggatgagttctattttaaaatgatcaacagtaggactgttggtggaattcatagacctaagcctgaagataataagtatactgaagaggaacttcatctgttgaaaaataaagatatgggatatatcctttagagcgttcaaagtgaaaaagaaaatcgaaaagctaagctcaacacttcatgaacttgataacaagcctcaaaacaagcatgcttattttgctgaagacagagaagaagcgaaagaaatacaatcaaggataggacaaagcagcaacatgactgatcctttgtttttactgtttatggagagtcatttttactgtttattagtctcaacatttatatttgtgtccatttaactaggaccaatatggttggaatgggattatgatattaatatattatgcagttagttagttgactggtatctcatgttgtctaatcctttgtttttccccaggaaaattgcacgcgcggtgttctagtctgtttattttgccttccctttttctgattaattcacggagtttggtggactacggttactgaattggaatgggaaaaaatctataaagtgctaaagactaagtggatcgagcgcgcgcgagggttgtcgtaaaatgtccaccgttattaagagggctaatgaattcccagtcgattgtagctacatgcatggaggagtgcacacacatgcctatgttgtttgaattaatcaaattgcttgtttgttagtaattattaccgcctccaactaggctctgtacgtccacaagatcgtcagctatttcatgcaagcatccgcacaagtgtcctactgctatatgttattgtgttctgatacttgagacttttattatgactatgtatgagatattgtctcttattagtactggatgagatgtgtcttatttatgattatggatgagacttttgtgatgtaattgatgagactatgaatttaaatattgttatgtgattgtgtgtgagatgttttatgtgaaaatatgttgtgttatatatttgttatgttgtgaaatgtggtgtaaaataaaaataaacaata

SEQ ID NO: 4730 - DNA, 2335 bp, Zea Mays
aacagcccaccacgtgaccacagacagccagatggctgagagcctgagacgggcgacgcccgcacgcccgcacaagctgctccgggctccgctgctaggctagggtttggactttggattggagccgcaccgccgcaccgccaccgcagccgccgcagtgccgcacagccgccactcccgtcttggtcttgcggccagtcgccctcgggcctcgaccatcagcccctcgcccgctcgccgagacaccgagtcggcatcgaccgtcgtcgcgtctccgaggtccagcgcctagtggcccagctccaagcctccagccatcggcgcccgccctcctccgccgagacgccgagtgccgagcgcccgagcaccccggtccccagcgcccaacaagctagcaggctgcaggtatgcgctctttgttgatgcgtccaaggagttgagctgaatgcccagaaggctagcaggctgcagaaactgaaggaaaaggcggcattcaggaacccggatgagttctattttaaaatgatcaacagtaggactgttggtggaattcatagacctaagcctgaagataataagtatactgaagaggaacttcatctgttgaaaaataaagatatgggatatatcctttagagcgttcaaagtgaaaaagaaaatcgaaaagctaagctcaacacttcatgaacttgataacaagcctcaaaacaagcatgcttattttgctgaagacagaagcgaaagaaatacaatcaaggataggacaaagcagcaacatgactgatcctttgtttttactgtttatggagagtcatttttactgtttattagtctcaacatttatatttgtgtccatttaactaggaccaatatggttggaatgggattatgatattaatatattatgcagttagttagttgactggtatctcatgttgtctaatcctttgtttttccccaggaaaattgcacgcgcggtgttctagtctgtttattttgccttccctttttctgattaattcacggagtttggtggactacggttagtcggtttattttctaggtagagggacaattatgcgtgactaataaaaagggtttcattccatggctaaatatatcatttgcatgatgctagttggagctagcatccttgttcaaacaaagcatcgtataacattttggatctacatattaaattgatggctagggcctaggtgcatgcatatgtacttgaacagcagggcttttatgatcttctgatcagcagaatccagcatctgtttttctcaaactgttatgcttttagatcgcgggtacttgttagtatccatgcacagcacacggtgtggctgtgtggtgaacatatctcttttcagatttgcgctcagctcatcgtgtgtggtgtacctaattaagcttccgtttcttttctgtattctttctttccttttttataagggcgctcctgttaaatcggttgaaacagaagtgacatcattggttattagcaaatcctggagaatgcatgcaagttcttctttatttgtatcactatctcttagcacagttctctaactttcgatgcacgtacaagtctatttttataaaaaaaaactgtctatatatgggggcacacaaaattctgtggacgtgtgcatcaatcatcacatgctgttatgcctgatgtcctgtggattggtgttcgatctcgtgaattcgagttgtcctccatttggaactgttatttttgcagctacatatataccaactgacagacatttggaactgtttttttgtgtgtgtttaggttactgaattggaatgggaaaaaatctataaagtgctaaagactaagtggatcgagcgcgcgcgagggttgtcgtaaaatgtccaccgttattaagagggctaatgaattcccagtcgattgtagctacatgcatggaggagtgcacacacatgcctatgttgtttgaattaatcaaattgcttgtttgttagtaattattaccgcctccaactaggctctgtacgtccacaagatcgtcagctatttcatgcaagcatccgcacaagtgtcctactgctatatgttattgtgttctgatacttgagacttttattatgactatgtatgagatattgtctcttattagtactggatgagatgtgtcttatttatgattatggatgagacttttgtgatgtaattgatgagactatgaatttaaatattgttatgtgattgtgtgtgagatgttttatgtgaaaatatgttgtgttatatatttgttatgttgtgaaatgtggtgtaaaataaaaataaacaata

SEQ ID NO: 4731 - DNA, 2066 bp, Zea Mays
accggccaaagcgggcagtagcagagggaaacttttgaaaagccttttcaaaatttggagtaaggcactgaggcgagcgcgggtggcggccggcagcgaggaaggctactgttaggatcatctcgctacaaaatcgggttcccgagatggaggggaaggcggtagccgtcggttgcggtggcgcccgcgtcgatccggcggatgatctcaagtacatctccgggctgagcaccattctcgtggccaccatccaggaagtgaaggaccaggtctcccagatggagttcatcttctgcagccagctcttcccgcacatccaggccaagtcgaagcttgtccaggcgcatctcgccgacacgatgaaggccagtgaggttgagtggaggaagacggaggctggcctggtgaagcagctggaggaggtcagccgtggtaagatgctcgcggaggagagattgctgcaactgggcacctctcttgaggagatgaagaggaagcttgtggattcggagcaattggctgcgaggcatgaggcggagaagaaacagcttctggggaggttggaggatgaaacgaggaaaggtgaggtggtacgtcagctccaaagggagattgaggagaaggacgctgaggtggtacgtcagctccagagggagattgaggagaaggccgctgaggtggtcagggagagagaggcacaccagcggctgcagcagcaggttgacctgaaggataagaatctgcttctggagcagagcaagcggagggacttgattgaggattacactcagctgaagacaaactacaagcatttgaagtctcagtacacctttcttcttgggaagattgaccagcatgaaggctccaagcctcctgaggacattcctgcagatagaagaaacactgaaagtcctccaagtaagaggaaattcaaagatttggagcacacaaacaaggagcgcatccaaatccttcccaacacaagggacctgaagaatgactctgctccaggtgccaaagcccaagctgcccaacatgctagttcagtcaggagtccaatcagaaactcacaccttgccgtgccatctcgcccaatgaatccattggcaaatcattctgccaacaattcaaaactacaagcttcaaccagtgtcgccagcccatgtctaaattggagggagacccgtgcacgcaaagaacaaggtgttgctgatccacacgatgatttccttgatacacctctggaagctgtcaagaataccatcaggaaccctgcaactcccgaagaagcactggcacttgccgcctctcctcaagttatggatttcgacaattcagatgatgaaacccaagatctgaatattgcaactcaagccctccggcacatccccaatatgccagttaccaagcagcaaaacacaatatcggtacatccaccaaagaaagacttcaaatatagagaatcagtgagaaagaaagctgaccgggagaacctgaaaggtgtcgagtgcaagcaatgcaagaagttttatgatgctgttcttcctggtggtcgtgcagatggcgatggtgcaggctctacaagcttacgatgtgagcaccacgatggtgtgtcaaggcatcggtacaggtacgcgccgcctctgacgccggaagggttttggaacattggtttcgaatcagaaatgtagcactacatcaagtagcaggaaaccttcagtgtcctcggtcaccccaagatattgtagcaatgactaagacaagttgcatgtcgctgctcaagttgcagaaatagtcattctgtgattaaggttgatggtaggcagtagctactgtgaatatgttggagatagaaagcactgtcagctatttacctttttgtggattacatcaagttgatcattttgtagcgaaccacctttaacataccattggaaagcaattcttttttatagaaaggagacatctgaataacagcttacaatcaacagcaaaacctctggccttgtactgttatacttattatgttcattctttcagctgttcgcaagttaattcaatatatt

SEQ ID NO: 4732 - DNA, 2509 bp, Zea Mays
accggccaaagcgggcagtagcagagggaaacttttgaaaagccttttcaaaatttggagtaaggcactgaggcgagcgcgggtggcggccggcagcgaggaaggctactgttaggatcatctcgctacaaaatcgggttcccgagatggaggggaaggcggtagccgtcggttgcggtggcgcccgcgtcgatccggcggatgatctcaagtacatctccgggctgagcaccattctcgtggccaccatccaggaagtgaaggaccaggtctcccagatggagttcatcttctgcagccagctcttcccgcacatccaggccaagtcgaagcttgtccaggcgcatctcgccgacacgatgaaggccagtgaggttgagtggaggaagacggaggctggcctggtgaagcagctggaggaggtcagccgtggtaagatgctcgcggaggagagattgctgcaactgggcacctctcttgaggagatgaagaggaagcttgtggattcggagcaattggctgcgaggcatgaggcggagaagaaacagcttctggggaggttggaggatgaaacgaggaaaggtgaggtggtacgtcagctccaaagggagattgaggagaaggacgctgaggtggtcagggagagagaggcacatcagcggctgctgcaggaatttgagcaattggctgcgaggcatgaatctgagaagaaacagcttctggggaggttggaggatgagatggggaatggtgaggtggtacgtcagctccagagggagattgaggagaaggccgctgaggtggtcagggagagagaggcacaccagcggctgcagcagcaggttgacctgaaggataagaatctgcttctggagcagagcaagcggagggacttgattgaggattacactcagctgaagacaaactacaagcatttgaagtctcagtacacctttcttcttgggaagattgaccagcatgaaggctccaagcctcctgaggacattcctgcagatagaagaaacactgaaagtcctccaagtaagaggaaattcaaaggtacagctatccgaatttgtcaatcaaacaatttctttgagctacttcagtttttttccgaatgatcaatctttgttcgtgatttatgctacttgggtcctggaataactgtggggatttgtattcttgtcccatgcaaattatgcctgatattctgatcaatgatctcaaatgaaaatcctaagtaaatcattgttaattggctcttattgatctaacaatgctggacacttggactcctaaatgcatgtgccctaaatacgcttggaattactgattggaccaatgcctttacattttcttacctgcttggttttcagatttggagcacacaaacaaggagcgcatccaaatccttcccaacacaagggacctgaagaatgactctgctccaggtgccaaagcccaagctgcccaacatgctagttcagtcaggagtccaatcagaaactcacaccttgccgtgccatctcgcccaatgaatccattggcaaatcattctgccaacaattcaaaactacaagcttcaaccagtgtcgccagcccatgtctaaattggagggagacccgtgcacgcaaagaacaaggtgttgctgatccacacgatgatttccttgatacacctctggaagctgtcaagaataccatcaggaaccctgcaactcccgaagaagcactggcacttgccgcctctcctcaagttatggatttcgacaattcagatgatgaaacccaagatctgaatattgcaactcaagccctccggcacatccccaatatgccagttaccaagcagcaaaacacaatatcggtacatccaccaaagaaagacttcaaatatagagaatcagtgagaaagaaagctgaccgggagaacctgaaaggtgtcgagtgcaagcaatgcaagaagttttatgatgctgttcttcctggtggtcgtgcagatggcgatggtgcaggctctacaagcttacgatgtgagcaccacgatggtgtgtcaaggcatcggtacaggtacgcgccgcctctgacgccggaagggttttggaacattggtttcgaatcagaaatgtagcactacatcaagtagcaggaaaccttcagtgtcctcggtcaccccaagatattgtagcaatgactaagacaagttgcatgtcgctgctcaagttgcagaaatagtcattctgtgattaaggttgatggtaggcagtagctactgtgaatatgttggagatagaaagcactgtcagctatttacctttttgtggattacatcaagttgatcattttgtagcgaaccacctttaacataccattggaaagcaattcttttttatagaaaggagacatctgaataacagcttacaatcaacagcaaaacctctggccttgtactgttatacttattatgttcattctttcagctgttcgcaagttaattcaatatatt

SEQ ID NO: 4733 - DNA, 2742 bp, Zea Mays
tgcgtctctttcgcaaccatatcgctctccgacgactgctgtatcgcccccctgtctctctgcaacgactgttgggccgccgccgccctacgccagtcgccaggtgtcgacaccttcgtcggtatctttaccggcgacgagcacgcaccagggtgatgatagatgccaattcatcattctctggaggtgctcagttgcagccaagtacaagcatgaatacttattccttcatgcctgctccatcgtccccaatatcattttcatcaaataacatctctggctcttcagtcattgatggctccattgtgcagcaaagtccaccccaagaccaggcgcaaaagcagagggttctcttcatctccaggggcaacagaacccacagcttcaagctttgatccagcagcataatctggcacatatgcagcagaggcagcagcagctgctgcaatcatttgctcagacacaaccatctcaaattggcattcctcatcagcctcagcttccgccatcactagcacagcctggaatagctgtacctgttaggactcctgtcaacaatggcctttgttcccgcaggctaatgcagtatttatatcacaagcgtcgtcgtccggagaataatcccataacatattggaggaagcttgttgaggaatattttgcaccaacagcaagagaaagatggtgtgtgtcatcttacgaaaagagagcgaatgcttcagtttctactgcacaaacggctcaggacgtgtggcgatgtgacatatgcaaaacacatggtgcaaaaggatatgaatctacctatgaagtgcttcctagactctgtcaaattagatttgatcatggtgttatagacgaatacctattccttgacatgaccaagcccaacgaattccaattgcctaatggactaatggtgctggagcatacaaaagttgttcaaaagagcgtttatgaacacctacatgttatacatgaggggcatttgagaatcatattcacaccagaattaaagatcatgtcatgggagttctgttcacgacgacatgaagagtatatcactcgccgggttctggcaccgaaggtcaataatttgctacaggttgcccagaaattccaaaccgctgccactgaaaatggtcctgctggggtttcaaataatgatgcacaaaccatttgcaacatgtttgtggctgcatcacgacaactagcgaagaatctggagcaccacaccttgaatgaacatggcctttctaaacgatatgttcgctgcctgcagatatcggaggtggtgaataacatgaaggacttgattgagttcaccaacagaaacaattttggtcctatagagggcctgaagaattatccaaaaccaaatgtgtcggagcttccaggacagaatccgcgtgagacaaaacaaacaacggctgctggtggtcttccgaatgaccagaacaacaccgaagctatgggtaccaaacaagaaacaagcgctcgtgtggacaacggagcttctgttgctggagccgtcggtaatagtgctccgcagaacgctgcagcactaaacggttaccaaaatttaccgagaagctccagcgcaaatcagagtcagcttcagcagggggcatccggtgccttcaaaggtcctgccgcgacgcgcaatggcatgcagatggaagcatctaggtccttctgtggacctaaccaagtgcagctagcacgattccaacatcctgggtcatttcagcacccaatgccccagcacaacaacctccagggcttggggttgcaaaacaatcaccggggcctgggcgtgagcccacagtatcagcagcatgctttaaatcagctgattcaagaagttaagaacgctaaaaggcacacactgccacagcaaccacctctagatatccctaacataagcagtggtatcacatcaggaggtgctaacaccaacagtgctggtacaggagatcagggacagcgcatggccgtaaatggtgctgccaccatctataccgggcctactagtgtgatcaataacagcacagccagaagtaacaatttcaagtcggtaagcagcaatctggctgttgctgctgctcctgctggaggcaatgccgcgactttgaaggccaagcccttccatgaatttgatgacctggagcatctcatcgctaatgaattggtggggagcgggctgctcaacggtaacgagttggcgtggaacagttgacagagtacaaagacatctcgctgctcagacttgagcgttaaagtgttgagaacagccttcttggtagattttgctagcatggaaactagtatgtgtcggtggaaagctaccccagatcctagtttctgtttctcttttggtagattttgtattgccggtcgggacagttaactgataggagttggatttggcttgtaaatgtgagataggagttgcattgcctctgactgtcaaattatttgttccatgttccggttattcccaggctgagccaaattttttttggctaattacttcatgcagtagtttgcattggccggattggcaagaatatgtagttagtacagaacgatacaacacttctggcgattacaatcaagtttccatggtggttacgggatctgttccgctaaccatggcgacgatccagtcctgggcaccattactgctggataggcgcacgccttgtgtaacgcatcaaccagacactctacctgtctaacatc

SEQ ID NO: 4734 - DNA, 2841 bp, Zea Mays
tgcgtctctttcgcaaccatatcgctctccgacgactgctgtatcgcccccctgtctctctgcaacgactgttgggccgccgccgccctacgccagtcgccaggtgtcgacaccttcgtcggtatctttaccggcgacgagcacgcaccaggttctagtcataaatattggaagatctttattggtaattccagctatgtgccctgcctttattggagattcttcagggtgatgatagatgccaattcatcattctctggaggtgctcagttgcagccaacaaagtccaccccaagaccaggcgcaaaagcagaggtcttcaagtctaacatcacatcctattattgaggctggtggtgcattgcatgctccaaagaaattaagaattgatgttaggcaagatgaactgcagcaacagctgattcagcgtctgctccatggtcagggttctcttcatctccaggggcaacagaacccacagcttcaagctttgatccagcagcataatctggcacatatgcagcagaggcagcagcagctgctgcaatcatttgctcagacacaaccatctcaaattggcattcctcatcagcctcagcttccgccatcactagcacagcctggaatagctgtacctgttaggactcctgtcaacaatggcctttgttcccgcaggctaatgcagtatttatatcacaagcgtcgtcgtccggagaataatcccataacatattggaggaagcttgttgaggaatattttgcaccaacagcaagagaaagatggtgtgtgtcatcttacgaaaagagagcgaatgcttcagtttctactgcacaaacggctcaggacgtgtggcgatgtgacatatgcaaaacacatggtgcaaaaggatatgaatctacctatgaagtgcttcctagactctgtcaaattagatttgatcatggtgttatagacgaatacctattccttgacatgaccaagcccaacgaattccaattgcctaatggactaatggtgctggagcatacaaaagttgttcaaaagagcgtttatgaacacctacatgttatacatgaggggcatttgagaatcatattcacaccagaattaaagatcatgtcatgggagttctgttcacgacgacatgaagagtatatcactcgccgggttctggcaccgaaggtcaataatttgctacaggttgcccagaaattccaaaccgctgccactgaaaatggtcctgctggggtttcaaataatgatgcacaaaccatttgcaacatgtttgtggctgcatcacgacaactagcgaagaatctggagcaccacaccttgaatgaacatggcctttctaaacgatatgttcgctgcctgcagatatcggaggtggtgaataacatgaaggacttgattgagttcaccaacagaaacaattttggtcctatagagggcctgaagaattatccaaaaccaaatgtgtcggagcttccaggacagaatccgcgtgagacaaaacaaacaacggctgctggtggtcttccgaatgaccagaacaacaccgaagctatgggtaccaaacaagaaacaagcgctcgtgtggacaacggagcttctgttgctggagccgtcggtaatagtgctccgcagaacgctgcagcactaaacggttaccaaaatttaccgagaagctccagcgcaaatcagagtcagcttcagcagggggcatccggtgccttcaaaggtcctgccgcgacgcgcaatggcatgcagatggaagcatctaggtccttctgtggacctaaccaagtgcagctagcacgattccaacatcctgggtcatttcagcacccaatgccccagcacaacaacctccagggcttggggttgcaaaacaatcaccggggcctgggcgtgagcccacagtatcagcagcatgctttaaatcagctgattcaagaagttaagaacgctaaaaggcacacactgccacagcaaccacctctagatatccctaacataagcagtggtatcacatcaggaggtgctaacaccaacagtgctggtacaggagatcagggacagcgcatggccgtaaatggtgctgccaccatctataccgggcctactagtgtgatcaataacagcacagccagaagtaacaatttcaagtcggtaagcagcaatctggctgttgctgctgctcctgctggaggcaatgccgcgactttgaaggccaagcccttccatgaatttgatgacctggagcatctcatcgctaatgaattggtggggagcgggctgctcaacggtaacgagttggcgtggaacagttgacagagtacaaagacatctcgctgctcagacttgagcgttaaagtgttgagaacagccttcttggtagattttgctagcatggaaactagtatgtgtcggtggaaagctaccccagatcctagtttctgtttctcttttggtagattttgtattgccggtcgggacagttaactgataggagttggatttggcttgtaaatgtgagataggagttgcattgcctctgactgtcaaattatttgttccatgttccggttattcccaggctgagccaaattttttttggctaattacttcatgcagtagtttgcattggccggattggcaagaatatgtagttagtacagaacgatacaacacttctggcgattacaatcaagtttccatggtggttacgggatctgttccgctaaccatggcgacgatccagtcctgggcaccattactgctggataggcgcacgccttgtgtaacgcatcaaccagacactctacctgtctaacatc

SEQ ID NO: 4735 - DNA, 2810 bp, Zea Mays
agcaattccaggcggtaatcaccatctaccgacagggcggcctacacgatgtggcggcagtcaggctgcccccggcccagaccaattcattggatcgcccccaggcacggtgatggtgtccgcgcccagagccccaggcgaccgccgcagcagccagcagcatcggaaagccgccgcgcccccttcactgctccgccggtcgctgtgcctccacgccgacgacatcatacccgctcaggcccagctgctctcactgccgaattgaaaccttttaattccctatgacccgtcagtctcctccaaagaacgtaagcgtgaagcaaagcttccccgttccggatcgatcgatcgatcatccatctgaatattctattggcatttttttagtggttgaaagctgcatctgcacctgcatatgctgctgctgctgcggcttcccctttctcgtccctgtcgtcgttgcgtactttggatagctggacctcttccctctcgtcccgctggccgcgaccagttctccatcccgagcttaggtagctacgtactcatatgtagacaggcagaggcagtcgcatgcagagctcggaagctcgagagagaacagcctgcagagcaacagtaacagccgttggtcgttagtatcttcagaacgagacgtacacgaggcacagagagagcaggtccggggtagctagctgccatgggcaacgtatgcttctgcggcaccacctccacctcccctgatcagcctgaaccggccacggccggcaaagcgccgccacaaggcgccaccaacaggaggccggcgacgcctccgagcagccagcagggcagcagccaagagccgagcccggccccgggggccaataagcccggaccgaaggcgaggcccaaggctactactaaggcgaacccgtacgactgggctccgccggcggcggcgcacgcgtcccgggcgtcggcgtcggtgtcggcgtcgcgcgtgctggacggcgtggtgccgcaccacccgcggctgcgcgtgacggacaagtaccacctcgggcgggagctggggcggggcgagttcggcgtcacgcggctcgccacggaccgcgccacgcgggagcgcctggcgtgcaagtccatccccaagcggcgcctgcgcacggcggtggacgtcgcggacgtgcgccgggaggtggccatcatggcgtcgctgcccgaccacccggcgctcgtgcgcctgcgggccgcctacgaggacgccgacgccgtgcacctggtcatggagctctgcgacggcggcgagctgttcgaccggatcgtcgcgcgcggcaggtacacggagcgcgccgcggccgccgcggccaggaccgtggcggaggtggtgcgggcgtgccacgctcacggggtcatgcaccgggacctcaagcccgagaacttcctgtacgcgggcaagagcgacgacgcgcagctcaaggccatcgatttcggcctctccgtctttttcagaccaggcgagcggttcacggagatcgtgggcagcccgtactacatggcgccggaggtgctgcggcggagctacgggccggaggtggacatctggagcgccggcgtgatcctctacatcctcctctgcggcgtgccgccgttctgggccgagacggagcagggcgtggcgcgcgccatcctccgcggcaacctggacctgcagcgggagccgtggccgcggatctccgagggcgccaagagcctcgtccgccagatgctccagatggaccccaagaagcgccccaccgcgcagcaagtgctcgagcacccgtggctgcagaacgcgcggaaggcgcccaacgtgccgctgggcgacgtcgtccgggcgcgcctgcagcagttctccgctatgaacaagttcaagaagaaggcgatgcgggtgatcgcggagcacctgtccgtggaggaggtggaggtgatccgggacatgttcgcgctcatggacaccgacaaggacggcagggtgacgctggaggagctcaaggccgggctcaggaaggtggggtccaagctcgccgagcccgagatggagctgctcatggaggccgctgacgtgaacggcaacggttacctggactacggcgagttcgtggccatcaccatccacctgcagcggctctccaacgacgcccacctccgcaaggcgtttctcttcttcgacaaggacagcagcggctacatcgagcgcgccgagctggccgacgcgctcgccgacgaggccgggcacgccgacgaggccgcgctcgacaacgtcctgcgagaggtcgacaccgacaaggatgggcggatcagcttcgaggagttcgtggcgatgatgaaggccgggacggactggaggaaggcgtcccggcagtactcgagggagcgcttcaagaccctgagcaacagcctcctcaaggacgggtcgctccgcatggcgcgatgaccagagaagagaacgatgcttgtgcggggcttcagagacgatccatgcgatgcgatgcttggtttcttatgcatacacccttcatcaatggatggatagaatgatagattcctttcttcagcttgcttgtatattcgttccagaaagtccgaactttggaatttgggtaggaatatttgtcgttaacaaaagctgatgggggttcaggtcagtgtctatggctacgaagtgaacatgtgttgcttgtaattatgcgtcctaggaaggaactaaattttgaaaatgtccttaaaaaaatctgacctgtaactttgaaactacggtctggaacattttgtttccataatcaaaa

SEQ ID NO: 4736 - DNA, 2703 bp, Zea Mays
gggccggggcccgaatcaagtttagtcctcgggagccctcgcgtgcgctctcttttcctgtgtctgctgccgacgaaagggcggccgccgccagacctccatcttcgtgaccttcgtaggcggcgagcacccaccaggagaaggcatggcttcacgcatgacaccttccaagaggccttttcagagaagatcttcagactacgatggccggggcaagtggcagaagacgaagcacccttctccacataaatctcagttcaaaatcgagcctggtgttcccattttccgtattctctgcccggcttcaaaatctggtaatgtgattggcaaaggaggtgccattattgcaaagatacgtcaagaaaccaggatgagaatcagggttgatagggcagcccccggctgtgacgagagagtcatcttcataactgctgccaacaaggatgaagaagctggcagcgagcaaggcggagagaatgacggaggtgctgctgcttctactggtggtgaccatgagaaggataaagataacaacagcaaggagcaaaacgttgatccagaggagaacaactgcaacgagcagaatgatgattcagagaaaggaagtggtaaggaagaaatagatggtttcgagaaagaccatggtacggaagaaaagaatgattcagagaaagaacacaataagggagaaaaggatgatcccttggttgcgaaagttacaaagttagaaccagagagggtaataccgttggcactgaaggccgtttcacttgtattcgataggatttttgcaactgaaggtaataatgaaactgggaacgcatctgctgcaagcgctcctgtttcgttgcgaatgttggtgctatacagccaagcaggttggctcctggggaagggcggtagtgtggttaagcaaatggcagcagataacggctgtgaaatccgtgttttgaaagacaaccttccgtcatgtgctctgttgaatgacaaactttgccagatcactggagagattgactcagtaaggaaaggtctcaatgctgtatctgaagtgctcttagctcatccacccaaggaaactgatgcagttgctgatgttcattcttctggatcatcgtcacgttctttgttcagccagcctgatggtcttccctctggaatgcaatctaacttccatatacctttgcaaggcccgccatcccaagccaatggaccttttgatatagttgatcttcaacctccaatacatggtcatgcctcagtggctatagaatccctctcctttaggatgctgtgtccacaagacaaggttggcagtataataggcaagggtggaaatattgttaaaaccattcaaaatgatacaggctgtgaaattaaagttcttgacactgttccaaaaacagatgatcgcatcataagtatatctggacctgcgcatccgagtgatggaatctcccctgcacagaatgccattctgcatgtgcagcgtaaaattatgttacctagctctgataagaaggaaggtcctgcaacgtgtaggctgatcgtttctggaaaccaagttggttgtgttctcggcaagggtggtagtatcatagctgaaatgaggaagctgtcaggagcatttatagtagtgttgagcaaagacaagattccaaggggtgtcccagagcatgatgaagttatccaggttacagctaggcttcgtaaccatcttttccgggacagaatgcctgcagtggggcctaatatgcggccaccttttggtttgttagatccccagtttggtccattttcgggaaaccatgaatcatcatccctgtttcataaagatttcatgggacgaccattggatgggattgctgctccttggacagtgaagggcatgcgggatctcagcgatccagtgtcaatatccgatatccctggagcagggcatagagaagctggtggatttccaggtcctggtcagccatctatgatgccaaacttgactgcagaggtcttggttccaagattagttatccctgttctctgcggtgaggatggaggttgtttggacaggatccgtgagttttctgaagctaagataactgtcgctgagcctacagccgatgcgatggacactgctgttttgatatctggcacaccagagcagatgcatgcagcccgaagtctcgttgaagcattcgttatgagcgaatcttttggcccatgacatgtccagaggcagtgaagctagcgatcatatgtgggttcatgtttgtgaatatgcgtcccagtctgtctgcagagtgacatatgctccaagtggctaattaggctgaatattcgactggagtcctctttctgtctgcagagtggcaaatgctccaggttgctagttatatataatcttccaaagtcgtcactttgactctgagatacggagcacattttgagtagccgcagaactatgttgcttatgcaaggaagtattgtttggacccggaaaggctctaactttatttttgttgtactgatgttgtgagatgtaccaccattgtctgtatttcagtccggctttatatctgtattttatggtattgctaccatagttaatatgacggtaaggcagcgaaaaggcgtaagccggggaatattaaatagtagaaatctttatctttatatatactaatataatgaagcagatgcaaactc

SEQ ID NO: 4737 - DNA, 1928 bp, Zea Mays
gctagctgtggcctgtgggcctgtgccaacatttaggcggcggcaagaaggtgacgcgggtagaggtgacgctggacggcggcgagacatggctggtgtgcgacctcgcccacccggagaagcccaacaagtacggcaagtactggtgctggtgcttctggtccgtcgaggtggaggtcctcgacctcctcggcgccaaggagatcgccgtgcgcgcatgggaccagtcgctcaacacccagcccgagaggctcatatggaacctcatgttttcatctgttcctggtggattatttattctgacgatggcgctcgaacaactgtttcgctgtttggcacgcacggcacaggggatgatgaacaactgctggttcaaggtgaaggtgaacgtgtgccgtccgcacaggggcgagatcgggctggtgttcgagcacccgacgcagccgggcaaccaggccggcggctggatggcgcggcagaagcacctggagaagacggcggaggcggccgcgccggggctgaagcgcagcacgtccacgcccttcatgagcaccaccgacggcggccaccagcagctcaccatgtccgaggtgagcaggcacgcgtcgcgggactcggcgtgggtcgtcgtccacggccacgtctacgactgcaccaggttcctcagggaccacccgggcggcgccgacagcatcctcatcaacgccggcaccgactgcaccgaggaattcgacgccatccactccgacaaggccaaggctctgctcgacgcctaccgtgtcggcgagctcatcgccaccggcacctccgacagctccgtccacggcggctccgcgctgccgtcccacctcctcgcgcccatccgcgaggccgccagggccccggcccccgcgctctccggcccgcgcgacaaggtccgctgccggctcgtcggcaggacggagctgtcccgcgacgtccgcctcctccgcttctccctgccgtcgccggaccaggcgctcggcctgcccatcggcaagcacgtctccgtctgcgccagcatcgacgggaagctgtgcatgcgggcgtacacgccgacgagcgtggcggacgaggtcggccacttcgacctcctcgtcaaggtgtacttcagggacgagcaccccaagttccccagcggcgggctcatgacgcagcacctggactcgctcccgctcggctcctgcatcgacgtcaagggcccgctcggccacgtcgagtacaccggtcgcggcggcttcgtgatcgacggcagggaccgctacgcgcgccgcctcgctatggtctgcggtgggagcgggatcacgcccatgtaccaggtcatccaggcggtgctgcgcgaccagccggaggaccgcacggagatgcacctcgtctacgccaaccggacggaggacgacatcctcctccgcgacgagctcgaccggtgcgcggccgagtacccggaccggctcaaggtgtggtacgtggtcgaccaggtgaagcgccccgaggaggggtggaagtacagcgtcggcttcgtaacggaggacgtcctgcgggagcacgttccggaaggcggtgacgacacgctggcccttgcctgcgggccaccgccgatgatccagttcgctgtctcccccaacttggagaagatgaagtatgacatggccaattctttcgtcgtgttctaagaccgtagcagcaaattaataatttcatagatatctgtatgtagtgccaccaaaactagccgacttgccagcgtaaattttcgtgagatgcatgggaatcatatattggaaggattatagtgaagtcgtgtacacttaacactattgtactctgctatagcctagaatttgagagaagcacatagacaggccattcatgtttttcccctttagaatctggaactttgaaatatgagg

SEQ ID NO: 4738 - DNA, 4490 bp, Zea Mays
accccaccatccttcccgagtcgtcctctccattttcccctcccgattcgccccgtcttcccaagccctacgccagcgacaaaaccctaaccggtgggatggcgacgcagccgccctctaccgccactgccgcggttgacctctatgagacggcctcgcagccggacgcccccgccgccggcgacgcctacacttttctcgagttcaacacgcagggggacgacttcgactaccccgacttcccggagctctctcaaccacctccccgatccacgccgctgacgtcctccatccccggcgccggcacgtcgtcctcgtcgtggcctgccccaccgcctccgccgtccgacgcggcctccccggaacccgatctcacgtctcaagacgtccacaccccgccggcctcctcctcctcgccgtcgccgcgttccgcctccaaggcgcgtccgtcggctgcggcggatgggctcgcctccggggttgtcgcacttaacttcgaggatcctgtaggaaccggcgccgtggaggacgggtacgactacagcaagggagacttcgtggaacacgcatgccggtactgcgggatccacaaccctgcgtgcgtggcgaggtgcaacgtaccctcctgccgcaagtggttctgtaactcgcgggggaacacttcaggctcccacattgtcaaccacctggttagggcaaagcataaggaagtatgccttcacaaggatagccctttaggagaaacaattctcgaatgctacaactgtggttgtcggaatgtatttcttcttgggtttatctcagcaaaggcggagaatgttgtcgttcttttatgcagagaaccatgtttaagtgttaatgcactgaaggatatgaattgggatctcagtcagtggtgccctcttatcgacgacaggtgttttttgtcgtggcttgtaaaggtaccttcagagcaggagcagctaagagctcgccaaattagtgctcaacaaatcaacaaagtggaagagctctggaagacaaatcctgatgcatctcttgaagatcttgaaaagcccggtgtagatgatgaacctcagccagttgttttgaagtatgaagatgcttaccagtaccaaaatgtttttgcaccactgataaagcttgaggctgattatgacaagatgatgaaagagtcacagagcaaggataatgtaactgtccggtgggatattgggttgaacaagaagcgtgtagcttactttgtctttccaaaggaagacaatgagttgaggcttgtgcctggagatgaactacgcctgagatatcctggtgatagctcacatcccacatggcaatctgtcggacatgtgattaagctcactgcacaagaggaggtggcacttgagcttcgcgctagtcagggggtgcctactgagctaaatgttggattcagtgtggattttgtttggaagagtaccagttttgataggatgcaaggagcgatgaaaacttttgctgtggacgagacaagtgtcagtggatacatataccatcaccttttgggacatgaagttgagcatcaaataatacgtaataccctaccaagacgctttggtgcacctggacttccagaactaaatgcttcccaggttttagcagttaaaagtgtcctgcagaagccagttagtttgattcaaggtccacctggcactggaaaaactgtcacatctgctgcaattgtgtatcacatggcaaaacaaggtcaaggacaggttcttgtatgtgccccaagtaatgttgctgttgatcagctggcagagaagataagctcaactggtctgaaggttgttagactgtgtgcaaaatctagagaagctgtttcgtctcctgttgagcatctcacacttcattatcaggttaggcaccttgatacttctgagaagagtgaattgcacaagctacaacaactgaaagatgaacaaggtgaattgtccagcagtgatgagaagaaatacaaggcactaaagcgtgccactgaaagagagatactgcagagtgccgatgtcatttgttgcacctgtgttggtgctggagatcctcgtctttcaaacttccgtttccgacaagttcttattgatgagtccacacaggctacagagccggaatgtcttattcctttagtgcttggtgtcaagcaggttgtccttgtcggtgatcattgtcaactgggtccagtcatcatgtgcaaaaaagcagcccgtgcagggttagcacaatctctctttgaacgccttgttatccttggagtgaagccattcaggctacaggtccagtatagaatgcatccttgcctctcggagttcccatccaactgcttctatgaaggcacactgcaaaatggagtgactgttaatgagaggcaatcgtctggaattgattttccttggcctgttccaaatcggcctatgttcttctatgtgcagatgggacaagaagagatcagtgctagtgggacatcctatctcaatagaactgaagctgcaaatgttgaaaaaattgtaacaacatttttaagaagtggtgttgtaccaagccagattggagttatcacaccttatgaaggacagagggcttacatcgtaaattacatggcaaggaatggctctcttcgccaacaactttacaaagaaatcgaggttgctagtgtagactcatttcagggtagagagaaagactacattattctatcttgtgttagaagcaatgagcaccagggaatcgggtttctcaatgatccgcgcaggttaaatgttgcgctaactcgtgcacgttatggcatagttattcttggtaatccaaaagtactaagcaagcagccactttggaatagcttgttgacacattacaaggagcatgagtgcttggtagaaggacctctgaacaacttaaagcagagtatggtgcaatttcagaagccaaaaaagatatataatgaccggagattgttcctgggcggtggtcaaggtgttatgcatggaactaactttggggctggggcctcaagccaagcagcagataagagaagtggcagagggaaaggtgcctgtccaaggactaagtcaaacattccgtgatggtttttctattggtgggatgtcacaggacttctttgtagacgattttaagagccaagggtcacatgtgccatacaatattgctgaattttctacccaggcttctcaaggtggttatggtgttgagtttactcaagcgccccaatctggatactctgggaattatatgaaccaaaattcacatcctggatactcccatattggtacaacaaatgacattgtatctcaggatcacatggcccatggatctcatgggatgtttacacaagcgggatataatgatccctcacaagatgagtcgtctcagattcattatggaatggctgccgctggccctctacagtcgcagggcatgatgaaccccttgtactctcaatcctatgctcactacaacacccaaccacagtctcttcaacctccgccccagtgataatgaaagcttgtgataggatgaagccaaattttggaagtttggtgggttgcatcttttggcccacatgtgcacttctccgctgtttcagactcgatggtgcatagacatcagatgcaagcaatgaaggcacactatgtattggctatttatcggggcaggcttgactgaggggcacaaggattgcaacgtatcattgatcgttgtagttcactgcccactttggccacaggagaggtcatatcatcgagaggttgacggcactaccctcatccctcacctgtatagaaaggcaatcggggccaatagtggtacgatgtgaatattccaggatttgctgccattcagaaagtcaagttgcagcaactgcatgcctccatggtaccatgaagacacgcccgtagagtggctttgtatagaggtgctataggcgaggtggacaaccctttcggatatcgcacatggcaagatatttacattgacattttgtatgcacctgatatggttttgatatttatgccacaaatcatttaggtggtgatgcaagtagtttgttgtgattggaaatttgggagtgttcgtgaaagcaagtttgatcctgaaatcttatgggggaatggttgagtgggggttattttgttgtgaaacaggtgtctttgaaaagaaacctttccaggagtgatttcatcaagattgattgttagaatagacattagtaactgttataaatggttaacatggtcaccaaagcggtacgtctagttaacatggccacaaagacattaatcaactttgagacgaatgacaggacctaaaggggcatgttctttggcaaagtagaagtggtcgtctcgcagttttatagcaagacggccattgacttatggttccaccactcccaccccttcccatctttggtagattttctatcatatctcatattt

SEQ ID NO: 4739 - DNA, 1711 bp, Zea Mays
ccgacattccgcgaaaagcaccgatatgcaacacggcaacacgcaaaggggggaaaaaactcggaaatcaaacccctgatccgatcgagcccgcacactcccaccgtttcccactcccatggggctcctcagctccctgccgccccatcgccggggcgccttctcgggtggcggatggcagtggtcgttcctcgacgtcgtatggggggtcttcctcatcgccgtggtcgtcttcctcgcgctcgtcttcactccgcggcgcggggaccccatcctaaccaccccctctgtcgcccgcgccggcggcacggtgccgccgtgcgctgcctctgaggtggacctcctcccctgcgaggacccgcgccgcagctcccgcctcagccgcgagatgaactactaccgggagcgccactgcccaactcgtggcgaggcgctcgcgtgccttgtgccgccgccccgaggttaccgcattcctgtgccctggcccgagagcctccacaagatctggcatgacaacatgccttatggtaagattgctgaaagaaaaggtcatcaagggtggatgaagcatgaaggttcgtacttcatttttcctggcggtgggactatgttccctgatggagctgaacaatatattgaaaagcttagccagtatgttccaatgaaaactggtgtcatcaggactggtcttgatatgggatgcggggttgctagctttggtggatttttgcttaaggagaatatcatgacactttcatttgcaccaagagattcacataagtctcaaatacaatttgctttggagagaggagttccagcatttcttttgatgttgggcactcgccgtcttccttttccagcacagtcctttgattttgtccattgttcccggtgtttgataccttttactgcctataatggatcttactttattgaagctgaccgtctgctaaggcatgggggctatctaatcatatcaggcccccctgtgagatggaagaatcaggagaaggaatgggatgaacttcaagcaatggcaggagctttgtgttacaaattgatcactgtagatggtaatactgccatttggaagaaacctgctgaggcttcatgtcttcctaaccaaaatggatttggccttgatctttgtagcaccgactatgatccagatgaagcatggtacttcaagttgaataaatgtgtcagtaaaatttcagtggcggaagagacagctataggttccattctcaagtggccagataggctgtctaaaccttctgctagggcatcagttatcaacaatggagcaaacttgtttgaagtagatagtcagaagtgggttaggagagtgtcatattataagaaatcgcttggtgtgaagcttgggagcacaaacatacgcaatgtcatggacatgaatgcattctttggaggattcgcagccgctataatatctgatcctgtatgggttatgaatgttgttcctggtcagaagccattgacacttggagttatttatgataggggccttataggggtttatcatgactggtgtgaaccattctcaacgtatcctcgtacctatgatcttattcatgctgatgcaattgactccttgataagtggcccgatttcaggcactagcagcttctacggtactctcttgttatatagaatgtcagataattgacatcacttcattcactttgct

SEQ ID NO: 4740 - DNA, 1925 bp, Zea Mays
gccggtagtggcagctgcgaacgggacaaggcaagggcgcaaggccagcatggcattgggcgtggtcggccttgtgctggcgtcgccactcttgttcttgctgacaagggcggcatggatcactgtctcctgctactacctcacgccggcgaggatccggacgatcctggccggccagggcgtccacggcccgccgccgcgtctcctcgtcgggaacctccacgacgtctctgctctcgtctccagggccaccgccggtgacatgagctgcctgagccacgacatcgtcggccgccttctgccccattacgtccagtggtccaagatgtacgggaggcggttcgtgtactggtacgggagcgagccacgggtgtgcgtgacggacgcgggcatggtgcgggagctgctgtcgtcgaggcacgcgcacgtcaccggcaagtcgtggctgcagcggcagggcgccaagcacttcatcggccgcggcctgatcatggccaacggcgccacgtggtcgcaccagcgccacgtggttgcgccggcgttcatggctgacaggctccgaggcagggtcggccacatggtggactgcgcccggcggacggtgcgcgcgctgcgggaggcggtggcgcgggacgggaacgaggtggaggtgggcgcgcacatggcgaggctcgccggcgacatcatcgcgtgcactgagttcgacacgacctacgacacggggaagcgcatcttccggctcatcgaggagctgcagcgcctcacggcgtgctccagccgctatctctgggtccctggcagccagtatttcccaagcaaatacaggcgggaaataaagcgtctgaacggggagctggagcagctgctcaaggagtccatccagcgcagccgcgagatcgcggacgagggccggacgccgtcgtcggcgtgcggcatggggctcctcggtatgctgctggccgagacggagaagaacaggaacaggacgaagtctagcaacggcgagctgggcctggggtacgacgcccagacgatgatcgacgagtgcaagacattcttcttcgcggggcacgagacgtcggcgctgctcctcacctgggccatcatgctgctcgccacgaacccttcgtggcaggacaaggcgcgcgccgaggtagcgagtgtctgcggcgacgccccgcctaccgccgaccacctccccaagctcaccgtgctgcagatggtgatcaacgagacgctccggctgtacccgccggcgacgctgctgccgcggatggcgttcgaggacatcactctcggctccggcgccgacgagctgcgcgtgcccaagggcgcgtcgctgtggatccccgtgctggccatccaccacgacgaggccgtgtggggagcggacgcgcacgagttcaggccggaccggttcgcgcccgggcgggcccggccgtgggcgggccgcttcctgccgttcgcgtcgggcccccgcaactgcgtcggccaggcgtacgccatggtcgaggccaaggttgtgctggccatgctgctcgcgagcttccgcttcggcatctccgacgagtaccgccacgcgcccgtcaacgtgctcacgctccgcgcgcgccacggcgtgcccgtgcgcctgctgccgttgacgtgacgcgggcggcagtaggcctccctcgcacttgggcttgtgttcttggttcttgaaaatttttgggacatgtgtcttttagtttgtgcacttgactagatggcagtagcctggcatgtagaaaataacataatactacttggtgtcaacgttttgttggcggtgtttttttttgtcactgagaaacaatcttgcataatgtatgaacaatccaaaagtgtaaatcagtaaatgtcgctgagggcagacggcataggaaattcgccggaattgattttcc

SEQ ID NO: 4741 - DNA, 2638 bp, Zea Mays
tttcgcttcacacggccggctctccgctccgccagacccggaccggcaccacgccacggctccggccatcacgcgccgcgcacaccatgaccacggttgcgcaccatcaccacctcgccgctgccaccgtgctcttcttcgtcgcattcaccatggcgcctctcgccgccggggaccccgtgggccagctctgcggtaccagcggcaactacacgctcaacagcacctaccagggcaacatccgccgcctcgccgccacgctgccgaagaacgcctccacctccgcgacgctcttcgccacggacaccttcggcgccgtcccggacatcgtctacgcgctcgcgctctgccgcggcgacaccaacgcctccgcctgcagcggctgcgtcgccgccgcgttcctggacgcgcagcagctgtgcgcctacaacaaggacgccaccatgttctacgacccctgcctcctccgctactccaaccagaacttcctcgccgaccccagcagcgatggccgcgggaccgcgctcatcctcatgaacacgcagaacgtcaccgcgcggttcaaggtgttcgacgccgccgtcgccgcgctcctcaacgccaccgccgcctacgcggccgccaattcgtccaaaaggttcggcaccggggtcgaggcgttccagaacttcgacagcaaccgcccgaggatctacgggctggcgcagtgcacgccggacatgacgccggccgactgccagagctgcctctcgggtattatccagacggggcccaagtatttcagcgggaagcagggtggcaggattcttagtgtgcggtgcaactacaggtatgagcagtacccgttctttacaagcaccccactgcttcagctggcggagcctaccgtgggggccccggcgcccgcgcccgcggtggtcaacggaactccaacgccaccgacgaccggaggagcacgacgaggaaataaaactggtagagttttagccattacactgcctatagttgctgcagtgctagctactgtagtactttgttcatgcctctggaggaggaagaggaaaacacaagggaagtcgtcactaccagatacaactaaccctgaggacatacaaagtattgattccctcattattgatgtgtcaactctacgagctgcaacagaaaactttgctgaagccaataagctcggtgaaggaggttttggttcagtatataagggaatcctccccgatgaccaggaaatagcagtgaaaaggctctcgcagacttctagacaagggatggaggagctgaaaaacgagcttgtgttggttgctaaactgcaacacaagaatttagtgaggcttgtcggggtttgcttggaggaccatgaaaaattgcttgtctatgaatacatgcccaacaaaagccttgacaccattctatttagtacggttacgtactcagcgtctttgagcaacagagaaatacctgaaaatctacagcatgcatttatgagttctttttttttctctctctctctctctgcgactgacagatcacgagagatgtggagagctggattgggggaagaggtttaagatagttaacgggatcgcccgtggcttgcagtaccttcatgaagattctcaggtgaagataatccacagggatcttaaagcgagcaatgttctgttagacaatgacttcaaccctaagatctcggattttggcttagcaaggctattcggaagtgagcaatcacgagatgtcaccaaccgcgtcgtcggaacctatggatacatggcccctgagtacgccatgcgtgggcactactctgtcaagtccgacgtgttcagcttcggcgttttaatcctagaaatcgtcaccggaaggcgaaatggtggctcctatagctctgaggaatcggccgatctccttagtctggtgtgggagcactggacgacggggacattggtggagatcatggatccatccttgagcagccttgctccacgagacctgatgttgaagtgcatccacatcggcctcctctgcgttcaagatgaccatgaggacaggccgatgatgtcgacagtgaatgtcatgcttagtagcagcacggtgaccctccaagctccatcgaggccggcgttttgcttcccgaagagtggcttcaactcagagatcaactcagaagtgtacccgccaggagcttatcagtccgcgagcaggtcgcccatgtcgctcaacgacgtctcaatcactgagctcgagcccagatgatccatgcatggcggcgatgaattgatgattctcttcttcgaaggagtttctgttgagtgtttgtgttttaccgcctgggccgagcacgtaagtgtgacccgtagtatacaatgcaaaaccagtagactaccaatatggcgaaatataacgcctattagtcgtccaattacttatgtatctgtatggcattgcctttcaaatgtagaggagagtagaaatgagaacgtggataagagaatgtatcggtggttcctgattcctgaaaatgtcatcccagtattggttgaaaaaaagaaggagcaaagaatggtggtgctaggaagcaagttaatccgaaagacggcaagtgaagctttcggaagggccttgg

SEQ ID NO: 4742 - DNA, 2839 bp, Zea Mays
gtagttgtagcatttgttttcacatgcgaagaccaatccgttgcttttgcggatgaaagacaccattttacgcatttatacatggctcaagaattaactgtactccagcaatttatcgtaaatttctccatcgttttcaagtgttgtcgtggtcctgtgctcccctgtatttggtggtttggctcctcgggatgttcttcctgtcccctccggaccaagagtccaaaacccaaacccaagcacccaaatccgaccccaaaatgcctgcttctcagtgatgggatgacggatgctcccctcctgctgtagccccagctcgcgccgcctcgctttctcccttcgcgacgccggcatttcgtggccggcggcgccgccttatcctctgccattcttgtgggcaagataagcagcgggttgtttttctttaccgttgtttctgaaggtttcggggccagttcagccggatcccggctcttcggacgccgccgctccctcggcctggtggagctggtggagcggaggggaggggcgatccatacggaggtggcggttccatttcttgttttcctggtttttgttcatgtagattgcccaagcaactgtggacctgaacagacttctgtggtgctgttgaagaattagtgccactctcccgatggataaacagaggaacaccaagaatggggaagtggggaacaatgtgttttgcagaatgattcttgatcatattgctggggacttatgtctcaatgaggagaacgtgccttgcaatactccaagaaactccgttcactccgcgtttggtggcaggacagttgcttctactagcggcagcttcaatactgattcggtgagcccaggcgagtatgtcagggatcctggatccctactgagtttacaaccgtggatttttagaagaaacggctcacagaactacagggaaagtgtgcgcgcgagtggtaaaggcaagaatctggtcgatgtccttggagagggtcaagctgtcgaaatctctccaaggagcccttgtcttggttctgggcctggaagaggctgtggagctcttaggagcagaagatctcgtaggaatttgatgaagccacttgtgccaatggaaaactcctacgttccacagctttacagtgagaacttcgaaatggaagaatgcacgtttgctccagctccctccccagcttctactaggccattcgttgtgacagacggtacaaggataattagtaaatcacgctatgagccagtacctctgccctttaatattagattagacgaggaatgtagaggcacctcattgatgccaggaagtatgattggaattgctcctctacctgagctgaagaaactcaaacatgaggccagagatttacacgatgcaaggcttggtctgtctggttctcagcgaagtagcaaatcgcatgaacaagcaggtctacgtgatcgactcctactattctctactggggtgagcatcggtattctgtcaaataagaaggaatttgatacattgaagggcacactgaaacaaatggagaacttagttcaggatttacaagatgagctggagatgaaagagggtttaactgtgaaagaattacttaatgaaacatctatcgaacatgatgatgataatagcaaactacacggagttgatccagagccaatgagcaaaattgaggctgagcttgaagctgagctagcaaggctggaactgaatatcacttcgataagtttagaagaagaaacatctgaaatcaatggggccgacgatgattccattggtgacattgtttgcggggaactgaaagctgatacggtccctcgcgacctcacagagtacagcagtgaatctgaccatcgcagggacagcagggaaagctccccaggttacacatgtggagccaactgtcctgtctcgccaagagatctcagcatccgtcttcacaaggtgatccaacacaggctcgaagaccgaatcaaggagctcgagtcagcaatcgtgcacggacagaagcagacgcaactgcagatgatggtgactgaccaaatggtctccgaccgaatacgctcgaacagcgagtcaggttcttcttcaggccagggaagtcccattttcatacaagaaaccagctcgctggcagaaccgtaccgtctaaacctatctggagacgcgctcgaagcttacgatgaagcttacgaagagttcatgaggatcgcggactccccttacaccacaagtccaaacgggaagccacaggcaaccgaagattgcttggcagaccgtggtctagtctggggaatggaggacagctctaggaagctgagagaagtgcccacctgggagagagctctaaggagtgcagatcctagcagagatcacgagcgcgatagggatgagtcaggtggcgacgacgacgatgacgactgtgaagtgctgatccggcagatcgtagagagaactagacaaggttcacatgtactcgttaacgcccagaaacttctgttttctgtggaccaatagtccactgcactatacaccattgctttttgagagatatatagcttgtatgtagtgtcgaattattgttgagaaaaaagggaattgttgattgttttgaggcttcttcacgtgatgtcttctcaatgcttacagaatgcaagttggaccccttgctgctgccatcttaaggtatcattttctgaattttcgtctgggtcaggctgaggcatgctcgaacaaggacattcatatgaacatgctaaagatccagccagaatctgcgctggaaaccagaaccagatgaaagtgagaagcacatgattt

SEQ ID NO: 4743 - DNA, 1073 bp, Zea Mays
gcggcgtgttccgtgccttgccttcccaagcaagcaagcaagctttcataatgtagtattgtagtagtttcattcaattcacgagtcacgacgttcacgagtcacgccagcatcaaagccgtgcgtgagtaggccgatctcttggatgatggaggaggaccagcagatagtcgctggcgtggacgccgcggcccgaggcggcggcggcctgggccgcgcgggagccgtctttctcaccgcgacctgcgccgcagccacctacagcgcggcggcggcaggggacgtcccgtccgtggcgttcgtggtcgccagctacggcgcgctcctgcttctgctgcgctccctgcgcgcctacgagctggcgccgccggaggcggctgcacgcagggaagcgctcaggcgcagggtctgggcgctctgcacgctactcagcgtgatgttcgcgtggaaggttgcgagcgtcgtcgcgacgccgtggccggtcgctgtcggcgtctgggccgcggcggccgtcacatctgccgctgggttcgttctgctgttccgccagcagcagcgtcgccaatgaacgagtgatcggtggatgtgtgttccgtctgtaacttgtaagctccaagagcctcaaatagttacaggcatgggatgggatcgatgcctggcctggttgctagctgctgtacgtatcatctcaaactttctgatggtgatacgcaattcgatcaagtgcctgatcgacgagctttgttttattatttttggcaggttagattgcccgtgcaatgcatgcatgcacgatgatgatgttgtgcatatgttattgaaggttttccgtgtgctggtgctggtgctggcctggtgatacggaggaagaaatgctttcaatctactgtacccggccggctggcgtttggtttccccgagataatagaatctgcagcgggtggggtatccgaggaaatacgctgcgagctcctgattgtgagattctgccagtagaaaatgcgctgttcatttttacttcttcgcgaagaaggaagaaggaacagctcatctatcagtgttctcagtattag

SEQ ID NO: 4744 - DNA, 2537 bp, Zea Mays
ctttaacaagttgcagcaagaaacttctttcgaggagcgaaacatgcacctcgacattggtggcggcatttattttgttcttgatttgcctttcccaatagctacgatgcacactactattcaactccgcacaccatttctgctcagtgagcataattcacacaccaataatcttgctcctagcagcggccaaaggcagatccatggaggttatgactggggcactaccgagcctcatccccaagcttgctaatctagtcgctggtgagtacaatctgcaaaagggtgtcaaaggggatatcatgttcctccaagaagagcttgagagcatgagggatgcactcgaggagatctccaaggttccagcagaccagcttcccaacagagataagatttgggctaggaacgtgagagagctctcctacgacatagaggttagtattgacgcattcatggtgcagtccaagggtaggaagctggttaaacaatatggtctccagaaagtcattggtatgtgtctcgactggttgttgcagcccaagattcgccataaaatggctactgaaattaggacgatcaaaaggcgcatcgttgaggtgcacgaacgacatatcaggtatgaaattaatcttggtcctgataagcttggcaatgctgctgtagatccccgaatatttggtcagtacacagagctgaaagagcttgttggcatcgacgagacaagagatgagttaatcgatattatgatggaagggaatgtagtccccatgaagcaaggcaagataatttccattgttggatttggggggcttggaaaaacaactcttgctaatgctgtttatgagaagataagagcattgttcgattgctgtgcatttgtttcagtgtctcaaactcctgacttgaagaaattattcaagagtttgctctatgatcttggcaagtacatcaatgaagaatcgttggatgagagacagctcatcaatgtactcagagaattccttcaagagagaagctgaaggctttgtccaatatgtgaaacaagggaagagcctatttgagcatggagagagttacttcaatgaactcataaacagagagtgccaaacgggattgggagcctaacaagccttgaagaactcacatttctaggcatttatgactccactgtggacattatagaagagctgggccagctaacggagctacgggtactgcatatcgttctttttggtgaatggaacgacaagctggtggagtgcctgcacaagctgaaaaagttgaaatatctatatatcaaggaccgcagtggtcaacttaacattggtggtttggatgcctgggtagcccctccaaatctccaaatattgaatacgcgatcgggttgctggttcaccacactgtcagcatcagcatggatgaatccatctcttcttcaggacctctccttatctaccaccgtgagggagttgcagcaggatgacattataattcttgggagtttgccagctctccgctatctaaatctgatgattgttggtgaggatttgggagttcacaatgaaatccatggggaatgcattgttggtgctggtttgttcccatccctagtatactgccagctctggggaaatgtggcgcctatagtgtttcagcgaggagccatgccacggctcagaacccttgactttcggttatctgttcaagaggtgagaggaatcaacggcagggatggtggtatcgacttgggcctcaggaacctgccatcactccagaaggtttgggttcatttggaccctgagggcgctaacaaggcagaggtgaaggaactggaggctgagttgacgcgtgccatcaaaattcatccaaatcatcctcagctgtatggaattcaggatgaagatgcagatgatgaatgatgcactggagaaaagattaccaattatgcagaagctagtgcactttcaactttcatggcactggtctcaaggattgtctgattcagatggattacttctgtttctgtctcagattcagaatgtgatgtccaccccaatcatccaacccttaaggaacatggtgtcatggtgatgaagatgtaaggagccaacttgtgatcatccgctggaaaatggaagagcaatctggtggcctgatggactagcaaacctggaaaattaaagcgtagtgtggcaatgtggcagcctggggaaacctgcaactggcgatctggaggtctggagagaacaaaacgccagtgacagttggggcttaggcttggcaagcctaatattgcaatagcacatatgaataacggttgtttgttgcgactggaagtcctgtttggtttttttacatagtgtttgctgttttcactcatgcctttttcttttgtgttttgtgtactgtcttgggtgttcctagggttgccaaaccgtttttgtgacaccccagtgtcacctagggtttctctcaaaatgccaaaccaagaaccatcattttatgtgaatcaaattaagcatgagcatcaaattgac

SEQ ID NO: 4745 - DNA, 2950 bp, Zea Mays
agacgtgccatcgtccagtcgcaccatcacaagagccgacaaaggcggccaaaggcagatccatggaggttatgactggggcactaccgagcctcatccccaagcttgctaatctagtcgctggtgagtacaatctgcaaaagggtgtcaaaggggatatcatgttcctccaagaagagcttgagagcatgagggatgcactcgaggagatctccaaggttccagcagaccagcttcccaacagagataagatttgggctaggaacgtgagagagctctcctacgacatagaggttagtattgacgcattcatggtgcagtccaagggtaggaagctggttaaacaatatggtctccagaaagtcattggtatgtgtctcgactggttgttgcagcccaagattcgccataaaatggctactgaaattaggacgatcaaaaggcgcatcgttgaggtgcacgaacgacatatcaggtatgaaattaatcttggtcctgataagcttggcaatgctgctgtagatccccgaatatttggtcagtacacagagctgaaagagcttgttggcatcgacgagacaagagatgagttaatcgatattatgatggaagggaatgtagtccccatgaagcaagtgtctcaaactcctgacttgaagaaattattcaagagtttgctctatgatcttggcaagtacatcaatgaagaatcgttggatgagagacagctcatcaatgtactcagagaattccttcaagagagaaggtatttaattgttattgatgacatatgggacatctcagtctggaaaatgattagatgtgctttaccagacaatgatatcgggtacattattgttacaaccacacgcatttccgatgttgctgaaaaagttggtggtgcttataagctaaaacctctttcattgaacaactctcgagaattaatgtataagataatatttgggaacgaaaatagagaaaacactaaagacaaagaaatatgtttagatgaggagcttgcagaagtatcaaataaaatactaaagaaatgtgccggtgtgcccctagctattattacgatggctagtgtactagcttgtaaagcaagaaatgaaatggagtggtatgaggtgtacaactctattggtgttggcattgagaacaatctagatgtggggaatatgagaaagattttgtcattcagctattacgatatggcatcccatctcaagacatgtttattatacttaagtatgtttccagaagattataaaattgagaaagatcgtttgatatggatgtggatagctgaaggctttgtccaatatgtgaaacaagggaagagcctatttgagcatggagagagttacttcaatgaactcataaacagagagtgccaaacgggattgggagcctaacaagccttgaagaactcacatttctaggcatttatgactccactgtggacattatagaagagctgggccagctaacggagctacgggtactgcatatcgttctttttggtgaatggaacgacaagctggtggagtgcctgcacaagctgaaaaagttgaaatatctatatatcaaggaccgcagtggtcaacttaacattggtggtttggatgcctgggtagcccctccaaatctccaaatattgaatacgcgatcgggttgctggttcaccacactgtcagcatcagcatggatgaatccatctcttcttcaggacctctccttatctaccaccgtgagggagttgcagcaggatgacattataattcttgggagtttgccagctctccgctatctaaatctgatgattgttggtgaggatttgggagttcacaatgaaatccatggggaatgcattgttggtgctggtttgttcccatccctagtatactgccagctctggggaaatgtggcgcctatagtgtttcagcgaggagccatgccacggctcagaacccttgactttcggttatctgttcaagaggtgagaggaatcaacggcagggatggtggtatcgacttgggcctcaggaacctgccatcactccagaaggtttgggttcatttggaccctgagggcgctaacaaggcagaggtgaaggaactggaggctgagttgacgcgtgccatcaaaattcatccaaatcatcctcagctgtatggaattcaggatgaagatgcagatgatgaatgatgcactggagaaaagattaccaattatgcagaagctagtgcactttcaactttcatggcactggtctcaaggattgtctgattcagatggattacttctgtttctgtctcagattcagaatgtgatgtccaccccaatcatccaacccttaaggaacatggtgtcatggtgatgaagatgagccaacttgtgatcatccgctggaaaatggaagagcaatctggtggcctgatggactagcaaacctggaagtaagtacaaacaaaacacgagacagagacacagagtcgggcctaagatttagcaaaactgatgctgggttgggtatgtatgccctgtttggtgtgctctgatcagaggatgacatttacagaattaaagcgtagtgtggcaatgtggcagcctggggaaacctgcaactggcgatctggaggtctggagagaacaaaacgccagtgacagttggggcttaggcttggcaagcctaatattgcaatagcacatatgaataacggttgtttgttgcgactggaagtcctgtttggtttttttacatagtgtttgctgttttcactcatgcctttttcttttgtgttttgtgtactgtcttgggtgttcctagggttgccaaaccgtttttgtgacaccccagtgtcacctagggtttctctcaaaatgccaaaccaagaaccatcattttatgtgaatcaaattaagcatgagcatcaaattgac

SEQ ID NO: 4746 - DNA, 3015 bp, Zea Mays
aaccccatatctctagtggcaatccagtagcgcgccgcctctggccgtccgccgtcgtcgccctctccctcgtcctcgcccgtcgcacgtgttgtgtgatccagcggccaaaggcagatccatggaggttatgactggggcactaccgagcctcatccccaagcttgctaatctagtcgctggtgagtacaatctgcaaaagggtgtcaaaggggatatcatgttcctccaagaagagcttgagagcatgagggatgcactcgaggagatctccaaggttccagcagaccagcttcccaacagagataagatttgggctaggaacgtgagagagctctcctacgacatagagcccaagattcgccataaaatggctactgaaattaggacgatcaaaaggcgcatcgttgaggtgcacgaacgacatatcaggtatgaaattaatcttggtcctgataagcttggcaatgctgctgtagatccccgaatatttggtcagtacacagagctgaaagagcttgttggcatcgacgagacaagagatgagttaatcgatattatgatggaagggaatgtagtccccatgaagcaaggcaagataatttccattgttggatttggggggcttggaaaaacaactcttgctaatgctgtttatgagaagataagagcattgttcgattgctgtgcatttgtttcagtgtctcaaactcctgacttgaagaaattattcaagagtttgctctatgatcttggcaagtacatcaatgaagaatcgttggatgagagacagctcatcaatgtactcagagaattccttcaagagagaaggtatttaattgttattgatgacatatgggacatctcagtctggaaaatgattagatgtgctttaccagacaatgatatcgggtacattattgttacaaccacacgcatttccgatgttgctgaaaaagttggtggtgcttataagctaaaacctctttcattgaacaactctcgagaattaatgtataagataatatttgggaacgaaaatagagaaaacactaaagacaaagaaatatgtttagatgaggagcttgcagaagtatcaaataaaatactaaagaaatgtgccggtgtgcccctagctattattacgatggctagtgtactagcttgtaaagcaagaaatgaaatggagtggtatgaggtgtacaactctattggtgttggcattgagaacaatctagatgtggggaatatgagaaagattttgtcattcagctattacgatatggcatcccatctcaagacatgtttattatacttaagtatgtttccagaagattataaaattgagaaagatcgtttgatatggatgtggatagctgaaggctttgtccaatatgtgaaacaagggaagagcctatttgagcatggagagagttacttcaatgaactcataaacagagagtgccaaacgggattgggagcctaacaagccttgaagaactcacatttctaggcatttatgactccactgtggacattatagaagagctgggccagctaacggagctacgggtactgcatatcgttctttttggtgaatggaacgacaagctggtggagtgcctgcacaagctgaaaaagttgaaatatctatatatcaaggaccgcagtggtcaacttaacattggtggtttggatgcctgggtagcccctccaaatctccaaatattgaatacgcgatcgggttgctggttcaccacactgtcagcatcagcatggatgaatccatctcttcttcaggacctctccttatctaccaccgtgagggagttgcagcaggatgacattataattcttgggagtttgccagctctccgctatctaaatctgatgattgttggtgaggatttgggagttcacaatgaaatccatggggaatgcattgttggtgctggtttgttcccatccctagtatactgccagctctggggaaatgtggcgcctatagtgtttcagcgaggagccatgccacggctcagaacccttgactttcggttatctgttcaagaggtgagaggaatcaacggcagggatggtggtatcgacttgggcctcaggaacctgccatcactccagaaggtttgggttcatttggaccctgagggcgctaacaaggcagaggtgaaggaactggaggctgagttgacgcgtgccatcaaaattcatccaaatcatcctcagctgtatggaattcaggatgaagatgcagatgatgaatgatgcactggagaaaagattaccaattatgcagaagctagtgcactttcaactttcatggcactggtctcaaggattgtctgattcagatggattacttctgtttctgtctcagattcagaatgtgatgtccaccccaatcatccaacccttaaggaacatggtgtcatggtgatgaagatgagccaacttgtgatcatccgctggaaaatggaagagcaatctggtggcctgatggactagcaaacctggaagtaagtacaaacaaaacacgagacagagacacagagtcgggcctaagatttagcaaaactgatgctgggttgggtatgtatgccctgtttggtgtgctctgatcagaggatgacatttacagaattaaagcgtagtgtggcaatgtggcagcctggggaaacctgcaactggcgatctggaggtctggagagaacaaaacgccagtgacagttggggcttaggcttggcaagcctaatattgcaatagcacatatgaataacggttgtttgttgcgactggaagtcctgtttggtttttttacatagtgtttgctgttttcactcatgcctttttcttttgtgttttgtgtactgtcttgggtgttcctagggttgccaaaccgtttttgtgacaccccagtgtcacctagggtttctctcaaaatgccaaaccaagaaccatcattttatgtgaatcaaattaagcatgagcatcaaattgac

SEQ ID NO: 4747 - DNA, 3290 bp, Zea Mays
tgactatgctaacattcaatcgtccactccaatcaagacaaccccatatctctagtggcaatccagtagcgcgccgcctctggccgtccgccgtcgtcgccctctccctcgtcctcgcccgtcgcacgtgttgtgtgatccagcggccaaaggcagatccatggaggttatgactggggcactaccgagcctcatccccaagcttgctaatctagtcgctggtgagtacaatctgcaaaagggtgtcaaaggggatatcatgttcctccaagaagagcttgagagcatgagggatgcactcgaggagatctccaaggttccagcagaccagcttcccaacagagataagatttgggctaggaacgtgagagagctctcctacgacatagagcccaagattcgccataaaatggctactgaaattaggacgatcaaaaggcgcatcgttgaggtgcacgaacgacatatcagagctgaaagagcttgttggcatcgacgagacaagagatgagttaatcgatattatgatggaagggaatgtagtccccatgaagcaagtgtctcaaactcctgacttgaagaaattattcaagagtttgctctatgatcttggcaagtacatcaatgaagaatcgttggatgagagacagctcatcaatgtactcagagaattccttcaagagagaaggtatttaattgttattgatgacatatgggacatctcagtctggaaaatgattagatgtgctttaccagacaatgatatcgggtacattattgttacaaccacacgcatttccgatgttgctgaaaaagttggtggtgcttataagctaaaacctctttcattgaacaactctcgagaattaatgtataagataatatttgggaacgaaaatagagaaaacactaaagacaaagaaatatgtttagatgaggagcttgcagaagtatcaaataaaatactaaagaaatgtgccggtgtgcccctagctattattacgatggctagtgtactagcttgtaaagcaagaaatgaaatggagtggtatgaggtgtacaactctattggtgttggcattgagaacaatctagatgtggggaatatgagaaagattttgtcattcagctattacgatatggcatcccatctcaagacatgtttattatacttaagtatgtttccagaagattataaaattgagaaagatcgtttgatatggatgtggatagctgaaggctttgtccaatatgtgaaacaagggaagagcctatttgagcatggagagagttacttcaatgaactcataaacagaggtatgatccaacccatatataaccaagctggcatgatatatgaatgtcgtgtgcatgatatggtgcttggtcttatatgttccttgtcaaatggagaaaattttgttacaacattaaatggtttgggtcacggatctccatcaaatatgattaggagattatcagttcaaaatggcaatgagagtcaagctatgactctgcaaaccagaaacttgcagcaagtaaggtcggttgttgcctttccggatgccaccgctagtgtagttacggtcttgaggagcttccgagttctacgtgtactagatttacaagattgtgacctttcacaatgttgcagcctgaagtaccttgggaatctatttcacttgaggtatctaggactatgtaacacaagtattacacagctccctgaagaaattgtaaacttgcaacttctacaaatactggatgtatggaacaataaaatgtattgcctaccctcaactattgtgcagctgagatatttgatgtgcctttacattgatggttttactagagtgccaaacgggattgggagcctaacaagccttgaagaactcacatttctaggcatttatgactccactgtggacattatagaagagctgggccagctaacggagctacgggtactgcatatcgttctttttggtgaatggaacgacaagctggtggagtgcctgcacaagctgaaaaagttgaaatatctatatatcaaggaccgcagtggtcaacttaacattggtggtttggatgcctgggtagcccctccaaatctccaaatattgaatacgcgatcgggttgctggttcaccacactgtcagcatcagcatggatgaatccatctcttcttcaggacctctccttatctaccaccgtgagggagttgcagcaggatgacattataattcttgggagtttgccagctctccgctatctaaatctgatgattgttggtgaggatttgggagttcacaatgaaatccatggggaatgcattgttggtgctggtttgttcccatccctagtatactgccagctctggggaaatgtggcgcctatagtgtttcagcgaggagccatgccacggctcagaacccttgactttcggttatctgttcaagaggtgagaggaatcaacggcagggatggtggtatcgacttgggcctcaggaacctgccatcactccagaaggtttgggttcatttggaccctgagggcgctaacaaggcagaggtgaaggaactggaggctgagttgacgcgtgccatcaaaattcatccaaatcatcctcagctgtatggaattcaggatgaagatgcagatgatgaatgatgcactggagaaaagattaccaattatgcagaagctagtgcactttcaactttcatggcactggtctcaaggattgtctgattcagatggattacttctgtttctgtctcagattcagaatgtgatgtccaccccaatcatccaacccttaaggaacatggtgtcatggtgatgaagatgtaaggagccaacttgtgatcatccgctggaaaatggaagagcaatctggtggcctgatggactagcaaacctggaaaattaaagcgtagtgtggcaatgtggcagcctggggaaacctgcaactggcgatctggaggtctggagagaacaaaacgccagtgacagttggggcttaggcttggcaagcctaatattgcaatagcacatatgaataacggttgtttgttgcgactggaagtcctgtttggtttttttacatagtgtttgctgttttcactcatgcctttttcttttgtgttttgtgtactgtcttgggtgttcctagggttgccaaaccgtttttgtgacaccccagtgtcacctagggtttctctcaaaatgccaaaccaagaaccatcattttatgtgaatcaaattaagcatgagcatcaaattgac

SEQ ID NO: 4748 - DNA, 3680 bp, Zea Mays
tcatcccattccccgccccagatcacgcccaccgctgtcctgttcgccttccgccgtgccatcccatatccaccgtgctccccaccctccctactcctccccgttgggtgctgacctttttccctctcttacggaaatcatgcttcatctggtgatgttcttaatatggagcaacggataagcttatccgtgtgtcagtttctctaatatctaagtagggtttcccaccgtcccccgttacgtctagtatgccattagttttaggctgtgtctgatccattaatggcactgcaaccaagacgtgccatcgtccagtcgcaccatcacaagagccgacaaaggcggccaaaggcagatccatggaggttatgactggggcactaccgagcctcatccccaagcttgctaatctagtcgctggtgagtacaatctgcaaaagggtgtcaaaggggatatcatgttcctccaagaagagcttgagagcatgagggatgcactcgaggagatctccaaggttccagcagaccagcttcccaacagagataagatttgggctaggaacgtgagagagctctcctacgacatagagcccaagattcgccataaaatggctactgaaattaggacgatcaaaaggcgcatcgttgaggtgcacgaacgacatatcaggtatgaaattaatcttggtcctgataagcttggcaatgctgctgtagatccccgaatatttggtcagtacacagagctgaaagagcttgttggcatcgacgagacaagagatgagttaatcgatattatgatggaagggaatgtagtccccatgaagcaagtgtctcaaactcctgacttgaagaaattattcaagagtttgctctatgatcttggcaagtacatcaatgaagaatcgttggatgagagacagctcatcaatgtactcagagaattccttcaagagagaaggtatttaattgttattgatgacatatgggacatctcagtctggaaaatgattagatgtgctttaccagacaatgatatcgggtacattattgttacaaccacacgcatttccgatgttgctgaaaaagttggtggtgcttataagctaaaacctctttcattgaacaactctcgagaattaatgtataagataatatttgggaacgaaaatagagaaaacactaaagacaaagaaatatgtttagatgaggagcttgcagaagtatcaaataaaatactaaagaaatgtgccggtgtgcccctagctattattacgatggctagtgtactagcttgtaaagcaagaaatgaaatggagtggtatgaggtgtacaactctattggtgttggcattgagaacaatctagatgtggggaatatgagaaagattttgtcattcagctattacgatatggcatcccatctcaagacatgtttattatacttaagtatgtttccagaagattataaaattgagaaagatcgtttgatatggatgtggatagctgaaggctttgtccaatatgtgaaacaagggaagagcctatttgagcatggagagagttacttcaatgaactcataaacagaggtatgatccaacccatatataaccaagctggcatgatatatgaatgtcgtgtgcatgatatggtgcttggtcttatatgttccttgtcaaatggagaaaattttgttacaacattaaatggtttgggtcacggatctccatcaaatatgattaggagattatcagttcaaaatggcaatgagagtcaagctatgactctgcaaaccagaaacttgcagcaagtaaggtcggttgttgcctttccggatgccaccgctagtgtagttacggtcttgaggagcttccgagttctacgtgtactagatttacaagattgtgacctttcacaatgttgcagcctgaagtaccttgggaatctatttcacttgaggtatctaggactatgtaacacaagtattacacagctccctgaagaaattgtaaacttgcaacttctacaaatactggatgtatggaacaataaaatgtattgcctaccctcaactattgtgcagctgagatatttgatgtgcctttacattgatggttttactagagtgccaaacgggattgggagcctaacaagccttgaagaactcacatttctaggcatttatgactccactgtggacattatagaagagctgggccagctaacggagctacgggtactgcatatcgttctttttggtgaatggaacgacaagctggtggagtgcctgcacaagctgaaaaagttgaaatatctatatatcaaggaccgcagtggtcaacttaacattggtggtttggatgcctgggtagcccctccaaatctccaaatattgaatacgcgatcgggttgctggttcaccacactgtcagcatcagcatggatgaatccatctcttcttcaggacctctccttatctaccaccgtgagggagttgcagcaggatgacattataattcttgggagtttgccagctctccgctatctaaatctgatgattgttggtgaggatttgggagttcacaatgaaatccatggggaatgcattgttggtgctggtttgttcccatccctagtatactgccagctctggggaaatgtggcgcctatagtgtttcagcgaggagccatgccacggctcagaacccttgactttcggttatctgttcaagaggtgagaggaatcaacggcagggatggtggtatcgacttgggcctcaggaacctgccatcactccagaaggtttgggttcatttggaccctgagggcgctaacaaggcagaggtgaaggaactggaggctgagttgacgcgtgccatcaaaattcatccaaatcatcctcagctgtatggaattcaggatgaagatgcagatgatgaatgatgcactggagaaaagattaccaattatgcagaagctagtgcactttcaactttcatggcactggtctcaaggattgtctgattcagatggattacttctgtttctgtctcagattcagaatgtgatgtccaccccaatcatccaacccttaaggaacatggtgtcatggtgatgaagatgagccaacttgtgatcatccgctggaaaatggaagagcaatctggtggcctgatggactagcaaacctggaagtaagtacaaacaaaacacgagacagagacacagagtcgggcctaagatttagcaaaactgatgctgggttgggtatgtatgccctgtttggtgtgctctgatcagaggatgacatttacagaattaaagcgtagtgtggcaatgtggcagcctggggaaacctgcaactggcgatctggaggtctggagagaacaaaacgccagtgacagttggggcttaggcttggcaagcctaatattgcaatagcacatatgaataacggttgtttgttgcgactggaagtcctgtttggtttttttacatagtgtttgctgttttcactcatgcctttttcttttgtgttttgtgtactgtcttgggtgttcctagggttgccaaaccgtttttgtgacaccccagtgtcacctagggtttctctcaaaatgccaaaccaagaaccatcattttatgtgaatcaaattaagcatgagcatcaaattgac

SEQ ID NO: 4749 - DNA, 2257 bp, Zea Mays
atcaagccaaacaacccggatccccacgggccacgaccccaccaggccaccacgtatacttgcccacgttccccttcccctcgcatccgtttcgtccgtgcgccgccgccagcatcttctcagcccaggccccagacagagcaaaccccccctctaaaattcggttatatttgggctcccgcctccgccgtcgccctacagtcctacaccaggtgccgaggccttcgccggtcaagagcgcccagcagatccgccactgggtttttggatttggagacatggcggaagtggatgacaagctcaaggactacgagatcaggaaggagggagaggcagagatcctcttgcacaagaggaacgccgtcttttacaatcccgtgcaggttcacaacagagacatgtctattgctgttttaaggacctttattgccaagcgcaaggaagaacatgaagcgctggtggacaagaggaacacatcgcatggaaaagacaaactgagtgaaatatcctgtcaaaatggagaggatgcgtcaactggccagcaagatgaaatggaactaaataaagctgaagttcaaattgatgatctgtcaaaagaagcaacaaaacctccttggaaagtaaccagagaacttaagccaccacttgtcctcgaggctttggctgcaactgggttgcgatctctccggtatgcccgtgaagttgagggcttaggaaagatagttgctctggacaatgataaagcttccgtcgaagattgcaagcgaaacataaagtttaatggtgcttccactactagtaaggtggaaacttacttggttgatgctcgaattcacatgctgatgcatccaaaagaatttgatgtgactcagctgtacaggctgttgctgatggcggtttattgatgtgcactgccactgatatggcagttctttgtggtgccaatggagaagtttgttactctaagtatggttcattcccaaccaagggcaagtattgtcatgaaatggctttgagaattctcctagccagtattgagagccatgcaaatcggtacaagcgatatattgtgcctgttctctctgtgttcatggatttttatatccgtgtttttgttcgagtattcacttctgcaagtgaaataaagaatacacctctaaaactttcttacatatatcagtgtgttggctgcgactcttttcatcttcaatgtcttgcgaggactgttccgaagaagaataatggtgtgaagcatgcacctgcttttggacctgttgttcctcaagagtgcagtgattgtggaaagaaatttaatgtaggtgggccaatatggtcagctcctattcatgatcaagactgggtagtttctactttgacaggtgttaagtcaatgaaggatagatatcctgcgtatgataaaattacttcagttctaactactgtgtcagaggagctagatgacattccactgtttttcagtctccataacatagcaggcactgtcaagtgcacgtctccgtctctggttatgttccggtccgcagttctaaatgcagggtatcggatctcaagcacccatgttaacccacttggggttaaatctgacgccccttgggatgttatttgggacatcatgcgctgctgggtgaagaaccatcctatcaaggaacaggcacgtgactcacctggcacggtgatcctttcaaaatcgccaaagctagaagcagacttttccagagcagttgctgccctcggcaaatctggggcaaagaagacgaaacgattccttccaaacccagagcggcactggggcccgaaggtcagagcaggccggaagatcacgagcaaacacgtctctctgttgggccctgatgccatcaacgctgccgtgaacggcggcggcggcggtgactgccacagagaagggagcggtgccgcgccagatagtagcaatacagccccagaacccgaggggctggaggacgaaccctcgaacaaacgccagaaagccagcggcgacggggaaccagaaggacagaaggccagcgacggggaaccggcaagcgaagcttgatctgtttggtagtcgttgttgtgcctgtcagcctgtgcttttgctcgttttgtggcccgatgggtgttacctgttttattttgatgcaacgaattttgcttggttttgacagcctgtgggttttagatataagaaaagcaggctccagacccaggcctcgtgcgtgtcgagcctggcaacgtt

SEQ ID NO: 4750 - DNA, 1596 bp, Zea Mays
tgtttctcattcattcctattcaaaactaaatcttttggggtagtgatcaactatgacttccccactggtgttgaagactatgttcacaggattggcaggacaggaagggctggtgccactggtgttgcatatacatttttctgtgatcaggactcaaaatatgctgctgacctaatcaaaattcttgaaggggcaaaccaacaggtgccccgtgatttagaggatatggcttctcgtggtggtgggcgaggtaagaagaggaaccgttgggcatcccgctctgaaaggggtggtccacgatctgaactggattcaaggtacagcggcagagatggattagcatcttccgggagatcagagagtggtcgtggcagtcatggaagggatgattatggtagccgtggcaggtatgactctggtgaaactgatgggcgatctcgtaggtctgctagaggtcgcagtagaagtcgtagcccaagccccaagaggtcacaccatcatgaagctaggcgtagccgaagcaggagcaggagccgaagctgtagaaactttcgtgctagccgcagcaagagtcacagccctgttgctagcagtaggcatgaaaaggctgctgttatttcaggatctactcaacctaacttggggtatgcagagcacaaaagccctccaagatctcactctggggatgaccatgtgaaccaccctgatcaaaaggatgaccacatgggagatgggaagatggaaagggttgatcttgatcgctcgcccagcccacaatatgataagtctgctccatatagtcctgcgtacaatggcaaagccagtgactcgatgagccctaatgttcagccaaaggcagatgccaaatatgtcaaaccttctgggaaacctgagcctgcatctccattgcgccacagcaaaggcagagatgatgatgaaggtatcatagacgacgatggagagattgctgagggtgagatgatgatgaaggtatcatagacgaggatggagagattgctgagcgtgatttgcgtgcaagtgcagctgtgtagagaatggtaataactgacggagaatggcctgcatcttctgtgacaacaagactgttatgcaaactgcagtcgttcccatctgcaagagtccagaatgtagaaatgcatttgtgccattaaatgtctcgtaggacctatgataatacatctgccatatatgaacaaaaactgttgatgtatgtcctgttgtttgttaaacttcaatgacttgtgttctggtgtcttactgctagttctgttaagtgatttatgataaaacatattgtcaggtctggaagtgataaatttatgatacttgtcaggtctggaagtagtttattatattggcagctccctggttggagattcctaggattgcaaaacctggcttgtttgagagcaagggcattggaggggattgatccccttactatcttatagcctgatttgttgtgttgttttttctcgaggtgtttggttgcctgcatctggtcggattctgctttccagatgtaaaagacagtctagagcctggcatcacggatagcgtacggtacgaatttg

SEQ ID NO: 4751 - DNA, 3456 bp, Zea Mays
agctaaaaaaaaaacgcaagaaaacagggcaagaccacaaatccaaacccccgcatcgtcctcgtcgccgccacagagcccctcgtctcggccgcccttcgccgcctccgcggagcaggcatcgcaggagaccaaagatccggccagctctgatgtcaggagctagtggctcaaccgggcgcgcggccccgcggtacgccccggatgacctgacgttgctcaagccgtggcgcggcctcgtcgacggcaccaccggctacctgtactactggaacccggagacgaacgtcacgcagtacgagcggcctatgccccctgagaatcagctgcccccgcccccgcccccgttgcctcccccgcctccccggagccgcgaccggcgcgacaggtccagatcccgatcccgcacccctcccaggcgcgaccgccgcgaccgcgaccgtgacgacgagcatgcgtcctccaagacggcgtcttcccaccaccatccggctccgatagccgtcgccgactatccgtccaccgaggcataccgacgccgccatgagatcaccgtcacgggggataacgtgccggctccaataacttcatttgaggctggtggcttcccatcagaaattctgaaggagatgcgatatctgctccgagggggagctaatgtcgtatgctgcctcgcgcgcccttggccaatctataagtgagatgagctgagggcaggtcttgctgatggagctgccaaggtgggtgaacgctcgaggttgctcgcttcctccctggggggccgcccatggagcggaggagggccacccactcgtggcacccacggtggctgatttgtcgctctgcgtccaattcttggaaaaggctccttgcatggatgatgggcttcttctggggcttgacccatggaggtctggcccaggctgtcaacgcccatccatatataggatcgggtggcagctgctggaaggggccttgtggatcaacggtctatgcctgaatacaacgtgctggatttgcaagcccaacacctatccaagcgcagtcatggccaattgctatgcaaaatcaagatgtagtagctattgcgaagactggatcaggcaaaactcttggttatctacttcctggatttatgcatatcaagcgcctgcagaacagcactaggaatggtccaacagtgctagttttggccccaacaagggaacttgcaacgcagattctggatgaagctatgaaatttggaagatcatctagaatttcttgcacgtgcctatacggtggtgctcctaaaggtcctcagttgagagatttagatagaggggttgatgttgttgttgcaacacctggaaggttaaatgacattttggagatgcgaagggtaagtcttaagcaagtgtcatatcttgttctggatgaggctgatcgcatgctggacatgggctttgagccacaaatacggaagatagtgaaagagatacctcaccgtcggcaaacccttatgtacaccgctacttggcccaaggaagtccggaggattgcagatgatcttcttgtccatcctttacaggtgacaattggaaatgttgatgaacttgttgctaatagtgctattactcagcatatagaagtcataacaccctcagaaaaacaacggcgcctggagcagatattacgatcccaggtttcaggttcaaagatattaatattttgtaccaccaagaggatgtgtgaccaacttgcaaggacactcaccaggcagtttggagcttcagccattcatggtgacaagtcccaaagtgaaagggagaaggtcctgaatcattttagatctgggcgctctcctattttagtggcaactgatgttgctgcgcgaggtttggacatcaaagatatcagggtagtgatcaactatgacttccccactggtgttgaagactatgttcacaggattggcaggacaggaagggctggtgccactggtgttgcatatacatttttctgtgatcaggactcaaaatatgctgctgacctaatcaaaattcttgaaggggcaaaccaacaggtgccccgtgatttagaggatatggcttctcgtggtggtgggcgaggtaagaagaggaaccgttgggcatcccgctctgaaaggggtggtccacgatctgaactggattcaaggtacagcggcagagatggattagcatcttccgggagatcagagagtggtcgtggcagtcatggaagggatgattatggtagccgtggcaggtatgactctggtgaaactgatgggcgatctcgtaggtctgctagaggtcgcagtagaagtcgtagcccaagccccaagaggtcacaccatcatgaagctaggcgtagccgaagcaggagcaggagccgaagctgtagaaactttcgtgctagccgcagcaagagtcacagccctgttgctagcagtaggcatgaaaaggctgctgttatttcaggatctactcaacctaacttggggtatgcagagcacaaaagccctccaagatctcactctggggatgaccatgtgaaccaccctgatcaaaaggatgaccacatgggagatgggaagatggaaagggttgatcttgatcgctcgcccagcccacaatatgataagtctgctccatatagtcctgcgtacaatggcaaagccagtgactcgatgagccctaatgttcagccaaaggcagatgccaaatatgtcaaaccttctgggaaacctgagcctgcatctccattgcgccacagcaaaggcagagatgatgatgaaggtatcatagacgacgatggagagattgctgagggtgagatgatgatgaaggtatcatagacgaggatggagagattgctgagcgtgatttgcgtgcaagtgcagctgtgtagagaatggtaataactgacggagaatggcctgcatcttctgtgacaacaagactgttatgcaaactgcagtcgttcccatctgcaagagtccagaatgtagaaatgcatttgtgccattaaatgtctcgtaggacctatgataatacatctgccatatatgaacaaaaactgttgatgtatgtcctgttgtttgttaaacttcaatgacttgtgttctggtgtcttactgctagttctgttaagtgatttatgataaaacatattgtcaggtctggaagtgataaatttatgatacttgtcaggtctggaagtagtttattatattggcagctccctggttggagattcctaggattgcaaaacctggcttgtttgagagcaagggcattggaggggattgatccccttactatcttatagcctgatttgttgtgttgttttttctcgaggtgtttggttgcctgcatctggtcggattctgctttccagatgtaaaagacagtctagagcctggcatcacggatagcgtacggtacgaatttg

SEQ ID NO: 4752 - DNA, 3602 bp, Zea Mays
agctaaaaaaaaaacgcaagaaaacagggcaagaccacaaatccaaacccccgcatcgtcctcgtcgccgccacagagcccctcgtctcggccgcccttcgccgcctccgcggagcaggcatcgcaggagaccaaagatccggccagctctgatgtcaggagctagtggctcaaccgggcgcgcggccccgcggtacgccccggatgacctgacgttgctcaagccgtggcgcggcctcgtcgacggcaccaccggctacctgtactactggaacccggagacgaacgtcacgcagtacgagcggcctatgccccctgagaatcagctgcccccgcccccgcccccgttgcctcccccgcctccccggagccgcgaccggcgcgacaggtccagatcccgatcccgcacccctcccaggcgcgaccgccgcgaccgcgaccgtgacgacgagcatgcgtcctccaagacggcgtcttcccaccaccatccggctccgatagccgtcgccgactatccgtccaccgaggcataccgacgccgccatgagatcaccgtcacgggggataacgtgccggctccaataacttcatttgaggctggtggcttcccatcagaaattctgaaggagttgcatgcgagggaccaaggtcttcaagtatggcgagggaaatggatcgtgcacatgtgctccaatgcgatatctgctccgagggggagctaatgtcgtatgctgcctcgcgcgcccttggccaatctataagtgagatgagctgagggcaggtcttgctgatggagctgccaaggtgggtgaacgctcgaggttgctcgcttcctccctggggggccgcccatggagcggaggagggccacccactcgtggcacccacggtggctgatttgtcgctctgcgtccaattcttggaaaaggctccttgcatggatgatgggcttcttctggggcttgacccatggaggtctggcccaggctgtcaacgcccatccatatataggatcgggtggcagctgctggaaggggccttgtggatcaacggtctatgcctgagtgagcctccatggactctgttagagctttttctacttcgccttgtgtgcgcaagtctacacattgcgggaacattttatttatacaacgtgctggatttgcaagcccaacacctatccaagcgcagtcatggccaattgctatgcaaaatcaagatgtagtagctattgcgaagactggatcaggcaaaactcttggttatctacttcctggatttatgcatatcaagcgcctgcagaacagcactaggaatggtccaacagtgctagttttggccccaacaagggaacttgcaacgcagattctggatgaagctatgaaatttggaagatcatctagaatttcttgcacgtgcctatacggtggtgctcctaaaggtcctcagttgagagatttagatagaggggttgatgttgttgttgcaacacctggaaggttaaatgacattttggagatgcgaagggtaagtcttaagcaagtgtcatatcttgttctggatgaggctgatcgcatgctggacatgggctttgagccacaaatacggaagatagtgaaagagatacctcaccgtcggcaaacccttatgtacaccgctacttggcccaaggaagtccggaggattgcagatgatcttcttgtccatcctttacaggtgacaattggaaatgttgatgaacttgttgctaatagtgctattactcagcatatagaagtcataacaccctcagaaaaacaacggcgcctggagcagatattacgatcccaggtttcaggttcaaagatattaatattttgtaccaccaagaggatgtgtgaccaacttgcaaggacactcaccaggcagtttggagcttcagccattcatggtgacaagtcccaaagtgaaagggagaaggtcctgaatcattttagatctgggcgctctcctattttagtggcaactgatgttgctgcgcgaggtttggacatcaaagatatcagggtagtgatcaactatgacttccccactggtgttgaagactatgttcacaggattggcaggacaggaagggctggtgccactggtgttgcatatacatttttctgtgatcaggactcaaaatatgctgctgacctaatcaaaattcttgaaggggcaaaccaacaggtgccccgtgatttagaggatatggcttctcgtggtggtgggcgaggtaagaagaggaaccgttgggcatcccgctctgaaaggggtggtccacgatctgaactggattcaaggtacagcggcagagatggattagcatcttccgggagatcagagagtggtcgtggcagtcatggaagggatgattatggtagccgtggcaggtatgactctggtgaaactgatgggcgatctcgtaggtctgctagaggtcgcagtagaagtcgtagcccaagccccaagaggtcacaccatcatgaagctaggcgtagccgaagcaggagcaggagccgaagctgtagaaactttcgtgctagccgcagcaagagtcacagccctgttgctagcagtaggcatgaaaaggctgctgttatttcaggatctactcaacctaacttggggtatgcagagcacaaaagccctccaagatctcactctggggatgaccatgtgaaccaccctgatcaaaaggatgaccacatgggagatgggaagatggaaagggttgatcttgatcgctcgcccagcccacaatatgataagtctgctccatatagtcctgcgtacaatggcaaagccagtgactcgatgagccctaatgttcagccaaaggcagatgccaaatatgtcaaaccttctgggaaacctgagcctgcatctccattgcgccacagcaaaggcagagatgatgatgaaggtatcatagacgacgatggagagattgctgagggtgagatgatgatgaaggtatcatagacgaggatggagagattgctgagcgtgatttgcgtgcaagtgcagctgtgtagagaatggtaataactgacggagaatggcctgcatcttctgtgacaacaagactgttatgcaaactgcagtcgttcccatctgcaagagtccagaatgtagaaatgcatttgtgccattaaatgtctcgtaggacctatgataatacatctgccatatatgaacaaaaactgttgatgtatgtcctgttgtttgttaaacttcaatgacttgtgttctggtgtcttactgctagttctgttaagtgatttatgataaaacatattgtcaggtctggaagtgataaatttatgatacttgtcaggtctggaagtagtttattatattggcagctccctggttggagattcctaggattgcaaaacctggcttgtttgagagcaagggcattggaggggattgatccccttactatcttatagcctgatttgttgtgttgttttttctcgaggtgtttggttgcctgcatctggtcggattctgctttccagatgtaaaagacagtctagagcctggcatcacggatagcgtacggtacgaatttg

SEQ ID NO: 4753 - DNA, 1853 bp, Zea Mays
tccccttccgttccgtccgctgcatcctcgtcgtacgttctgtctgtctttctcgccccctctcgctctccgacggctggtcggccgccgccgccgtaagccgccaggtgctgaggctttcgttggtctcttcgccggggacgagcacccactagatggcaaatgaagagaagttgttcaagatgggaaatgcagatacagatactgctgcactgcacaatgaatgggatgatgctctctgtccgatatgcatggaccatccacacaatgctgtccttctgttgtgcagctcccatgacaaaggatgccgatcctatatatgtgatacaagctataggcattcaaattgcttagacaggttcaagaaaatgaaagtgaatgatggggacagtccttcacagtcaagctcatccatgcctaggggtacaagaaaccaaaatgttgtccacggatctcgttttggtcttactagagagagccgcagactacacatagacatatctgaacccaatgaagcttccaatcatcaaggtgccagccatagacctgctgccataggtggagaacaggaagataacagctacaatgaaggcacagatttgacattggaaggtcaagaggttgagatcaatggtacttcagagtcaagtgatatgtcaagcttaaaccaattgttgtgcccactgtgtaggggggctgttagtggctggaagatcatcgaagaagctagacagtatttggatgagaaatccagagcttgctcacgagaagcctgcatgttttctggcaactacagggagatccgtagacatgccagaagggtgcaccccactacaaggcctgctgatgttgatccatcaagacgccgtgcatggcaccgcctggagcatcagcgggagtatgctgatatagtaagtgcaatcaggtcggctatgcctggggcagttgtgtttggtgattatgctatcgaaggtggtgaaatgttttcacatgaccgggaaaccagtggcccaagtgaaccgagtgggtctcttctgacaacattctttctatttcatatgctcagcagtagtccgattagatcaggtgatgagccaggaggcacatcaaggggcctgagaaggcatagaagacgctatctgtggggagagaatttgttaagtcttcaatacaatgataatgatgatgatgatgatgatgatgatgatgatgatgagggggaggagggcgaaggagatgctgtagatgaagaagttcagagaccaaggagccgccggaggttcataagatcaagatcggaggagcgagtataatacattggtggcttgtggtaattacattcttcgctgctgtgaagttcttttgccgtgaacccatgatgactccttgcatggcagtggatgatgtgcttccttgcattgttaaaatgctgcgcacatccttgcaatcaaagacctaaaggcttgtggacctcaagttcaagtttagatgactcaaatgtgtttaacaccatccatgagaccctcttgaatccgacacttacggggaacactcgttcttatggcaaagctggactgatctcagcacaattacacaagtgatactagaagctagcttttggagatgctcgctccatcacagttggtgctgtcgctggtgcaccatgtctttttaccttatgcactgtgtgtcatctgcatttgttgtatattcttcacatattacattccattgagttcatgctgctactattctggttcatatcgggtgtgtttggttgcctggatatgatctggccagactcatgagacgcagctttattctgtttggttgcctgatcagcctcttcagcc

SEQ ID NO: 4754 - DNA, 3572 bp, Zea Mays
gcgtaatccctcgatggggacgacggacgagacggtcatacttcaactgccgcgtccccgaatattggctattttccaaccggcggcgcagccggtgacgcgcaggcgggcgggttcatctgacccttcgtcgactcgtggcagatgtgactttctgaggccggtgtgcctggacggtttcgtccatggcgtgcgcagtgcgcactcgcatcgcatggtattaatagtcattgcaagccaagaggagactagaaaagagaaggtggaagaacagcaggagagtcggaggaagcaagcttgcccatacgctggtacttatgtgctgatactactgcagccgcgctgcgagagaagaggagtgggagcacgtggagccaaaggggcgattctttgcttggccttcatttctcgcctcttccgcatctcgagttgtcgtgattaacaagacagcaagacctcggcggcggcaaacagtcgagcacctgcgagcgtctctgccaccgggactcaagaggcaatgccagcaccagccccaccaattcgtctgggacctccgactccctatatatcctctcatggatccaaagttgcacgcctacacatgtatgactggattgtgctaattcttttagctgtattggatggagttcttaatataatagaacccttccatcgcttcgtcggatcagaaatgatgacagacctcagataccccatgaagggcaatacagtgccattttgggctgtgccgataattggtatcattgggcctatggttatcataacagtgatatactttaagaagagaaatgtatatgatctgcatcatgccatactaggtctcctattttcagtacttattactgctgttttaactgatgcgataaaggatggtgttgggcgaccacgtcctgatttcttctggcgttgcttccctgatggaaaacctgagtataacaactttactacaggcgccatatgccatggccaggcgagtgttattaaagaaggtcataaaagctttccaagtggtcatacttcatgtaagtgacattattctttacaaatatagggattagtcccatgttattagagctaactgtttgggacatgtcctattttatgacgtgctaactacctcctcagcagtttagtgaatataataattgatgcctccttttctaggttctgatctaaatcagctaattgtatgggacaaggtgtttaatatgttttgtatacaatatattgtttatcaagttctcaagaaacaaatgtattgatggtttttccatttctatctgcccatgtgatccttttagccctttatgtcaaatactgcattcttccttcactcttccattgagtacggattaaaagttgcagtcagcttgacacaaaatattgctgctgcaagtgatagtatgaaattttaatagacataagtgttacaagtttgtggacaaatataggacctacaactaataaaaattgcttacctttgttgtgtctgtttattctcgtatttaaatcaattactcatataaatgctttgtaatctttatctgattgtgataaacctatgccccattcatactttttatcctttgggttgcacctttatgcatatttgacatttgtttagttaaaaccttagctcgagtcatgtgttaacatggaaatcaattatactcatcgcttctggcatatatgtacacgaggtctgcatagtggcacacattatgcagtgtaccttgtttgttttttatattaacaattctagaagttggttatgccaaaggtaggtaatttagcaacagatttaggaatttatttcatatgcgaactagattatttctcatgaaggcataggtgagtcatttagatgaagatttagagggttactttaggttatttttcataatggcagaggtggataattttgatatagatttcagggattacttaatatttttcaaaatgatgagatgtataattatttataaaacaaaatagatttaatgtcaattagtgacaatgataattagagtttatgaattgatgggtagatgttccttttttttgagttttgaggatttatctctttttctagtgcgtctaattaacatgggggttccaaaaagactcagtaattggtaatagtaagatcaatatttgttagaagagaataaaacaaaagctaaacgaacatttacacactttgcaagggccctaggactggcagtctccatctctgcattagtggctacctctactgccaaggcacaatcagtctccaatgtcgcacttcccttcatgctgtcttgtacccgcgtgtcgtgcgtcctgatcctagaaacagtaatattagcagatcatttgttagtacttggctgttcaatgtacttactacttttggctccaccttgaaatactatggcatgctagttcgcaatggtggtagtaatgctgctccatttggttccctctagccatacagtggcctcgatctggttctcagttcacttttacctcctaactgtttcaaaatctcatggaggtccattaacatttcgtagcacaaagttattgttctcttgagtctagaatataaacttttcaatcagctgttactgttggtggattactcaaagattttatgtttatcttagggtcttttgctggccttgggttcctttcatggtatttggctggtaaaatcaaagtattcgatcgtagaggacatgttgcaaaagtctgcattgtcctttcccctctgcttcttgcagccttagtggcagtttctcgagttgatgactattggcatcattggcaagacgtatgtactggcggattacttgggttcacggttgcttccatttgctacctgcagttttttccactaccatctgatgaaaatggactgtggccgcacgcatatttccgacacattcttgagccagagggtgacagccaagcgcaacccacgtacatgagccgtcgcagctcggttcagaacggttcctttcagtacagccctgacgcagtggaaatgaggagcacgagccaagcaatggattccatggaagctggccagagagcccaataatgatggaattaataggaacatcaatttagccacggaccgttgtaatgtaatataacgtcgttgtagcgcttagtacagcaagatcttgttcagatcccttattgtgtagtataacagttcctgaatgatggtcacgtttctgctggtcctccgaagactgaagcgcgactgattaccgcgttggcgtgatccggctggctgccatgtgactcaggcgatgaacaatgcaaatttaaaactcgttcggtgcgatggggttcgttgggactggggccattgccgcagaaccatgtccctctccctccacacacacacagcacagcggggcagatctgaatgtgaatggatcaatttcaggcacctgcgcatcatgaccaaattggtcctcctccctccctctgttccaaacagtacagtactcgtagttaactgggactggacgaaagcctgcaagctgacccgc

SEQ ID NO: 4755 - DNA, 2243 bp, Zea Mays
atgcttggcccggcttccctccatttcgaatttcaaaacccccagcgcctcctgcctgcgcagtgcccacccacccgctcccactccaaaggctccaaagccaaagcaggcgcacgcgccacgcgcacctctgtctcgtctctcgcccgctctccactcttcctcccaaagcctgccgccgcgtggggggttgcttgcttgctgcccgctcctctccctgctcctgtgtctctgccgcccaccgcttccgggaacaagtccggttgccgccgccgccgctctgtgcgagaggagggagggacggagcgggatgggagggtccgggaagtgggtcaagtcgctgatagggctcaagaagcagcccgagaaggaagactgcaagatgagcaacgtttccgtgcctgcccaggacaagctgcagctcccatcagtccacggcggaggattgcgaggcaagggccgcaggtggaagctgtggcggacctcctccggcgaccagggctccatgtggcgcggctccagaggcggcagccagcgctcggcggcgtcggaggcctcggacgacgcgtcctcggtggccgccgtccccgccgacccgttcacggccgccgtcgccaccgtcgcccgcgccccggccagggacttcatggccgtccgccaggagtgggccgccatccgcgtccagaccgcgttccgcgggttcttggctcggcgggcgctccgggcgctcaaggggctggtgcggctccaggcgatcgtgcgcgggcggcaggtgcggaagcaggcggccgtgacgctgcggtgcatgcaggcgctggtgcgggtgcaggcgcgcatccgggcgcgccgcgtgcgcatgtccaccgagggccaggccgtgcagaagctgctcgaggcgcgccgcacccagatggatatcctcagggaagccgaggaaggatggtgtgacagccagggaacacttgaacaagtgagggtcaagctgcagaagcggcaggagggcgcaatcaagcgtgagcgggctatcgcctatgcatattcgcagcaggccgacggtgctgccaaatgcaatccaccgaagcttacttccaatggactggtgaaccactccggcatgctgctcaagcaccagaacttagacaagggcaacggcaactggagctggctggagaggtggatggcagcgcggccatgggagaacaggctgatggaggagcacaactccagctccccggacttccggtcctccaagaactgcgaggactcctttggtgtgctcggcgacttctctgaaccgaactcagtgaaggtgcgcaagaacaatgtcagcaagcgggtctgcgcaaaacctccagggccaacacacgcccacggacatcatcagcgcctcaaggcccagtcgatctcgtctctgagcactgagctgcacaacgacgagagctccgcgtcctcctcgtcttgctttgcgtctacccctatatcattcacacttgtggcttcggagaagacagaggacagcgtcaggacgagacccaactacatgagcatgacggagtcgatcaaggctaagcagaaggcatgcagcgcccagaggacggtggcgctgaagcaatgtgatgataggaaagccatgagcgccgagctgaaggtcgctcaggtgtgactgtttcgtggaactccatgcagagatagatggagccgacttcgacatcctctctatgctaggatgttttgcttggtgtcttgccacattcttgagtggctcggtgctgcattcctgagttgtcctcctgttgctgggtgtctgattgttcaacttcttgttgtcagattgcatctttgttcactcattgtggctgcatctttgttcagccgttgtggctttgtcagtggtagagtctctgtaagatagttctttgagtagacaacattgtggatttctttcctgggtgttgatttcaggtcaaaaaagacaggataatttacaacgtcctgcttcccaagatagctctttgagcagaaaacattgtcggtactatgctgatgctgtggtcttaactggaagctggagccagtgtgctaaactattgcaatggttaatttccatctgacctcataatgtgaggtacttataatatataatgctctctaatgtgaggctgtaactagtaactacactctattgttctgcaaaactggggtcgggtctacagtctactcttagatgaataaatttttgtttg

SEQ ID NO: 4756 - DNA, 2667 bp, Zea Mays
ggggaaattttttcgtcgcggggacacgtatggggagctattccccggcggggaattccccgttgccatccctacttgtgtcctctaaccatgtcctgatgatggttttcttgctgttgtggtttggttcagtgattttttcagggtcagctgattgtcagtccttgcctcagatgtagaatcatgcatggctgttgcccgcttcgaggatgcacatgactgagttttgttagctttcagtgctactatttattttgtttgtggaactaaacattagctcatttgtaacttgattttaggaatgcaataaaccaccatgtctggcttactgagtctacgattgccataggtgatgatgaaggttgcattaaggtatgggatacccggtaacaatcttgctgcaacagttttgaagtccacgatgattacatttcagatatgacctatgtggctgactcaaatcagatactggccacaagcggggatgaaactttgtctatgaacaccctgcggaggaataaagtaaggtcacaatctgaattttcagaagatgagttggtatcctcggtgctaatgaaggtacacgatggagggagcgggaagagatgccaaccctttgagcggttacagaattggcaaaaccctgggaattgggtcgttcggtaaagtgaagatcgcggaacatatattgactggtcataaggtggcgatcaagattctcaatcgcaagaagatcagaagcatggatatggaagagaaagttaagagagaaatcaagatactgagattatttatgcatcctcatatcatacgcctttatgaggtgatagatacacctgctgatatctgtgttgttatggagtatgttaaatctggagagttgtttgattacatcgttgagaagggaaggctacacgaagaggaagcccgacacttttttcagcagatcatatctggtgttgaatattgccataggaacatggttgctcaccgtgatttaaagccagagaatcttcttttggattcaaaatgcaatgttaagattgccgattttggcttaagtaatattatgcgtgatggtcactttcttaagacgagttgtggtagcccgaattatgcagcacctgaggtcatatctggtaaactatatgctggtcctgaagttgacgtctggagctgtggagttattctttatgctcttctttgtggcactctcccatttgacgatgagaatattccaaaccttttcaagaaaataaagggtggaatatatacccttcctagtcatttgtcaccttcagcgagggacttgattcccagaatgctggttgttgatccaatgaaaaggattacaatacgtgaaatccgtgaacatgtgtggttcaagatccgacttccgcgctatttggctgtgccgcctccagacactgctcaacaagttaaaaaggtcgacgaggaaactcttaatgatgttattaagatgggttttgacaagaatcagctaattgaatctctgcaaaacagattgcagaatgaggcaacagttgcctattatttactcttggacaataggcttcgtacaaccagtggttatcttggatctgagtttcaagaatctatggactcatctttgtctcaagtaatcgctgaaacaccaacttcagcaactgaacttcgtcagcatgggttttcagaatctccaggttctggcttgaggcagcattttgcagctgaaaggaaatgggcccttggtcttcagtctcgagcacatccacgagaaataataagtgaagtgcttaaagctctgcaagaactgaatgtttactggaaaaagattggacactacaacatgaaatgcagatggagtcctggctgccttgagagtatgatgcataacagtgatagcttcagtgcggagtctgctataattgaaactgatgttttcatggagaaatcaaccccgacagtgaagtttgagattcagctttacaaaacgagggatgagaagtaccttcttgacctgcaaagggtcagtggatcacatcttctctttctggacttgtgttccgcctttctaactcagctgagagttctttgagcctgacatgattggcttcccaagcactccttgatgcacccagtggagtttcaagttacatttgagatgtacataatgaccatatataatcctccagtagattatattttctggagcatgtaatgtagacgttagaggcttgtcctggtttgccaagatggttgttacctaaggtcctaacaagaggccgcaggcgagcccagtccaattagatgatgtgaaaaatttttggcctttttttagtctttggacatgttatcaaattaaggaggtcgtgctagcacgatacccaaactaagaaataccccattgaaaactgaaaacaaagcttgctcgttcatactagtgtcaactctggcactaaagactggtgcttattttactccatagacagtaattagatgtcacattcacgtcacgtgcatattcatcacaactgttttaggtattatggattgcatacgttttcttttggatccttcgttctggtggggtgcactcttgttcgtttgtttttaatctataccagcttctaatacaatattttgtgtctatgaattgcagctgca

SEQ ID NO: 4757 - DNA, 2802 bp, Zea Mays
agaaagaatggaatccaccaagctttattttttttaaaaaaaagaaccctcaaagggaaaaaggctgcacactggaagacgaaggcaaaccctagtcgctactccaccgcggcgccaaccacctcgatcgggctccgattccgatggacttcgcggagctggaggccgtggagggcctccggtggccgtggcactcgtggccgccgactgctcccgccgccgcgtccctcgtcgtgcccacggccgtcctctgctcgccgctgcagcaccccacggcgcccgacctcctcccgctgctcccctacgcgccgctccgctgcgcctccccgggttgcggcgccgcgctcaacccgttctcgcgcgtgcaccacggctccgcgcgctggtcctgccccttctgcggcgccaccggcaacccgttcccgcgcctcctggcccccgacgcgctccccgccgagctcttccccacccactccagcgtcgagtactcgctgcctccggaccccgccgaggccgggggcccggggccacctgcgctcgtgttcgtgatcgatgcggccacggcggccgaggagctcgccgtgctgaaggacgaggtacgcagggtcgtgcaagggctgcccgaggggatcagggtggcgctcgtcactttcgctgcgtccgtatgggtgcacgatcttggatttgagggttgcgctcgagtggttgtgctcaacggcgagcgtgagctcgagtctgacaagatacaaaaacttctaggtgttcaccgttcaccatacaagaagttggctatgccaaggtccactgaagcacagcgatttttgctgcctgtttctgaatgtgaatttaacatcacatctgcaatagaggacctgagctccatgtctgcatgtccacgtgggcaccgccctttaagggcaactggcgcagcgatttctactgctattgctcttctagagggttgctgctcacccagtactggtggtcggattatggtctttacatctggtcctgcaacagttggtccagggtgtgttgtggaaactgatcttgggaaagcaattcgttctcatcgtgacatattcaatagcaacgcacctttgactgacaaagcacgtgatttctataagaaagttgcaaagaggttgacagatcatgcattagttcttgatctgtttgcttgctcccttgatcaggttggggccgcagagctgaggaatccaattgaagtgtcagggggtttaatggtgcatacagaatcatttgagtctgagcagttcaaaagctgttttaggcatatgttcaagcgtgaaggcgccaataaccttaatatgaacttcaatgcgacgattgaaatagtgacatcaaaggaggtgaagatttgtggcgcccttggtccctgcatttcccttcgcaggaaaaatagctccgttagtgataaggaaattggtgaagttcatgacaaggtaccgagctggtgatggtagttatcgcctaagggtaacgaccgttgcaagaaggtgggctgctcctcgatctcctgaaattgctgcagggtttgatcaggaagctgctgcagctgttatggccaggcttgctgtttacagggcagagacgtaccatgttagagatgttatacgatggcttgacaagatgcttatccgcttcactgctaagtttggaaactatgtttctgaagatccatctacatttcggctgtcaacaaacttctccttgtatccacagttcatgtactacttgcggagatcacagttcattgatgttttcaacagctctcctgatgaaactgctttcttcaggttgatgctgaatagggagggagttgtggggtctctaatcatgatccagcctactctattccagtactcatttgatggaccacctattcctgtgctgttagatgtcagctccatctctcctgatgtcattttactatttgattcatacttctatatcgtgattcattatggctcaaagattgctcaatggaggaagcttggctatcacaaggacccaaaccacgaaaatttgcggaagctccttgaagcaccagaagtagatgcagaggcactattggtagaccgtttccctgtgccaaaactcataaagtgtgaccagcatggtagtcaggccaggttcctgctcgctcgcttgaatccatctgtgacacagaaaacacagctttcagagggatctgaagtcattttcaccgacgatgttagtttgcaagtgtttattgaacacttgcaggagttggctgttcagggctagaaagtcatggagcttcaccatgtctctgctatttggtccacttgagatcctgaagatatggctttgagagggaccagacttcatatttgcagatgaagtttacttgcaagtttttattgaacacttgcagtaattggttgtgcaggattaacatgttcatgtggattatttatatgcaattttctgctcacatgcaaatactggggagctctactgcctggaggagtgagatctccctgagttgtacattgctcaagctccagtttgatgtaagccaattacattttactagttctgtatatcatgtggtattatccactgggaatgctggattttctccacaaatgattgttgtgcattccatccagttttggctgtatggtaaccaatatgggggatactttctgttttgtagactcattagtttgtatgcccctttacgcacaaaacaaagagataatgtagcctttctctgattctcaccacataacttccacataatcattggaa

SEQ ID NO: 4758 - DNA, 1636 bp, Zea Mays
tttcaggttctgatattagccatgtttaagagtttccggcgaatcaaactggataaaagtggagcaaaagttggttgctaaaggaaccaatagaacctcaaggcttcaaataacaactaacaagaaaggagttgtctggtttgatcaagtatcactcatgcctgaagacacatacaagggacatggctttcgcacagaacttatatccatgattttggatttaaaaccacgattcttgagatttcctggaggctgctttgtagaaggtggctggttaagaaatgcctttaggtggagagaatctattggtccatgggaagagagacctggacacttcggggatgtttggcattactggactgatgatggccttggatactatgaatttcttcagcttgcggaggacctgggtactgaaccaatctgggtattcaacaatggagtcagccacaatgatgaagttgatactgttgctattgctccttttgtaaaggatgtattggacagtatagaatttgcaagggggagtgcaaattcaacatggggctctgttagggctgcaatgggccaccctgaaccattcccagtgaaatatgttgcaataggaaatgaagattgtgggaaaaaattttaccgcggtaactacctcaagttctacaatgctataagacaggcctatccagacattcaaatgatttcaaactgcgatggttcatctacaccacttgatcatcctgctgatttatacgacttccatgtctataatgattctaagactttgttcaacatgaagagcacatttgacagaacatctcgtagtggacccaaggcttttgtaagtgagtacgctgtttggagaggtgatgcaggtagaggaagtcttcttgcttcattggcagaagctgctttccttactggactggagaagaatagtgacattgtttccatggcaagttacgcgccactattcgtaaacgacaatgaccagacgtggaacccagacgcaatcgtcttcaactcctggcagcattacggcactcccagttactggatgcagacgcttttccgcgagtctagtggtgctatgttccatccaacgacaatcagctccagctactcaggttcacttgcagcgtctgcgattacctggcaggactccgagaacagcttcctaagagtaaaggtcataaacttcgggtcagatgctgtgaccctgacaatctccacaagtgggctccaggccagtatcaacgctctgggatcaaccgccactgttctcacatcagcagatgtgatggatgaaaactccttcagcaacccaaccaaggttgtgccggtaaagagcgatctgagcaatgctgcagagcagatgcaggtcacgctggctcctcgctccttcagctcgttcgatctcgccctggctcagtccaagcttgtagcggagatgtgagctaggctggtacactagtatacaatacaacgtgtgaagtgtggtacacaaataccagcaaccacaggggttgccaagctgttgttagcatcttgaacacatggctttgtattgtgtataatgacatgatgctgatactaatctctattatataaagcactagtttctatgttgtcgtgctcccac

SEQ ID NO: 4759 - DNA, 2307 bp, Zea Mays
atcctgccttcggaagccactgctaaccgctttctctgcccttctctacctacataagcgcgagggagcacgcctcccggcctctcctcatccaattcctatgccctgcacccgcagacggggagctcgcgtcttccttcggatggtggatgcatgcatgcatgacacgccggcccaaccagaattgacaagtggaagcgtatgggtattaccagcaacgacgcggcccctcgtgccgtcctcctccgcttcttgtttctgctctgcataggctgcaaatgcctggcatcagaggtagaggccacccagacggcgaccctcgcggtggacgcctcgccgcagcttgctcggaagatccctgatacactgttcgggatcttctttgagatcaaccatgcaggggctggtggcatatgggctgaacttgttagtaacagagggtttgaagctggaggcctccatactccatcaaacattgacccatggtccatcattggagacgactcctctgtatttgtggagaccgatcgcacatcatgtttcagtcgaaacatcgttgctctcaggatggaggtcctttgcgataactgtcctactggtggtgttggtgtttacaacccagggttctggggcatgaacatagaagaaggaaaggtctacaatcttgttatgtttgttaagtcaccagaaacaactgacttgacagtttcactaacaagctctaacgggttgcaaaatctggcttcagctacagtaacagtttccggcgaatcaaactggataaaagtggagcaaaagttggttgctaaaggaaccaatagaacctcaaggcttcaaataacaactaacaagaaaggagttgtctggtttgatcaagtatcactcatgcctgaagacacatacaagggacatggctttcgcacagaacttatatccatgattttggatttaaaaccacgattcttgagatttcctggaggctgctttgtagaaggtggctggttaagaaatgcctttaggtggagagaatctattggtccatgggaagagagacctggacacttcggggatgtttggcattactggactgatgatggccttggatactatgaatttcttcagcttgcggaggacctgggtactgaaccaatctgggtattcaacaatggagtcagccacaatgatgaagttgatactgttgctattgctccttttgtaaaggatgtattggacagtatagaatttgcaagggggagtgcaaattcaacatggggctctgttagggctgcaatgggccaccctgaaccattcccagtgaaatatgttgcaataggaaatgaagattgtgggaaaaaattttaccgcggtaactacctcaagttctacaatgctataagacaggcctatccagacattcaaatgatttcaaactgcgatggttcatctacaccacttgatcatcctgctgatttatacgacttccatgtctataatgattctaagactttgttcaacatgaagagcacatttgacagaacatctcgtagtggacccaaggcttttgtaagtgagtacgctgtttggagaggtgatgcaggtagaggaagtcttcttgcttcattggcagaagctgctttccttactggactggagaagaataggtggaacccagacgcaatcgtcttcaactcctggcagcattacggcactcccagttactggatgcagacgcttttccgcgagtctagtggtgctatgttccatccaacgacaatcagctccagctactcaggttcacttgcagcgtctgcgattacctggcaggactccgagaacagcttcctaagagtaaaggtcataaacttcgggtcagatgctgtgaccctgacaatctccacaagtgggctccaggccagtatcaacgctctgggatcaaccgccactgttctcacatcagcagatgtgatggatgaaaactccttcagcaacccaaccaaggttgtgccggtaaagagcgatctgagcaatgctgcagagcagatgcaggtcacgctggctcctcgctccttcagctcgttcgatctcgccctggctcagtccaagcttgtagcggagatgtgagctaggctggtacactagtatacaatacaacgtgtgaagtgtggtacacaaataccagcaaccacaggggttgccaagctgttgttagcatcttgaacacatggctttgtattgtgtataatgacatgatgctgatactaatctctattatataaagcactagtttctatgttgtcgtgctcccac

SEQ ID NO: 4760 - DNA, 2401 bp, Zea Mays
gggacgggccccacgttcccgtgcgccgtggccctgcgcgggcggtaggcaggacagccaccgccgaacgaagtggcgcgctccggcaagcaactgcggccgtgccgtgccgcgccgcgacatgggcgctggccgtcccgtcccgtgccgacggggagctcgcgtcttccttcggatggtggatgcatgcatgcatggtagacacgccggcccaaccagaattgacaagtggaagcgtatgggtattaccagcaacgacgcggcccctcgtgccgtcctcctccgcttcttgtttctgctctgcataggctgcaaatgcctggcatcagaggtagaggccacccagacggcgaccctcgcggtggacgcctcgccgcagcttgctcggaagatccctgatacactgttcgggatcttctttgagatcaaccatgcaggggctggtggcatatgggctgaacttgttagtaacagagggtttgaagctggaggcctccatactccatcaaacattgacccatggtccatcattggagacgactcctctgtatttgtggagaccgatcgcacatcatgtttcagtcgaaacatcgttgctctcaggatggaggtcctttgcgataactgtcctactggtggtgttggtgtttacaacccagggttctggggcatgaacatagaagaaggaaaggtctacaatcttgttatgtttgttaagtcaccagaaacaactgacttgacagtttcactaacaagctctaacgggttgcaaaatctggcttcagctacagtaacagtttccggcgaatcaaactggataaaagtggagcaaaagttggttgctaaaggaaccaatagaacctcaaggcttcaaataacaactaacaagaaaggagttgtctggtttgatcaagtatcactcatgcctgaagacacatacaagggacatggctttcgcacagaacttatatccatgattttggatttaaaaccacgattcttgagatttcctggaggctgctttgtagaaggtggctggttaagaaatgcctttaggtggagagaatctattggtccatgggaagagagacctggacacttcggggatgtttggcattactggactgatgatggccttggatactatgaatttcttcagcttgcggaggacctgggtactgaaccaatctgggtattcaacaatggagtcagccacaatgatgaagttgatactgttgctattgctccttttgtaaaggatgtattggacagtatagaatttgcaagggggagtgcaaattcaacatggggctctgttagggctgcaatgggccaccctgaaccattcccagtgaaatatgttgcaataggaaatgaagattgtgggaaaaaattttaccgcggtaactacctcaagttctacaatgctataagacaggcctatccagacattcaaatgatttcaaactgcgatggttcatctacaccacttgatcatcctgctgatttatacgacttccatgtctataatgattctaagactttgttcaacatgaagagcacatttgacagaacatctcgtagtggacccaaggcttttgtaagtgagtacgctgtttggagaggtgatgcaggtagaggaagtcttcttgcttcattggcagaagctgctttccttactggactggagaagaatagtgacattgtttccatggcaagttacgcgccactattcgtaaacgacaatgaccagacgtggaacccagacgcaatcgtcttcaactcctggcagcattacggcactcccagttactggatgcagacgcttttccgcgagtctagtggtgctatgttccatccaacgacaatcagctccagctactcaggttcacttgcagcgtctgcgattacctggcaggactccgagaacagcttcctaagagtaaaggtcataaacttcgggtcagatgctgtgaccctgacaatctccacaagtgggctccaggccagtatcaacgctctgggatcaaccgccactgttctcacatcagcagatgtgatggatgaaaactccttcagcaacccaaccaaggttgtgccggtaaagagcgatctgagcaatgctgcagagcagatgcaggtcacgctggctcctcgctccttcagctcgttcgatctcgccctggctcagtccaagcttgtagcggagatgtgagctaggctggtacactagtatacaatacaacgtgtgaagtgtggtacacaaataccagcaaccacaggggttgccaagctgttgttagcatcttgaacacatggctttgtattgtgtataatgacatgatgctgatactaatctctattatataaagcactagtttctatgttgtcgtgctcccac

SEQ ID NO: 4761 - DNA, 2343 bp, Zea Mays
atttcctgttcctccgcctcgtctccgcctcccatcgccgcatcagatatccgcacaaaccaagccatcagcgccatggcgatctccacctggagcgcgcgccttctcctcacccctgcttcctcccgcgccaccctatcaccccctcgccctcccactacaaacccgctctcatcgttctttcctcgcaatcgtctccatttcgtgcgcccgcgcccgcgcccgccgtgcgcctacatctctgcgccagcgccgggcccggaggccgcatacgcgccgccttctctcgacgccaccgccgcggcagccgatgtcgccgctgcgatatcctcctccgacgcggtcacttgggccggcgtctgggcgctgctctcgcgacacagggcccgcatcgcggtctgcatcgccgcgctcgtcgcctgcaccacctgcacgctctccatgccgctcttctcagggaggtttttcgagaccctgattgggagggggaacgagccattgtggaggctcttatccaagattgcgatactgtacacactggagcccatcttcaccatcatattcgtgatcaatataactatcatctgggagcaggttatggcaaggctgcggagccagatatttcgaaggattctgatccaaaagatgttattttttgatcgtcacaaggttggtgaattgaccggtttgttgacatctgatttgggttccttgaagagtgttgtaagtgataacatatccagagatcgtggactgagggcactctctgagatcattggtacactttgtatacttttcacactatcaactgagctagctccagttcttgggctccttatggtgtccgtctccgtgctagttgctattttcaagaggtcaactgttcccacttttaaatcttatggaatcgtgcaagcacgcatatcagactgtgcatcagagacattttcagctattcgtactgttcgatcatttggtggtgaaaaacgacaaatttctttgtttgacaatttggcacatgcttaccaaaataatggcacaaaacttggagtgctgaaatctgctaatgaatcattaactcgagtagtcgtctatgtctccctaatggcactttacattcttggcggtagaaaggtcaatgcgggcaaattatctgttggaaccatggtatcttttattggttacaccttcacattaacctttgctgttcaaggagctgttaatacccttggtgatctgcgtggcacattggcttccgtagagagaataaattctattctttcagcgaaggacattgatgattcacttgcatatggtttagccaaagaacttgatggcaaagagtttgatgattccaatggagtgtatgaaaatggatctgttaacaaacatttcatgtcagagctgaaatcatccagtagctgtagtaatctagcctggtctggtgacattcgtctgaaagaagtccatttctcttatccattgagatctaatgtggagattttaaatggccttgaccttacaattgagtgtggaaaagtcacagcacttgtcgggcctagtggtgctgggaaaagcacagtggtacaacttctagcacggtattatgagccaactcaaggttccatcactgtcgcaggagaagacatccgtgtatttgacaaaagggaatggtctcgagtagtatctctagtcaatcaggggtatgatactcttgttggagagcgaggtagtctcctaagtgggggacaaaggcagaggattgcaattgcacgagccctcttgaaaaatgctcctattctaatacttgatgaggctactagtgcactggacgcgacaagtgagcgactcgtgcaggaagctctcaatcacttgatgaagggaaggacttctctggtcattgctcacaggttgagtaccgtacagaatgcacatcgaattgctgtttgttcagagggcaggataactgaactggggacacaccgagaactggttgctaagggaggcagttatgcatcacttgtcgggacacagagacttgctttcgagtaatcacacgtcaactgcgaggaacggatcgactgcaatgtaggggattctatatattactctattttccttcagggcccatcggaacataggaattctcgtggaaatcagaatgaatttcatgggtaaaatatagaaaacagaagatgaaaaaaaacccaccttctgaatgtggccttggttataggttgtttcttatccacagaagcaacacatgaatcagaaaacacatgtatgtatcgaactttataatatattaacctaaacaaaggacaacaaacttcttatcctcac

SEQ ID NO: 4762 - DNA, 2523 bp, Zea Mays
caacggatagccgctatttggctacgcgtgcaacaggcatatataatttcctgttcctccgcctcgtctccgcctcccatcgccgcatcagatatccgcacaaaccaagccatcagcgccatggcgatctccacctggagcgcgcgccttctcctcacccctgcttcctcccgcgccaccctatcaccccctcgccctcccactacaaacccgctctcatcgttctttcctcgcaatcgtctccatttcgtgcgcccgcgcccgcgcccgccgtgcgcctacatctctgcgccagcgccgggcccggaggccgcatacgcgccgccttctctcgacgccaccgccgcggcagccgatgtcgccgctgcgatatcctcctccgacgcggtcacttgggccggcgtctgggcgctgctctcgcgacacagggcccgcatcgcggtctgcatcgccgcgctcgtcgcctgcaccacctgcacgctctccatgccgctcttctcagggaggtttttcgagaccctgattgggagggggaacgagccattgtggaggctcttatccaagattgcgatactgtacacactggagcccatcttcaccatcatattcgtgatcaatataactatcatctgggagcaggttatggcaaggctgcggagccagatatttcgaaggattctgatccaaaagatgttattttttgatcgtcacaaggttggtgaattgaccggtttgttgacatctgatttgggttccttgaagagtgttgtaagtgataacatatccagagatcgtggactgagggcactctctgagatcattggtacactttgtatacttttcacactatcaactgagctagctccagttcttgggctccttatggtgtccgtctccgtgctagttgctattttcaagaggtcaactgttcccacttttaaatcttatggaatcgtgcaagcacgcatatcagactgtgcatcagagacattttcagctattcgtactgttcgatcatttggtggtgaaaaacgacaaatttctttgtttgacaatttggcacatgcttaccaaaataatggcacaaaacttggagtgctgaaatctgctaatgaatcattaactcgagtagtcgtctatgtctccctaatggcactttacattcttggcggtagaaaggtcaatgcgggcaaattatctgttggaaccatggtatcttttattggttacaccttcacattaacctttgctgttcaaggagctgttaatacccttggtgatctgcgtggcacattggcttccgtagagagaataaattctattctttcagcgaaggacattgatgattcacttgcatatggtttagccaaagaacttgatggcaaagagtttgatgattccaatggagtgtatgaaaatggatctgttaacaaacatttcatgtcagagctgaaatcatccagtagctgtagtaatctagcctggtctggtgacattcgtctgaaagaagtccatttctcttatccattgagatctaatgtggagattttaaatggccttgaccttacaattgagtgtggaaaagtcacagcacttgtcgggcctagtggtgctgggaaaagcacagtggtacaacttctagcacggtattatgagccaactcaaggttccatcactgtcgcaggagaagacatccgtgtatttgacaaaagggaatggtctcgagtagtatctctagtcaatcaggatccggtcctattctccgtgtctgttggagaaaatattgcttatggtctcccagatgatgttgtctctaaggatgagataataaaagctgctaaagctgccaatgctcatgaattcatcatctctcttccacaggggtatgatactcttgttggagagcgaggtagtctcctaagtgggggacaaaggcagaggattgcaattgcacgagccctcttgaaaaatgctcctattctaatacttgatgaggctactagtgcactggacgcgacaagtgagcgactcgtgcaggaagctctcaatcacttgatgaagggaaggacttctctggtcattgctcacaggttgagtaccgtacagaatgcacatcgaattgctgtttgttcagagggcaggataactgaactggggacacaccgagaactggttgctaagggaggcagttatgcatcacttgtcgggacacagagacttgctttcgagtaatcacacgtcaactgcgaggaacggatcgactgcaatgtaggggattctatatattactctattttccttcagggcccatcggaacataggaattctcgtggaaatcagaatgaatttcatgggtaaaatatagaaaacagaagatgaaaaaaaacccaccttctgaatgtggccttggttataggttgtttcttatccacagaagcaacacatgaatcagaaaacacatgtatgtatcgaactttataatatattaacctaaacaaaggacaacaaacttcttatcctcac

SEQ ID NO: 4763 - DNA, 2244 bp, Zea Mays
cccgcagccgcaggtcgcgccgtcgcggccgccccggtggactattccacccgccccacgcagaccacacccagtggctaggctcgcacggaaccgagcgcatgcagtgggcaagtcgcaagcgagagagcgcgctcggttttcttttcttactacttcccctgcacgtgcacggacgccactgctaactagctaatctagcagtcagcataggagactggttggagagaagagaacctcagtgcgcgaaaaaagaactcaagcctcaaggagggtatacgccgccgcgccgagtcgtccacgtccgaggaggaacgcacgcgctcacgcggcgccgatggatggaagcggtgccggcaccggcagcgccacgctgctgcggaagcggccgctgtccgtgaacacagcgtcgtcgacggcggcggcgattgagctcgggagcaagcaggccgccggggttgtggcggccatcgaggaggagccggtgagcccgacggggcggctgttccgggagccgaacttccgctgccacatcgtgtccgtgttcggcctcggcgcgccggtggacctgccggcgctgcgggccggggtcgccgccacgctcgcgcgccaccctcgcttctgcagcgtccaggtggtaaatgagaaggacgccagaccgaagtggatacggacagcggtgaacgtggacgaccacatcatcgtccccgagctgaaccccgccaccacgtcggccgacccggacaaggcgctggaggactacgtgtcgtccctgtcgacgcggcccatggcgcactcccggccgctgtgggaggtccacgtcctggacttccccaccgccgacgccgcggcggcgctggcgctccgcgcgcaccactccgtcggcgacggcgtctccatgctctccctcttcatggcctgcacccgcagcgccgccgacccgggcgcgctcccttccctcccgccggcccggcgcgcgggccccgtccacgctgtgcggcggcccgcgggcgcgctggcggcgctggccgcgtggctcctgtccttgctcgtgctggcgtggcgcacggcggtggacgtggcatgcttcgtcgcgacggcggcgtcgctgctgggcgacgcgcccacggtgctcaagggcaaggagggcaccgagttccagcccaggcgcttcgtgaaccgcacgctcagcctggacgacatcaagctcgtcaagaatgcagtgggctgcactgtaaacgacgttcttcttgggataacctctagcgctctgtctcggtattattaccggagaacaggtgaaagcgacagtaagaggagcatcacggtgcggtcggctgttctcgtcaacttacgggcgacgcccggcatacatgcactggcgagcatgatggagtccggcaacgacaacaacaacggcgccgcgaggtggggaaacaagctgggctacatgctgatccccttccacctggccaagcacgacgaccccacggagtacgtccgtacggcggccaaggtgacgcgcaggaagaagagctccatggagtcggccttcaccttctggagcggggacatggttctcagactcttcggcatcaagctgctgcgctctgctacggcatgttcacgcacaccaccctgtccttctccagcatggtcgggccgactgagcaggtgctgttctgcggcaaccccatcgtctacatcgcgcccagcacctacggccacccacatgccctgactgtgcactaccagagctacataaactccgtgaagctagtcctgtcggtagacgaagcgcagtttccggatggccgtcagctcctggacgacttcgccgagtccctcaggatcatccgcgaggcagctccaggaaaaccaggggacacgcaggatgctgcttccacttgaacgtagactatagccatcaggcagaagctccaagcattcttgtcgtgctccagttgtgtctgatcatgtgtgtgtgtgcgcgcgcgtgagcgcaattgagatctcgttgctggccgtcacagactttttgggtgcgcggcttgatagcactccaacagagggttcaggacttcaggttacttaatctttcaacttggataatgcgacgtgaaggcaatgatctttggaaacaaatgattaataagtttgcattagaaaggtccacttgtagtagctgcagacatcgcttttgattttttctaagaaaatgaaccgcaaagcctcccaccgacg

SEQ ID NO: 4764 - DNA, 667 bp, Zea Mays
aaacagccatttcatggctttatgtggcacttggaaaccttgttgagcttcaatcaggcatattcttcgacacgtacggggaatactacgaggacatgagagagttccaccagcaccttcctaagctactgaagcccggaggcatctactcgtacttcaacggcctctgcggcgacaacgcgttcttccacgccgtgtattgccagctcgtcgcgctggagctcgcgaaccttgggtactcgacgcagttcatccctctgccggtcaaagattgcctggcggaggaggtctggaagggcgtgaagcggaagtactggcaactggacacctactacctccctgcttgccagtcagaatcagaatctactatcaagtagtgatgagttatttctagtctgcgttctgaagttggttgtctgttttgagctacgtacatttttgttctgtgttacgaatgttaaccctttcactttcgggagctgaattttctttgggcgtgtggtgatttgccctctctcgtatgctcctgacgcgtgcgtgcattcgtggttcgaaaaatagaattgtcatggaaaaatttggttccctgacgatcattttccttgccatgttggaccgcgtggctctattcagaataggcttccaaatcactcacctactgccgcct

SEQ ID NO: 4765 - DNA, 726 bp, Zea Mays
tcaggagcatgaggaaagtcgggcaacagctgaaggaaagaaaattgctggcaggcttaagagaactacaatagtactccctttggtcgtcgatattagatgacaggattgataaagcatattcttcgacacgtacggggaatactacgaggacatgagagagttccaccagcaccttcctaagctactgaagcccggaggcatctactcgtacttcaacggcctctgcggcgacaacgcgttcttccacgccgtgtattgccagctcgtcgcgctggagctcgcgaaccttgggtactcgacgcagttcatccctctgccggtcaaagattgcctggcggaggaggtctggaagggcgtgaagcggaagtactggcaactggacacctactacctccctgcttgccagtcagaatcagaatctactatcaagtagtgatgagttatttctagtctgcgttctgaagttggttgtctgttttgagctacgtacatttttgttctgtgttacgaatgttaaccctttcactttcgggagctgaattttctttgggcgtgtggtgatttgccctctctcgtatgctcctgacgcgtgcgtgcattcgtggttcgaaaaatagaattgtcatggaaaaatttggttccctgacgatcattttccttgccatgttggaccgcgtggctctattcagaataggcttccaaatcactcacctactgccgcct

SEQ ID NO: 4766 - DNA, 2902 bp, Zea Mays
gtcgcgctcacaatcggcggtccggcgttaaccaccgccaccgttgttgcttccacaccacaaccacacgcactggaacacccagcgcatcggccggcaggcggcgcccgcgtcttggctgtcaccacacgcgcccgccgacgccgaccaggtcccgcatacccgcagctgcgtagccattcccacaaaccaaccatacacgctaatcaaaaagattagtggagcactgcctgagccttgatttctcgttctttagtactacctgctccacgagaccagaccacgccagcggaaagataaaggattagtagaccagaagcttaagcttgctgccttgctgttcatttcccttgcctgagccgttaagcgtactgtactggcagtttgttcgtttactccgttccacgcatcccaacaattcgtcaatccccagccgcacgcacgagaaagaggcagattcgctgctccgaccgcgtcttcgttgccttgttggtttccgttctgtgactctgtccttcgcttgcttttgacttggggtagttggcttttctctcccccctcgccttcctccaggctttggggatttggttgcttcctgtcggggtttgagaggagcggcgctcttgaattgttgctttcaattggtccgtttggcagggtttggcaatagaaagatttgttgccggagatgggcaagccgtcgctgaagaagaagagggcctccggcggcggcaagtccggcgaccacgggggcaagccggcgtcactggagcggtctggttccaaggtcctcgacggcgatgagaccctcttcacggacatggcgcaggagcacaaggaagagggcaataagctcttccagcgccgggactacgaccgcgcgctgctcaactacgacaaggccataaagcttctgccccgggcgcaccccgacgtcgcctacctccacagcaacatcgccgcctgctacatgcagatgagcccgcccgactactaccgagccatcaacgagtgcaacatcgcgctcgaagcgtcgcccaagtacaccaaggcgctgctcaagcgggcgcgctgcttcgaggctctgggcaggctcgacctcgcgtgcagggacgtcaacaaggtgctcgctctggagcccaacaaccttactgcgctggatgtatccgacaggatcaagaagactatggaggagaagggaatcgttctggacgacaaggagatcatgcccacgccggaggaggtggtggccgctgcacccaagcagaaaccgcgcaagaagaggggaggacggaagttcgctgccaaggctgcggctgctgctgtggaggaggtcgatgaacagaagattgcggaagctatcaaggaggaggtggaggagcagccaaggcaggtgaaactcgtgtttggggaggacataaggtgggctcaggtgccggcgagctgcagcatggcacagctgcgcgaggccgtccggagcaagtttcctggactgaaggctgttcttgtcaagtacaaggacaaggagggtgatcttgtgacaatcaccaaccaggatgagctgaaatgggctgaggagttggctgaggctgggagctcacttcggctgtatgttaccgaggctgatccggaacatgaaccttatgttgacgacaccaatatggagagaaatgtaaacagcaattcggataatggaagtattagaagcaataggcaggatgaggacaggagcactgtgacctgtattgatgattggattgtgcaattcgcccggcttttcaagaaccatgttgggattagctctgatgagtacctggacctccatgaggtcagtatgaagctctacactgaggcaatcgaggacactattactactgaggaagcccaggaggtgtttcatcttgctgagggaaactttcaggagatggcagcacttgcatttttccactggggtaatgttcacatgtcccgggccaggaagagattgttgctatcaggagattccccaagtgaattggtgcttgagcaggtgaaggaagcatatgaatgggcaagggacgaatacaataaggctggaacaagatatgaagatgccgtgaaggccaagccggacttttttgaaggtttccttgcactggcgcaccagcagtttgaacaagcaaaactgtcatggtactatgcaattggtagtaatgcagatttggacagctgttcttctgaaattctggagctcttcaataaagctgaggataatattgagaaaggtatagagatgtgggaggaaatggaagaacagcgtctgaagaatcgatctaaacctagccaggagaatattgtgctagagaagatgggcttggaggagtatatcaaggatgtatccactgatgatgcggctgaacaggcttccaatttaaggtctcagataaacattttatggggtttgggcttcaagattgatgaaattgttcaagcctggaatgaaatgtatgacattaaacggtggctgcgtggtgttccatcatttcgccttgagccattatttaggcgaagagttccacaattgcatactgcacttgaacatatatagtactcatgaagttgttctacatcatattggatttcaatgcttttttatcagtgacacttttctctttttttggtgagtacaataactgtatttttatcttgtaatagattagttttattcatacgacaagcactatgcactgtgatatttgttgatttttcctttacctgcccccttgcactttctaattaaatgtttgtgactatggaatggatcttttccattccatgtggtttgggggacaattgatgtgctttgctttgaagacagttgtagtggtcatctgattgtgaatttgtggtgcacaagttggct

SEQ ID NO: 4767 - DNA, 816 bp, Zea Mays
gacagactgtgccatcgaggctcccaattcaattgtgttcccccaggccgagaatagaatgcacgctcaaaaatagcataccatcttcaaatagcccgaggaaattaccaattaataggtgtatgaagccctgatggagatcactagcccacgtgcctaccttattcactgtttgcccgcagagagaggattggaggtgacagacggtgccatcgaggctcccaaatcaatcgtgttcccccaggccgagaacagaatgcacgctcagaaatagcataccatcttcaaacagcccggggaaattaccaattaacaggggtgatattgttgaagtagatacatggattagtgctaatggtaaaaatggaatgcgtagacattggcatgtacatgattctataacaagccatacaatactaaaggtgacaagtacttctgacttttggtaatgtgagggtgtcggagagggaattcttcgaccgggtggcggagtgcacccgccctaaatcctaagatgaggagggggcttaagcgttttgcctgttggtagatgaacgatgaactcaggaacacgcgaggatttagagtggttcgggccgccggagcttaataccctactccactgtatgttggattgctgtgaaagcttgagagctgagagtctaagtctaagttcggtctaactgtgtctgagtctgtccctttgtaatgttgcatgcctccccttttatagctaaagaggggcgtacaagggtgctgagccccgacatgtgggcccaggaatataatggatgtaatatttggagttggtggagc

SEQ ID NO: 4768 - DNA, 1038 bp, Zea Mays
cgccattgctcgaacagtcccggtggatgaaagccctgatggagatcactgacccacgggcctaccttacgcacagtttgcccgcaaagagaggagcggaggtgtatgaagccctgatggagatcactagcccacgtgcctaccttattcactgtttgcccgcagagagaggattggaggtgacagacggtgccatcgaggctcccaaatcaatcgtgttcccccaggccgagaacagaatgcacgctcagaaatagcataccatcttcaaacagcccggggaaattaccaattaacaggtagtatttgttcattgttgcgctcatattttagtgcctaatagatgcctaaggaaatgcctagatgctatgattttctcccagattctgagtttctgaatatttgtgctgcatttctaaatatttgagtttgcatacgtgctatgatttactcacagatgctagcaaagtatgtacatcagccatgcattctaattctcctactatgcgctcgaactcgctcctctaatctactgcaggggtgatattgttgaagtagatacatggattagtgctaatggtaaaaatggaatgcgtagacattggcatgtacatgattctataacaagccatacaatactaaaggtgacaagtacttctgacttttggtaatgtgagggtgtcggagagggaattcttcgaccgggtggcggagtgcacccgccctaaatcctaagatgaggagggggcttaagcgttttgcctgttggtagatgaacgatgaactcaggaacacgcgaggatttagagtggttcgggccgccggagcttaataccctactccactgtatgttggattgctgtgaaagcttgagagctgagagtctaagtctaagttcggtctaactgtgtctgagtctgtccctttgtaatgttgcatgcctccccttttatagctaaagaggggcgtacaagggtgctgagccccgacatgtgggcccaggaatataatggatgtaatatttggagttggtggagc

SEQ ID NO: 4769 - DNA, 1251 bp, Zea Mays
ccgggtgttacacgccgccgccgccgccgccgccgccgacggcgatagatttggggatggatttgggctcgtgctacctcggtgggaacgccgacgcggtggagttctgcccgcaccgcccgttccgccacgtgctggccgccgccacctacacgctgcaggagcaggagcgcgaccgggcgggcagcatatccctcttctcagttgacgttgcctcggaggacgcgtcccggaggctccagctgctgtatactgtggagaccgccggcatcttcgatatgaagtggagccccaagtcgccgctgctcgcgcaggccgacgcccacggccgcctcgcgctccggcgcttggagcaggaggacggctcggacacaggcattctcctcaccgatgtctctgctgaagatatttcttcttcaatgtgcttatatgtggactggaaccaaactgcggagtctctgtctgttggattatcagatggctcactgtctctggtttcagtgagagaggaccggctggagatatcagaacagtggactgcacatcagttcgaagtctggacatgctattttgatcgtacaaggccacacttgctgtacagtggatcagatgactgttgtttcagttgctgggacttgagagaaagcccatcaaacattgtttttcaaaacaaaaaatctcataagatgggtgtctgttgtattacacagaatccgttggaggggaacatgctacttactgggagttatgatgaatttctcagagtttgggacatgagatttatggcaaaacctgtcaatcaaaagttgataaatctaggaggtggtgtgtggaggatgaagtatcatcctagtattgcagatgttgtattggctgcgtgcatgcacaatgggtttgccattgtaaaagtaggttctggagatgctacggtaatggaaacatattgcaagcatgagtccttagcatacggtgcagattggcagaaaagtgaagaggtggagcaaaatggaaattcttcagttgttgctacttgttcgttttatgatcgcctcctccgcgtgtggcaaccagagaatctagctgagctttaaagacctaaagctttttttgaattgaattcaagcatgactaggccatgaatctatttcctgaatgaaccagtataatttcattcaggagcccttgcctgcctgcagcagcgaagcatacagcagttcattccacgtatctggcacgccaggcaagcaccag

SEQ ID NO: 4770 - DNA, 906 bp, Zea Mays
cctagcccgtcgaggaggatcggcactgcacgggctccgtaagcacttcccgagaaaaggaagacagagaaggaaactgcagtgaagtcgccggcgccgccgcgacaggaggaaggagcagcagcggcaggggaggcccggcgatctcttctgctgcgtgcggcgagggagtaaaaggagccgcgacaggatgcactcctttgggcaccgcgccaacgcggtggcaacgttcgcggtcaccatactggccgcgatttgcttcgccgcctccttctccgacaacttcaacaccccaacacccactgcctccgttaagatcttgaatctaaactggttccagaaggaggccaacggcaacgacgaggttagcatgacgctgaacatttcggccgacctttcgtctcttttcacgtggaacacaaaacagagtatgagactccacagaatgctttgaatcaagtttccctttgggatggcattatacctgcaaaggagcatgccaagtttttgatccataccacaaacaagtacagatttattgaccagggaagcaatctaaagggcaaggaattcaacttgacaatgcactggcacattatgccaaagactggcaaaatgtttgcagataagatagtaatgacaggctatcgtctccctgagctatacagatagtcagatagatcatggacaggactaagtggcctgcaagaagtgttagtggcagtggcataattgatcctgagcgttttgttctaatctaagtggagcatgtaaccttataagcttgtacttaagctgaaccaggcaaaacaaagttgtaatttgagaggatatgtatggttcaattttgatttgcctatcaaatgttgattctgaacttgaaaggtatgccttgcaattcgtgga

SEQ ID NO: 4771 - DNA, 1525 bp, Zea Mays
ttaaaaaaaatggtttatgaagcccttgcagcatgggaagctaaccatctgcatccaaaaggttggcaaggagccacttctgtttcagagattcgatctatggtgcaaaatgcttttcccgagaccagttgtcattgtttaaaaaacaggggtgtaatccagttagcactagctgctgaaaatgactctacgggagcctcaaagttctcgctgggacgcctttacaagtgccgagagaatattaagtgtgacatctgcagagacacctcaaagtcttgccagtgagcttcgtgatttcatcaacactagcactttagttgaatcacacacacaaactacttcaatggagtcttcacagggcctacttagtttccaggacgtactgcttctaacgattatagggtatatcttagctggtgaaaatttccctacatctatggctggtggtccattttcttgggaagatgagcggtctcttaaagatgttatagtggactctatccttgaacgaccatcatctgtgaagttgcgcttccttgatggcctggatagtgaacttgaagctaaagctagatctaaagatggcgagaggaataaaaactctagcgaggtagcacccagtactgatgatgattttgatgatgaatggggtacctgggatgacagtgataatactgatcaccaaaaggaggaagcttatggggacatgcaacttaagttggaagtgcgagatagagttgatcagcttttcaaattctttcacaaattatccagtatgaggttaagaaatcaagcccttggtgaaggtatagcagcattaagtagattcgagactgacggttactcgaggaaatgcttgctttataagttactattagctctcttgtcgaggtacgatgtacctggcctcgagtatcattcatcaactgttggtcgtctattcaaaagtggactaggtagattcgggcttggacagccttcggtgatcaatctgttcttatcatttttgttcttggaggtattaatactcttgaggtccgggaagtcatgacagcgatatcggagagcagcagaccagatgtggagcttattctgggtgggacaacccttcttaccccagacgacatgtttgagttgatgttgggatcgtcaagctttgcttaggctcaaccttcactcttgagtcatgtgcgggacttggaaagaaatcggagcatatttttttcttattctccagaatagttacttgtctgatgtagcagaagcattcagactcggaagaggatactaccagaagaaagcagtccattcagagtcaaaatagtttgcaagatgaacctacgagtattgctggaaggtgtaagaaacagtgtgtctagttatcagtggctgactcttgttgtaaaacatgtagcagagatatatcaagcaaaagatgcgtaagaactcaagtaatttgttttgtcactaacatgagcagatgccgtttggctccatgatgaattgtttgtcggcagtaactaac

SEQ ID NO: 4772 - DNA, 506 bp, Zea Mays
aggcgatctcttttatcaagcaagcaaacccctacccattcattgctcacgcacgcattcaagaccatgaagtccaccttgccatctatgtccttccaatcaccctgtttcaagatccaaccggctactcagcagagcctctggcctcctcggcgacagagcacgaggaaaccaggacttcctctaaagcttatacgtgcagcattaggaccagacgccaatggcggactcctcaatgctgaccgcagaggtgccaccttaccatcttcgcccctgtcagatgtagttcaggagttttactcctccctcaatgaaaggaacagcaaacggctcgacaagttgatggcccctgattgcatcatcgaggataccgcatattataagccactggatgctaagggatcatcttcgtttctggcaaggctcaccggagtacaaggcgacaactggtatcaacgtcgttgtcgtgttgggactgtgcttgcagttatgcaacgcggacaaac

SEQ ID NO: 4773 - DNA, 844 bp, Zea Mays
atcaacctaaagtcctaaagaggcaagccagagaaagtatgtagccgaacctccgcccgcccgcgacccaaaagccgaaagcccgaaaccagaggcgggtagggttctagctgcaggcgacggccatggccgcctccgccgccgccccggcgctgcttcgacgcctcttctgcagctctattccagcctcctcctccgtactgcgcgctaccttttgctcctccgccggcttcggctcgtcttctccgtcctccatattcggcgacgccaccgaggtcgccaacgtgccaccgctcaccacgcccaacctcttcgtcagtggtaacgtctctccgcttcgccccgtcccaccaaactcgtcgcactaatacaaaacaggtgtgtgcgtgaatttaaagctgcgggcacttggataccttaatgctatgtttgtgagcaatccatttggggaactagggataaccagtaagctttatcgatgaagcacagcatttaaacctgttacagactcctagtttgcatcccatcctgcagctcttgtgccgtcaaatcctattgcacctgtgcgttttgcttgattttctttttaccagtgcataaaaatggccgtgttccatgtccatcggttgtagtttgccgctatgctcagtaataaacacttctctcagtaagaagcagctcccagttcattttcacctgtaggttttccataaaaataaactgctttgagggtcctgatttacattaacttgggcgcaggcctttcaaggttaacgacagatgagaagctccagggtgcatttgctcctttcgggaggctccttgaagtgtgcttttgtgttac

SEQ ID NO: 4774 - DNA, 1575 bp, Zea Mays
cttctgtggacccctctcccactcccctccggccctcccctcccacctcacatcccttcttgcttctcgcctccccacccttcatccacccgccgctcctcaagccccaagctccggcgatatgtcacgcttcggtcgatccggtccgccgccgccgatccgcgacacatattcactcctcgtcctcaacatcaccttccgcacgactgctgatgacctcttcccgctcttcgacaagtacggcgagattgtcgacatctacatcccaagggaccgcaggactggcgactcgcgcggattcgcgttcgtgaggtacaagtacgaggacgaggcacagaaggcagttgataggctcgatgggagattggtagacgggagggagatcatggtgcagtttgccaagtacggtccaaatgctgaacggattaataaagggagaataatggagccagttccaaggcccaggggccgttccagaagccgcagtccaagacggaggtaccgtgatgattatcgagatgactaccaggatagagattatagaaggcgaagccgtagccagagtagagatagatacgcccgtgacaggtacagagatagggattaccgccatcgtagcctgagtcgcagtttgtctcctgcacgaagaagccctagtcatagccgcagccgcagttacactcctgatgattacaagaggcgtggcaaagacagcagcgcatcacctgcaagtaggagccctagtcgctcccctcctcgcaagacgccaccttctcctaagagatctcctgtcaggcacaatgatgaccggtctccacgctcacggagcccttcaacataagcacaattcacttgcaaagcatcttgaacagctcaggatgaatggacttgctctgatcctatgtgtgtgtggctatgcttgtgctcaatggtgggcacttttcagttaaagttttgtagtgctgtctgtcagttgctgcctcaaacttggaatactacttctgtttggcacctgaactgcttatcaaaaactttatttacatggagtgaagatatgctggctgatatgcggtcaacatgcacgtagcttactgttgaagttgatataatctgtgctgtttgcgttgttgatgatgatggctgatgagatgatggaactgcagctgactgcacaatttgctgctgtctgcacctattatgctgacaacaatagaaggcgtggggagaagtttcagcgacagaaatgcctgactagttgattgatcttctggatctgaatgctgatgatttgcttcaaagacttagtctcatgtagtcatgtcatttgtggagtctgctgacccatcaggctctggattttgtaacacgaactttgatatgcttctgtgaaaaaaaatgggtaaccttacataagtgtttagacggtttagtggtgttctgctcttttctttacggtactgaaaaacattgactgttagttgggttgttaacctggttgaatgttatacacacttagttcagctgaattaaattgtttatttgattgttcgttgcgatatgagcgtattccctcct

SEQ ID NO: 4775 - DNA, 1733 bp, Zea Mays
tgtggacccctctcccactcccctccggccctcccctcccacctcacatcccttcttgcttctcgcctccccacccttcatccacccgccgctcctcaagccccaagctccggcgatatgtcacgcttcggtcgatccggtccgccgccgccgatccgcgacacatattcactcctcgtcctcaacatcaccttccgcacgactgctgatgacctcttcccgctcttcgacaagtacggcgagattgtcgacatctacatcccaagggaccgcaggactggcgactcgcgcggattcgcgttcgtgaggtacaagtacgaggacgaggcacagaaggcagttgataggctcgatgggagattggtagacgggagggagatcatggtgcagtttgccaagtacggtccaaatgctgaacggattaataaagggagaataatggagccagttccaaggcccaggggccgttccagaagccgcagtccaagacggaggtaccgtgatgattatcgagatgactaccaggatagagattatagaaggcgaagccgtagccagagtagagatagatacgcccgtgacaggtacagagatagggattaccgccatcgtagcctgagtcgcagtttgtctcctgcacgaagaagccctagtcatagccgcagccgcagttacactcctgatgattacaagaggcgtggcaaagacagcgcatcacctgcaagtaggagccctagtcgctcccctcctcgcaagacgccaccttctcctaagagatctcctgtcaggcacaatgatgaccggtctccacgctcacggagcccttcaacataagcacaattcacttgcaaagcatcttgaacagctcaggatgaatggacttgctctgatcctatgtgtgtgtggctatgcttgtgctcaatggtgggcacttttcagttaaagttttgtagtgctgtctgtcagttgctgcctcaaacttggaatactacttctgtttggcacctgaactgcttatcaaaaactttatgtataccagttacattccacttttaaccttcatattagtattaccatattataactgtcttttcagtatttagtacttactattcatggtgacttgcacctttctagttacatggagtgaagatatgctggctgatatgcggtcaacatgcacgtagcttactgttgaagttgatataatctgtgctgtttgcgttgttgatgatgatggctgatgagatgatggaactgcagctgactgcacaatttgctgctgtctgcacctattatgctgacaagaaaggtatgatggcatgtgagtatttggatttgttggtgctctttacccttcttcagcaatagaaggcgtggggagaagtttcagcgacagaaatgcctgactagttgattgatcttctggatctgaatgctgatgatttgcttcaaagacttagtctcatgtagtcatgtcatttgtggagtctgctgacccatcaggctctggattttgtaacacgaactttgatatgcttctgtgaaaaaaaatgggtaaccttacataagtgtttagacggtttagtggtgttctgctcttttctttacggtactgaaaaacattgactgttagttgggttgttaacctggttgaatgttatacacacttagttcagctgaattaaattgtttatttgattgttcgttgcgatatgagcgtattccctcct

SEQ ID NO: 4776 - DNA, 2179 bp, Zea Mays
tgtggacccctctcccactcccctccggccctcccctcccacctcacatcccttcttgcttctcgcctccccacccttcatccacccgccgctcctcaagccccaagctccggcgatatgtcacgcttcggtcgatccggtccgccgccgccgatccgcgacacatattcactcctcgtcctcaacatcaccttccgcacgactgctgatgacctcttcccgctcttcgacaagtacggcgagattgtcgacatctacatcccaagggaccgcaggactggcgactcgcgcggattcgcgttcgtgaggtacaagtacgaggacgaggcacagaaggcagttgataggctcgatgggagattggtagacgggagggagatcatggtgcagtttgccaagtacggtccaaatgctgaacggattaataaagggagaataatggagccagttccaaggcccaggggccgttccagaagccgcagtccaagacggaggtaccgtgatgattatcgagatgactaccaggatagagattatagaaggcgaagccgtagccagagtagagatagatacgcccgtgacaggtacagagatagggattaccgccatcgtagcctgagtcgcaggtacagtcctgatgattacaagaagcgtgggagagacagtttgtctcctgcacgaagaagccctagtcatagccgcagccgcagttacactcctgatgattacaagaggcgtggcaaagacagcgcatcacctgcaagtaggagccctagtcgctcccctcctcgcaagacgccaccttctcctaagagatctcctgtcaggcacaatgatgaccggtctccacgctcacggagcccttcaacataagcacaattcacttgcaaagcatcttgaacagctcaggatgaatggacttgctctgatcctatgtgtgtgtggctatgcttgtgctcaatggtgggcacttttcagttaaagttttgtagtgctgtctgtcagttgctgcctcaaacttggaatactacttctgtttggcacctgaactgcttatcaaaaactttatttacatggagtgaagatatgctggctgatatgcggtcaacatgcacgtagcttactgttgaagttgatataatctgtgctgtttgcgttgttgatgatgatggctgatgagatgatggaactgcagctgactgcacaatttgctgctgtctgcacctattatgctgacaagtaagattccaatgatttagctgaattcagtgttcccatttttcgtgtcataaaatgcatgacaccacgaatcttgaatctacatgcttaggtgttaacacccttttaatattttggtttagaagtgtctgcactgatttatcatagatctgttttggggttgttggatcataagcctacatgtgcattattaattgttgcatgcactggttgtgctgtcaatgcatttctgccatttgccagacatgtcttgtaaagaaaagcataagctcagtcttacttttggaaactgttccattgtcttgagtagaggtgagtgttgtactgttgtttaagctgtatacacactcgtgtcataatgccgttgtagtgcaatccaagttcattgacatgatcacgagtcataaaagggtatcttttaccccaagtgttcattaatctcacctacttatgcttgcaagttaatgatttgcatgaaataaggaagttctctgcattaatgtatcgagagtaggaaaggtatgatggcatgtgagtatttggatttgttggtgctctttacccttcttcagcaatagaaggcgtggggagaagtttcagcgacagaaatgcctgactagttgattgatcttctggatctgaatgctgatgatttgcttcaaagacttagtctcatgtagtcatgtcatttgtggagtctgctgacccatcaggctctggattttgtaacacgaactttgatatgcttctgtgaaaaaaaatgggtaaccttacataagtgtttagacggtttagtggtgttctgctcttttctttacggtactgaaaaacattgactgttagttgggttgttaacctggttgaatgttatacacacttagttcagctgaattaaattgtttatttgattgttcgttgcgatatgagcgtattccctcct

SEQ ID NO: 4777 - DNA, 2540 bp, Zea Mays
agaaaatccgcaattttattgtcgtcctcgcccgctttctctgaccgaccggaaaggcgctgcccaaacaaacgcggaggaagaagggaactcgccgcctagggttccgccgccgcctactcttccgccgatcaaggagcgggaatcattgcgcgatgccgcagtcggtgctggtggaacgcgcgacgagcgagtcgctcatcggccctgactggtctctcaaccttgagatctgcgacatcctcaaccacgacccctcgcaagccaaagatgtagtgaagactatcaagaaacggattgcacacaagaactcaaaggtccagcttcttgcattaacgttgctggagaccttgattaaaaattgtggtgattttgttcatatgcaagttgctgagaaggatatgcttcatgaaatggtgaagatagctaagaagaagcctgactatcacgtcaaagagaagatattaattctgatagacacttggcaagaagcttttggtggtgcccgtgcaagatatccccagtattacgcagcatatcaagagatgctgcgtgctggagctgtatttcctcaaaggccggagagtactgtgccaatctatactcctccacagacacagcctctacggaactatccgcctcctgcattgcgtaacactgattatcgacatgatgtgcctgaatcctcttctgcaccagaagtgcctgcattaagcttgacagaaattcagaatgcacgtggggtcatggatgttctttcagagatgttaaatgctatcgatcctggtaacagagaggattgtatgttgacatgttccagattgttcaactggaccatacagttccagaagttctagtcatccctggatttctaaatagtactcaacatgcagggtctaaggcaggaggtcattgtggaccttgtggaccaatgtcgttcatacaagcaaagagtggtgcagcttgtcaactcaacatcggatgaggacctattaagtcagggccttactttgaatgatgatttacaacgtgttttagcaaagcacgatgcaattgctgctggcatagccattcgattacaaaaaccaaaatcagccccggcccgcgcagacagttctccaacgaagcctgagccgacaaaggaaacagaacaaaggtctgctaaagttgccagtagtgtgactccatttgagcagttagcacttcctgcaccaccatcatcaagtgcttcaaagtctcatggagaatcagctgttagcccaaatattgatttgcttagtggtgatgagttttttaaaccagaacctgttcattcccaagctcttgttcctttagtcactcaggcttcagcttcttcaagccccagtactttagaccttttagacatgttttctgatagcaatgctatcaataacaccagccagaaccctaccatactttctatatctaactcaaatcctaatacatcagtacaagcctatcctgttccacagcaacctgttccaccacaccatccttcaccatatgctaatggcttaaattcagatacaatgacaccctttgatcaaggctctaagttaacctcagcaagttcatggaatgaacagattgcccatggaatgattccaccacagcagtttgcccatggtcaaggtgaacaaagcaacgaccttccactaccaccctgggaagctctgcctgcagaaactgagcaattagaagctgaccatcctggtgggttgtcagctctgccacaatttggagttagtcaaccccagccagtccaaattacacattctgggcagcaagtgttaccatcgcaattaatgccaactggacaaccgggagggcagttccagcctagatttggggctcaacaaccatatgctacagaaaatacgcagtatggaggaatgtatccgccagtgcaaggcaaccaaccaacgggtatttatccccagcaaatggctggagatgtctaccagcaacagatgtttggtggccagatgataggttatggctatggtccgcagcctggaggctactacgtgccgaacgccgcatatgcatatgccggtgcaaatgatctttctcagaggatgaatggcctctcgatgcaaggcaacagtctgtatggcacacccgcgtcgtcttccctccagcagcgtaacaggccaagcagacctgaagattcgctctttagtgatcttgttagcatcgccaaacaaagccttgtaaaactgcttccaacaaggctggtaacttgtaaaccatgagtttctgctcatagtatataaaattcttgaaatttttttcctattggaaagtagtgggcgagatttgtatatcctgatattgataaagatgtttacatcttttcaagaaattatattttgtttacaagtattctgtaccattaatgtcttatgtatatacataggagcaaaaaaaaaaaaagactccagtatgctgattcctctttgaaattttggcatacgacttcagcatgtcagaccatgttcctgttctatacattttgc

SEQ ID NO: 4778 - DNA, 908 bp, Zea Mays
gagaatggagactggagccgtctcctcctgtcctcccgagacccgactcaactttttctctgcacgccactgccaattccccgccagcagcagaaatcacactccgcttcatcttccgctggatccctagtctacgccggcctaacgccttgggacctccgctgctgttctctcgccggtcatttttggttcaggggctgatcgcttgatcggatcggtgtcgcagccctatacatcatacatgacgacgcccggctcctgtcctgcgacaaccgccgccacccaccctcccatgtgcgccgctagcgccgcaggtggatcgcaaaaaatggtgcgtccgcgactagtgctcttcggggactccatcaccgagcagtccttccgccccggtggctggggtgccgcactggctgatacctactcgcgcaaggctgatgtagttgtcagaggctatggtggatacaacacaagatgggctcttttcttagtacatcacatctttccgctggatggtttagcaccccctcttgcaaccactattttctttggagcaaatgacgcagccctgttaggaagaactggcgagcgacaacatgttccagtttcagaatataaaaataatctcaaaatgattgttaatcatttgaaggattgttctaattccatggttattgtgcttattacgccacctccaattgatgaagaaggaagagaaagatttgcacgaatgcgaggaagctacctgaaaggacaaatgaaatggctggggtctatgctggttattgcgtcgaactagctagagaaatgtgtataccctgtgttaatatctggtcaaagatgcaggagacagaaggatggcagaaactttacctaagggcccaagggggcggcgacaaggagcagcagta

SEQ ID NO: 4779 - DNA, 1008 bp, Zea Mays
gccaacagcctgctctgctgttcctgcgaagtggaactgcaaccgccaccacgggccccaccgcggcaaatcgccaccgacccagagaatggagactggagccgtctcctcctgtcctcccgagacccgactcaactttttctctgcacgccactgccaattccccgccagcagcagaaatcacactccgcttcatcttccgctggatccctagtctacgccggcctaacgccttgggacctccgctgctgttctctcgccggtcatttttggttcaggggctgatcgcttgatcggatcggtgtcgcagccctatacatcatacatgacgacgcccggctcctgtcctgcgacaaccgccgccacccaccctcccatgtgcgccgctagcgccgcaggtggatcgcaaaaaatggtgcgtccgcgactagtgctcttcggggactccatcaccgagcagtccttccgccccggtggctggggtgccgcactggctgatacctactcgcgcaaggctgatgtagttgtcagaggctatggtggatacaacacaagatgggctcttttcttagtacatcacatctttccgctggatggtttagcaccccctcttgcaaccactattttctttggagcaaatgacgcagccctgttaggaagaactggcgagcgacaacatgttccagtttcagaatataaaaataatctcaaaatgattgttaatcatttgaaggattgttctaattccatggttattgtgcttattacgccacctccaattgatgaagaaggaagagaaagatttgcacggtcactttatggacagaatgcgaggaagctacctgaaaggacaaatgaaatggctggggtctatgctggttattgcgtcgaactagctagagaaatgtgtataccctgtgttaatatctggtcaaagatgcaggagacagaaggatggcagaaactttacctaagggcccaagggggcggcgacaaggagcagcagta

SEQ ID NO: 4780 - DNA, 850 bp, Zea Mays
gcgatcccatcctgtgctgttgccccagctgtgtgtgatctctcctcctcgtatggccgtacacgagctctatataaacagaaacaggcttgcccctctcagcacacgcgcctggattctcctcgcccctcgcctccctccacctgcagagagcgccacaagagcgcttcgttctagcagcagcggacgagggagacaagaggaggaagagatggcaggccgtgatggagccaagtcatcggcgtccatggaggaagaggcatgcggggagaagaagtacggaggaatcgcacccaagaagaagcctttgatatccaaggaccacgagcgcgcctacttcgactctgcagactgggtgctgggcaagcaggctgcgaacagtagcacgagggccaccgtcgagtctctgaagcccaagctgaagagaacgcctcaccaccagctgccccctcgcaagcccacctgcgcttccggttgagacgaccggacccatggctacgcgttgcagctgctcggaggtgagggagggaggacgccgaggccgagctcacataaatgtctagctggtcggaaaccgtggtagggacgaatccgagatgcaatctggcttgttggccgttgcattgcagcacctattgtgtctttatcagttcgttatcaattatctggctttaagtttggcatggcacttggtgttcgaatgaactacacaagagagtggacgagagattttgcctcccaaaaatgcgggcattagaaattttgtttctttgtccgcggggtttgtggctttcttctagggaacagaagccctgcattcggtcacggccctgcaatgcttacgcaggcc

SEQ ID NO: 4781 - DNA, 805 bp, Zea Mays
cggcttttaactaattcctcctcctcctctctctctccccgatccagctagcctgacctcccaccctccctcttgaatccgctcaagttcccgatctcccacctcgtcctccagctcgatcgcgttcgcggcaccccactccgtgctccagaaataagtagccggcggtttcctcgccccaggttttgcggtcgctggggagtgggaattcgttcggctccggtctggccaatgctcctgcggtttcttggagaggccgctgagattgggatccaagctgcgttaggcgagcagcagcagtagccgcatcgagattcgccgtcgttgtccgagggattctccgtttcttgggcggggatttcggttgcggcgggaaaaaaaaaagaattctttcaccggacttggcccaactccgctgtatgttagggtagccttttcgacgcgtttctttcgtcgccccagatccgtctccccgcccgattctttcggagtaatcggcggcggatcggaggcagaggggtttggaggcctgagctccgatggagatgcacgccgacgtcgacgggtgcagcgtgcccctggccgtgctcctcaagcgggagctgtgcaaccagaaggtggagaggccggacatcctgttcggggaggccaacaagagcaagaaaggggaggacttcacgctcctcgtgcccaggtgccaccgcaccccgggcggcagtggcggcggcgagaatgccggcgacgacgacaccatttccgtatttgcgtagcatgatgggcaggcctggttttgcggtgtgctggc

SEQ ID NO: 4782 - DNA, 3084 bp, Zea Mays
gtcggccgcctgccgccgccatctcacggcctcctaccttccctcgtggtgggctccaccgcggtctggttcgtcttcgatcgtgtgggatacagcttcctctccgtcctcttgaaagctatcagagcaagcaagccagccactttacctagctagtgttccggctgattccactggcgacgattcgagattggatttttattggtgattcggtacaaccaaaaaggatttccgtttgagaagcacgtgggggcggagtcgaagaaccagaacggtaacatcctcctcatcaacgacaagttgctctacgacctgttccacgagctcagaaattggcccccttgtgcggaggagttttgggcgaccgccggggtactcatgactgtgcctgccaccgaagcctcatctgcgccgcaggggcagcaagcaggcgcgcccgctagctgggaacccaacggggttcaggttgacggcgtgacggtggatccccctttgcctggacggggagccatggtgatgctgaccgaggaggagaaagccagcttgtgtctgcttggtttgaagcaaagcagttccacggctgagttggacactatatgcggcattgaagggcctgctgcggaacagatcaaagatgaagcaggtggtgaccatgtgatgcacgatgctctagtgggagtgacagaaacagagtatcagctagacagtgaccttagagatgttagaggactgctgtccactggacttcttgaaggtttcagggtgacctacatgaaggatgaggtggaggaggttggacggataaatggacagggttattcttgtggctgctcaaagtgtaattacaatagtaatattatgaatgcgtgcgagtttgaggagcattatggtcagtcatttgacaaccagattgatcacatcttcttggataccgggatttctctattcagggtggtggaagcactgaaaccttgtaagcttaacatgcttggggatttcattgaagagaagattggtttccctcctaatttggatgagtataacaagtggaaagcttcatttcagaagagaaaagattatttagatgctgtggcttcagatggttgtttgactcagagttcacaggggttggctgcaggggagatgatttacagtttgagagattacttgaaagattctgtcagcaatagcatctcaaaccttaactggagtgcatctaaaaggcggtctgggagacggtttagacaaggagacactgggacttcaactccaacctttagcggaagcccaggcaaagggggttttggccactctactgacacctcagagaagaaaggcactgaagaaactcacagtgagaacacaggagaccctctcagcatcgatggtgttaagtctgattctccattacctactgcagtaaccactaaccactctaaacacgattcaacaaatttagggctttctttatcaagtccagtaaaaatcacgcaaaggccactccgaaactgcagcatagactcaaagtcaaaagaatcaaaaacaagggataccactttgcatccactgattttcaaggaggatggccttgcagataatactttgttgacttacaagttaaagaatggagaggctctaaagcaagggtataaacggggaacatgcatcatctgtaactgttgcaatcaagagttttctccttcccactttgaagaacatgctggcatggggagaagacggcaaccgtatcacaacatttatacattagaaggattatcacttcataagctagctctgcaactgcaagatcatttgaatccaaatggattcgacaatgctagtgtttccagcgtcagtgactaccataaccttacttcttcaggttgtggcagagaaccttctactaccagtggacctattgttcctctgaaacggactttacaagaaagagtggtagaaacagagagttgctatttctgtgggtatggccacacaacgattggaaatatcaatccagacacgattattttctgtaaccagtgcgagagaccatgccacatcaaatgttacaacaatagagttgtaaaaaagaaggtgcctctggaaattttgaaagaatacatgtgttttcacttcttgtgctgccaagaatgtcaatcactccgtgcccgtctagaagaaggactggaaaagtgtgtagggattaccttccttagacggataagatctaatatttgttggcgacttttaagtggaatggatgcaagtagggatgtcaaactctacatgcctcaggtcattgatatcttcaaagatgcatttatggattctactgatgagcacagtgacatcatctcagacatggttaatggcaaaaatggagaccaagagaaggattttcgaggaatgtattgtgcactgttaactgcaagcacacatgttgtctctgctgcgattctgaaagtgcgcatcgaacaaatcgcagaacttgtcctcattgctactcgtagcgagtgcagaaaaaagggttacttcatacttctcctaaagtcgatcgaggcaaatttgagagcctggaatgtaagccttcttactgcgcctgttgaccctgaaatggcacaaatctggtcagagaagctcgggttcaccattttatcagctgaagagaaggagtcaatgctggagtcgcaccccttggtgatgttcaagaacctagtcttggtgcagaaatcacttgcttgagcaaatctgatctatgtttgtttgtactactttagaaatgaaaacccggtttcgagagcttagacagtacggggttaggccgtgttaagtcattttgtttattatttagatttaaaatatttttaaactatttaaatatatattataaattatatctctacgcttgagcgggaaactggaacagtcccaaacactcccatagagtttagacggactagatgttcgtgtattgttacggttttatgtcacatggacacagatagattttgttttaataaataaaatatatgtgctctaatggttaggtggatgtagatgtgaaatcaataactaaggtgtgga

SEQ ID NO: 4783 - DNA, 1904 bp, Zea Mays
ctagagatttccatcgcacacctctctagtctccatctgtcgggacgccgcatctcgctttctaccagttgctttgtctcgctttcatcctctccgcgtcacttgggtttcgtcagcgtcaagtactccgcttccgcccgaagacttcgccttctcttggcttgctcaccggctacgtctctttgatcctattgcttcggtgcgtggagattgagatctaaacgacaactattttcttttggttaaccggttcgcaagaagtgcagatgcacatctggttccaaatttgtgcttcgatcgtatctagctgccagcttggtcgtcgacacgtttatttccatagttgtgctcccattcttgcttcgccgattgtttcgttttggtgcacagctgatctcgtttgtgtcaaatgcataaggttgtctcaggtcggagatttccagttgtgctcattgcgaccaagacgaagaagacgacgacgatccgtccacgacgaccgtctcctccacgggcgtattgacgccacaacccgctatgggtaccttgagttggccatcgagcagatggcagagaccgcagatgctagcaacgcacttgaccatgggcttcactaccttcggtcaaccggcaatgcatgtgcggcgagggcgctgttatggtggggatgggataactctgatgctcacgctggtatggccacttccgtcgaactttccttgttcttgcctccttcggtgaacttcctcggttcttgcctccttcggcaacttcatgtactcacggccgatgttgccgccacacaccgtctcttgtgctcctcctccggcgaacatccactgctcgaaccaccatggcgctcagctacagggcgtcatgacagcagctccccaagcgatgcaagccgcctgttcgacgaaatgtgtgagaagcaaaatgaacatgcccgcgtgttaggtcctttatgtgacccaaataactgaatttcagctaagcaccagagctaatatctctaatcagcttccatgggtgaggcaattaacacttactccaatttgttcttccttcacggtgctacttaattcaacacgttcttcgttgcaatgattacagttacacttggtttatcaccattgctttcagcttgacaaagccttatctttgctacatacttaattaatgcttcaaagcactgacaattccaaatgacaggtacaagcttagtttcattgtcactgatggaacatgtgaagcagagttcttttgttttgatagcatagccagaaaaatagtaggaaaaccttgtaacaaccttgttacagcagttacaacttctcaaggtcccctagcagacctagccgatgttatgtgactgaaatttacccttgcagttgccatcaatatgccagcctactctatcacaaacagtcttctctattctgtctattttgacaaatcatgtaagacatgccttcatgccatctaacatgtctaaccatcctgaagagttgtatacacaagatgaagtacctagccttccggtcacacaaaactctccaacaacatctttggcgaaactatctacctgtagcaacgaaagaaacgagggtgatgaccaacgtacaagtgaactcaacaagcaagatttatcatcaccaccgaaaaggtatttgctttttgtgcacctatcaggatcaccatcacttttggaccatgaatgcttcagcttttagcctatttgtggatctatacatatggacttaacacctgcaagcacactgttgctaggtcttgatgtacggtggttgaatgctacttactatatattttttattgtagtctaaattaactctacaactgatatcaactattagagaaaaacaatgttatatgcttatatttggttc

SEQ ID NO: 4784 - DNA, 809 bp, Zea Mays
tggccaggtgcctgcctccatctccctcctccactcgggtcttcacgatgccgccgccgccacacgacatcgcacatccgctcttctccctcccctcgctctcggcggtcgacgtccgctcccctggtgccatcgcttgtgcctggctcccgccatcgctggctccccgatggacctcacggctagtgtggggccatggatccccgacggatcgagggtcgcgccgcctcatgagaaaattcatctttctggctcgaacagaaaatacctgaagcttcaatttgacgtcgtgtagcaatgaatgcgtgcaaggaatgctcttttacatgttgagaatgaagaaaaattagatgtcgtggaggcatcccaaaacatgaatgtcctcaggaggcttggagccttcatgctggtcaatcttcccaagaagaaagctgcagccgaaacagtagccagctgaacatgctgacatgttattgcgggtggtcaaggctcaggattcagagcagaagatacacataaatactggtgaatgatgccatcgacgatgatgaactgatcaaacgatggatgatgccatcgatgaaagatggaatggaactcaaatttgggtggtcgcacaagtgtggagacttgaatttatatatacttagtctcaatgttagcacaaacagttgatgagcaagttttcccattgtattttagtttgaatttagagtacacttatgtaagagttatttgacaatgcttatttatgagatattgaatgatatttatatatattaaattaattataatgttattaaatatat

SEQ ID NO: 4785 - DNA, 1947 bp, Zea Mays
acccgacccgtgaccgtgagacagtgacgcgagcctgtgtgcggcccgctttcgttcgccgagtcaacaacaagaagccacgcgacgataacgcccagttcgtggaagattggaagaacactagagcgagaagcgatcagagcgaggcacggcgagggcgacgacagagccatgagttaccagaaggtcccggagtcctatccgccaccagggtactcgcagccgtacccaccgccccaggctccaccgcaggggccttactacccgccgccgcagcaaccacctccggggtaccagggctactttaacgacggccagcaaccctacggctatccgccgccgcagggtgggtattaccatcacggtcaccaccaccataacgaccaccatcaccatcatcatggtcaccaccaccaccaccacgaagatgatgactgctgccttggcttcttgaaaggatggctggccgctctttgctgctgctgcatgatggacgagtgctgctgctgctgcttctgacatacatgcacctgaagctcgctgtgtctgggcatcgtggcacggcaacatttgagtgattatggttgctggatagtgtttacttgaattttctctttgttattgttcgtaaataatctgaatagtacatcgtgttaataaaagggtatttgcagtgtttctttctgtgtgttctgagctgattggtcgtccatggaaaagacccggaatcctttcgtagatccctgtatcgttgaataacatatttgttttttttttcaataataccagttgtttccatcggatcatgagcgaggaatctaattcattcatagagcagattttctctaaaaaataagaagtaaaaagctgtgcagagatttttttttcttcggttgttatataatcacaaggtgcagcagcaagcagttccctgcattttatgagccttacctttttctccctcctgaatggaaggtaacagtgtcactcactgcatttcataacgtgctatctatcttgacaactctgcctactgcaggctgcagctgaaagaaatgaacagaacaaggggaaatagttgtccttggacaagaaacctcagccccattgcaccggatggtatggtcgaccgatcgaaagcgcgggatacactgctagctgcatctcgtcaggtccatccgtccatcctagattaactgaagaggagatgagcctagcatggaggatggaagccgctcagactagccaaggaggctgcctgcggggaccgcacgcggtggaggcggggccacgcaacgtccgcagcaggaggccacaggcagctcatccttggctaccgaagcagagcttccatcgccatgccagggatcggtttcagataaggggcccgcccggactagccaaggagactgcctgtgatcgaggccacgaggcgagcaataaaacgtgcacaaggttttgcccgagccaagccaagccaagaagccacaggtgtagtaggtgacggagaggacttggtgtgggtaatggagccgtggttcatgctgattgttggggaccttcggcttccgaaggtcctcaaaaacataatttaacaatgtttctggagtaaaatacatgaacagatatcttcggactaggatcagaaccacagtatgaagcacaaagaacacgaaggttggtgcagagccgaagctatgagcaggagagcttcggcacgatagcagaaaaggaaaccgacttaaaaaggaaaaggctattcagacctcgatgggttactatagagtcattagcaaatgtaaagggcatgggtgtaattttacatgggctgagtcccgtgcctataaatagatgaataatgctcccgtactgttcacgctgacttgacatttgcttttgcgtcacgcttgtacttttatcttctttcaagccgaaggtacacttgta

SEQ ID NO: 4786 - DNA, 889 bp, Zea Mays
tgggctttctaaatttctgcctccggcccatacaaattcctcctgatgaaggttcgtcggcccaaaccaagtagcgtctagggttttagcctctccaaccgcacgatggacaccgacgcgagaaggcagggggagagaaaatggcgtatttgtcccgcacagccgccgccgtcgccgtcgccgtgaggtcggcggtccgctccgcacctctcactggccgcgtcctcggagcgccactgccttcccttgcctcgccttccgctgcccggtccgcccgaatcctccgcaggacggcggccgcggcgtcggcggggctggagactctaatgccgctgcacagcgcggtggcggccgcgcggcttaggtcctgcatcgtcgtcgactcctcgtgctggagctcgctctcgcaaggtttaaacaagcgcatctgatcatggctaggagctgagcacagaagagaagtgaggacaacgagttagaacgaagtcatctcttttgcagatatttgtaacattttggtcatgagctatgctgaaggaaaaaacttgtacttgtaataaaaaaacacttcagttttttctttaggatatgctttgcctttatgagaggagaggtgcacctgaagaaaccaatgaacattaggaattacaaacaagggctgtaataatgtgattgttgtaaactaattttacctttgatgttcattgaatcatccacagatgtacaactggcatttgttgatgttgggattttatttacgtggatccatgaattacctgcagctcctctttcaaacggttgcttcattattggcattgggatgctcagatattattttcaattccgatgtaggcatcacttgaaatagcttcaattatgtgccttcctt

SEQ ID NO: 4787 - DNA, 2142 bp, Zea Mays
cgctggtacagggagcccgccgcgtcgcgttctccagtttagcgcgcgcgcgcgccgccgccggctccgtctctccgccccgagctccgcgtgtaatctcagacccagcctaagcaaaccaccagagtcagtaccccgccagcacccgagcccctgttctggtgattggtgaagaccttgtcgcagaccgcaacgatgtcggccgcggcagggacgccaccggaagacggaggggatcggccgtggcagtcttaccataccgcatacaccaacgccaaagctggaatggagggtgttgacaaagagaaggtgcagaaggtaatctacgaaatgagcaagggctcaaaatatttcgaaaatgagcagaggaaggaggcagccaccaaacaaaagattgaacatctccgtgcacaatgtgcagtattgactgataatgacatatcacattttcagaaggttgcagataagaaaatgttagagttggaagcttcacgagatctttcaaagatatggcttcacactgacatggatgccttttatgctgctgttgagacattggagaacccatccttgaagggaaaacccttggcggttggtagcatgtctatgatagctactgccagttatgaggcacgcaagtttggagtgcgtgcagcgatgcctggttttattggatgcaaactatgtcctgacttggtttttgtcccaccaaactttgagagatatactcattatagcgagctgacaagaaaagttttccagaggtatgatcccaacttcattgcaacaagtctagatgaagcatacctcaacataaccaatgtttgcattgagagaggcattacaggcgaggaggttgctattgaacttaggtctgccattcaccaggaaactggtctaacatgtagtgctggggttgctccaaaccgtatgattgcgaaggtttgctctgatattaacaagcccaatgggcagtttattttgccaaatgactgggaagctgtattgacatttgtatctacattgcctataagaaagataggtggcataggtaaggtaacagaacagatgttacatcaggttcttggaatcagtacatgtcaggagatgctgcaaaaggctgcttttttatgtgctcttttttcggaaagctcagctgatttctttctgtcggttggtctcgggttaggaggtacagaaaccccagaacaaaggcaaaggaaaagtatcagttgcgagcgaactttcacagcaacaaatgattcttctttgcttttcaaaaaattagctagccttgcagaaaatttatctgatgatttgcaaaaggagggtttcaagggaaaaacactaacactcaaactgaagactgcagattttgaggttcggacaagggcagtaacaacacggaactacatcgactccaaggaagatattctggtctatgctacaaagttgattaaagctgaaatgcctatttctttgagattgatggggttgcggatgtctcagctacatgatgagaaggacgatccatctacttcaacacaaaagacactagatatattctttcgttcatcaaacagtaactcaaatggcaatggaaccactgttcagagaatcactaattccccagggcaggataatgattctattagtctcacaaccaaggaagagtacttggcacctgatgctggaacaagtgtttccacaggccaacaggatttcttcctacatgatgagatctgttttattcccgaacaacaacggagtttagacaacgatactaaagaggctgtcctaagcgacccgttaggtggaacaaagtcagatgatgtgtcttccagtgcaaaggttacgcccactaagaagttggatgaacctgatcccttgatcagcccgaaggctgtgtcttcatcaagtaaacctgaccagcagtcatggattgatggctacatttgttccatctgtggatttgaactgcctccgggcttcgaggaggagaggctggaacattcagattttcacctggctgaaacactccagcaggaagaagcagtggacggcacaagacacatctcaaacgagaggaaggcagcagaaggctgctggagaccgtctacggatacagaagcagtagagtaa

SEQ ID NO: 4788 - DNA, 2284 bp, Zea Mays
cgctggtacagggagcccgccgcgtcgcgttctccagtttagcgcgcgcgcgcgccgccgccggctccgtctctccgccccgagctccgcgtgtaatctcagacccagcctaagcaaaccaccagagtcagtaccccgccagcacccgagcccctgttctggtgattggtgaagaccttgtcgcagaccgcaacgatgtcggccgcggcagggacgccaccggaagacggaggggatcggccgtggcagtcttaccataccgcatacaccaacgccaaagctggaatggagggtgttgacaaagagaaggtgcagaaggtaatctacgaaatgagcaagggctcaaaatatttcgaaaatgagcagaggaaggaggcagccaccaaacaaaagattgaacatctccgtgcacaatgtgcagtattgactgataatgacatatcacattttcagaaggttgcagataagaaaatgttagagttggaagcttcacgagatctttcaaagatatggcttcacactgacatggatgccttttatgctgctgttgagacattggagaacccatccttgaagggaaaacccttggcggttggtagcatgtctatgatagctactgccagttatgaggcacgcaagtttggagtgcgtgcagcgatgcctggttttattggatgcaaactatgtcctgacttggtttttgtcccaccaaactttgagagatatactcattatagcgagctgacaagaaaagttttccagaggtatgatcccaacttcattgcaacaagtctagatgaagcatacctcaacataaccaatgtttgcattgagagaggcattacaggcgaggaggttgctattgaacttaggtctgccattcaccaggaaactggtctaacatgtagtgctggggttgctccaaaccgtatgattgcgaaggtttgctctgatattaacaagcccaatgggcagtttattttgccaaatgactgggaagctgtattgacatttgtatctacattgcctataagaaagatctttgtatgcagataggtggcataggtaaggtaacagaacagatgttacatcaggttcttggaatcagtacatgtcaggagatgctgcaaaaggctgcttttttatgtgctcttttttcggaaagctcagctgatttctttctgtcggttggtctcgggttaggaggtacagaaaccccagaacaaaggcaaaggaaaagtatcagttgcgagcgaactttcacagcaacaaatgattcttctttgcttttcaaaaaattagctagccttgcagaaaatttatctgatgatttgcaaaaggagggtttcaagggaaaaacactaacactcaaactgaagactgcagattttgaggttcggacaagggcagtaacaacacggaactacatcgactccaaggaagatattctggtctatgctacaaagttgattaaagctgaaatgcctatttctttgagattgatggggttgcggatgtctcagctacatgatgagaaggacgatccatctacttcaacacaaaagacactagatatattctttcgttcatcaaacagtaactcaaatggcaatggaaccactgttcagagaatcactaattccccagggcaggataatgattctattagtctcacaaccaaggaagagtacttggcacctgatgctggaacaagtgtttccacaggccaacaggatttcttcctacatgatgagatctgttttattcccgaacaacaacggagtttagacaacgatactaaagaggctgtcctaagcgacccgttaggtggaacaaagtcagatgatgtgtcttccagtgcaaaggttacgcccactaagaagttggatgaacctgatcccttgatcagcccgaaggctgtgtcttcatcaagtaaacctgaccagcagtcatggattgatggctacatttgttccatctgtggatttgaactgcctccgggcttcgaggaggagaggctggaacattcagattttcacctggctgaaacactccagcaggaagaagcagtggacggcacaagacacatctcaaacgagagctgggtggctgaaagaccacgctctactgcacccacgcccaagaagaaactcaagtcttctaaagaaggaaagcatattcctattgactctttcttcacaaagtgtaataagagcccgtaaccgtaaggaaggcagcagaaggctgctggagaccgtctacggatacagaagcagtagagtaa

SEQ ID NO: 4789 - DNA, 2307 bp, Zea Mays
cgctggtacagggagcccgccgcgtcgcgttctccagtttagcgcgcgcgcgcgccgccgccggctccgtctctccgccccgagctccgcgtgtaatctcagacccagcctaagcaaaccaccagagtcagtaccccgccagcacccgagcccctgttctggtgattggtgaagaccttgtcgcagaccgcaacgatgtcggccgcggcagggacgccaccggaagacggaggggatcggccgtggcagtcttaccataccgcatacaccaacgccaaagctggaatggagggtgttgacaaagagaaggtgcagaaggtaatctacgaaatgagcaagggctcaaaatatttcgaaaatgagcagaggaaggaggcagccaccaaacaaaagattgaacatctccgtgcacaatgtgcagtattgactgataatgacatatcacattttcagaaggttgcagataagaaaatgttagagttggaagcttcacgagatctttcaaagatatggcttcacactgacatggatgccttttatgctgctgttgagacattggagaacccatccttgaagggaaaacccttggcggttggtagcatgtctatgatagctactgccagttatgaggcacgcaagtttggagtgcgtgcagcgatgcctggttttattggatgcaaactatgtcctgacttggtttttgtcccaccaaactttgagagatatactcattatagcgagctgacaagaaaagttttccagaggtatgatcccaacttcattgcaacaagtctagatgaagcatacctcaacataaccaatgtttgcattgagagaggcattacaggcgaggaggttgctattgaacttaggtctgccattcaccaggaaactggtctaacatgtagtgctggggttgctccaaaccgtatgattgcgaaggtttgctctgatattaacaagcccaatgggcagtttattttgccaaatgactgggaagctgtattgacatttgtatctacattgcctataagaaagataggtggcataggtaaggtaacagaacagatgttacatcaggttcttggaatcagtacatgtcaggagatgctgcaaaaggctgcttttttatgtgctcttttttcggaaagctcagctgatttctttctgtcggttggtctcgggttaggaggtacagaaaccccagaacaaaggcaaaggaaaagtatcagttgcgagcgaactttcacagcaacaaatgattcttctttgcttttcaaaaaattagctagccttgcagaaaatttatctgatgatttgcaaaaggagggtttcaagggaaaaacactaacactcaaactgaagactgcagattttgaggttcggacaagggcagtaacaacacggaactacatcgactccaaggaagatattctggtctatgctacaaagttgattaaagctgaaatgcctatttctttgagattgatggggttgcggatgtctcagctacatgatgagaaggacgatccatctacttcaacacaaaagacactagatatattctttcgttcatcaaacagtaactcaaatggccaacaggatttcttcctacatgatgagatctgttttattcccgaacaacaacggagtttagacaacgatactaaagaggctgtcctaagcgacccgttaggtggaacaaagtcagatgatgtgtcttccagtgcaaaggttacgcccactaagaagttggatgaacctgatcccttgatcagcccgaaggctgtgtcttcatcaagtaaacctgaccagcagtcatggattgatggctacatttgttccatctgtggatttgaactgcctccgggcttcgaggaggagaggctggaacattcagattttcacctggctgaaacactccagcaggaagaagcagtggacggcacaagacacatctcaaacgagagctgggtggctgaaagaccacgctctactgcacccacgcccaagaagaaactcaagtcttctaaagaaggaaagcatattcctattgactctttcttcacaaagtgtaataagagcccgtaaccgtaaggtaggacttgccggcaactctgtaactatgggcatgctagccaagtgttgtacgtgttaactttattcttgatgagagcaatatatgtaaatatcaccctcaactctcactaatagccaagtgttgttacagagttccacggtgtttccacatacgcaggccttcatgacaaaaaaaaaaaatggagagtgttttttttttctttctaa

SEQ ID NO: 4790 - DNA, 2585 bp, Zea Mays
actgcactgcaccgcaagccgtcgtcaccaagagggaggaatgcggtaagcggcaagcctattccgtcttctactgtcctgttccgccgaacacgtcgccaggtctccttccgccagagcacgccacctcgaatccccctccctgctcaagtgctcggcgactcggcacctccgccccacgtctttctccaccgaccacctgccccgacccctcctcgaccggcgtcgagtggggatccatcaggactggttgggaaggatcggcatgctctacagagaagtgttgcagagcgttaaaagcagtttgggaagactacagaaatacccaaaaagatcgccccctagcttctgaatccttcaattctctagcctgtaaaagaacaagccaggggtagctaaatacgacaaccccagcacttactcattatctttgctgacagtatggcactgaaaaatgtgatccgtgtcattttggtgctggcccatgtgagcagttgtctggctcgattagggaacatgttctctcctggcttcgtttcagcatcaaagccattgccaagctggccaattttgagtgcaggaacatctgtaactgtggctcttgttttgtcattgtttctaacctttgagcatctgtgtgcataccatcaacctgaggagcaaaaattcatgattggtctgattctgatggttccagtatatgctgttcaatcagtggagaagaaagtaccattaggtttatggagggtcggcttcaaatcagtgagagctcacctctgctagatattgattatgattatggcattgtgaaacatcctttcccattgagctgctttatgagaaattggtacctcggtcctgacttctaccatgctgtgaagattggtattgtgcaatatatgatcctcaagcctatctgtgctgttttggcaattttctttgaacttcttggaatctatggagaaggaaagtttgcgtggaaatacgggtatccatatttggctgttgtcctaaatttcagccagacgtgggcattatattgtcttatacagttttatactgctaccaaggagaagctgcaacctataaagcccctgtccaagtttcttactttcaaatctattgtatttttgacctggtggcagggtgttgctgttgcgtttcttttctcaactgggctttttaatggacatttggcacaaaggtttcaaacacgtatccaggattacattatatgccttgagatgggggttgcggcagtggtccatttaaaagtgtttccagctaaaccttaccgacgtggggaaagaaatgttcccaatgttgctgtcatgtctgattatgcatcactgggagctccagaccctgaagaaattggagggatcgacagcttaacaatcttgcaaactcctgtcactaaagacaggcagctgagtttttctcagagtgttcgtgatgttgtgttgggcagcggtgaaatcatggttgatgatgttaaatatacagtttcacatgtcgtggagcctatggagcggagttttacaaagataaataagacaattcatcaaatctcagaaaacgtcaagcagcttgagaagcaaaagaggaaggcaaaggacgacagtcatcttattcccctagaaccatggtcagaggaattttcagaagctcatgaccatgttgcgggcggtagtgccagtgacagcggattagctaagacaaggtacaacaggatcttaaataggccccggaggtcattcgagtccagattgcgcagatggttctagcagccagccggtgctagtgggttaattgattttgatcaaaagaggcggttaaccttttcgctccggttgtttgacaaaatgatagcaattctgacaaactagttctccctccgttcttttcttctttatttgctggtgacaaatattcgagaacggagtttggagtttggcacggggtggaggcagtagccagcagctcttcattattttgtgggtgacaaatattcatgaacggagtttggagtttggcacggggtggaggcagtagccagcagctgcttcctgttgtttatagcttgaccctgggctctttcccattttggaggctgtagctacacgagtttttgatgttagcgtccttgtttagaacttacctcttaggatcggcaaataccgatgtaacctgttgcttcctagagttagtataaagtaccatgctttgaactggggttctagtttagaattcatctttgaggacggcgaagtaaaaggtttctctggaactgtttcagctggaatgatatgtttatttgtattaatattgattaggcagcgttcgttttgtacggaatggggctggaactattctaggttgatcaatattaatacaaaataagcttatcaatttttagggcaaacgaacgaggacaatagtttctagcctcaatccgagataaatgagggtcctaatatggatgcaatccgtttcttcttctagaatgagtaggaagtaacatgcatggaacagagagatttgtaatctgggggtaaacatggttttaaagtgaaataaaagaa

SEQ ID NO: 4791 - DNA, 2483 bp, Zea Mays
ttgggggccacgcatagtttcttctccgcttcctccgctgcctcgctttccggcgaaagtatcggccgctgcgtcctccacacctaccccacaggcgcattgttcggctgtttccgtctccccgaacggccgaaccctgtcgtttgcccgggcgcctcgctgtcgtcgagtctgaaccgtgctgcgtcgcggagggaagtgagtgacatagagataggggaaaaggaagatcagatataatggcggttgccgtcctgttgcggcagagggcgctctcgtcgccccacgcggtctcatgccgaaatgctgtatatactagtggccttttttccaattccgatctacactcaaaggtgaattctactagtttgagattttggaggacctaccataattctgggaagtttgatttgactgatctgacgcatcctcatatgtggtacccgaaagctcgagaaaagaagcgtaatgtgtttttacatgttggccctacaaatagtgggaaaacttatagtgctctcaagaggctagaagcaagctcttcaggtgtgtactgtggacctctgagattgttagcaagagaggtagcccaaaggttaaacaaagttaacgtcccttgtaacctgattactggacaagaaaggaatgaaattgaaggtgcaaaacatagctcagtgacagttgagatggctgatatgacaactaactatcaatgtgctgttattgatgaaattcagatggttggctgtaaatcaaggggttattcgttcacacgtgcacttctgggactttgttcagatgaacttcatgtctgcggtgacccagctgctgttccccttatccagcgaattcttgaagctactggtgatgtagttacggttcaatattatgagagactatctcctttggttcctctgaaatctccacttgggtctttctctaacatcaaggcaggagattgtttagtatcattctcaagacgtggaatttataaactcaagaaaagaattgaaagggagggaaaacatctttgctctgtggtctatggttcattgccaccagaaactcgaacaaagcaggcgacaatgttcaatgatgataccagtgaccttaatgtgctagtagctagtgatgctattggaatgggtcttaacctgaacatttccagaattattttctctactatgatgaagtttgatggtttctgcaacagggaactaactgtggccgaaatcaaacagattgctggtagggctggaagatatggatctaagttccctgttggagaagtgacctgtctaaatcctcaagatctcccattgctgcactcgtctctgaaatcagcttcctccattatagagcgtgctggactttttcccacatttgatttattatctttgtattcacgattacatggaactgacttttttcaccctatactggaacgtttcttggagaaggctaaactatcaccagactatttcattactgattgtgaagatatgttgaaggttgctgctattgttgatgatttacctcttgggttgtatgataaatacctcttctgtatgagtccggtggactttgcagaaaattatgcaaggaaaggaattgttcgacttaaagaaatattcacacctggaacattacaggttcctaaaacagacaatcaactcaaggagcttgaatctgttcacaaggtcctagagttatatgtgtggttaagcttcagaatggatgattcctttccagaccgtgaagtagctgcctctcaaaagtcaatctgtagcatgttgatcgaagaatatctggagaggtttggatggcagccacaagaccgaagaaaggttttgggtggagcacaaaagctgctccaagaatacgatgtatcacaaatgaacaaatattttcaagaagtcaacccaggaccgaagtagaaggactatacaggaaatgagcctcaccacttccagtccagatttgaggaaccaataccatccagagcatttgcgttctgcctcactggttatggatcaccggcacaaagtggaactacacttcggacgaccgaagatatacgtggacgcatctcaaaccgtgatcatctagattgatttggcagcacgcatttccatcagccagatcgtgatcgactagtaggacttttttccccaaaaatgaaactacactccagtcttaagtcataatgaatacagagccatgagcccatgatagggccgcttctgagacggagattgtgtattaacgggtacacagacggtacttgcattctagtctgagttcgatgagttgcagcaatagcggctgtaatcctgtatataaagagggaaaataatgttgcttgtgctgttatttattgcaagatctgaatgtttgtgtccaatgacaatttagtagacattttacatgcactaactaatagctaatggcccgtgtgtacctttgtatatatcctttcagat

SEQ ID NO: 4792 - DNA, 824 bp, Zea Mays
agccagagccacgcgtggccaggcagcaaggcgtgctggacttcacggccaactcggtggagtggctggacatgcggcacgtgtggggggcaacctggtgcctggtgcggggcccgctcgtgggccccttctccgtgaggctcaccacgctgtccgcgcggaagacgctcacggcccgcgacgtgatccccaggaactggacgcccaaggccacctacacctcgcgcctcaacttccagccgtctctctaggtctaggacgagggagggacccaccgcggcgactggggcccacgttttatcggccccggacactgccctgtgggcccgttgcaaaacgaggaatcagtcagtccagagtgtttttttttttgttttccctgtatgcagatgcaggcaaccttcgtatggtttggtttttatcttatcgtagtcgtagctagtgtgaggaggtggttcatggccatcatagtacgtaggcatcgaacatgtgtgatgctcatgaggatgagttgagtctgtgagcgggcacagagtgccagccaccaggtacacacagacaggcgctgtctccaaaggagagagcgttcgttcgctgcttgctcccgggtccagcggcccttggaggctcgaaacccgatcgtggcgtctgcttcgctcgtgtgtgtgtgtgtggatgtgtttttggcgtcgatatgtgttgagaactacgttaccacggatcaccagatccgctcccttccctcccgtcagcagtagaggcgcgagaagctgtagagaacccgtctcccttcccataagcacgacagaggaaacgcacgagac

SEQ ID NO: 4793 - DNA, 1806 bp, Zea Mays
ggccgtcttgccatttgtacatactactctgcctctgactggggcaagcaaagcattggggcttgggatttctcgaagccataaaagagtgagccccaaaaagaagcctaccaaagtaccactacgactccgcctccggctccgagagcagcagcctcagtaccaccagtccagtccagcctccagctaggggaagaagaagaagagcgaaggaaggggacgggggcgaggaaggagccagagcagacccaatccctcaatggcttcctctcgcgctctcgctctcgctctcttcctcctctgcgccctgctgcccgcgccccctgtctcggccacattgctgttcggcggcggcgagtcggccaagaaggcgggcgtcgacgcggagtggcggccggccactgcgacgtggtacggcgaggcagagggcgacggcagcgacggcggcgcgtgcgggtacgggacgctggtggacgtggtgccgatgaaggcgcgggtggggtcggtgagccccgtgctgttcaaggacggcgagggctgcggcgcctgctacaaggtcaggtgcctggaccgcggcgtgtgctcgcgccgtgccgtcacggtggtcgtcacggacgagtgccccggcgggctgtgcgcgttcggccgcacccacttcgacctcagcggcgccgcgttcagcaggatggccgtcgccggggccggcggccggctgcgcgaccggggccagctgtccgtcgtgtacaggaggacggcctgcaagtacggcgggaagaacatcgcgttccgtgtgaacgagggctcgactaacttctggctctcgctgctcgtcgagttcgaggacggcgagggcgacataggatccatgcagataaagcaggccgtcacacaatgaaaggcagcaccttatctggaagtggaacaggccgggaagtccagagccagagccacgcgtggccaggcagcaaggcgtgctggacttcacggtgggctctcacgcagtcgcctgcctgcttttgcgttgcactagccaactcggtggagtggctggacatgcggcacgtgtggggggcaacctggtgcctggtgcggggcccgctcgtgggccccttctccgtgaggctcaccacgctgtccgcgcggaagacgctcacggcccgcgacgtgatccccaggaactggacgcccaaggccacctacacctcgcgcctcaacttccagccgtctctctaggtctaggacgagggagggacccaccgcggcgactggggcccacgttttatcggccccggacactgccctgtgggcccgttgcaaaacgaggaatcagtcagtccagagtgtttttttttttgttttccctgtatgcagatgcaggcaaccttcgtatggtttggtttttatcttatcgtagtcgtagctagtgtgaggaggtggttcatggccatcatagtacgtaggcatcgaacatgtgtgatgctcatgaggatgagttgagtctgtgagcgggcacagagtgccagccaccaggtacacacagacaggcgctgtctccaaaggagagagcgttcgttcgctgcttgctcccgggtccagcggcccttggaggctcgaaacccgatcgtggcgtctgcttcgctcgtgtgtgtgtgtgtggatgtgtttttggcgtcgatatgtgttgagaactacgttaccacggatcaccagatccgctcccttccctcccgtcagcagtagaggcgcgagaagctgtagagaacccgtctcccttcccataagcacgacagaggaaacgcacgagac

SEQ ID NO: 4794 - DNA, 2188 bp, Zea Mays
cggccactttctgcccgcttggagtccccgtcttcgtcgtcttgtagtagcactgagtgcgggagtactggccggccggcggcgaggctcctccactttctctgcacccatacatacgtatatgcttgttctccgccgtctccgcctccgcctcccactgccacgccctcttctcgtctcctccttctcctccacctccccctcctcctcaccctcgacctctagctcctcctcctgttggtcgtcgacaggcgaaagtagaagggccatggcgtcatctccttctcccgattcggccgcggtcgttgccgagggctccgcggctcgccgcttctggatcgctgcctccacgcgcgaggccgccttcgccgcatacacgcccttcctcctctccctcgccgccggcaatctgcggctcaacgtgtttcgccactacatcgcgcaggacgcgcacttccttcacgccttcgctcgcgcgtacgaaatggccgaggactgcgctgatgatgacgacgacatggccaccatagccgccctcaggaaggccatcctccaagagctcaacctccactcctccgttctgaaggagtggggagttgatcctaccaaagagatacctccaagtgcagctacaaccaaatatactgatttcctacttgcaactgcggctggaaaagttgatggcacaaaaggttctgacaaaatggttactccatttgagaagactaaaattgctgcatacactgttggggccatgactccatgcatgaggctttatgcatatctaggcaaagaactcatggttttccttaaacaagatgaaaatcatccatacaagaaatggattaacacatatgcatccagtgattttgaggacaccacactccaaatagaagaattgctagacaaactaagtgtctcattaactggtgaggaacttgagattattggcaagctctaccagcaagctatgaaactggaagtggagttcttttcttctcagcttatagaccaacctgttgtagctccactttcaagatactgtgatccaaaatataaactcttgatcttttctgattttgatttgacgtgcactattgttgattcatctgccattttggcggagattgcaattttgtcattccaaaaggcaaatcaaagtgggattgataataacctcgaccgtgcaaaatcgggagacctgagaagttcgtggaacatgctctctaagcaatacatggaagagtatgagaaatgcatggaaagactacttcctccagaagaatcgaagtcactagattatgataaactgtataaaggcctggaggtgctagctgagtttgagaagcttgcaaattctagggttgtcgactctggtgtgctgaggggaatgaatttggaagacatcaggaaagctgaacttataagatcagccttctcatcagccggttgtctagatggtttgaacatacattcaaatgagtttgcctttgaggattctgtttcaactggtgagatcgacagaaagatgcagtctccgctagacaaagttgaaaagttcaagagcatcagaagtgacgtggacagtacagtgccattcctatctgtttatattggagactcggttggagatttgctctatacggtttctagctggtcagaaatacacgccttcgtactgggaagtgatttcagctgatggatgtgctgcttcttttcttccattttttttccgcttgagaagcaaaattgccggccgatgctgatgcacatgatacgtgaatcctcaatgtggtcattttatgaaagccacatgtcaattctggctaccagtatgtatgaatgaataccgataccagtttgtggtgtggaatgggttgagtttgtacccttgaattgtgatcaatgtttcattgattcgtctgtccttgttccattcggggctaatttctgggtggttgctggcattatactgcaccaacaacaacagtataaacatagtggtatatatcccaagtccaagtgtaacgacgactgcataaatgtagagatgtttgtttttaattggcaataaatgaaatgtgatgagactgttgcgcgtttgcttgttgtctgactgctacatgacctttatattatcagagagagagagatgtgtgtatgcttactttgaacgatgaattacagc

SEQ ID NO: 4795 - DNA, 4640 bp, Zea Mays
ggttggcacatatgcagcagctgcgaaaaggcagtacagtacatgtgttatacttgtacgtactctgtctgcaaaggatgcatcaaacaaggcaaattctttggcgttagagggaacaagggcttctgtgacacatgttatggtactatattattgatagaatccaaagaagatggtgcaaaggttggtgttgattttgatgatatatatagctgggagtaccttttcaagttatattggttggatctgaaagggaagcatttactaacgattgaagagctaaaaagtgccaagagccattggattgttcctactactgctggtagaagagagaaagaggagtcatctgatgaattatatgatgcaagcaatggccaagatgctacttttgacatttcgtcaaagaaacgaatacagaataactcttcaggaaaaagaggacaaaaacgcaaaaaagacggcaacattacttcaaggaaatgtggaatctcaattaacagtgctggaggcttaccaaatggatcaacaggtgaagggatggccttggctggtgacaaaaactgggcatcatctgagttattggaattcattggacacatgagaaatggtgataattcttatatttcccagtttgatgtccaggttcttttgcttgaatatataaagcaaaataacctccatgatcctcgcagaaaaagtcagattatatgtgatgcaaggcttagcaatttgtttaaaaaaccacgtgtcgatcattttgagatgttaaagcttttggagatgcattatcttgtgaaacaggcttcaacaccgaatgcagacagtcaaagagcaatttattcagattcagctcaagtaaataatggaggacataatgagttggccgatacattaggttttgataggaggaaggctcataagaagattgaaagagaattgacaattaatccagaagattatgcagccattgacatgcacaatatcaatctaatttacttgcggcgcagtgtgatggaggatcttattgatcaggttgctgcattttctaacaaaattgctggtgcttttgtgaggataagaatttctggtcttggcaacaaggaagatatgtaccgactggtgaaagttcttggtacgcataaagttgcagagcgatacactgtcagtaagaagacaacagattatgctcttgagatatctaatttagaaaagaaagagattatcacaatggatacgatttcaaatcaggatttcacagaggaggaatgcaaacgattacgtcagagtatgaagtttggtctaactgcccggttaaaagtgcttctgaacacccctgaagaaaaggaacgcatgattaatgaagttccagaagtacatgttgattcccggatggatccaagttatgaatccgctgaagaaccagagtataagaaagctgttgattggaccatgcatcggaatgggccagatctattatttccaggaagaaaagggacagaattgaattctgtggagaatcatacacaaaagagtctggatacaagcagtctacctacagaggacgtggaccatagatcagttatccaagtgggcaagttttttcccacgcgacctgagagtatggcttacatttgagagtgaggagaactcactactgttgactgaagtgctcccaaagcagcagaaagattttattcagctttcaacagttactaccagtgataaatcaatgtgggcaggctctggtcaagatagagttaactcaaatgcaaataactcttcctcccctatgggttataacatggtctatccttctgcattatctagcccgtctgctgagtgttatgatccaacaaaagatctaaagcctctgggtggaacttcgccatcacgatctctgaaagatgctcatgctttgcatgaggttcagaatcaggttaactattcattcacaattctatcttcaactggttcatatgcaccacccggttctcatgatggaagggtttcaagagacagggttgatgaatggaacagtagtcaggacaatggtggtatttggaggccaaccatgaattctagtcagaagactaatgcacagcagcatcctgatggttgtactgggaaggacctaatgcaaactgaatctaaatgtagttcacatttggtctcagttcttacttcacaacactctgagagagaccctgccacttcccttagtactacaagttggccggtgttcagaaccaggtgccagcaggaaggttcttcatggacttcagctacaaatgctggagctcatgaccttcagttatctattgctttagcaaagccggagacctgttctccaacaaatcctgtggaagacagagattcaagttctgcttctgctttgtcttgtcagtctggggctcctgtctgcgttccccaaccagatccaacatctacatctaattcaaggaagattgatgcaaccatggatcagcatagaacatgccagcctgacacatcaagtgtatcatttgatcttcttcatgagcctaaaagtggctcactcttttccttgaaaactcaagatcttgagtttgagtaccctagtcctatcccaaaacaggaggggaaggggatttctgtgaaccagtcaggctcaacatcagtagcacatgagaatttagctacaaagacatgtgtccgcgcacctactagcaaaattgatagcttacaaccacttaaggaaagatcacattcgacagatagggactcaatcactcaattagagcatctgtttgaagagaatgtgataaagagaaataacaaagtggtcaatcctgtatctgatgctgaagggattgctgtatcagatgtgttggaatccttaacagaacaagattgtgaaaaatgtagtatacatggggtagcgccttcacaaaaaatggtgccagcttcagctgaggaagatcaaccacaatgctccagtcctattgcattgtccccttggggtgaaccaagttactatcagggtgaagctgttgattctgctctatggggcgtccaagatgaccctggtaatgacatgtggtcaatgccttctccaaaacctggtttccagccctcatcaggtcttggagctgatggcaaagacgcttcatgcatcatagaggaggcgagagcggacccaggagatggtgcttttgtcaaaacattaccaacacaaggggagaaaaagatggaacatggaaattcaagtgcctcaggttctggagtgtcagaacgggtaaaaccaaaaggaagcgctgcatcaggtccatctctagatgggagcacaaaagttatgggttggcaactgccgggctcatctctagagggcagtgcaaaagtttcaggttggaaaccaccagtcttatcacttgaagggattgctaatggttcaggttcacaagcatcgtgtccttctacgcaaaggggcacaaaatcttcaggttggcagcgatcaagttcatccccggatgggagcagaaaagcctcaggttggcaacagtcaagtacatcaccagaggggagtggaaaagcgcatggctggcaacgatcaggatcttttacccaggggggtacaaaggctgcaggtcggcaaccctctcgttcctgtacagatcggattgcaaaagttgatggctggcaacgaacaagttcatctccggagggaagcagaaaagcttcaggctggcattcgtcgggtcgtgacagctcaaagatcgcatccagtgccagcgaaaaccgtaaattgtcttctagtcaccaagcgacgacaccaacagggaggcactcgttggcaaagagacagggaagcagcgacaagggtgctgctggttgggacgaggctctggggaactcttcggaagcatcgaagagacaacagggaaacagcgacaagaatgcaggctcgggagtggctctcggaagcaacaggagctggcatccatcgtctggtaaccctagtcggggcggccaggggaatcaccaacatgacagggactctcacagcggtgattcgcggcggggtagctcgaactacccccggaggtccgacaatcgtcatgaccatggcagtggtggttcgtcacgaccctcgtcaagagggcagtcccagagggggctatgtaaacactacgagagtggccactgcgggaagggttcgaaatgccagtacctgcaccggtgatcgccgtggccgtgtggaagcgggacccctgtttgcctggccgtcctcacatttttgtatagcaggatgtggtttcgtcgtagtcagtatagtagaacgcttattaaccgtgtcggcaccactaagttggtagtagtacatatctttcagggcaggagcatgactaaagtaggatttgtaagttttattagagccactgatggccttggataaagattctccgctttttggttcgggaatgcacgctttttgttcagctaaacggagttgtgggcttctacaaacatggattttctcgctaggtcagagtgctgtgctatcgtacagaacagctgcacgtccgagtggtcacggacgaggcgcgtgcaatcgtccgaatgcctacaaaagagtggccaccggcgtgtggcagacatgtgaa

SEQ ID NO: 4796 - DNA, 5573 bp, Zea Mays
ctctgccttccccagcctcgtatcatcttcatcactttctctctgccccaggccagtgcccacctctcgcagtcctgtacctaccaaccacatcatattcgggtccgtgagcccgtgggagaccgcgcggcggcgacgacgaggcctcgacctcgagcgagggttggtggacgtcgacgagctagggttaggcgggcttttgagcttaagcttgggttgggggggcctgctgatccatggacggggggaccggcccgggcgccgaggtgctctctcccggcgaggccgagtggcccccagagctccgcctcccgccgctgccctccgtgccggagcccccagggccgcccccgcccgcccccgcctccgcttcgctgcgactgcgaagcgtcggggtcgcgccccatctgcacggggaggtctttgatgatgacccgcagttcctcggatcgatcatgggggccgcggccccgcccccgccccagcagcagcagcagcagcccgccgccgcggcaccggtgaagaggaagagaggcaggccgccgaagaacagggacggtgcggcgccggtgcctgcgccggtgaagccggggaacaagaaggacgaggaggaggtctgcttcatctgcttcgatgggggcagcctcgtggtttgcgaccggaggggttgcccgaaggtgtaccaccctgcgtgcatcaagcgagacgaatccttctttcggtgccagggcaagtgggattgtggttggcacatatgcagcagctgcgaaaaggcagtacagtacatgtgttatacttgtacgtactctgtctgcaaaggatgcatcaaacaaggcaaattctttggcgttagagggaacaagggcttctgtgacacatgttatggtactatattattgatagaatccaaagaagatggtgcaaaggttggtgttgattttgatgatatatatagctgggagtaccttttcaagttatattggttggatctgaaagggaagcatttactaacgattgaagagctaaaaagtgccaagagccattggattgttcctactactgctggtagaagagagaaagaggagtcatctgatgaattatatgatgcaagcaatggccaagatgctacttttgacatttcgtcaaagaaacgaatacagaataactcttcaggaaaaagaggacaaaaacgcaaaaaagacggcaacattacttcaaggaaatgtggaatctcaattaacagtgctggaggcttaccaaatggatcaacaggtgaagggatggccttggctggtgacaaaaactgggcatcatctgagttattggaattcattggacacatgagaaatggtgataattcttatatttcccagtttgatgtccaggttcttttgcttgaatatataaagcaaaataacctccatgatcctcgcagaaaaagtcagattatatgtgatgcaaggcttagcaatttgtttaaaaaaccacgtgtcgatcattttgagatgttaaagcttttggagatgcattatcttgtgaaacaggcttcaacaccgaatgcagacagtcaaagagcaatttattcagattcagctcaagtaaataatggaggacataatgagttggccgatacattaggttttgataggaggaaggctcataagaagattgaaagagaattgacaattaatccagaagattatgcagccattgacatgcacaatatcaatctaatttacttgcggcgcagtgtgatggaggatcttattgatcaggttgctgcattttctaacaaaattgctggtgcttttgtgaggataagaatttctggtcttggcaacaaggaagatatgtaccgactggtgaaagttcttggtacgcataaagttgcagagcgatacactgtcagtaagaagacaacagattatgctcttgagatatctaatttagaaaagaaagagattatcacaatggatacgatttcaaatcaggatttcacagaggaggaatgcaaacgattacgtcagagtatgaagtttggtctaactgcccggttaaaagtgatgtctatgagaaagctaaaatcttccaatctctgcgatttaaagatcttctgaacacccctgaagaaaaggaacgcatgattaatgaagttccagaagtacatgttgattcccggatggatccaagttatgaatccgctgaagaaccagagtataagaaagctgttgattggaccatgcatcggaatgggccagatctattatttccaggaagaaaagggacagaattgaattctgtggagaatcatacacaaaagagtctggatacaagcagtctacctacagaggacgtggaccatagatcaggtgcaggaagtaacattaatttaaacaacatggcacctgagcctgcatcacttggaattttatcaaatgacactgagccagaaaaggtttggcactacaaggaccctaatggaaatgttcagggcccgtttactcttttgcagttatccaagtgggcaagttttttcccacgcgacctgagagtatggcttacatttgagagtgaggagaactcactactgttgactgaagtgctcccaaagcagcagaaagattttattcagctttcaacagttactaccagtgataaatcaatgtgggcaggctctggtcaagatagagttaactcaaatgcaaataactcttcctcccctatgggttataacatggtctatccttctgcattatctagcccgtctgctgagtgttatgatccaacaaaagatctaaagcctctgggtggaacttcgccatcacgatctctgaaagatgctcatgctttgcatgaggttcagaatcaggttaactattcattcacaattctatcttcaactggttcatatgcaccacccggttctcatgatggaagggtttcaagagacagggttgatgaatggaacagtagtcaggacaatggtggtatttggaggccaaccatgaattctagtcagaagactaatgcacagcagcatcctgatggttgtactgggaaggacctaatgcaaactgaatctaaatgtagttcacatttggtctcagttcttacttcacaacactctgagagagaccctgccacttcccttagtactacaagttggccggtgttcagaaccaggtgccagcaggaaggttcttcatggacttcagctacaaatgctggagctcatgaccttcagttatctattgctttagcaaagccggagacctgttctccaacaaatcctgtggaagacagagattcaagttctgcttctgctttgtcttgtcagtctggggctcctgtctgcgttccccaaccagatccaacatctacatctaattcaaggaagattgatgcaaccatggatcagcatagaacatgccagcctgacacatcaagtgtatcatttgatcttcttcatgagcctaaaagtggctcactcttttccttgaaaactcaagatcttgagtttgagtaccctagtcctatcccaaaacaggaggggaaggggatttctgtgaaccagtcaggctcaacatcagtagcacatgagaatttagctacaaagacatgtgtccgcgcacctactagcaaaattgatagcttacaaccacttaaggaaagatcacattcgacagatagggactcaatcactcaattagagcatctgtttgaagagaatgtgataaagagaaataacaaagtggtcaatcctgtatctgatgctgaagggattgctgtatcagatgtgttggaatccttaacagaacaagattgtgaaaaatgtagtatacatggggtagcgccttcacaaaaaatggtgccagcttcagctgaggaagatcaaccacaatgctccagtcctattgcattgtccccttggggtgaaccaagttactatcagggtgaagctgttgattctgctctatggggcgtccaagatgaccctggtaatgacatgtggtcaatgccttctccaaaacctggtttccagccctcatcaggtcttggagctgatggcaaagacgcttcatgcatcatagaggaggcgagagcggacccaggagatggtgcttttgtcaaaacattaccaacacaaggggagaaaaagatggaacatggaaattcaagtgcctcaggttctggagtgtcagaacgggtaaaaccaaaaggaagcgctgcatcaggtccatctctagatgggagcacaaaagttatgggttggcaactgccgggctcatctctagagggcagtgcaaaagtttcaggttggaaaccaccagtcttatcacttgaagggattgctaatggttcaggttcacaagcatcgtgtccttctacgcaaaggggcacaaaatcttcaggttggcagcgatcaagttcatccccggatgggagcagaaaagcctcaggttggcaacagtcaagtacatcaccagaggggagtggaaaagcgcatggctggcaacgatcaggatcttttacccaggggggtacaaaggctgcaggtcggcaaccctctcgttcctgtacagatcggattgcaaaagttgatggctggcaacgaacaagttcatctccggagggaagcagaaaagcttcaggctggcattcgtcgggtcgtgacagctcaaagatcgcatccagtgccagcgaaaaccgtaaattgtcttctagtcaccaagcgacgacaccaacagggaggcactcgttggcaaagagacagggaagcagcgacaagggtgctgctggttgggacgaggctctggggaactcttcggaagcatcgaagagacaacagggaaacagcgacaagaatgcaggctcgggagtggctctcggaagcaacaggagctggcatccatcgtctggtaaccctagtcggggcggccaggggaatcaccaacatgacagggactctcacagcggtgattcgcggcggggtagctcgaactacccccggaggtccgacaatcgtcatgaccatggcagtggtggttcgtcacgaccctcgtcaagagggcagtcccagagggggctatgtaaacactacgagagtggccactgcgggaagggttcgaaatgccagtacctgcaccggtgatcgccgtggccgtgtggaagcgggacccctgtttgcctggccgtcctcacatttttgtatagcaggatgtggtttcgtcgtagtcagtatagtagaacgcttattaaccgtgtcggcaccactaagttggtagtagtacatatctttcagggcaggagcatgactaaagtaggatttgtaagttttattagagccactgatggccttggataaagattctccgctttttggttcgggaatgcacgctttttgttcagctaaacggagttgtgggcttctacaaacatggattttctcgctaggtcagagtgctgtgctatcgtacagaacagctgcacgtccgagtggtcacggacgaggcgcgtgcaatcgtccgaatgcctacaaaagagtggccaccggcgtgtggcagacatgtgaa

SEQ ID NO: 4797 - DNA, 1397 bp, Zea Mays
tggacagcctataaatctcaagcgtgggttgcaacaagctgctctgaaacatccatttttctctgtgccatcaatggatgcttagcacagatcgcttccacatatcacatgatcaatcagtactgggcgtatagcatattgttcagaaggtttttataccattggacagtcatatgaacttatagattggaaccggatcaattgacaaagttagtttactaatataaagatggatacagaatggttttactggtttgatacctttgctccttcctatctaccatttcattttcatatgaagtagtacatgcatatgttcacattttttccttagactgatctagaggcagggcttgatcactaatgatttcatttttatatttaaaaccatctgtatagattcctgtaacaggctaagagcatctcctcaagagattagccaaatttactgatttagctactttgtaaaatagatttcacaaaaaaagagttgggtactcacagactctaaaattcagagtctccatattcaaaagcgccacctaaataggattttttcagattagagaggctttcagcagcatggacgacttttactccttcaggtctggctttttggcgccgccaggccagacattttgttgcaggtcgatgctgttgctggtcgccgaacaaagcatgcaggggtagccatgtccaccggcccgaaagcacgcaggcccagccgtggatacatccaatgaggcaacgcgcttgagaggctttccagtttggtcgtgcatgtaattggcagtgtctgatgcctcaaccaccgtgagcagacgtctggataattggaggctagcacccggtctcctgctgctcagtggggtacatggtgcctaggggctgagctgcaagacgtgaagacgacggtgggaaaacgcgaggaaaagaaaaatcttgggcctcctgccggcgtgggcttgtggtggcggagaggaaggcacatgtcaagatgcactagcatgactgtcttcgatgaactttaactgctttgagcctttgacaagcaacgaggcaatttcccgttctctatttaagacacttgtgtgttcgacacccttgtgcctcgccaagctaatattctggtttggttggttagatgatttggctacaacggcatctgcaactatctcttgtcagggtttttagggacgtaagtgctagcgctcgagtgtgaatcattattgttgccatttatgttatagttcgtaaaccaaacagttctctaattgtaaacgtggataccgcttcttttggctggtagcccacgacttattgtttgccccttctggacaaataccttagcaatacaatgctgaaacgaatcaatgcagggtaacggttgttttggg

SEQ ID NO: 4798 - DNA, 3758 bp, Zea Mays
tcgccactgctacaccactacaccagtacaccctgcacgcgctgcgggcgtttccgccggctttgtgcctcctctgccctccccggccgctcgccctccgtccacgctcaagctcgccccgtcccggcgcctcgaactcgtcgtcctcgcttccgctgtcgccaccgcgaagcatgaggaggcgtcctgggatcactggcttgcagaatgtggcggctactctcaaccagttgggactggtcggggagaatatggccaaggtcgggaccgatgtcatgaagaagcagcgacttgggatggtccgatcacagctcgagaaatttgcttgcaagcataagaaaacatccttctctaccgtggggttcgacctgcccgactggttcaggaacccaaaggatggttatccttgttccaggttggatggcaatggcgatgatgactttgtgctcccggccaaatcagacttctcagaacaacaaggttgctctgccaccggtggaggatccagtccactgtcgatccttgccagctgccctgcatcccatgaagatgccgaatttgaggccgacatggatgaggtcagcaggattttgagatcccggtttgcttctccagaggctattgtgatcaccatggactgctgccctgtcagggtgtcagcacgccttgtcagcaaggtcctgagcaggttcagcaatgattgggtggccgcatttgggttcttcatgtgggccggaactcaggaaggctactgtcattgtgctgattcatatgacatgatggtagacatattgggcaagttcaagcagtttgatttgatgtgcggtctgatcggccagatgcatgagattggggggttggtgtcgctagcgaccatgacgaaggtgatgaggaggctatgtggagccaaccgatggagtgacgccattgatgctttccataaaatggaccgctttggggtggcgaaggacacaaaggccatgaatgtgctcttggacacattgtgcaaggagaggagtgtgaagcgtgcaagaggtgccttccaagctttgaaggggacaattcctcctgatgaaagtagcttcaacacattggttcatggctggtgcaaagcaaggatgctgaaggaggctcgcgaaacaatgaaggagatggagcggcatggtttcagtccttcagtaacgacttacacctgcctgatagaagcgtactgcatggagaaagattttcagacggttgatggtatcttggatgagatgcacacaaaaggatgcactccaaatattatcacatacacaattgtgatgcatgcgctagggaaggctgggaggacacaagaagctttggatacttttgacaaggtgaagcaagatggctgtgccctagatgcttctttctacaactgtcttatatacatactatgcagagctgggaggttgcaagatgcaaattttgtggtcgaagaaatgcaccgaactggaatatccccaaacttgactacctttaacaccctgatttctgctgcctgtgatcactctctggctgagaacgcacttaaattgttggttcagatggaggaacagtcatgcaacccagatatcaagacgtacacccccttgctgaagctctgctgcagaaggaaatgggtgaagacgcttctgttcctgatatgtcatatgttccggaaggacatcacccctgatttcagcacatacacattgctggtgtgctggctatgccggaacgggaggctcacccagtcctgcttattcttggaggagatggtgctgaagggctttactccacagcaggcgacctttgatcttgtgctggagaagcttaagaacatgcacatgctttcagcagtgagaaagattcagcttctcaggatgcacacagaaggtactaggtgtaggagcggtgttccatcttatttgagagaggatggtcacgatagacactgttatgctgtattgtcaaacactagtgaagctgaatcttcaatagatggaaaagaggatattcagggacatcatttactccccacataataaaactgaagcctaacaatttacttgaaaccatcatgtgatgtgcctaagttatattcagggggtatttttgtattcatgattaagtgaactgctgttcaagaacatacttatttgttgaaatgttgtggcgtatccatgtggcttacaaagtccagccattctccagaccttatagtcaactttcaacaactgaatttccatggagttatagccacatttgtctattaaaacggagcaccaagagagagttatatgccgttttttacttatagaacaggcttgaaacatttacgcattgtctttccacttctccagcattttaaccttttatcatccttttcttagctgctctgaaacatccatttttctctgtgccatcaatggatgcttagcacagatcgcttccacatatcacatgatcaatcagtactgggcgtatagcatattgttcagaaggtttttataccattggacagtcatatgaacttatagattggaaccggatcaattgacaaagttagtttactaatataaagatggatacagaatggttttactggtttgatacctttgctccttcctatctaccatttcattttcatatgaagtagtacatgcatatgttcacattttttccttagactgatctagaggcagggcttgatcactaatgatttcatttttatatttaaaaccatctgtatagattcctgtaacaggctaagagcatctcctcaagagattagccaaatttactgatttagctactttgtaaaatagatttcacaaaaaaagagttgggtactcacagactctaaaattcagagtctccatattcaaaagcgccacctaaataggattttttcagattagagaggctttcagcagcatggacgacttttactccttcaggtctggctttttggcgccgccaggccagacattttgttgcaggtcgatgctgttgctggtcgccgaacaaagcatgcaggggtagccatgtccaccggcccgaaagcacgcaggcccagccgtggatacatccaatgaggcaacgcgcttgagaggctttccagtttggtcgtgcatgtaattggcagtgtctgatgcctcaaccaccgtgagcagacgtctggataattggaggctagcacccggtctcctgctgctcagtggggtacatggtgcctaggggctgagctgcaagacgtgaagacgacggtgggaaaacgcgaggaaaagaaaaatcttgggcctcctgccggcgtgggcttgtggtggcggagaggaaggcacatgtcaagatgcactagcatgactgtcttcgatgaactttaactgctttgagcctttgacaagcaacgaggcaatttcccgttctctatttaagacacttgtgtgttcgacacccttgtgcctcgccaagctaatattctggtttggttggttagatgatttggctacaacggcatctgcaactatctcttgtcagggtttttagggacgtaagtgctagcgctcgagtgtgaatcattattgttgccatttatgttatagttcgtaaaccaaacagttctctaattgtaaacgtggataccgcttcttttggctggtagcccacgacttattgtttgccccttctggacaaataccttagcaatacaatgctgaaacgaatcaatgcagggtaacggttgttttggg

SEQ ID NO: 4799 - DNA, 2386 bp, Zea Mays
ctccctcccgctcactcgcgcaatccgtcgaactcgaacactgccatggccaccgccgctgccgacgacgatgtcaagctcgaatccttcctccaatggctccagtccaacggcgccgacctccgcagctgcacgatccgcgcatgcggcggcaagggcttgggggttttttccaccgccgcccccgagccgggctccaacgacggggtggcgatggtggtaccgctcgatctcgccatcacgcccatgcgggtgctgcaggacccactcgtcggcccgcgatgccgcgcgctcttagaggacggagtcgtcgacgaccgcctcctcgtcatgctcttcctcatggccgagcgccgacgccctggctcactctggaagccatacttggatatgcttccgagcacctttgggagctccctttggtttactgaggaagagcttgccgaactggaagggacaactttgcaccgagctacgttgattcagaggaagtcattgcaatcctcatttgatgagaaggttaaagggctcgttgaggagcttttgcatgtcgatgaatcagcaagctcagttgaagttttgtttgaggacttcctttgtacgagtctatgacagggcaaactcaatcttctggactcgagcactgaacataccattgcctcattcttatgtttttctgggctcatgtggcgatcaacaggccagggctgacaatgatgcccaccaggaaattgatattacagctaaggattgtagtgctgatgagaattctaaaccaagtaacacagagtcaatttgggttgagggccttgtcccaggaattgatttctgcaatcataatgtaaaggcactggcaacatgggaagttgattctgtgggaaatgctaccggaattcctgcttcaatgtacctcttgcttgctgataaaagtcctgctgagactggagcagagatctgcataaactacggcaacaaaggaaatgaggaactactgtacctttatggatttgtggttgacaacaatcctgatgattatctcatggttcattatcctttggaagctcttagacagatccagtctgctgatataaaaatgaagctactagagatgcagaagggagaattgaggtgcctcctacccagaagtttgcttgataatggattttttggtatccgttctagtgaagataaggatagcaagaaaaatactggtccgttttcaagttttagttggagtggtcaacgcaaagttccatcatatcttccaaaaattgttttccctcatgaatttatgagtactctacgtactattgccatgcaagaacatgagcttgaacaggttgcttctttacttggagagactttattctctaggcgtgaaactacactttttggagatgcagtgatcagtgtttcgttcgctacttctgaactgatctgttgataactgtgtactaaaaaggagtaggagactagtgactccgcacgttggatatagtgaagacagagaaacatcttgtgcagcgatccaaagtgctatttgggaggtctgcggtgatcagggtgcactgggtttgcttgtggatcttctcggggtcaaaatggctgaacttgaagagggctctggaacagaagcatctgacgccgaactgctcgagcagttcgattccattcagccagaagactacgcgagtgaaagcggcgagaagcacgaaaggaagtcaaagacaaactaccgttcgtgtgtagtgtaccggagagggcaaaagcagctgacgaggctgttcctgagggaggtagagcatcttctggagctttctgcgaaagaacagagctaagagactctcatctggtacaagattgatttccttctctctgttttccgagtgaaattcctgaggtttctatgttttactagcctgttgtttatctacgatcatgacattgacaggccctgcctgcatcaaggttagaactgcagggttgtgaaaggaggcacacccgttgcgaaagtagaataccgccttcgtttcgttcccttgcgaaagtactactactccgttccaggactacgatttcgtctcccgaggattccggattgcccgttggctgggcatttgtggaggagacgtcgtcttgcactttgctgccacggctaggctgtagctttacctgattcagcttgcagcggcggagctgcagcgaacagccatctagagacagctccagagctctggttttaccaaaatgcgtttcttttctagatgactttgccttcgtcagagatgcatctcctggtctcacgagtcacagttccgactccgagacggtcaaggagattatagtctgctaagattatgtaatctaaagtattttttaaaccggg

SEQ ID NO: 4800 - DNA, 819 bp, Zea Mays
agtccccattgtccactccctccaaatccccgttgcgtcggccacacctcttcctcttacgcgttacacatcttcctcttcctctaaaattaaccgagcgtctcgaccctgcgaattcatacgcgcgcgcgcgcgcgtgtgcacgtgcgcaggcgcggctggtagcctgcagacaccgacacgtagcagcggcgtcccgtcttccatcttccatggcggcggcgagctatgatcggttggccgtcgcggcgtccgctgtggtggtggcggcggtggcgctggcggtcgctgggctgccggcggctggagcgctcggggtgaactggggcacgatggcgacgcaccagctgccgccggccaccgtggtgcggatgctggaggacaacggcatcaggaaggtgaagcttttcgacgccgacgccggccccatggacgcgctcgccggcaccagcgtggaggtcatggtggccatccccaacaacatgctcgacatgatgacggactacggcacggccagggactgggtgcgccagaacgtcagccgctataacttcgacggcggcgtgaacatcaagaaaggtcgaaaggatatggcaagaacaattggcctttgccgtcttggtgtgatccttttcagctctgcatttgttggctgcgtctgctgtggctttctatatatctcccctgaaaaatggaaactttatatcggtgacaacaaagtagtaccaaaagctgtgaacgtgcacttcagcaaaacagacttccatagcgcacacataaaacataaattaactagctcctcttagtttcgatcctcct

SEQ ID NO: 4801 - DNA, 1349 bp, Zea Mays
cggaaaaaaaatcccattatggacggcgactggtactttttgttcgcggggacggcgactggtactttttgtcgctgcggagacggggagtcttccgactcttccccaacgggaattcctcattcacatccctacgcacgaacggaaacgccccatgctgcgctcgcagtctcgcatggactccaccactgctgctgctaccgcggccgcggctgcggcgccggcgccggtgctgctggtgacgaacgacgacggaatcgacgcgccggggctccgcttccttgtcgaccgtctcgtcgccgcagggcgataccgcgtactcgtctgcgcgcccgacacagacaaatcgggtgtgagccactgcatcacatggcgccctgcactccgctgtaaacgtgttgatataataggtgctacagcatttggagtttcaggaactcctgctgactgtgcttctttaggcatctctggaaaactatttgatggtttggttcctgatctggtacttagtggaatcaacattggaaataattgtgggtaccatgtggttgcgggtcggagcagtgttaatgacctcaaggtgtctgcagaggtctgcatgcctctgataaatgctatcgtgactgagatcaagaatgggacttaccctcaaggatcattcttgaatgtagatgtacctacagatgctgcacaccccaagggctacaaaattacaaaacaaggaacatatatggccagaattagttgggagcagacggtttacaagaagcctgcagtagaaagttaccagacagcaaacatggatgttgatggtgaaaaggatagcgaactagttacttcagaaaatgacctactgtttaagagagtgattgtagggagaagttccaatggagtggaaggagaggaaacggaccacaattccctagttgatggatatatcactgttactcctttgggtgctctttcccgcacagaaccagacgccataccgtatttcaaagcttgtgtctcacgtctggttgataatttctcttctcctggctcttctttttctagaagcagaggatgagccatgaaatttctaaagctgtttatttatggccatgatcaagttccatattgctttttcctaacccatacatggttaccatacatgggcaatattgccattcatgctacctgaatgttattactgcaatcagcatgtgtattctgcttcatagcctatgtcagaattatgcattcacaaatggttgcccgcttctttaccatgcatcttgtaagaaaaataggttcatttacaaatttattttggtgtttaatattcaacaagagcatttgaactaaca

SEQ ID NO: 4802 - DNA, 659 bp, Zea Mays
cagtgagaagtttgaacctggtagccgggtcctcttgtgacttcctagggcacaactttgtttataaacaaaaatgttacatcatcaactcctcgccctgctattgaatcctcagagagaattgctagggctggttctttgcccccagctttggaaccagagtctcctagaatagaggcgcctaaggttgtgcgctcatctacaatcatgtcagcatcgggacttagtttgctagctggaactacaacaccacctaaaagagaccagccgggtgctttcagcagaacaagttcaatgaaggaaggatcctctgagttaccgagtggtgtccgaagctcagcagaaccaagccccaggagatctggcggttcaaccctttttggagggcttggttttctaaggagctacaccagctgagacgaacttaataccttgcagggcaatgcctggagggttgtatattgcactggattatactagtagaatacatgtttggcaaggagcagttgcaactaaatttgtgcttttcttggactcaaacctgctggctgatgatgcttgcttggatagcatgtatgcaacatttgttgtggcagctgcaggctgcaggcatatctggaaactctggatccactcacggttggatttccacccagtac

SEQ ID NO: 4803 - DNA, 2037 bp, Zea Mays
caccagtggcctaagctaaggcagcttccatgacactccacgccgcggtgccccttcccaactctctcccacccggcccgggcgcaacacaataactagccgggcaccaacactcggaggcacagcccgtggctcccgcgccagccatgggcgccacaacgcggcgcgagccgctgaagcagcgcgtcaaccgctgcctcctcaagctttccgaccgcgacacagaggccatggcggccgccgagctggaagccatcgcgcgcgcgctcgagccggacgagctcccgaccttcgtatcggccgtttcggacgcgcgccccaccgacaagaccccactccgccgccacgcgctgcgcgccctggcactcgtcgcggcgtcccacccgcgcgacgtcgtggccccgcttatcccgcgcatcctcgccgccgcgctccgccgcgtccgggaccaggactcctccgtccgcgccgcgctcgtggacaccgcgcgcgccgcggcggcggcctcggcctcggcctccaccgcgctccggcctctcacggacgcgctcctccacgagcaggaccagtgcgcgcagctagcggccgcgctcgccacggccgcggctgtcgaggcgtccgccgtcaccgacgacctcgcttcctacctccacaagctccaaccgcgcctcctcaagttacttcgcagcaatgccttcaaggccaagcccgcgctcattaccctcatcggcgcctccgctaccgtgggcggcgatgccgaagtcactgcctccatcccgtgcctccgcgatgcagtcgctagcgatgactgggcagcgaggaaggccgcggcggaggcgcttgctgcattggccctagagcacacggatcttctcacgacctacaaatcctcttgcgttaccttcttcgaggccagaaggtttgacaaggtcaagattgtgcgagagtcgataaaccggatgattgaggcgtggaaggagatcccgggtgctgaagaggacgagtgctcctccgctccgccatcagcgtcccagtcacaacgaagatattctcttacaggaagtgcaagtgatgggcgatatccagctgcttcgctgggctcaaactcagttccatcagcaacaaggaggagcagattacctgtgagcagatcatctccacctgatgtgtcacccagtgtcaccaaaacatatagtccttcatccatcaggaacaagaagctgtcaccgccttcatatcggaaagcgcgccaagcaaataattgtaactacaaggttgagatagctgttgctccggatgctacaccaatcaaagtggtgacggaggagaagctgctggaaggaggcaatgtgagaggcagactggaggctaggagggcactcttccaaggcagccaggataggtcggccaagctggctggatacaaagcagggtcacgagttgttccatacgagggtggtggtaatttggaagagatttcagaagttgaaggtagatcggaaaggtatgcagttcagaaagacgagagcttgtcagaaataaggacgcagctccttcagattgaaaatcagcaaagcagtttactggatcttctccagaaatttatggggaagtccgagaacggtatgcgttctttggagacaagagtgcatgggctggagatggctttggatgagatctctcgtgatttggccttctcttcaggaaggatgtcaagcagagagcctgatgcaaagacgtgctgcattccgagcccaaaattctggagaaggcacaatggtggtaggtcttcctcaaggttttctgtctcagacgcagcaaacagctcagatgggagcagaacttcttacaagtgggagaggcagaggtttgggcttcagggtgggtttgtcacaaacccattagccgagccgaacatttcatctgcagggaaaacaatggttactcatgaaggcaggaagaaggataaaactttacaaaagtgaaggctcggcggaaacagacattcaggcccatggctgccatgctggagtggag

SEQ ID NO: 4804 - DNA, 2454 bp, Zea Mays
tcaccagtggcctaagctaaggcagcttccatgacactccacgccgcggtgccccttcccaactctctcccacccggcccgggcgcaacacaataactagccgggcaccaacactcggaggcacagcccgtggctcccgcgccagccatgggcgccacaacgcggcgcgagccgctgaagcagcgcgtcaaccgctgcctcctcaagctttccgaccgcgacacagaggccatggcggccgccgagctggaagccatcgcgcgcgcgctcgagccggacgagctcccgaccttcgtatcggccgtttcggacgcgcgccccaccgacaagaccccactccgccgccacgcgctgcgcgccctggcactcgtcgcggcgtcccacccgcgcgacgtcgtggccccgcttatcccgcgcatcctcgccgccgcgctccgccgcgtccgggaccaggactcctccgtccgcgccgcgctcgtggacaccgcgcgcgccgcggcggcggcctcggcctcggcctccaccgcgctccggcctctcacggacgcgctcctccacgagcaggaccagtgcgcgcagctagcggccgcgctcgccacggccgcggctgtcgaggcgtccgccgtcaccgacgacctcgcttcctacctccacaagctccaaccgcgcctcctcaagttacttcgcagcaatgccttcaaggccaagcccgcgctcattaccctcatcggcgcctccgctaccgtgggcggcgatgccgaagtcactgcctccatcccgtgcctccgcgatgcagtcgctagcgatgactgggcagcgaggaaggccgcggcggaggcgcttgctgcattggccctagagcacacggatcttctcacgacctacaaatcctcttgcgttaccttcttcgaggccagaaggtttgacaaggtcaagattgtgcgagagtcgataaaccggatgattgaggcgtggaaggagatcccgggtgctgaagaggacgagtgctcctccgctccgccatcagcgtcccagtcacaacgaagatattctcttacaggaagtgcaagtgatgggcgatatccagctgcttcgctgggctcaaactcagttccatcagcaacaaggaggagcagattacctgtgagcagatcatctccacctgatgtgtcacccagtgtcaccaaaacatatagtccttcatccatcaggaacaagaagctgtcaccgccttcatatcggaaagcgcgccaagcaaataattgtaactacaaggttgagatagctgttgctccggatgctacaccaatcaaagtggtgacggaggagaagctgctggaaggaggcaatgtgagaggcagactggaggctaggagggcactcttccaaggcagccaggataggtcggccaagctggctggatacaaagcagggtcacgagttgttccatacgagggtggtggtaatttggaagagatttcagaagttgaaggtagatcggaaaggtatgcagttcagaaagacgagagcttgtcagaaataaggacgcagctccttcagattgaaaatcagcaaagcagtttactggatcttctccaggaaggatgtcaagcagagagcctgatgcaaagacgtgctgcattccgagcccaaaattctggagaaggcacaatggtggtaggtcttcctcaaggttttctgtctcagacgcagcaaacagctcagatgggagcagaacttcttacaagtgggagaggcagaggtttgggcttcagggtgggtttgtcacaaacccattagccgagccgaacatttcatctgcagggaaaacaatggttactcatgaaggcaggaagaaggataaaactttacaaaagtgaagggcgggttaggcatgatgaagacattctgttccaagcgtgaactgctcgagtttgcttattatcatggaggcggctgtagttctcttttccaccgcgacctcttttttttcctaaggaacgtacattgtcatttttggaagcttctgaaagcatggcgtgcgcgtgaactatggatgtatgagtcactccgaagctaaactgtttgagtactatgctaagctgaggagctgcattcacatcatgtggtggagcgcgagggaggcttctttatcggacagcctcacttgtcaccgacgcaatcaggcacccccccaagccgtggactacgctgggtttggctttggcatgagaacgaccgctgtgtttgtcataagtcatatcgtaactagagaaacaagtagctttataatcacaatgtatcaccatcctacagaactatggatgcgtcttgtacataggccggataaagcgcttctatgttcccgagcgtcttttctttaccatgattccaaagtgtgtttttttccccttagtattaagaagaaaaataaggaggtagaagaaagtctga

SEQ ID NO: 4805 - DNA, 1866 bp, Zea Mays
caattttcagcaccactatttctccttaactgctgttttttttttgggtttccacacttggtcgccgtcttctccccctttcgctttcgctcttcctctccagcccacaagactccgcggcgccgcagacatgcgcccgcttatccgaaccgctcgctgctggctcctccgcgcgcgtgttcgcgccatggccacgcttcctatggcgtcccccgccgccgccatcccctcctccgccacccgccccgtcgcctccccttcttcgcgttctcaccgccccctcacccgcttcttctccgtcgcgccggcgccggtcggggcgaaagggctccgagcggcggcctccgccgttgaggtgggcggcgtaaagatcgcgcgcgaggatgttgtgaaagaagatgacccaacaaacaacgtgccagacactatctttgcgaagattggcctgcagctgcacaggagggagaaccatccccttgggattctgaagaacacaatttatgattactttgacaagaacttcactggacagtttgacaagtttgatgacctttgcccccttgtttctgtcaagcagaattttgatgatgtcttggtcccttctgaccatgtaagccggagttacaatgacacatattatgttgatgatcaaacagtcttaaggtgtcataccagtgctcatcaagctgagctgctaagggatggacgtacacactttcttgtaactggagatgtttaccgttctggcttggatgggacagcatatgcagctgcagaactcaagaaaacactggaaggattggcaagacatctatttggtgctgtagagatgcgatgggttgacacatacttcccatttaccaacccatcctttgagctcgaaatatattttcaggatgattggttagaggttttgggctgtggagttaccgagcaggaaattttgaaaagaaatggcaggagagatcatgtggcatgggcctttggattgggattggagcgtcttgcgatggtccttttcgacattccagatattcgactattctggtcgaatgataaacggttcacgtcccagttctcagaaggcaagcttggtgtcaagttcaagccattttcaaagtttcctccttgttacaaagatatgagtttctggatcaatggtgcatttacagaaaacaacttatgtgaggttgtcagaggaatagccggggatcttgttgaggaggtaaaacttattgataatttcaccaacaagaaaggcatgacaagtcattgctacagaatagcatataggtcaatggaacgttcgctcacagacgaggagattaacaatcttcagttgaatgtcagggaagctgtgaaagataaattgaaagtagagttgagatagcagcagctaattatgctgtcatagcatggactaaattttgcctgtctttatgtaaatcaattaaaaaggattttttatctatcgagaaaatgcgccatttgttcctggcattgatcacgttctcttctgtttagggaagagaaaaggtccctgttccatttgggaatcatatcttgtaattcataaggctttgtttggttgcacagggatcaaaggagattgaggaggattaaatccctctctattcaattttgactaggtagagatttaatcccctctaacctccttttaatccccttgtaaccgaacaagccctaagatgatgagctgtacacttctcactattttggaggacatgtggtttgggaattcatgtttggcctttcaattcaattttggccgttgtacattatttgtaacgaacaagtaaaagcactctgtatataaagtctaggatggttcaaatctgaaattaa

SEQ ID NO: 4806 - DNA, 1860 bp, Zea Mays
tttcaatgctgcagcttttgagttatgctgcatattcatatatacgtcaatcagtcaaaaccttctcatctttcttctgtctcctttttttctctgtcatgggctcatggcacacatccaactgcaatgtggtgaacgagtatgtgggagcgatgaggcagctcgcatgtgagatcctggacctgctcggagaggggctagggctcaaggaccccagatccttcagcaggctcatcgctgacacagacagcgactcactcctgcggataaaccactaccctccaccatgcgccattcacaagcttgaccacgacagtcagtgcaggatgaagaacagtttcaggatcgtggcaggcaatggcgcgaaccagtcggcaggtgcacggatcggattcggggagcactcagacccgcagatccttagcttgctccgatcaaacgatgttgacggccttcaggtgcttctgaacagcgacggcagagaggtgtgggttcaggtgccagccgatccatcagcgttctttgtcaatgttggtgatctcctccaggtaaaataaacaggcactgcggctagtagattaggtaaatgagaattgcttctatatatgagctaccaacgactgtgtcttctaaacagacaaccaggttaattagcaattgctcctttttttgtgaaaagatgggtcagcactgatgttttttggacagcatatgcaccaagtacatcgtaccaactgacaaggatttctgtttttgtcttgttagttgttaccacatctgaatctaacaacattaatccattccatggtgcaacaatataatgtaatatcatgtctcttttcctttttcttgtatgtatgttcccaggccttcacaaatgggaaggtgataagcgtccggcacagggtaattgcaagctcgagcagggcgaggctgtcaacgatctacttcgctgcgccgccactgcatgcacgaattttggccctcccagagacagtcacagccaactcacccaggcagtaccggcccttcacctgggccgagtacaagaagacaatgtactccctccgcctcagccacagccgcctcaacctcttccacatcggccatgatgaccacggcaaaggagaacaagaatagggagaaagtggctgaactgcaggcagagagtttatgttggaggcttaggtaggtagaattgtccccaaaattttggctctctggcctccacagccagataatgtctagcagtatgctggttctgccaagtgccaatgggtaatagtatttagcattgtacacaagtccttgttgtatggaactgatgtactattgcctgttttagcagtttgttgtctccacctaacttttatttactctcccccccccctttctagagttgcctttgcttaaagaaacctcttccttgcacaaaagtgagacctaacaaggactccctgctgacaattttgatacatcatccatttttatggaatctaaaattgaagcctaaaaggacttcaaatgtcacatatactataaaaataggtcaaggaagtgatagaatgttcaattaattaattctgcaaacccatcacatcacaaaacaattccccactgtttatcaccttcactgctagttcagaaactcaaattcccttgggatcaatgtctttttctagggtgagcgattaatgggatatcatttaagtaagatatttagttttttagctctccttacttccaaactagtcctcataatgcaaatattgtatcattatatctatgtgaataataagtatattttctctcaaatatgcaggagagttatgtgtcattatattaataagaaaagaaaaa

SEQ ID NO: 4807 - DNA, 2778 bp, Zea Mays
gctgaatattattagtggggcaaaaagacacaaatccgaaaccctcgcatcggcctgtacctagccgccgtcgccacagagccctcatctcgtccgtcctcggcggcctccgcggagcagccgtcgctggagcctggagaccaaagatccggccagatctgatgtcaggagggactggctcatccgggcgcgcggccccgcggtacgccccggatgacccgacgctgcccaagccgtggcgcggcctcgtcgacggcaccaccggctacctctactactggaacccggagacgaacgtcacgcagtacgagcggcctgtgccccccgagagccagctcctcccgcctccgcctccgttgccacccccgcctccacggagccgcgaccgccgcgacaggtccagatcccgatcccgcaccccaccccggcgcgaccacagggaccgcgaccgtgaccgtgacaggcgccacgacgagcacgcgtcctccaagacggcgtcttcccaccaccatccggctccggtagccgtcgccgacgatccttccaccgaggcataccgccgccgccatgagatcaccgtcacgggggataatgtgccgactccaataacttcatttgaggctggtggcttcccgtcagaaattctgaaggagatacaacgtgctggattcgcaagcccaacacctatccaagcccagtcatggccaattgctatgcaaaatcaagatgtagtagctattgcaaagactggatcaggcaaaactcttgggtatctacttcctgggtttatgcatatcaagcgcctgcagaacagcactaggaatggcccaacagtgctagttttggccccaacaagggaacttgcaacacagattctggatgaagctgtgaaatttggaagatcttcaagaatttcttgcacgtgcttatatggtggtgctcctaaaggtcctcagttgagagatttagatagaggggttgatgttgttgttgcaacacctggaaggttaaatgacatcttggagatgcgaaaggtgacaattggaagtgttgattcacttgttgctaatagttctattactcagcatgtagagatcataacaccctcagaaaaacaacggcgcctggagcagatattacgatcccaggattcaggttcaaagatattaatattttgtaccaccaagaggatgtgtgaccaacttgcaaggacactcaccaggcagtttggagcttcggccattcatggtgacaagtcccaaagtgaaagggagaaggttctgaatcagtttcgatctgggcggtctcccattttagtggcaactgatgttgctgcgcgaggtttggacatcaaagatatcagggtagtgatcaactatgacttccccactggtgttgaagactacgttcacaggattggcaggacaggaagggctggtgccactggtgttgcatatacatttttttgtgatcaggattcaaaatatgctgctgacctaatcaaaattctggaaggggcaaaccaacgagtgccccgtgatttagaggatatggcttctcgtggcggtggacgaggtaggaagaggaaccattgggcatcccgccctgacaggggtggttcacgttctgaactggattcaaggtacagcagcagagatggactagcatcttctgggaaatcagagagtggtcgcggcagtcgtggaagggatgataatggtagccgtggcaggtacgaccctggtgaaaccgatgggcgatctcgtaggtctactagaggccgcagtagaagccgtagcaaaagtgacagtagaagccgtagcccaagtcccaagaagtcacgtcgtcatgaaggtagacgtagcaggactaagagcaggagcaggagcaggagccgtagaaatcatggcgctagccacagcaagagtcgcagccctgtcgctagccgtaggtatgaaaagactgcttcaggatctgctcggcctaactcggggcatgcagagcacaaaagccctccaagatctcactctagggatgaccatgtgaaccactctgaccacaaggatgaccacaaggatgaccacatggaagatgggaagatggaaagggttgatcttgatcgctcgcccagcccacacgatgacaagtctgctccatatagtcctgtgtacaatggcaaagccagtggctcaatgagccccaacggtcagccagaggcaggtgccaaatttgttgaaccttctgggaaacctgagcctgcatctccagtgcgctgcagcaaaggcagagatgatgatgaggaaggtatcatagacgaggatggagagattggtgaggatgatccgcgtgcaaatgcagctgtgcagaatggtaataactgacggagagtggcctgcatcttctgtgacaaccaagacttatctgttatgcaaaatgcagtcattcccatctgcaagtcctgaatacggaaatgcatttgtgtgccattaaatatctcgtagaacatgtgatactgatgcctctgccatcgatgaaccaaaactgttgatgcatgtcatgtcatgttgttaaacttaatgacattgttgtgttctggtgttttacagccagttctgtaagtgatttatgataaaatatattgtcaggtctggaagtggtagtttatgataactagcaaagttatgttgctacggtttctatttataaagtatagaatataaaatacaaagacatgtgttctgttggttaggtgaatgcgaatatgggtttatagcaaaa

SEQ ID NO: 4808 - DNA, 2989 bp, Zea Mays
cttggccgctgcgctcctccactcccctattccccacatcactccgcttttgcggccgcttgtggcggtgccttccacggggctgcggctgcgctccgccggagcgagcaaatatccttgcccccacgagaccctcgcacagtcgcacctctccgacgtgaccggcgccgtagaaccaccgggtcttcccttgtgggattattcaagaacatggagagaaagagaaaccccattgtctttctggatgtatctgtaggtgatgagccagatgaaagaatgatctttgagttgttcgctgatgttgcaccccttgtgactgagaacttcagagctttatgcacaggtgagctgggaattggacacaagactaagaagccattatgttacaagggatcatcgttccaccgtgtcatcgaagggttcatggcacaaggaggtgacattgcgaaaggaaatgggtctggtggagaaaacatatatagtggaaaatctgcagatgaaacttgtgttctacctcatgatgatcgtggtctcttgacaacagcagatactggatccaaagctagtggctcccagttctgcattactttcaagcctaattctcatcttgacaggaagcacacagtttttggcaagcttgttgttggaagtgatgttctgaagagaatcgagcaagtagatgtgcaatcccctgattcaactcctgttgttccggttactatagtaaattgtggggagctcactgaccgtaaagatattggatctatgagaataggaattgataaaaagagggccgccaaatcaaagttgtcaaagggtatatcttctgatgaggaaagtaatgaaggacagcacaagggccgccgtaacaaatcttcaaaaaggagaaggaagaagagatatttttattcggacagttcaagtgatgacaggcgaaggcgcagaaagagacattcgaagaaaaataaacgcaagcgttcaagaagaaagcatgaccaaaggcgtgaaagaaggcgtaggaagcgtgataggaaatcaaaacagaagtcaaaaagcaggataaagggtgacagtgaagctgaaagttcgagtgatagcagctctgaagatgctagaagcaagagacaccgccacgggcggaagtccaaggcatcatctcaagtttttgaggaaaatattgctgcagtgtctgctttgaaggatgccacgtcacctcaacaaaagagtggcataccaaacagtccagcacaagatgtctccccgctgcaaaatggggaaaactatacaaatggtgttaacgaatcaaaaattgaaaggaatgcagctgtcatgcctgttctaactggcaaccaaagcaaatctaggagccagagcatgagtgttaatcactcaatgagcaagagtatgagcatcagcccaagaagaagcccaatgaaaaggtcaattaccaccacaaagaggtcagttagcaggagccctgttcaccataatcgcagtggaagtcctgtcggtgctccccaaaaaagcgtgagcaggagttcagccagaaggcagagcatcagcaggagccctgctaggagcctcagcaagagcccacccagagatgcaagcagaagcccccacataagcaggactcctgttaaagctcacagaagaagcattagcaggagctcagctaggtccatggaacagagaagtctaagcaggagcctggagagaattcatgtacgaaaaagtgtcagcccaagaccaccattggcgaagccaaaaagcattacccgaacccctgtgacatctccattgcgaagcgttagccggagcccagctaggatttcaaggagcccacttaggccttctaggagaagccctatgagaagtccacgacggaacattcacagaagtctcagcaggagccctgcaagaatacttagaagtgtgagcagaagtccagtaagaggtggtcgacctcgccggaacattagcagaagtcccagtccacttcgcagggcattaacaccaccaaacaatggaaggagccgatctaggagtgattctcctgatgggtcacccaaacgcataagacgtggacgtggttttactcaacgctattcatttgcaagacaatatcgctcaccttccgctgatcgcttgcatcgttatggcggaagaaatgaccgtgacagatacatgggttaccggggttttcgccaccgatcacctcctcgacgttataggagcccctctagaggcagagtgtcatcgccaaggtacaggaggaggagccgaagcgcatcacgcagtcctgtccacagaggaaggagaggtgggtacaacaagagtcctgtacggagccgttcaccccccgccaggaaaaggtcacctagcgatcgtgcacggtcagtttctaggagccacctttctaggtcagtatcaaagtctccaccagtgcatcatccctccccacttgattctccatctctggagcgtgcaagtgatgggaaatctcggtccccatcaccgtctggtggaggcaagaaaggtttggtttcctacggtgatggcactcctgattcagctgggaagtaggtttccaccggatgtattgtactacctttggccattgtctcttgatcggtccagtgttacgtcactactgtagagaagagaacggttttggtccttgaggcgccccgtgtactggtgttgtcgctgtagaattgttacttaagttgtttgggatgatcgtcgttgtccttagattatcttaagacctagtactctgagcttagtttacgctcatgctgaacatgtagcagggcttcagcttaattaccattggtggaatttggatgttataatgtttgacgcatagagaatcattacattattttgatctcggagcacaataacatgtataattaataattaattccttctggaactatccaacactagcgtttctgcatgtatgcaataattcgcttggccg

SEQ ID NO: 4809 - DNA, 2017 bp, Zea Mays
gttcacagtcgacatgttctgcctcctcccatcacgcgtccgcgtccgcagctctgccccaccgcgcctccgccgccgcaatccgcgcccgcatcccaccatccccgtgcggctccttcgccgtgatgctcgcccacgcatgatagaaggcacacccgcatctcgattcccgccaccacaatctttgccccttgctgacttcgatggaaggcgtaccgctcgctctcacctgcctgtgccccgcgacgcccacccctccccattgctggggccaggcaaggatcatttccaccgtcgcaaaccaccgatcccgcaaaacggcgccgccatcctgctcgtccctaaccaccgcctacagatggattcccctcccccactgcgcacaacagatggctccgcgcatctcgtgaacacagcgggccgccggcggataagcacgcagcagctcaccatgcctgggtcgccaacaaacccgcccctctccttctcatccccacctgccagtgtaggagaagaggacggaggttagcagatctcgtcgcgctggtggagatgaccgaagccgcggagtgcgaggaggagcgggacctgtttgccgatgcataggccagcgaggtgtatgattgttagcatccggacggtgtggccgcggggctcgagctgctgaattcgatctgcgcggtgcacaggtcagcgaggtgtatgattgttagcatcggtgcggtgtcgtagctggtggaattgttgccgaagctagcgacggagtgtgtcgagccggctttggacatcttggatgccctgtctgcggttccagaggggaggatggttcttaaggattgtctgcagacgatacccaatgctgtccggttgctgatgagagtttcagaggcatgcactcgacgagctctgtcgatgttgtggccggtgtgtcggatggctccggaagaatgcgcacctgctgcagtggaggctgggttggcggcgaagcttcagcttgtcatccaaagtggttgtgcgctggagctgaagcagaaggcgtcggagctgctcaagctgtgccgcctcaactacaccgacaccccctccatctccaagtgcaaactcacaaggacaattcagtgagatatgcaaatgatgctggtctgatctgatttggttcgatgatgcgtggtttgtcgattgaccttgctgagtttagagttccgaggaaatggaattggcaaattgacgaatgatggcaagactggtggttaccacaacaattttcggggagacaagaagcgatgcagcctaatgactagcaagttagatggcaagcaggcggggtgtacatgcaaattgttgagaatttgatcagctcaataagcacatgaggttgggtggtgtcctgaatgatatggggctagactcactgtattggttatgtagacaacacccatatcggcatataagctcaacttcgtatcagcagaggaaaacatacattgtggaaataaattaattatggtctcagattcaagatatgacagatacttgtagaagtggcaatggtattacagaagccattcatttcgttgaatggggtgagaaaggaggacgtcagtttcttactcctgctggaattttaacatttaacagaaatagcatgagcgccaaagataaggctacgaggaaggatcagatcgatcttcgggtgggctgtctgaggctgacatctagaagatggtgcaagaagctaaactgcgtgcctagaagaatcaggaacggaaaagccctcatcatctaatctaattcgtttgtccattattttgctgagaagtccatccctcgataagtgttcccttcatgagtttataacaccaactccaacatactcactcacctctttcagtctgttcaaagcattgcttgccaattaacagagtaacgatttattatctgcaaatttaaatcatgttagatatataccgttgcaacgcacgggcctctaactagtatataattatatatatttgtg

SEQ ID NO: 4810 - DNA, 2093 bp, Zea Mays
atgttctgcctcctcccatcacgcgtccgcgtccgcagctctgccccaccgcgcctccgccgccgcaatccgcgcccgcatcccaccatccccgtgcggctccttcgccgtgatgctcgcccacgcatgatagaaggcacacccgcatctcgattcccgccaccacaatctttgccccttgctgacttcgatggaaggcgtaccgctcgctctcacctgcctgtgccccgcgacgcccacccctccccattgctggggccaggcaaggatcatttccaccgtcgcaaaccaccgatcccgcaaaacggcgccgccatcctgctcgtccctaaccaccgcctacagatggattcccctcccccactgcgcacaacagatggctccgcgcatctcgtgaacacagcgggccgccggcggataagcacgcagcagctcaccatgcctgggtcgccaacaaacccgcccctctccttctcatccccacctgccagtgtaggagaagaggacggaggttagcagatctcgtcgcgctggtggagatgaccgaagccgcggagtgcgaggaggagcgggacctgtttgccgatgcataggccagcgaggtgtatgattgttagcatccggacggtgtggccgcggggctcgagctgctgaattcgatctgcgcggtgcacaggtcagcgaggtgtatgattgttagcatcggtgcggtgtcgtagctggtggaattgttgccgaagctagcgacggagtgtgtcgagccggctttggacatcttggatgccctgtctgcggttccagaggggaggatggttcttaaggattgtctgcagacgatacccaatgctgtccggttgctgatgagagtttcagaggcatgcactcgacgagctctgtcgatgttgtggccggtgtgtcggatggctccggaagaatgcgcacctgctgcagtggaggctgggttggcggcgaagcttcagcttgtcatccaaagtggttgtgcgctggagctgaagcagaaggcgtcggagctgctcaagctgtgccgcctcaactacaccgacaccccctccatctccaagtgcaaactcacaaggacaattcagtgagatatgcaaatgatgctggtctgatctgatttggttcgatgatgcgtggtttgtcgattgaccttgctgagtttagagttccgaggaaatggaattggcaaattgacgaatgatggcaagactggtggttaccacaacaattttcggggagacaagaagcgatgcagcctaatgactagcaagttagatggcaagcaggcggggtgtacatgcaaattgttgagaatttgatcagctcaataagcacatgaggttgggtgatgacagatacttgtagaagtggcaatggtattacagaagccattcatttcgttgaatggggtgagaaaggaggacgtcagtttcttactcctgctggaattttaacatttaacagaaatagcatgagcggtaagttattatttttccggtctccctagagatgaatgaagaagcttttgacatccgatgtatatcttttaatctaacctgcaaactcaggtgtcctgaatgatatggggctagactcactgtattggttatgtcttatatttatatttgactgtattagttgatgagggcttgcctcagattgaggttacattcgacatcgatgctaatggaattgtgaccgtctcagccaaagataaggctacgaggaaggatcagatcgatcttcgggtgggctgtctgaggctgacatctagaagatggtgcaagaagctaaactgcgtgcctagaagaatcaggaacggaaaagccctcatcatctaatctaattcgtttgtccattattttgctgagaagtccatccctcgataagtgttcccttcatgagtttataacaccaactccaacatactcactcacctctttcagtctgttcaaagcattgcttgccaattaacagagtaacgatttattatctgcaaatttaaatcatgttagatatataccgttgcaacgcacgggcctctaactagtatataattatatatatttgtg

SEQ ID NO: 4811 - DNA, 2163 bp, Zea Mays
atgttctgcctcctcccatcacgcgtccgcgtccgcagctctgccccaccgcgcctccgccgccgcaatccgcgcccgcatcccaccatccccgtgcggctccttcgccgtgatgctcgcccacgcatgatagaaggcacacccgcatctcgattcccgccaccacaatctttgccccttgctgacttcgatggaaggcgtaccgctcgctctcacctgcctgtgccccgcgacgcccacccctccccattgctggggccaggcaaggatcatttccaccgtcgcaaaccaccgatcccgcaaaacggcgccgccatcctgctcgtccctaaccaccgcctacagatggattcccctcccccactgcgcacaacagatggctccgcgcatctcgtgaacacagcgggccgccggcggataagcacgcagcagctcaccatgcctgggtcgccaacaaacccgcccctctccttctcatccccacctgccagtgtaggagaagaggacggaggttagcagatctcgtcgcgctggtggagatgaccgaagccgcggagtgcgaggaggagcgggacctgtttgccgatgcataggccagcgaggtgtatgattgttagcatccggacggtgtggccgcggggctcgagctgctgaattcgatctgcgcggtgcacaggtcagcgaggtgtatgattgttagcatcggtgcggtgtcgtagctggtggaattgttgccgaagctagcgacggagtgtgtcgagccggctttggacatcttggatgccctgtctgcggttccagaggggaggatggttcttaaggattgtctgcagacgatacccaatgctgtccggttgctgatgagagtttcagaggcatgcactcgacgagctctgtcgatgttgtggccggtgtgtcggatggctccggaagaatgcgcacctgctgcagtggaggctgggttggcggcgaagcttcagcttgtcatccaaagtggttgtgcgctggagctgaagcagaaggcgtcggagctgctcaagctgtgccgcctcaactacaccgacaccccctccatctccaagtgcaaactcacaaggacaattcagtgagatatgcaaatgatgctggtctgatctgatttggttcgatgatgcgtggtttgtcgattgaccttgctgagtttagagttccgaggaaatggaattggcaaattgacgaatgatggcaagactggtggttaccacaacaattttcggggagacaagaagcgatgcagcctaatgactagcaagttagatggcaagcaggcggggtgtacatgcaaattgttgagaatttgatcagctcaataagcacatgaggttgggtgctcaacttcgtatcagcagaggaaaacatacattgtggaaataaattaattatggtctcagattcaagatatgacagatacttgtagaagtggcaatggtattacagaagccattcatttcgttgaatggggtgagaaaggaggacgtcagtttcttactcctgctggaattttaacatttaacagaaatagcatgagcggtaagttattatttttccggtctccctagagatgaatgaagaagcttttgacatccgatgtatatcttttaatctaacctgcaaactcaggtgtcctgaatgatatggggctagactcactgtattggttatgtcttatatttatatttgactgtattagttgatgagggcttgcctcagattgaggttacattcgacatcgatgctaatggaattgtgaccgtctcagccaaagataaggctacgaggaaggatcagatcgatcttcgggtgggctgtctgaggctgacatctagaagatggtgcaagaagctaaactgcgtgcctagaagaatcaggaacggaaaagccctcatcatctaatctaattcgtttgtccattattttgctgagaagtccatccctcgataagtgttcccttcatgagtttataacaccaactccaacatactcactcacctctttcagtctgttcaaagcattgcttgccaattaacagagtaacgatttattatctgcaaatttaaatcatgttagatatataccgttgcaacgcacgggcctctaactagtatataattatatatatttgtg

SEQ ID NO: 4812 - DNA, 1310 bp, Zea Mays
attcgtccccgacctaaggaagcggaccccggccaacgctcctgacagattcgcccggccgacgctcccttcgattccgtcctctcgcccgcgctccgcagcaggtgtgtaagacatcttcagcataccatctggtccgtccctggaaatgtccggcgtccaggagcagttcgagatcaagttccggctgccggacggcatcgacatcgggcccaggcgcttcccgccggcgtccaccgtcgctacgctcaaggagaccatcatcgcccagtggcccaaagtgtccttactgttcgttctcaacagataaggagaaaggtcctaggactgtgaacgatcttaagcttattaacgctgggaagatactggagaacaacaaaaccctgtcagaatgcaaaagtccgatctgtgacttctctgggatgacaacgatgcatgtcgtcgtccgcgcaccgacttcaagcaaacagtctggtaaaagagcagcaacgaaagcgaaaggtttcaggtgcggttgtgccattatgtgacagagaatgccagttttctccctttttccgctcttgctggagtgttgtatcatgtttgaggcgctttctccttttatttccttttcaagtattgtgggtaagcttaggtatacaatcactcattttggtgcaagcgtgcaatcaaactatccagagcatccaatctagatccaacggtttcatatggaagtggttaaaattaaaataggtactatgttttaggtgtaaggggttaaatataaaataacagtcatcattagatctagatcggatgcaccagatcgcttgattgcatgcttgcaccaggataagtgatggcataggatattttcccgcggttaagtgcccattaatcacgagtttgcatcgaacacaaaattggaaggcagcttgctgctaattacccttaatcttaagttatgccaagcacacacaatttgaaggcagtcattagtgtctaaactgcgatcttccatgatttcaggttctcttctatatttatgctaccccgggtgacgtgatgaacttttcggaacggcgttctaactgatcaatttacattacgtaacaccaaaaccaattgtaatctgataactaaggaagctttggaggcagaggagcgggcgttagcaggttggtgcaaggtagtaaatatgttgacgggtcgcacaggaccggccgcgggtgcagaagccgccgaaaaatatgaaactttgtttcgaagctttgcagcttttatcgtttttaataatgagttctgttttcaataatgagttccgg

SEQ ID NO: 4813 - DNA, 2566 bp, Zea Mays
ttttgtattgatggtaaaactttagtcgctttggatgcaagcaacccaacttttttacagttctaaaataatcagttttttttttttgcaaatttatattgtaaagttggttgcatctctcattgaactatagtcctagtgtcctgtcattcttgcactgtaataggaatataggaccctgataagtgtttggatctcagcaatccacatgcctggcctcttgctatccttgctgccgttgatacattgtttctttgagtgttttatccccttttctggcttctgttaggttttatctctagccctgacttcctatggagctgggagtaagtctttgttgttgttgttgtattaacttttgatggattagattgtgccataccagtgcaatgttccaacagatggatatgttggctattaatgggtaactcactacaatggttcttttggttaatcagggtgtttatgatgtgaatcattcatttcaagaatgtcatacatttcacattctgctgatttctaatttttaacagctcatatttttgaacagggctgaaccaaggtgtaagcggtttaccactgaagggctggccattaactggaattgaccagttaaggccgaatttgggtgctcaaatgcagaagccatttctttcaacacagtcacagttccaacttatgtccccacagcagcaacaacaatacttagcacaggcccaagcacaagggaaccttggaaactcaactaattatggggatattgatccccgcagacttacagcattgaccaggggtagtttgaatggtaaagatagtcagcctgcaggaacggatggttgtattagttcccctatgcaatccagttcacccaaagtcagaccagaccaagagtatctcatgaagatgcagcagacatcttcccagcaaccccaggaacagcttcagcagcagcagcagaaccaacagcagcaacagagccaacaacaaatgcaacagaacaatagaaaaagaaagcagcctacttcttcaggaccagcaaatagtaccggtacaggaaacactgtgggtcctgcaaactccccaccatctacaccatccacacatactcctggggatggacttggaatgggtggtaatatgcgccacgttccaaagaacttaatgatttatggtgcggatggaactggacttgcctcctcttcaaatcaaatggatgacctggagcagtttggtgatgtgggctctttggacgataatgttgaatccttcttatccaatgatgatggagatcccagggatatttttgctgcactcaaaagaagtcctgcagagcctagcccagccgtttcaaaaggttttactttcagtgaagtcaactgttggcgcacaagcaacagcaaaattgtttgctgccacttctcttcagatggcaagattttggctagtgcaggacatgaaaagaaggctgtactttggaacatggaaaattttcagacacagtatacaccagaagagcatgcccttattatcactgatgtccgtttcaggcctaactctagtcagctggcaacatcttcttttgatagaactattaaattatggaatgctgccgatcctggattctctttgcatacattcactgggcacaacggccaggtcacatcattagattttcatccaaagaaaacagaccttctatgctcttgtgatggcagtggtgaaatccggtactggaatgtgacccagtttgcatgcttgcgtgccataaagggtggtagtgcccaagtccggtttcagcctcatgttggacagtttttagccgcagctgctgaaaacgtggtttccatatttgacattgagacacatgggaaaaaatacactctacagggccataacactgatgtgcagtcagtgtgctgggacaacaatggggaatatattgcatctgtcagtcaggacctagttaaggtttggtcaatgtcaactggggattgcatttatgagcttagttccaatggaaacaagttccattcttgcgtgttccacccgagctattccaatctcttggttattggaggctaccagtctctcgaggtttggaacatggtgaaaaaccagagcctaaccgtacaagctcatgaaggtctaattgcggcgctggcgcagtcaccagtcacagggatgatagcttctgctagccatgacaactctgtcaaggtgtggaaataacagtaacaacgattatgatgcatctaggtagttttttttccagggcaagtgaaatttctcctgctgaggcataaaataaggaagagtagtaaattagatggttgccggtcgcggttcagctgtccaagagcagtgagtttgttgatgggttgtattgtatttatgctgataggctgtttgtgtagctcagaaacaaaaaagaatacattggctgaaaaggtgtccgcctgttttattttttgtttctgccgtatcatatgtaaccatttaacgttccctgttttttaattggaactcgctgcgattggcatctggcagaaaaaaaaccagagatact

SEQ ID NO: 4814 - DNA, 1248 bp, Zea Mays
tgcttggcgagctgggattgatccttcaacacttgttccatagctttgaccccccaactccttgttcacttgcatgtgcgcctgaactcgtgggatgtcgcccgtcctggtgaagaggaggtcaatactctccgtcatgtgattccagcggttttcctcctgctttcgcgccgcctccatcgcctccaacacaaatcagggaaatcgacttccgtcgccggtgttgcgcgacagacagaagaatttcaccaacccaaccctgttatggtggcgatcaacggagtatgcaaaacggcgacagtcgcacagcaggaaagtgtctctgataccaattgtcgtgcccgtggccgtggtgatcgccgacgacgtgagaaacggtggatcggggacacacaagcacaatgagcttgcgagtgctggctgaagaaacagaaggatgtcatggcccctgctgttattgcaaagggggaggacgtcatgtggacttctggtctaatctttggaaaaggagaggggattgtggggcttgaaacaaatttagggacacttcatattcaagttgcatttggccccccatatgcattgcttcaaggaacactggaagttgatggtgtgcccttcaagaagataccaagagaagcatgtccggcggtgaaaagagggtccgttgcctgggtagggtcagggccagagttcctgatcagcttagcggaccacgaggagtggagggacgcctacaccgtgttcgggaatgtgcttcccatggacatggcgatcgctgaggagatgacactgctgccgacaagcacagacgtgtggagcaacgtgaaagtgaaggtgctgaaagatcctgtctacttcaaggtcaagagaagcagcaatgctagcgctgtctaggtgatgggcatatttcttcttgcttgtttggatggaaggctgtggcaacaccggcaaatggttgtttgaccatgaaaacctgtgttataactcacaggagacgatggtctcgcttcattgtgcaaagaaaggggagagttctaatacaacagtaatatactagcacagtagtaatatactagtacaatactcctagtacaaaggccggagattctctcttttttcctcgtgtagaacacgtgactcaacgagttcttcgtgtcttttagtttgcctcctgcgttttggcccgttaggcatctccagcatatcctatatcatatttctattttatcatctattttaaacttc

SEQ ID NO: 4815 - DNA, 1352 bp, Zea Mays
gtttcgttacccactagaatcattcgggtatttggcctacgaatttgggtattttggatttcgggctgtgaaatcgccaaacacctgagatctgctttttcggtctggtggaacgtggaattgcagcagacctgggcgggtaaagcgtgaacgcctgtacgacgcaacacgccgaggcggtggctgcggcggcggcgcgccgacgccgcggtcgcctcgtcctttccctcgtcgtcttcgttgctgtctccgccgccgcagccctcgcctacctatctttcccctctgccgggcggacatcgcccccggcggtccggacggaggccgactgctgcaggggtatggagggcctcgagctctggggcccggcggtcaagtggggctcagaccaccgcctgccctccgccgccgcctgctgcgccgcctgcaaggccatgtgccctcaccctaaggacggggcctgccgctgcgactcgtgggtcttctgcggtgacgagcgcaaatgcaaggacaggctcggggagttgctgcctggttgcgcgccccgttcagtggaccacttcatcgagctcctgggcttgcgcaactgtgctggatgcagattttatcgtgcagaaggacgtgggaacgtctgggatgcaaaaggcgaccatgaaaaaaatgttgcatttggccccccatatgcattgcttcaaggaacactggaagttgatggtgtgcccttcaagaagataccaagagaagcatgtccggcggtgaaaagagggtccgttgcctgggtagggtcagggccagagttcctgatcagcttagcggaccacgaggagtggagggacgcctacaccgtgttcgggaatgtgcttcccatggacatggcgatcgctgaggagatgacactgctgccgacaagcacagacgtgtggagcaacgtgaaagtgaaggtgctgaaagatcctgtctacttcaaggtcaagagaagcagcaatgctagcgctgtctaggtgatgggcatatttcttcttgcttgtttggatggaaggctgtggcaacaccggcaaatggttgtttgaccatgaaaacctgtgttataactcacaggagacgatggtctcgcttcattgtgcaaagaaaggggagagttctaatacaacagtaatatactagcacagtagtaatatactagtacaatactcctagtacaaaggccggagattctctcttttttcctcgtgtagaacacgtgactcaacgagttcttcgtgtcttttagtttgcctcctgcgttttggcccgttaggcatctccagcatatcctatatcatatttctattttatcatctattttaaacttc

SEQ ID NO: 4816 - DNA, 3432 bp, Zea Mays
ttttttttcatttttttttaccttgcgtgacgcttcgttttcacagtgcggcggcggcggctgcttggctcgttgctcctcccattctgctcagctcagcttctgatgagttcgcctttgccgctgctagttaccagcatactagaccactgactgatcacgttataaggcttccgcgcaggcgagcttctgccgccttgtcgggtaaccaaacggacctcgccggccctctccagtggtcacatcacatcacatcacatgctcgaggtcgtcctggacatgacgccgccgccgccgccgccgcaggcgcggctccaccaggggtcatcagccaagggcgggcacgcggagcggaggaagcaaccgctgcagagcagcgtgacacagcccaaggcagagcccgcggcggcggcggccgtgctgccggtgccggagggaggcaagaggtgcagagggggcgggaggcgccgcggcagggccaaggcgcccggtgagcctcgcgccgcgctactagcgccagcgcaggcgcagacgcaggcgcctccgccgcgcacggtcattgggccgcccgtgccgagcaaggggctgtcattctgccgccggccagggttcgggacggtgggcgcgcgctgcgtcgtcaaggccaaccacttcctcgccgagctcccggacaaggacctcacccagtacgatgtgaagatcacgccggaggtgagctcgcggaccgtgaaccgggccataatggcggagctggtccgcctctaccgcgcgtccgacctggggatgcgactcccggcctacgacggccgcaagaacctctacaccgccgggacactaccgttcgacgctcgcgagttcgtcgtgcgcctcgccgatgaggacgacggctccggcgtcccgcctcgggagagggagtacagggtcgccatcaagttcgccgcgcgcgccgacctccaccacctcaggcagttcatcgccgggcggcaggcggacgcgccgcaggaggccctacaggtactcgacatcgtgctccgcgagctcgccaaccagaggtacgtgtccatagggcggtccttctactcgccggacatcaggaagccgcagcggctcggcgacggcctgcagtcgtggcgtgggttctaccagagcatccggccgacccagatgggattgtcgcttaacatcgacatgtcgtccacggcatttattgaacccctgccggtgatcgagttcgtggcccagatattaggaaaggatgtcatatcaaggccattgtccgatgctaaccgaatcaagatcaagaaggcattgcggggtgtaaaagttgaggtcactcaccgggggaatgtacggcgcaagtatcgcatttcaggcctcacaacacagccaactcatgaattgattttcccgattgatgaacaaatgaatatgaaatctgtcgtggaatacttcaaggaaatgtatggtttcaccattcagcatcctcatcttccctgccttcaggttggaaaccaaaagaaggcaaactatctacccatggaggcctgcaagatcattgaaggccagagatacacaaagaggctgaatgaaaaacagatcacatcgctgctaaagacagttcatcaaaatgattatgagcaagatccatatgcgaaggaatttgggatcaacattagtgagaagctaacctctgttgaagcccgagtccttcctgcaccttggttgaagtatcatgacactggaaaagagaaagagtgcttaccacaggttggtcagtggaacatggtaaacaagaaagtgataaatggatgcaaggtgagccattgggcatgtataaacttctcaaggagtgttccagaaaccacagctcggggattttgccaggaattggcacaaatgtgtcaaatttcgggcatggaatttaacagtgagcctgtgatgccaatatattcagctagaccagatcaagttgtgaaggcacttaaaaacgtgtataatattgcattgaacaaacttaagggtaaagatcttgaacttcttttggctatcctccctgacaacaatgggcagttatatggtgacatcaaacgtatttgtgaaactgatttggggttgatatcacaatgttgcttaaccaagcatgtttttaagatcagcaagcagtacttggcaaatgtctcactgaaaattaatgttaagatgggaggaagaaacactgtgctcctggacgcaataagttggaggattccgttggtcagtgacatcccaactattatatttggtgcagatgtaacacatcctgaaaccggggaggactcaagtccatcgattgctgccgttgttgcttctcaagattggccagaagttacaaagtatgctggattggtttgtgctcaggcacaccggcaagagctcattcaagacctttacaaaacatggcacgatcctcagagaggcactgtaacaggcggcatgatcagggagctcttaatatccttcaggaaggccactggacagaagccattgagaataatattctacagggacggtgttagtgaaggtcagttctatcaagttctcctttacgagttagatgccatccggaaggcatgtgcatccctagaaccaaattaccagcctcctgtaacatttgtggtggttcaaaaacgtcatcatacaagactatttgcaaataatcacaaagacagaagtagcatggacaagagtggaaatattttgccaggaaccgttgttgattctaagatatgccacccaacggagtttgatttctacctctgtagtcatgctggaatccagggaacgagtaggcctgctcactaccatgtcctctgggatgagaacaatttcacagcagacgaaatgcagacattgacaaacaacctttgctacacttatgcccggtgcacacgctcggtttctgttgtccctcctgcatactacgcacacttggcagcattccgggctcggttctacatggaaccagagatgttggacaaccagacgtccaagacctccaatggcacgagcggagtctcggtgaagcccctgcctgctgtgaaggagaaggtgaaaaggatgatgttctactgctgacaaggagaccacttaaccactcacatgctgtagctaacttgctagagtttagtaaggattagatagctttctcaaggagtgatggatcaatctgatctgttaacgacctctgtaaagtactcggaaatggctgtataatagttgttgtttcaaatgtgaaagcatctaggtccttagttagatttcagtgatcagtgatcaatgacgatactagattattgtgactaatgtatgctagattattatgattaatgtatgttttgcagaaacaatggattttgtgccgccattaatagtattcaattttggttttcaaag

SEQ ID NO: 4817 - DNA, 3497 bp, Zea Mays
ttttttttcatttttttttaccttgcgtgacgcttcgttttcacagtgcggcggcggcggctgcttggctcgttgctcctcccattctgctcagctcagcttctgatgagttcgcctttgccgctgctagttaccagcatactagaccactgactgatcacgttataaggcttccgcgcaggcgagcttctgccgccttgtcgggtaaccaaacggacctcgccggccctctccagtggtcacatcacatcacatcacatgctcgaggtcgtcctggacatgacgccgccgccgccgccgccgcaggcgcggctccaccaggggtcatcagccaagggcgggcacgcggagcggaggaagcaaccgctgcagagcagcgtgacacagcccaaggcagagcccgcggcggcggcggccgtgctgccggtgccggagggaggcaagaggtgcagagggggcgggaggcgccgcggcagggccaaggcgcccggtgagcctcgcgccgcgctactagcgccagcgcaggcgcagacgcaggcgcctccgccgcgcacggtcattgggccgcccgtgccgagcaaggggctgtcattctgccgccggccagggttcgggacggtgggcgcgcgctgcgtcgtcaaggccaaccacttcctcgccgagctcccggacaaggacctcacccagtacgatgtgaagatcacgccggaggtgagctcgcggaccgtgaaccgggccataatggcggagctggtccgcctctaccgcgcgtccgacctggggatgcgactcccggcctacgacggccgcaagaacctctacaccgccgggacactaccgttcgacgctcgcgagttcgtcgtgcgcctcgccgatgaggacgacggctccggcgtcccgcctcgggagagggagtacagggtcgccatcaagttcgccgcgcgcgccgacctccaccacctcaggcagttcatcgccgggcggcaggcggacgcgccgcaggaggccctacaggtactcgacatcgtgctccgcgagctcgccaaccagaggtacgtgtccatagggcggtccttctactcgccggacatcaggaagccgcagcggctcggcgacggcctgcagtcgtggcgtgggttctaccagagcatccggccgacccagatgggattgtcgcttaacatcgacatgtcgtccacggcatttattgaacccctgccggtgatcgagttcgtggcccagatattaggaaaggatgtcatatcaaggccattgtccgatgctaaccgaatcaagatcaagaaggcattgcggggtgtaaaagttgaggtcactcaccgggggaatgtacggcgcaagtatcgcatttcaggcctcacaacacagccaactcatgaattgattttcccgattgatgaacaaatgaatatgaaatctgtcgtggaatacttcaaggaaatgtatggtttcaccattcagcatcctcatcttccctgccttcaggttggaaaccaaaagaaggcaaactatctacccatggaggcctgcaagatcattgaaggccagagatacacaaagaggctgaatgaaaaacagatcacatcgctgctaaaggttacatgccaaaggcctagagagcaagagatggatattctacagacagttcatcaaaatgattatgagcaagatccatatgcgaaggaatttgggatcaacattagtgagaagctaacctctgttgaagcccgagtccttcctgcaccttggttgaagtatcatgacactggaaaagagaaagagtgcttaccacaggttggtcagtggaacatggtaaacaagaaagtgataaatggatgcaaggtgagccattgggcatgtataaacttctcaaggagtgttccagaaaccacagctcggggattttgccaggaattggcacaaatgtgtcaaatttcgggcatggaatttaacagtgagcctgtgatgccaatatattcagctagaccagatcaagttgtgaaggcacttaaaaacgtgtataatattgcattgaacaaacttaagggtaaagatcttgaacttcttttggctatcctccctgacaacaatgggcagttatatggtgacatcaaacgtatttgtgaaactgatttggggttgatatcacaatgttgcttaaccaagcatgtttttaagatcagcaagcagtacttggcaaatgtctcactgaaaattaatgttaagatgggaggaagaaacactgtgctcctggacgcaataagttggaggattccgttggtcagtgacatcccaactattatatttggtgcagatgtaacacatcctgaaaccggggaggactcaagtccatcgattgctgccgttgttgcttctcaagattggccagaagttacaaagtatgctggattggtttgtgctcaggcacaccggcaagagctcattcaagacctttacaaaacatggcacgatcctcagagaggcactgtaacaggcggcatgatcagggagctcttaatatccttcaggaaggccactggacagaagccattgagaataatattctacagggacggtgttagtgaaggtcagttctatcaagttctcctttacgagttagatgccatccggaaggcatgtgcatccctagaaccaaattaccagcctcctgtaacatttgtggtggttcaaaaacgtcatcatacaagactatttgcaaataatcacaaagacagaagtagcatggacaagagtggaaatattttgccaggaaccgttgttgattctaagatatgccacccaacggagtttgatttctacctctgtagtcatgctggaatccagggaacgagtaggcctgctcactaccatgtcctctgggatgagaacaatttcacagcagacgaaatgcagacattgacaaacaacctttgctacacattgatgtatactgatgcagttatgcccggtgcacacgctcggtttctgttgtccctcctgcatactacgcacacttggcagcattccgggctcggttctacatggaaccagagatgttggacaaccagacgtccaagacctccaatggcacgagcggagtctcggtgaagcccctgcctgctgtgaaggagaaggtgaaaaggatgatgttctactgctgacaaggagaccacttaaccactcacatgctgtagctaacttgctagagtttagtaaggattagatagctttctcaaggagtgatggatcaatctgatctgttaacgacctctgtaaagtactcggaaatggctgtataatagttgttgtttcaaatgtgaaagcatctaggtccttagttagatttcagtgatcagtgatcaatgacgatactagattattgtgactaatgtatgctagattattatgattaatgtatgttttgcagaaacaatggattttgtgccgccattaatagtattcaattttggttttcaaag

SEQ ID NO: 4818 - DNA, 2349 bp, Zea Mays
gactatagtgcagcgctatacaagaaacatcccagaaagtccgcgtcaccaagccgcaaagctagaatccttccaccacagccatggtgccatcacgacacaataattgattgccactgattccagcaaggttctaataaatcttgtagatgcaacctcgctttgcctgccgccgccagtcttccgcctccgccacacacaaatgtccagtttctttgctgtagctgtagctttggtgctctcatctctcatccatggaaccacgatggccacagcgagcagcgaagagagcttcttccagaagtgcccagcgtccaggtgcagcgaaggagggccagagatccggttcccgttccgccttgcgaccagccctctgtcatgcggtgcgcccggcatggagctggtgtgctccaaagcagacaccgtcctggttcacccaaaccttggcttgtgtaaggtaactgccatctggtatggcggcagcactataaccatcgtcccactcgcagtcgcagcagaacccaagtgccctttccagaagatcatctccaccaatctatcaaccgatgtgtatagaccttatggggatagggcaaccttagtgagctgttcagcagagttcatagtaccaagccatccggccagccttgctggtcccatctcttgccttaccaacgctagccgccggttcgcttacttggtgccgtcttttcgaccaatggatttccttcccttggactgcacggttctttcgaatagcatctcggtaccttaccctgcttctgtcaacgcgggcttcaacggaactgcaagaggagccatcgcatttggcgagacaatgttagaatggagagttcctaacattaccgatgtctgccgagactgcgaagctgaaggaaggctctgtggatttagctccgagagtaggcaagcattctgtaagagttcacgtctcaaggtcattgcagtaacgacgccagtagccgcagtcctggttctttcagcaatggcaggtgctgcattattacacctggccctgaaatctaaatacgacgacgagatacacaggaaagtggagatgttcctcgagacctacaggacgctgaaaccgagaaggtacacattctctgaagtcaggaagatgacaagacggttcagcagcagacttgggcaaggcgggtttgggagcgtgtacaaaggcgagctgccgaacggaggagtgcctgtgcctgtggcagtcaaaatgctggaggactcgacgggggaagaggagttcatcagcgaagtcgcaaccattggaaccatccaccacgccaacgtcgtccggcttctagggttctgctccgagaggtcaaggcgtgctctggtatacgagttcatgcctaacgcgtcgctggagaagtatatacgctgctcctcccaagaacagtcgttaataccaacggccagtaagatgctggaaatagcgacagggatcgcccgaggaatcgagtacctgcaccagggctgcgaccagcgcatcctccatttcgacatcaagccttccaacatcttgctagactacaacctgaacccgaagatctcggatttcgggctggcgaagctgtgcgcgagggaccagagcgtcgtcgcgctgaccgcagcgagaggcaccatgggctacattgcgccggagctatactctcggaacttcgggacagtgtcatgcaagtcggacgtttacagcttcggcatggtggtgctggagatggtggtggtgagtgcaaagaggaggaagtacagcccagcagagaccgaggaccagaacgacgacgtttgcgttccagagtggatatacgaggaaatagtcaccggacaagagcccagggaaatggcacgaggagagagagacatggtgaggaagctggctatcgtggctctctggtgcattcagtggaacccaccgaaccgcccgtccatgactacagtggtgaacatgctgacggatagcttgcagagccttaagataccccctaaaccatttgtttcatcctttgttggccagtaaccatgaagaaaaagctctagagaccacatggtgaccattcagatagatattcgtgtctatcacttgtcggcatatgcatgtatcagcgatgatgccctgtgatctgtcgtagttttgtgtcatacccatataccttttttccttgtaaccactggattgtatacattgcaattttctggtggtttaaccatgttcacgaatttgtaatggcattattagcaggacgttacataaaaaaaattagtaactggaaaggtagaagttacagcttacattaaaatgcggacagaataacgttctta

SEQ ID NO: 4819 - DNA, 1670 bp, Zea Mays
aatggaaccagtacctctattccattccaggctgcttcttcctgcgcgattcgacacggactcagaccctcacacgcctcctcaccggctcacgacgtcgccacctcagatccggcgaccgatcccctcctcctcggcgaggcgtagccaagtttgtcaagttacgtccgatgctccagacatagtagaaaaccatgggagaagttagtgatgacaattccaacctgtcctttctaaaaagaatcgcaacaagtgacgtaccgctgttgaaagagtatggtgtaaatggagttgtcgtcgctctgcttcttgctgtagttactcccgtcttgctttccatgatgtttggcaagaaaacaaagcagagggcggtgcgagctaatgtgggtggagaggaaggatttgccatgcgaaacagtaggttttcctccttagttgaagtcccatgggaaggcgccaccacgatgtcagctctgttcgagatggccagcaaaaaatactctcgacggaggtgtcttggcacgaggaagctaatcaagagggaatttgtggaatcttctgatggtaggaagtttgagaaactgcaccttggtgaatacgaatgggatacgtacgccgaggcatttaaccgcgcatgtaattttgcttctggacttgtcaagatgggccacgacctagatagtcatgctgctatcttctctgatacaagagctgagtggatcattgctgctcagggatgcttccgacaaaatttgacggttgtaacaatatatgcatctcttggtgaggatgcattggtgcattcactaaacgagacacaggtttcaactctgatatgtgattcgaagcaacttaagaaaatacctgcaatcagctctaaattgcagagtcttaggcatattatctatattgaggatgaacctgtcgaggctgagacactgaaccaagtgaagcatctgacaacattgtctttcactgaagtagaggagttaggcaagacatctagtgttgatgcaaggttaccttcaagctctgatactgcagttatcatgtatacaagcggaagtactggtcttcccaagggtgtaatgatcacacatggcaacatggtggccacaactgcagcagtcatgacaatagtcccaaaacttggcatgaatgatgtttatctggcttaccttccattggctcatgtctttgaactagcaggagagactgtcatgctagcttctggtactgccattggatatggttcaacattgactatgactgatacatcgaacaagattaagaaggggacaaaaggagatgtttctgtactgaatcctactcttataatttcagttcctgcaattttggatcgtatcagagatgcagtgtttaagaaagttggtgagaagggtggcctgacaaaaaagctgtttgattttgcatataagcggaatcttgcatcaattgaggggagttggtttggatcctgggcaccggagaggatgatatgggataccattatttataaaccaatacgggcaatgcttggaggacgtgtaagatttgttctttgtggtggtgcacctttatcaggtgacacacaaagattcatgaatatatgtctagggtccatgttatcctgaatctcagtcattctcagttggattagttcatcctta

SEQ ID NO: 4820 - DNA, 1619 bp, Zea Mays
atggcggggctgcagcggtccagcgagacgttccggcggtcgggctcgtcagggcttgtgtgggacgacaacaagagcttctcgggggagatcaagccggcggaggaggacggcggcgcgggcgcggcgcgggcggtggagcgcagccgctccaccgggcacgcgcacgccgggtacagggccacggggcgcgtgccgcccgcgctcgacccgccgtcgccgcgcgtcgccgtgtcggcgcgcgcaacaatggccaaggccgtgccctcgccgctcgcggccgtggccgtgttggcgctgctcctcctgtgccgcggcgccgaggcccgcgtcctcctcacgctcgacgacttcggcggcgtcggcgacggcattgccaacgacacccaggctctcctggacgcgtgggccgccgcgtgcagctccacccaggaggccgtcctcgccgtgccggccgggaaggtctaccagatctggccggtgcagctctccgggccctgcaagaagaggctcaagctgctgatttccggcgcgatcgtggcgccgtcgagccccgacgagtgggccgggcgggaccccatgaagtggctctacgtctacggcgtcgacggcctgtccgtcagcggcggcggcaccatcgacggcatggggcagcagtggtgggccagcacctgcaagcgcaagaagacccagccgtgctactcggggcctcgtccaaaggcggtgcacttcgaggagtgccgggaggccagcttcctccgggtggtggcgccggcggacagccccaacaccgacggcatccacctcaacgacacctcccacgtccgcatcacggacaacctcatctccacaggggacgactgcgtctccatggtcggcaattgctctgacgtccgtgtgaaagacatctcatgtgggcctggccatggcatcagcatcggaagccttggaaagaaccggaccaccgacatggtggaggacgtgaaggtcgacacctgcttgctcaccaacacgaccaacggcgtccgtatcaagagctggcagggaggcacgggcttcgcgcgggacctgcggttcgagaacatcgtgatgaggaacgtctccaaccccatcatcatcgaccagtactactgcgaccagcccacgccctgcgccaaccagacgcaggcggtggaggtgcgcagggtggagttcgcgggcatccggggcacgtcggcgacgccgcaggcgatcagcatcgcgtgcagcgacgccgtgccgtgccgggacctggagctggcgaacgtcaacctgacgctggagggcggtggtgccggccgagccaccgccctctgctaccgggcgtcggggaagagcgccggcaccgtggtcccgccgtcctgcctcgccaggtcctgactgagactcacctagcgaagcagtggccgaagcgcgtatacacccacatgctgcatggctgtcgattggagctgttgccatacccaaacaaaaccaacctgttgattgtacacgccgttgttgacgacaaggaaacacagagaagaaatatcggagcttcttacctgcaaaatgtcgttcgcacttaaaaaaggttcggattaaaaaaacacaacttgatt

SEQ ID NO: 4821 - DNA, 2200 bp, Zea Mays
cccgacctgacctgacctcatcgtttattagcacttcgcaaaagaggcggcatcgtctgcatcccatctgagagggctgctttgctgtccttcaagaagggtatcacaagggacaagaccaatcgcctcggctcatggcacggccaagattgctgccggtggagaggtgtcacctgcagcaaccgaaccggcaacgtcctcatgctcaatcttgcctacccgagctatccatatgatgactcgtacgacagagatgtatgcggcgattccagaactttgtttggcgagataagtccctctctactcttgctgagacaactagagcacatagacctaagctggaactgcttgttaggcccaaatgggcgtatgccttcattcctgggctccatgaagaacttgagatacctcaatctctctggagtaccattcaaagttacaggagctccatctgggccaagttcgatagggtacttcaggagcttacgcatccttgatctcagctataacaatctcagaggaagtgtacctactgaaattggtacccttacaaatttgacctatttggatctaagcaataacaacctcggtggagtaatcacggaggagcactttgtaggtctgatgaacctaaaggaaattgacctgtctttcaataatttgagtgttgtagtggatgcagattggatccaaccattcaggctggagtctgcagggtttgcatcttgccatttgggtcccctgtttccagtttggcttcgccagcagctccttcatatcactaagctagacatttcaagcacagggttggtgggaaacattcctgattggttttggtcattttcaaaggctgcttctcttgacatgtcttacaatcaattaaatggcatcatgccacacaagattgaagccccactgctccaaacactagtcgtgtcctcaaatcaaattggtggcaccattccggagtcgatttgcgaattgaagaacctgttatttctagatttgtcgaacaatcttttggaaggtgaaattcctcagtgttctgacattgaacgcctagaattttgtctcctaggcaacaacaatttatcaggaacgttcccagcatttctgcgcaactgtacgagtatggtggtcttggaccttgcatggaataatttatctggaaggttaccttcttggatacgggagctgtatagtttacagtttctacgtctaagccacaattcattttctgggaatattccgtctggaataaccagcctttcttgtcttcaatacttggatctatcaggaaactacttttctggtgttatacctcctcatctttcaaatctaacaggtatgaccatgaagggatactgcccatttgaaattttcggcgagatgggatttaaattcgatgatatatggttagtaatgacaaaagggcaacaacttaaatatagtctgggacttgtatattttgtaagcattgatttatcaggcaacggcttaactggtgaaattcctttgggtatcacatcctttgatgccttaatgaatttgaatttgtcatcaaaccaactgggtggaaaaattcccaacaagattggtgccatgatgtcgttggaatccctagacctctccatcaacaagctttctggtgaaatcccatggagcttatcaaacctgacatctttaagctacatgaacttgtcctacaacaatctctcaggaaggataccctcaggccgccagctagacaccttaaacgcggacaacccgtcacttatgtacataggcaacagtgggctttgtggacctcctcttcaaaataattgttcaggaaatggtagtttcacacctggttattatcacagaagcaataggcaaaaaatcgagtttgcatcattttatttcagtcttgtattggggttcgtggtggggctgtggatggtgttttgtgctctgttgttcatgaacacatggagggttgcttattttgggctcctcgacgagctgtataacaagatctacgtgtttgtagctgtaaaatgggcaagtatgacaatgagtgcagctgcagaatgagagcagaacatcttgaaggaaatattgtccaggacacaaccaatacaatggaaactgttaatggaccagtcaggaagatatataaaagtgctataggccgtgtggtttcgtccaaataaagacc

SEQ ID NO: 4822 - DNA, 3089 bp, Zea Mays
ccgcccgccaccaaaccgcgccccctgtcctcgccctcgacggcgctgccctttgtgatggtgcccttccttccccagctcccccaaatgctgccaagtcccccaccaacgccgcccttccttccccggcagcccgcccccactagctccgcgctccgcgtgccccaccagccacgctagctgccgccgggatactcaccacctccgcgcccccaccaaaccgaaaggcgagatccgccgccagttccacgctccgcgcgtcaagagcagccatcacagtgatgccgcgcgagggagaggaaggaaggccgcgtgagtcgccgcagggaaagctgccaggcatcaccgtaaggtgagatccggttgcgcgtgagggagaggaaggaaggccgcgtgagtcgccgccgagaaagccacagggaaagccgccagtgtgagtcgccgccgggaaagccgccagtgtatgatggttcggtcatccagatgtgggtggcgtacaacgttgtcactcatttcctcctgcactgtaccgactgcaaggcgcaagctcactggcgtgttcgacctcctgaagattatgctatacaaggtgtgcgcaaatggctcatcggcgcttcccgattgggagatggaggccagcatcatggagttctacgctgttgcatcttctaagtggcatcaccgagctggacgacaggaaacagagaaaattgtgcctgaaaaaatttaggagcagggatgagcatttatcagaagtggacacaaagagggagcttgagtgtgggctctgcatgcggtgctttgagtattgtcttttttttgtttgctgacgccttcctaggaaaggggatcttctgcgacgatagcgatgaagacgaagacagtgaccaggagagggaggtgaacaaggagatggttgtctaccttatcgatgcctcgcccaaaatgttcacccctgccaccacctagggcaatgaaaagcaggagacacatttccataccattgttaactgcatcacagagtctctgaagacacaaattattggtagaacttatgatgaagtcgcaatatgtctctttaacactatgatgctccagttctgcaacttctttccgacaaaatgtccactcatatatttacaactctataagggtttagtgtgggcgtccacaccccttcaccatgcccccgcctcagcccccgtcaaccacgcaaggactccagcgtgaaagtcgggcccgtcgccggccttgcatcgtcgcgacacactccgtgcctcccttccatcatcgctcgatcgcggtttcgtcgcactccttccttcgatggcactcctttccatcctcgattcctcctgccccagcaccggccagcctcatcaggtcattcctcctcgctgtgccccctccaccgtattcaaccacctcttcctcggcaccaaacgtagacgcctcctccgcgatgccctcagaccgcccgtcctcgcccaacatctccttgccgcatatgcccgcagcggctgcctcgcatcccgcccgcacgccacctccttgcacccgcgcatggatgccactgcacgcctactatggaagggggacgcctactattgaagctcccatccacgatcccattccaaatccagcttcaaatttgccccaatctgcagtcaaccttccacccaacatcttccccttatatattgttgtctctgctataaaagacttgacagaggcgaggcctccaaaccactaccactctccaccgattcactggagtcgcgagacgttggaggccctgagacgttcaagcctcatctgcagtctcctccaaagaggccatttaattacgcctatttgatttgagagctcgagtagacaagatcatgtaggctctgaaatctatcttctggaggaccaaggccattaaagtacagggttctttcagcagcaatggcctcactatttcttctaaattaccaagattctcggacatgtacactctcacgatagcaagtgtagacccacagtttatcgtagcaaacaagccaatccatttcactaagagcgtgacaaagtgtcacagagcccttcttcttcgctctgccacccacaccgtggcacctcgccgagctccgcatcgaaactgcgttgttgccttctccgtgctctgcgttgaagacatgcagcgcaagcgtcgctgcctcatcccggcctcctctagacgcaagacgacaagaggatgctgctcgagctgtccccttggatcccacgccgaacgccctgtcacctccgtcgacaacatcaagctcctgtccctcccccacctcactgcaatagattcttcggttgtggaacttagggagagttttgagtcgtggtggtgtataaagcagtcgtcaagcacaagctcctccaaagtaccatcaggatcctacagtagaagagttagccaaaacactcgattgttggccatcaatgaattattatatcacgggttgtaaatatgttcttatgccatgaaaattcaacgaatgtcacgcccttttcgtaatagatcatgttaaaagcatgtgacttttatcgactttacaccgactcaagattggtgtaaacacatgccatacaagaggtttgcggaagctattatcatggcctcaaagaaatataagattgcttacaacaagaaacgttctggatgggcggaggatatctttaagtgggaacatacaattcagactggtgttccaattgacttaagagggtttaataccagctacctcgttctacaagttatgaccatgtgggggaatgacagacgaatgaaatttgttgggaatgcaaatattcttcgaaggaactttgtgattgatctgttaagttatgaggacaattcgtgccgatatgccatccctgcaaacatacaacagagacttatcgatatcgctaaaaaggattagctgattagtgtacggttgtcgacacatttgtctgtaattaaaaattctaaattatctttttagaaataatttgtgtgatattgataatgaaaaacacggattttgcatattatatagtgatgtttgtcgttc

SEQ ID NO: 4823 - DNA, 3104 bp, Zea Mays
agcaatcgcccccggtatctcgcccgcgccccaccaactctgcccttgaacccgcctgccaccaatctcgtcgccgggtatcccgcccgccaccaaaccgcgccccctgtcctcgccctcgacggcgctgccctttgtgatggtgcccttccttccccagctcccccaaatgctgccaagtcccccaccaacgccgcccttccttccccggcagcccgcccccactagctccgcgctccgcgtgccccaccagccacgctagctgccgccgggatactcaccacctccgcgcccccaccaaaccgaaaggcgagatccgccgccagttccacgctccgcgcgtcaagagcagccatcacagtgatgccgcgcgagggagaggaaggaaggccgcgtgagtcgccgcagggaaagctgccaggcatcaccgtaaggtgagatccggttgcgcgtgagggagaggaaggaaggccgcgtgagtcgccgccgagaaagccacagggaaagccgccagtgtgagtcgccgccgggaaagccgccagtgtatgatggttcggtcatccagatgtgggtggcgtacaacgttgtcactcatttcctcctgcactgtaccgactgcaaggcgcaagctcactggcgtgttcgacctcctgaagattatgctatacaaggtgtgcgcaaatggctcatcggcgcttcccgattgggagatggaggccagcatcatggagttctacgctgttgcatcttctaagtggcatcaccgagctggacgacaggaaacagagaaaattgtgcctgaaaaaatttaggagcagggatgagcatttatcagaagtggacacaaagagggagcttgagtgtgggctctgcatgcggtgctttgagtattggctttgtacagtcttttttttgtttgctgacgccttcctaggaaaggggatcttctgcgacgatagcgatgaagacgaagacagtgaccagggcaatgaaaagcaggagacacatttccataccattgttaactgcatcacagagtctctgaagacacaaattattggtagaacttatgatgaagtcgcaatatgtctctttaacactatgatgctccagttctgcaacttctttccgacaaaatgtccactcatatatttacaactctataagggtttagtgtgggcgtccacaccccttcaccatgcccccgcctcagcccccgtcaaccacgcaaggactccagcgtgaaagtcgggcccgtcgccggccttgcatcgtcgcgacacactccgtgcctcccttccatcatcgctcgatcgcggtttcgtcgcactccttccttcgatggcactcctttccatcctcgattcctcctgccccagcaccggccagcctcatcaggtcattcctcctcgctgtgccccctccaccgtattcaaccacctcttcctcggcaccaaacgtagacgcctcctccgcgatgccctcagaccgcccgtcctcgcccaacatctccttgccgcatatgcccgcagcggctgcctcgcatcccgcccgcacgccacctccttgcacccgcgcatggatgccactgcacgcctactatggaagggggacgcctactattgaagctcccatccacgatcccattccaaatccagcttcaaatttgccccaatctgcagtcaaccttccacccaacatcttccccttatatattgttgtctctgctataaaagacttgacagaggcgaggcctccaaaccactaccactctccaccgattcactggagtcgcgagacgttggaggccctgagacgttcaagcctcatctgcagtctcctccaaagaggccatttaattacgcctatttgatttgagagctcgagtagacaagatcatgtaggctctgaaatctatcttctggaggaccaaggccattaaagtacagggttctttcagcagcaatggcctcactatttcttctaaattaccaagattctcggacatgtacactctcacgatagcaagtgtagacccacagtttatcgtagcaaacaagccaatccatttcactaagagcgtgacaaagtgtcacagagcccttcttcttcgctctgccacccacaccgtggcacctcgccgagctccgcatcgaaactgcgttgttgccttctccgtgctctgcgttgaagacatgcagcgcaagcgtcgctgcctcatcccggcctcctctagacgcaagacgacaagaggatgctgctcgagctgtccccttggatcccacgccgaacgccctgtcacctccgtcgacaacatcaagctcctgtccctcccccacctcactgcaatagattcttcggttgtggaacttagggagagttttgagtcgtggtggtgtataaagcagtcgtcaagcacaagctcctccaaagtaccatcaggatcctacagtagaagagttagccaaaacactcgattgttggccatcaatgaattattatatcacgggttgtaaatatgttcttatgccatgaaaattcaacgaatgtcacgcccttttcgtaatagatcatgttaaaagcatgtgacttttatcgactttacaccgactcaagattggtgtaaacacatgccatacaagaggtttgcggaagctattatcatggcctcaaagaaatataagattgcttacaacaagaaacgttctggatgggcggaggatatctttaagtgggaacatacaattcagactggtgttccaattgacttaagagggtttaataccagctacctcgttctacaagttatgaccatgtgggggaatgacagacgaatgaaatttgttgggaatgcaaatattcttcgaaggaactttgtgattgatctgttaagttatgaggacaattcgtgccgatatgccatccctgcaaacatacaacagagacttatcgatatcgctaaaaaggattagctgattagtgtacggttgtcgacacatttgtctgtaattaaaaattctaaattatctttttagaaataatttgtgtgatattgataatgaaaaacacggattttgcatattatatagtgatgtttgtcgttc

SEQ ID NO: 4824 - DNA, 3450 bp, Zea Mays
cagcaatcgcccccggtatctcgcccgcgccccaccaactctgcccttgaacccgcctgccaccaatctcgtcgccgggtatcccgcccgccaccaaaccgcgccccctgtcctcgccctcgacggcgctgccctttgtgatggtgcccttccttccccagctcccccaaatgctgccaagtcccccaccaacgccgcccttccttccccggcagcccgcccccactagctccgcgctccgcgtgccccaccagccacgctagctgccgccgggatactcaccacctccgcgcccccaccaaaccgaaaggcgagatccgccgccagttccacgctccgcgcgtcaagagcagccatcacagtgatgccgcgcgagggagaggaaggaaggccgcgtgagtcgccgcagggaaagctgccaggcatcaccgtaaggtgagatccggttgcgcgtgagggagaggaaggaaggccgcgtgagtcgccgccgagaaagccacagggaaagccgccagtgtgagtcgccgccgggaaagccgccagtgtatgatggttcggtcatccagatgtgggtggcgtacaacgttgtcactcatttcctcctgcactgtaccgactgcaaggcgcaagctcactggcgtgttcgacctcctgaagattatgctatacaaggtgtgcgcaaatggctcatcggcgcttcccgattgggagatggaggccagcatcatggagttctacgctgttgcatcttctaagtggcatcaccgagctggacgacaggaaacagagaaaattgtgcctgaaaaaatttaggagcagggatgagcatttatcagaagtggacacaaagagggagcttgagtgtgggctctgcatgcggtgctttgagtattgtcttttttttgtttgctgacgccttcctaggaaaggggatcttctgcgacgatagcgatgaagacgaagacagtgaccaggagagggaggtgaacaaggagatggttgtctaccttatcgatgcctcgcccaaaatgttcacccctgccaccacctagggcaatgaaaagcaggagacacatttccataccattgttaactgcatcacagagtctctgaagacacaaattattggtagaacttatgatgaagtcgcaatatgtctctttaacactttattagttattgtcaatgctaaccatttcacttattaagtgataattttgcacatatattagtattactcaagacgatattatgaagtacaactgtgtaaatgttcttacaataaataaaatttagaaggtgcctggatttgtttattagacaataatattttaataacagtttgatgaaaaactacaattccagatgatgctccagttctgcaacttctttccgacaaaatgtccactcatatatttacaactctataagggtttagtgtgggcgtccacaccccttcaccatgcccccgcctcagcccccgtcaaccacgcaaggactccagcgtgaaagtcgggcccgtcgccggccttgcatcgtcgcgacacactccgtgcctcccttccatcatcgctcgatcgcggtttcgtcgcactccttccttcgatggcactcctttccatcctcgattcctcctgccccagcaccggccagcctcatcaggtcattcctcctcgctgtgccccctccaccgtattcaaccacctcttcctcggcaccaaacgtagacgcctcctccgcgatgccctcagaccgcccgtcctcgcccaacatctccttgccgcatatgcccgcagcggctgcctcgcatcccgcccgcacgccacctccttgcacccgcgcatggatgccactgcacgcctactatggaagggggacgcctactattgaagctcccatccacgatcccattccaaatccagcttcaaatttgccccaatctgcagtcaaccttccacccaacatcttccccttatatattgttgtctctgctataaaagacttgacagaggcgaggcctccaaaccactaccactctccaccgattcactggagtcgcgagacgttggaggccctgagacgttcaagcctcatctgcagtctcctccaaagaggtccacaaatgatttgagagctgtaggtctacaaatgataatgcaacaaattctgattcatgcatttctttactgtgtggaggccatttaattacgcctatttgatttgagagctcgagtagacaagatcatgtaggctctgaaatctatcttctggaggaccaaggccattaaagtacagggttctttcagcagcaatggcctcactatttcttctaaattaccaagattctcggacatgtacactctcacgatagcaagtgtagacccacagtttatcgtagcaaacaagccaatccatttcactaagagcgtgacaaagtgtcacagagcccttcttcttcgctctgccacccacaccgtggcacctcgccgagctccgcatcgaaactgcgttgttgccttctccgtgctctgcgttgaagacatgcagcgcaagcgtcgctgcctcatcccggcctcctctagacgcaagacgacaagaggatgctgctcgagctgtccccttggatcccacgccgaacgccctgtcacctccgtcgacaacatcaagctcctgtccctcccccacctcactgcaatagattcttcggttgtggaacttagggagagttttgagtcgtggtggtgtataaagcagtcgtcaagcacaagctcctccaaagtaccatcaggatcctacagtagaagagttagccaaaacactcgattgttggccatcaatgaattattatatcacgggttgtaaatatgttcttatgccatgaaaattcaacgaatgtcacgcccttttcgtaatagatcatgttaaaagcatgtgacttttatcgactttacaccgactcaagattggtgtaaacacatgccatacaagaggtttgcggaagctattatcatggcctcaaagaaatataagattgcttacaacaagaaacgttctggatgggcggaggatatctttaagtgggaacatacaattcagactggtgttccaattgacttaagagggtttaataccagctacctcgttctacaagttatgaccatgtgggggaatgacagacgaatgaaatttgttgggaatgcaaatattcttcgaaggaactttgtgattgatctgttaagttatgaggacaattcgtgccgatatgccatccctgcaaacatacaacagagacttatcgatatcgctaaaaaggattagctgattagtgtacggttgtcgacacatttgtctgtaattaaaaattctaaattatctttttagaaataatttgtgtgatattgataatgaaaaacacggattttgcatattatatagtgatgtttgtcgttc

SEQ ID NO: 4825 - DNA, 2498 bp, Zea Mays
gtgtacgggtgtcgagttgttgccttggtgataacagtctgatacccccccacccactgccttcactgactgctagagcccctccttgtcagtacagtgtttggtgctgaatcaaatccactgaagatgccaagttctgaaccagacagtgatgatgttttctttgacgcatttgaagatgttcgatctgcaggggaaccttcatgttcagaggattgcagcaccagcgatgaagtttcagtggtgaaatttgagtatgagatttgggcaaacgagccgatgagcgttcaagaaaggcggcaaaggttcctcaagggaatgggattcgatgatttcgtgtctagtagaacagattcttttcaatgccatggtgaaatcacagccgttgagtcttccactggcatggaggtgagaacggccagttgccattcttccgtggattcatctgtttgtgacaatgaatcggagtttgacggtgcctgttgcataagggatatggatagtagaaagagagatattgtcaagggtggacatagcagtataactgacatgctcaaggaggttggatcagataaggtgatgtctcttctggagttccagagtttgcctggcctctctcgggctgttcaaaatttagttcggagggggtgtggtaaaagtcctgcaaaagaaacgaaaagtgctaagaaaatggatgccaaaagcttgtggaagaaattcatgataaagagaagctttggtagcgtgtgcaagtatgatgtccatgtgaaaaactgcacaaatagtataccaaccagaacaagagttcaacatcggaagaaaaatttccttgaattctctgctgtctacatggatcaagaaatcagagctcacaagggttcaattcgggtcatgaaattcagcccatctggctggtatttagcaagtggtggtgaggattgtgttgtacggatatggcaaatcatacaagtagaagcatctcctaagttgtataggggagaggacccctatgaaaaagtggagaaagttcaggtctttaagacaagtatagaaaaggggcagaaccaggcacttgcagttatacccaataaggtttttcgtatatcagagactccattacatgaattccgtggccatacaagtgatatccttgatctggcatggtccaaatcagattatctcttaacttcatccaaagataagacagtgcgcttatggaaacccggctgtgatggttgtcttgcagttttcaaacacaaagactatgtaacatgtgttcagttcaaccctattgatgagaaatacttcatcagcggttcagtagatggtaaagtgcgcatttgggacgtgttggacaagcgagtaactgactgggccgatacgcgaaatatcataactgatttgagttaccaaccggatggaaagggctttattgttggcacgattgcaggcacatgtcgtttctatgatcaatcaggtgaaagcatccagctagagaaagaattgtttgtgcaagggaagaaaaagtcagctgcctgtcggatcaacagcctaaagctatgtgcaattggttccaacagggttataatcacatcaggagattccaaaatccgagttgccaatggtgataccatccaaaagtttgaagggccttggaagtcgaaggctctgtcattaccgtctctaacatcagacgagagatacctcatatcggccggcaaagattccaacgtctacatctgggacttggccaactcgagagacgacgcaaagccagtccactcgtgcgagctgttcttctccaaggacgtgacgaccgcagtgccatggccgggagtgcggcaacaagacgggcacgcgagcgcgaaacctgcctgtgtggccgagaaatccgccagcgcgcccatcctgcgccagtcggcccccgggccgtggccgttcgtggacggcggcggcagcagcagcaaggggtcggcgacgtggcccgaggagaagctcctttctgcagcgaagcctgtggaaagcagcccgcggctggacgactgcctctccatgctatccgccgcgtggagcacggtcatcgtgaccgccggccgcgatggcgtcatccggtcttttcccaactacggcttgcccgtcaggctgtgagctccgtcaccggtctgggctgctggtcagtggaggcgcagcagccgtggttggcgactgatgatagataacctgctaacgtcttgaagtttttttttctctctctcgtttttctgggcggagttactagaaattcttttttatgtaagcatttgttagatcatgaaccttgtcatgaagagatgatctgtagtagtcagttcaagtccaaacacttgtgctctgtgtgtgtgtgttttttttgctggatggttgtgacaaggtaaaaaaacgcaagcattcagttagatgtgaccagccttttttttgccctctaacatcaggatgtttatattgaaaatatatttaaa

SEQ ID NO: 4826 - DNA, 2657 bp, Zea Mays
cgccttggaaaccaagaccaccagagacgacggacggacggacggagaccggagcaaacgaggcggccggggtccggagcagaggacgcgtccaatactacaacaggagcgcccgatccttcccatcccccaagctcgcccgcctccgattcccgctgtcctgtcccctccaaacaccctcccgccgaaggcctccgatccaggccgcaaccgggatggcgcgtgccggcgggaggaggtcggcggcggcgccggcggcttcgggagagccctccgtcgagtgctctcgcggcggataacagtctgatacccccccacccactgccttcactgactgctagagcccctccttgggaaccttcatgttcagaggattgcagcaccagcgatgaagtttcagtggtgaaatttgagtatgagatttgggcaaacgagccgatgagcgttcaagaaaggcggcaaaggttcctcaagggaatgggattcgatgatttcgtgtctagtagaacagattcttttcaatgccatggtgaaatcacagccgttgagtcttccactggcatggaggtgagaacggccagttgccattcttccgtggattcatctgtttgtgacaatgaatcggagtttgacggtgcctgttgcataagggatatggatagtagaaagagagatattgtcaagggtggacatagcagtataactgacatgctcaaggaggttggatcagataaggtgatgtctcttctggagttccagagtttgcctggcctctctcgggctgttcaaaatttagttcggagggggtgtggtaaaagtcctgcaaaagaaacgaaaagtgctaagaaaatggatgccaaaagcttgtggaagaaattcatgataaagagaagctttggtagcgtgtgcaagtatgatgtccatgtgaaaaactgcacaaatagtataccaaccagaacaagagttcaacatcggaagaaaaatttccttgaattctctgctgtctacatggatcaagaaatcagagctcacaagggttcaattcgggtcatgaaattcagcccatctggctggtatttagcaagtggtggtgaggattgtgttgtacggatatggcaaatcatacaagtagaagcatctcctaagttgtataggggagaggacccctatgaaaaagtggagaaagttcaggtctttaagacaagtatagaaaaggggcagaaccaggcacttgcagttatacccaataaggtttttcgtatatcagagactccattacatgaattccgtggccatacaagtgatatccttgatctggcatggtccaaatcagattatctcttaacttcatccaaagataagacagtgcgcttatggaaacccggctgtgatggttgtcttgcagttttcaaacacaaagactatgtaacatgtgttcagttcaaccctattgatgagaaatacttcatcagcggttcagtagatggtaaagtgcgcatttgggacgtgttggacaagcgagtaactgactgggccgatacgcgaaatatcataactgatttgagttaccaaccggatggaaagggctttattgttggcacgattgcaggcacatgtcgtttctatgatcaatcaggtgaaagcatccagctagagaaagaattgtttgtgcaagggaagaaaaagtcagctgcctgtcggatcaacagcctaaagctatgtgcaattggttccaacagggttataatcacatcaggagattccaaaatccgagttgccaatggtgataccatccaaaagtttgaagggccttggaagtcgaaggctctgtcattaccgtctctaacatcagacgagagatacctcatatcggccggcaaagattccaacgtctacatctgggacttggccaactcgagagacgacgcaaagccagtccactcgtgcgagctgttcttctccaaggacgtgacgaccgcagtgccatggccgggagtgcggcaacaagacgggcacgcgagcgcgaaacctgcctgtgtggccgagaaatccgccagcgcgcccatcctgcgccagtcggcccccgggccgtggccgttcgtggacggcggcggcagcagcagcaaggggtcggcgacgtggcccgaggagaagctcctttctgcagcgaagcctgtggaaagcagcccgcggctggacgactgcctctccatgctatccgccgcgtggagcacggtcatcgtgaccgccggccgcgatggcgtcatccggtcttttcccaactacggcttgcccgtcaggctgtgagctccgtcaccggtctgggctgctggtcagtggaggcgcagcagccgtggttggcgactgatgatagataacctgctaacgtcttgaagtttttttttctctctctcgtttttctgggcggagttactagaaattcttttttatgtaagcatttgttagatcatgaaccttgtcatgaagagatgatctgtagtagtcagttcaagtccaaacacttgtgctctgtgtgtgtgtgttttttttgctggatggttgtgacaaggtaaaaaaacgcaagcattcagttagatgtgaccagccttttttttgccctctaacatcaggatgtttatattgaaaatatatttaaa

SEQ ID NO: 4827 - DNA, 2706 bp, Zea Mays
ccaagaccaccagagacgacggacggacggacggagaccggagcaaacgaggcggccggggtccggagcagaggacgcgtccaatactacaacaggagcgcccgatccttcccatcccccaagctcgcccgcctccgattcccgctgtcctgtcccctccaaacaccctcccgccgaaggcctccgatccaggccgcaaccgggatggcgcgtgccggcgggaggaggtcggcggcggcgccggcggcttcgggagagccctccgtcgagtgctctcgcggcggataacagtctgatacccccccacccactgccttcactgactgctagagcccctccttgtcagtacagtgtttggtgctgaatcaaatccactgaagatgccaagttctgaaccagacagtgatgatgttttctttgacgcatttgaagatgttcgatctgcaggggaaccttcatgttcagaggattgcagcaccagcgatgaagtttcagtggtgaaatttgagtatgagatttgggcaaacgagccgatgagcgttcaagaaaggcggcaaaggttcctcaagggaatgggattcgatgatttcgtgtctagtagaacagattcttttcaatgccatggtgaaatcacagccgttgagtcttccactggcatggaggtgagaacggccagttgccattcttccgtggattcatctgtttgtgacaatgaatcggagtttgacggtgcctgttgcataagggatatggatagtagaaagagagatattgtcaagggtggacatagcagtataactgacatgctcaaggaggttggatcagataaggtgatgtctcttctggagttccagagtttgcctggcctctctcgggctgttcaaaatttagttcggagggggtgtggtaaaagtcctgcaaaagaaacgaaaagtgctaagaaaatggatgccaaaagcttgtggaagaaattcatgataaagagaagctttggtagcgtgtgcaagtatgatgtccatgtgaaaaactgcacaaatagtataccaaccagaacaagagttcaacatcggaagaaaaatttccttgaattctctgctgtctacatggatcaagaaatcagagctcacaagggttcaattcgggtcatgaaattcagcccatctggctggtatttagcaagtggtggtgaggattgtgttgtacggatatggcaaatcatacaagtagaagcatctcctaagttgtataggggagaggacccctatgaaaaagtggagaaagttcaggtctttaagacaagtatagaaaaggggcagaaccaggcacttgcagttatacccaataaggtttttcgtatatcagagactccattacatgaattccgtggccatacaagtgatatccttgatctggcatggtccaaatcagattatctcttaacttcatccaaagataagacagtgcgcttatggaaacccggctgtgatggttgtcttgcagttttcaaacacaaagactatgcggttcagtagatggtaaagtgcgcatttgggacgtgttggacaagcgagtaactgactgggccgatacgcgaaatatcataactgatttgagttaccaaccggatggaaagggctttattgttggcacgattgcaggcacatgtcgtttctatgatcaatcaggtgaaagcatccagctagagaaagaattgtttgtgcaagggaagaaaaagtcagctgcctgtcggatcaacagcctaaagctatgtgcaattggttccaacagggttataatcacatcaggagattccaaaatccgagttgccaatggtgataccatccaaaagtttgaagggccttggaagtcgaaggctctgtcattaccgtctctaacatcagacgagagatacctcatatcggccggcaaagattccaacgtctacatctgggacttggccaactcgagagacgacgcaaagccagtccactcgtgcgagctgttcttctccaaggacgtgacgaccgcagtgccatggccgggagtgcggcaacaagacgggcacgcgagcgcgaaacctgcctgtgtggccgagaaatccgccagcgcgcccatcctgcgccagtcggcccccgggccgtggccgttcgtggacggcggcggcagcagcagcaaggggtcggcgacgtggcccgaggagaagctcctttctgcagcgaagcctgtggaaagcagcccgcggctggacgactgcctctccatgctatccgccgcgtggagcacggtcatcgtgaccgccggccgcgatggcgtcatccggtcttttcccaactacggcttgcccgtcaggctgtgagctccgtcaccggtctgggctgctggtcagtggaggcgcagcagccgtggttggcgactgatgatagataacctgctaacgtcttgaagtttttttttctctctctcgtttttctgggcggagttactagaaattcttttttatgtaagcatttgttagatcatgaaccttgtcatgaagagatgatctgtagtagtcagttcaagtccaaacacttgtgctctgtgtgtgtgtgttttttttgctggatggttgtgacaaggtaaaaaaacgcaagcattcagttagatgtgaccagccttttttttgccctctaacatcaggatgtttatattgaaaatatatttaaa

SEQ ID NO: 4828 - DNA, 2002 bp, Zea Mays
taacgtcaactttccatactcgttcgactacgacctgcttccattgacatatgggtcctgcagtgttaaagtcccactgatcagccaaaccagcattcccctcaaagccgtcgtccttatccccaatccacaccgtcggcggcccatccaacccgtccccatctgatctccccgtcggcggcggcccccaccgcttccttcccctcgccgtcgcgatactgagcagacactagcagaagtaggtgctccgtaacccgccccccaacaccaaagtggcactcatcacgcccacgcgaggtggtcgacgaagagccgcagaggagggggaggtgctgggtgggatccggcggaccgctcatgtcgagcggcgcggacggatcggatccctgcacgggccttgacccggggacgatcccagagctgccggcccatgaacctcctgtgctgcaggctccgtcgccggcgccgcagcaggaggtggtggtggcatcgcagaccgaggcgccgttgccagctgtcaccatcgtgatctcgcggccaggcgaggatgttcagatgcccgatgcaaagggtggctccccggcatgctccccgcaggccggtgacggcaagcctatggccacctcggtttcgttgaccgcttcggcggccgcgaaggaagccgggctggcaaggtccgactccgacagcttggacgactacgagcaatgcagagtttgtcaacagaagacagaagaacctctggtcgaccttggatgcagatgtcgtggtgatcttgcaaaagcacatcgcacatgcattgatttttggtttcgtactagaggttcaaacaagtgtgagatatgccagcaggttgctgtcaatatcgcccctccagaaacgcaatcaagtacaagttattgggtttggagggttgattcgacttatggaaggggacgaggaggacgagaaaggggatggtttagcccactttgggttgcatttgcaattctgattggtggtctcttattggatgtgctgatatctgtttctctcggtgtttccgcacttcctgtcaatataataattggtgttcttatagttctcggattgggcaccgcccttcatctagctcttgagtgctgtcacgaatggggctcaaggaggaacgtggccaatattccgaggctggagaacatagcgccgactgggtaccaccctgcagtagtataatcattatgggacttgtaaatagcgtaggaacatctaagctcgtgctggcttttggattattatgttctcgcaactagctttagctcacacgtgttgctcgttaatgtcgagctcaaattcaaagctcgttgattacaatccagttcatactcccactagtccaatccaatgtaaatgcagagttactgatactcggtcatcacgggctagtgctcatgccaaactgccagcaccttaattggatggtctggctacccattcagcatgacagggctaggttccttcttccctccttgtacggtttactctgacaagtcacttgttgtgtttcatctttatctgtggcttgtcggtataggcatttgtgaaggccatttgagctagtgttgtttttgtacatttatgtagagttgtggatataacatttttatatgaattaatctgctgatacgtttcgtgattacgtaaaaccataaatttgacagttcccttttgattcttgacgatccttctagcaaaccttgacttgcaccaatatgttaaaaaaacagagtaacatggcccttatatataaaatggcgacatgtgacaatagttcaagccatttcggcggcatgttgcaattgctcaaactgtcttttttttttttgagagagcttccttttcttttgttttttttttgagagagaagtaacggataagaacctttcgtttttctcattttctttatcaatattgtcacatccttcaaccgaccaatcttgagcattagaagcaaggtagaagtaca

SEQ ID NO: 4829 - DNA, 2813 bp, Zea Mays
agtttcgccatttcgtagtccgatcaaaacctccccaaacccaacgcaccggctagtcgctccgctcgcacgtcgcgcccgacgccccgacctcggctgctcgtccagtcgtccttcgtttcccttcccttcccttcccttccgccagaagtctccacgctccctttctcccgtttaaaaccttcgcttggtctcgactctacttggccggccatttcttcgtctcgcccaatcctcgctcacctcaaatcctagggccccgcttctcctactcgggaggctcagatccaatgggcgcggcgccgtcgacgccgacgttggacgtggcaccgttgacgccgaggttgggcgcggcaggcgcgccaccgtcgcccagcgcggcggagcagatgttcgcggcgctggtcggcgaaaaggcctacccaatctcctccgagttctggaaccagctgctcgagctgcccctcaccctgcagtggccgcgcgaccgcgtgctgcaggcgtgccacgcctttgccgagaataactacaaaacaaagcatcttgcaaagattttgatccatttggtttgttgcttgcaagagtgcacctcaacaacttctgtatcttctgtcgtatatcagagggcaatcaacgcggcatacatatcatccatatttctcaagttcatcattgaaaatgcaaaaactgacagttggcaagagctatgccttgacattgacaggagtgagaaggggttggaaaaaattccagcagaaaacacggtggagtattttctgatgagaggtgtgctggactatattggtagtgtggatgtaagttgtgttctggaccatctccagagccaaaggatgtgcatcctttcattgatgcagctatgcttcaggacagctccatcgtggcttcagtggtgcaaaaattgttgctcaattttgttacacgtccaaaaattcctctaaatgcttcgcaccctgttttctctgatgatggtaggcctggtgttctccaacgagttggctcagcagctgcaaactttgtcttgttgccatattactacctcgtaagctcaactcctgagggtgcgacaagtcaattggcagataacagtttacttgttcttcttatcatgatccactaccgaaagtgcatttcaactaatgagtccattccaaccaacaatgtatacacgatggactcaaataccaatgacaaggatgctccagtttttcatgataacccttactgcaaggcattaaacagtgctaaggacatacaatatgatcgtgctgatgttgaaggaaatgctcaagatcgacctgttgtcaggttgtcttttgcatcgttgtttgatgcttttggaaggtgcttaaatgatgagagctcggttctgttgctctattctttggtctatgggaactgcgactttcaggaatatgtcctggttagaacagacttggacactttgctgatgcctatcttggaaatgctctacaatgcatcaaggaagacttcaaatcagatttacatgctgttgattattctccttatcctcagtcaagattcaaccttcaatgctagtgtgcaccaattggtgcttcctgcagttccttggtaccatgagcgcctgatgcatcaaacgtcactgggatctttgatggttgtaatactaattcggaccattaagtacaacctctccaagctaaaggatgtctaccttcacacaaactgtcttgctattttagcaaacatggctcctcatgtgcataggctgagtgcttatgcatcacaaaggctagttagtctcttcgacatgctttctcgcaagtatgccaaactagctgagctaaaaaacgacaagtctctgaaagttatatatgatcagatggaagcagacatagcagatgatatgtctatagagcttcacatatatacagatttcttaagaattgttctggagataattattgccatccttacatatgcattgcccagaaatcctgaggttgtgtatgctgtattgcatcgacaagaggtgtttgagccatttaaaaaccatccacgtttcagtgaactgcttgagaacatatacacagtattggatttcttcaatagccgaatggacatgcaacaattagatggggaatggtctgtggataaggtgcttgaagtcatcaacaaaacttgccgttcatggcgtggagaagggatgaagatgtttacccagttacggtttacatatgagcaagaaagccaccctgaggagttcttcatcccatatgcatggcgccttgtcctatcacggggattctccttcaatcccgatgccataaatctcttccctgtggagattcaccttgaagaggcaccggccggtggacaaaaggtttaatatgaatggtccgaaccagagttctgacaagaacataaaggcatatttttgtttcattgtggcaaagagcacgatgtaaataggccgcatataccatataccaggtagtcaaatgtacacattcttttgtattaaatcattatatgtgtaagacgaaagggggtggacggattgcgcaagggtgcagagattgtgctagttataggggggagattactatgtagggtatatgcaattctttcgtaagttatcgttgtattgtacccttagttcaaaaggcttgtaaccacttatttattgaaaagttgtagagtctgcgatctaagggcatgtacagtggagagacaccaaaacggttctccaagcacaggagacaactaagagactctattgtacaatggagtgtctataaacgtagtctatt

SEQ ID NO: 4830 - DNA, 706 bp, Zea Mays
tgttcagtacagctttgccatgtctatgtcgttggactttagccagttgctagatgtttgacgatcaagacctgggcttctttgccaatttcctgggcatcttcatctttgtcttggttattgcgtaccacttcgtgatggcagacccgaagtacgaaggaaactgatgtcctctagtgcaaagatcctattatctgcaggccgaaatagggctatactgttagctaatgctagtgagatcgcttgacactttgagtgcatatcatggaagctggacatgcagttcctggcattttggttttgcccatgttttaatctgctgaattagtaaatcctggagaattcaaaagcgttttcaagtactgcagttggtggttgtttctggtcctagtgtatgcatgccagaatcttatgaataatattctttgttttgttgcctatttagctgtttagttggttgttagcctgtcaagaaactggggaacggctccgttactagactacattgagtcgtctctcacattggagtctgggagcaccaccaggcagaggcagccatgttcttatgttgttttgtgctgtctgctcaagctttcgttcatctcacctgaggcctcccttcgttgaagagagagcttggatgagagctctgtttttccttctttttttattatttactattcaaaaagtcgagaccagaaaaaag

SEQ ID NO: 4831 - DNA, 1633 bp, Zea Mays
aaaccgccaagaatggaatggatagatctgcagcaacccctcccagaacctctgactttgcttcccatcgcttcgtttccaagaggagaatgtttctctcccttgcccagtcgcctgcctgcgccgtcgtctccttcccatggaggtcctcgtcccaactcatcccacgggtcccctcccgctgcaccctcgcatgccacgcagcggtgcccaaagtgcccctccccatcgcctcgccggcctccctcggggacgaccctagcaagtgggaccccgccgagtgcgacgctctcctccgcggcggggagcaggtcgcctccgtgctgcaggagatggtcacgctgatggaggacatggagatggatggtgcatttgagcaggttgctgtggagctggtggcacaaggagttattgggaagagggtggatgagatggagtcaggttttcttatggcacttgattacatgatacaacttgcacagaaggacacagatgatgagcgtaagtctattcttgaggtaattaagcagacagtgctagaccatctgacgaagaaatgtcctccacatgtccaggttgttgggctactttgccagactgaaaagaaagagagcagacatgaattgttgcgccgcgtagctgctggtggaggtgtttttaagaacgataaaggtcttaagtgccaaattcctggggcaaatcttaatgacattgcaaatcaggcagatgatctagtagagtcaatggaatctagggacaccattcctgatcgaaaacttcttgcaagattagttatagtaagagaagaagctcggaatatgatgggaggtggcctgttagatgagagaaatgatcgtggtttgactaccctccctgaggcagaggtaaactttttgagcaagctcgttgctcttaaacctgggaaggcattggaaaggatgataaagaatgttatgaatggcagaggggaaggtgctgataacgttgaacaaccaagtgctgattcacattctgaacaggagagtctaacaggagtattaggaaggggaagtgtatctggccacaagccacggccagtccgccctggaatgttccttgagactgtttccaaggtcctgggtggcgtatatgcaagtaacacatctggtattacagctcaacatctggaatgggtacatcagacaacactcaaaattcttcaggaaatggccttctagcattgttatcagggttcactgatatagtttgtaacataagaagtataatgctgcacatccgtagctattgaaggtacatgatatcaaatagccttgtgtgcaccaaggtatgttctgttttcttcttaccggatgcactggtcctactgatccctctgtgtttgttattacagagcctttttaagtggtcacatatctttttgttgagaagtggagtggaagaaacgataatgggttatctaaagccatagatcactcaggggaagaatgttgccacgttgtgcagtccagaagtaacttacaggcttggaattgatatgaccatgtggttgcccttgccaattgactaattttaagtactagactcagtaacatatttgaggcgtaatatcattattattgacattaaaaaacaa

SEQ ID NO: 4832 - DNA, 2208 bp, Zea Mays
tgataatttgcttgcagttttgcactaggcattgattgcatctctagtgcccgtcctccgtcctccggagcggctatgggcgaagagagggagttcgtgggcgctaggttggacgccggcctccgcgctgcccgcttctcgtcgccgccgtctgccgacgagtttgcggcagatgtcgagcccaagaacgtccctgcggtctttcgcggcgtggttaaggagtgggcggcctcctcccgttgggatcctctacatggcggcctcgattacctgctggaaaaagtgggacctgacgtggctgtggaagctatgatgtcaaacactggccatgtgttctacggggatctcagaagccatgagagggtgtctgtttcattctccacgttcattcagtcgtgcaagtcttacctggatcatatgaatgcagctagtgattcatccaaagagcagggaatgcttggggagccagctagttcaagggagacatgttcgaacagttcagagaacttggagcaagtctatttggcacaggcaagctcacattttatgaggctagtgttatcttgaaatggacttagcaatttacttttagcaggtatctattatgaatgcagagaacaaagaaggatgctcattacaagttctggaaggcgacatccaagagcctatatttctgagaggaaaatcattttcgtcaataaacttttggatgaataagggtcacttgagatcaagtactcattacgatccccaccataaccttctctgtgtggtatctggtcgcaaaaaagttactttgtggcctccatctgcatccccattcttatacccgttgcctgtgtatggcgaggcctccaaccacagctctgttagtgtggaggagccagattattcaatatatacaagggcaagatacatgaaggaatattctgaaacagtaattctaaactgcagcgatgttgttttcataccagaaggctggtatcaccaagttgacagtgacgacttaacaatagcagttaacttttggtggaagtcaagaataatgactcaaatgttagaacatatggatgcctactatctacgccgaattatgagcagagcataatggcgcagaagagtccttttggtcatttgaaagattgcacggatattcagcatatggccaaaacattgacaggtttccagctattcaatttgcaaaaagattcaccactacgaactctggaaccctccactctgcaagcactctatgaactcatctcactggtccatgatggtgctgaagcggttagccaaatggacaaaatagaagccacatcccagaataaatcctccaaccaaagagatgacacagatacgagtgctgctgcagacgattcatccctcttggacaaagatcctgttgcaaaaatcattttgccagttgaaccacttgaattgcggactatgctgcttgcaatggtggtatgcattacaaagttaaaaacaatcgattgatattgttgcatttcttttatttttccgaatccaatctgtgcacgactgcacgctgcaacgatattttgttgttaagcggagcactcctaaacttctatggttttcagcatactttcccaaggacgttagaaaatttgattctcaacatgcttggggtaggagcagagatactgactaggaagtttgatgagatggatcaacaaacaacaaaagaagaacagtctgagttctacaagatattctatagcgtgtttgacgaccagtacgctgcaatggatgcgcttctgaacgggaaggaattgttttcttttcagatattccagaatgtcctggacaagtatctcggggtgcatgttgaccgacccagcagatttgttactcgtacaaaccaatgaaatggagcgcctctaccctctagtatacaaaacctgaatcggcttgttgagccaagccaatgaagaacgtattatgctgattactgatgtttgagcgtctcgatagataatgtgtttttattggcttgcaaccatattttagggattttttttggacgaaggcggcagtaactgagagcggtgcgcatatgtgagatgcgtgactgctcttgaatgcgatgattacaaacgaaaattaccgttacgcctcgtttggattcatggaatcgaatttcattctaataatattaattctaacgatattaatttaggc

SEQ ID NO: 4833 - DNA, 1167 bp, Zea Mays
aacgcaaaaacctaaaccgctatggtccatccacatccacagtcgccatcgcccccacctctcaccgtcgtcttcgtgcaccactcggcctccactgccggtcgcgcctcccagccacctcgtgccgctctgccaccccgcgcatcctccaccgcccctatggctgccacgggcgagcgctgcccgagcagtcgaccgccctttccgtgccgccccgcctccccgctaggcctccactgcccactgctccggcgcctacagtggaaggcaaggagaaggacatcgggcggcgatgacgattatcttattgctagcaccgatggggtggggacaaagctgaagcttgctttcgaaactggtattcatgatacaatcgacattgacctggtggcaatgagcgtcaatgacattgtaactctaggtgcaaaaccattgttcttcctagattactatgcaacgagcaagcttgatgttgatcttgcagagaaggttatcaaggggattagggatggctgcgaacaatcagattgtgctctcctaggaggggagacagcagaaatgcctggtttctatgcagagggtgaatatgatctaagtggttttgctctcccaagaaatgatggcataacaactacagttggtgaagctctaatggcaccaaccttcatctatgttaagcaggtgcttgagattattagcaaaggtggtgtgaaaggactagcccacatcactggtggtggctttactagcaatatcccaagagtattcccctctggatgcggggcaaaaaatttactgggtcatgggaaatacctccaatcttcagttggcttcaacaggcaagaacaaatgatcttcaaacttcgcctttgattttcagtagcaactattctgagaaacatcaggcactgcattggcgtactggtcataaaaatgattgcctccagataataagttctgctgcttcaaattcagttctgccagctgtaggaatagggtttgtccgctggtttgctaaggcaagcaacgtacatagactgctcgtcttggatcctttagaaatggaattgagggtatccatggagatgcatgtagctgaactcagtcaagtttatatccattgtgtgtgtgcacgcttatttggcatcgtgttcttccttttcatgg

SEQ ID NO: 4834 - DNA, 1586 bp, Zea Mays
aacgcaaaaacctaaaccgctatggtccatccacatccacagtcgccatcgcccccacctctcaccgtcgtcttcgtgcaccactcggcctccactgccggtcgcgcctcccagccacctcgtgccgctctgccaccccgcgcatcctccaccgcccctatggctgccacgggcgagcgctgcccgagcagtcgaccgccctttccgtgccgccccgcctccccgctaggcctccactgcccactgctccggcgcctacagtggaaggcaaggagaaggacatcgggcggcgatgacgattatcttattgctagcaccgatggggtggggacaaagctgaagcttgctttcgaaactggtattcatgatacaatcgacattgacctggtggcaatgagcgtcaatgacattgtaactctaggtgcaaaaccattgttcttcctagattactatgcaacgagcaagcttgatgttgatcttgcagagaaggttatcaaggggattagggatggctgcgaacaatcagattgtgctctcctaggaggggagacagcagaaatgcctggtttctatgcagagggtgaatatgatctaagtggttttgctgtgggtgttgtgaagaaggataaaatcattgatggaaaaacattgttaagggagatgtgcttataggtcttccttccagtggtgttcattctaacgggttctctcttgttagaaggagtactgagaaaagtggactttctttggatgattagctcccaagaaatgatggcataacaactacagttggtgaagctctaatggcaccaaccttcatctatgttaagcaggtgcttgagattattagcaaaggtggtgtgaaaggactagcccacatcactggtggtggctttactagcaatatcccaagagtattcccctctggatgcggggcaaaaaatttactgggtcatgggaaatacctccaatcttcagttggcttcaacaggcaagaacaaatgatcttcaaacttcgcctttgattttcagtagcaactattctgagaaacatcaggcactgcattggcgtactggtcataaaaatgattgcctccagataataagttctgctgcttcaaattcagttctgccagctgtaggaatagggtttgtccgctggtttgctaaggcaagcaacgtacatagactgctcgtcttggatcctttaggtttgtatagtgtgttgctttatgatcaactgaccattcattacctccgcctgatggcccttattaacaacagaatcataaaagcatatagaggaactatgtataggctacaaagaagcataagaagcatttttatagcagaagccaagtgttctgatgattttgttttttcaattgtgttttctgttattggttcagtatgcacatatattgacatgatttatggcatggcatctgccatctttgttatatttatgacatcgttcttgattgatgtgtgcgacatgaatgatagatctttttaacatcctgagcatcattgtgtcactcattatcgtattttgtatatcatttatgggttcacggatatgaaat

SEQ ID NO: 4835 - DNA, 1826 bp, Zea Mays
actggggagatccctcctcactctcactttacccttctgccattttccaacacacgctatattataaaacatacccaaagagatcgtcgcctcgatttctcttcgagtgccaagcagtactgctagttctacttctgtacttcagcagtaggaggccgctgtttgctacgattttgactgactgagatgggaatcctctgcctcggtgcttcctccacactgctctgcggggaggacaggaacaacgtactcggcctcggctgcggcaacgagctggtggaggtggggagcggccatgacggcttggactccgtcgtcggcgccgtgttccccgtggacacagatgaggccgtgcgggcgttgttggagaaggagacggaccacaagcctcaagacggctatgcggagaggctggagcgcggcggattggagtactcctggaggagagacgccatggattggatttgcaaggtccattcgtactacaggtttggaccactcagtctttaccttgctgtgaattacctggatagattcctctcctcatatgatctcccacacgataagccttggatgcgacagttgttgtcagttgcttgcctagcactcgctgtcaagatggaggagaccgtgctccctcttcctgtggaccttcaggtctgcgatgtgaaatttgagttcgaagcaaggactattgggaggatggagcttcttgtgctggccaccctgaaatggagaatgcaggctgtgacccccttcactttcatcagctacttcctcgacaagttcaatggtgggaagccgccgagtttggcactagcgtcacggtgcaccgatatcataattggcacactcaaagaccatctgagattgccgcggcctcagctctagcagcagtttctgagaatcaggttgttggctcctcgagtgctctttcagcatctgaagtccctataaataaggtgatgattgctagatgctatgagctgttgcaagagcaagcgctggtgaggaagacagggcacgtcaatggaagcccttcagtgccgcagagcccgattggcgtgctggatgcaacatgcttcagctttaggagtgaagatgcaagactagtatcatcgcaatcaaacaacatcagtagtagtagtagtaacgacaatcaagtttctaagaggagaaggctaagcatatcaccaatctgagtggatcaaatctctgttggcagtgtcgcattgtgcgcttggttatgcattgatcatcttaacctcagagtttgtcagagcaacaagtagtggtacaaaaggacccagtgaagcattgtaacaagcagaggatggtgacagtaataagttagaagcagtctgttgatctctgagacgaaagaggtgacgaggaacgtttcttcctctagtaactttgaatccccttcctccccggcacctttgttttgttcctttttcctttttatcggtatctcaaggcatttgtggggagatatgtggatatgagattggagacgtgaggattagagagagagagggagggagggaggggagggagatcaacaacaacaaaaatcaggtttgttcctttgttctctgccaatatacaaaaaaactgtcgtgcgaaatcctccggatgtttcagtttattttgcttctgtagtctgaaaaatagccgtgctgattcatcgattgcattctcttatgactggttgactgcttgtttgtattacttgtccatgcctgacatttttgtgaagagaaccagccataggtacaagttatggcatggctttgcaaatataaagaaaaggagcaggcaaa

SEQ ID NO: 4836 - DNA, 1872 bp, Zea Mays
cgcctgcccgctgctgcgcttcaccccgctctcgcctcccgccgccgcgccgtcccggtcgcgatggccctgcgctccccggatctgcggtggctcggatcgctcacgaggcccggccgccttgcaccatccccactcgccgcgctcgcctccccacggcgccgccgccgcgcaccgtccccttcgccctcgccctccgactcctccaccccatctaccgcccctacatccgacagtgggccgggagcggaggggatggaggggctggagtggaagaagatcagtgccaagaggttcgggatcaaggagtccatgatcccccccgaggcctggaacgtactacaccgcctccgcagcagaggatatgatgtgtaccttgttggtggttgtgttcgagatctcataatgaaaaagacgccaaaggatttcgacataataacaacagctgatcttaggcaggtgaaagacactttcttaggatcagctgttatagtaggaaggcgttttcccatatgtcatgtacatgagaacaattccatcgttgaggtgtcaagttttaatacttgtgcaaggggatcaagtggtagccagatttacaattcaaagagccaaaattgtagcaagaatgattttgttcgctggaagaactgccaaaggagggacttcacaattaatgggttaatgtttaacccatattcagaaaagatctatgattacttgggaggcattgaagatattaagaaagctaaggtccgtactgtaattcctgctggcacttcgtttcaggaggactgtgcccgtattctacgtgcaatcagaattgcagctcgtttagggttcagcttccccaaagaaacagcttattatgtgagaacacttgcttgctcagtggcaagacttgataaggcaaggatactcatggagatgaactatatgcttgcttatggttcagctgaagcttctttgaggttgttgtggaggtttggcctccttgaacatttgttgccctttcaggtcttattttctaagctggataattttcttgcaccgaacaggccatgtcacaatagtctatggataagccttttagcttttcatgaagcattggcacgcaaaccatgtgatcctttgatagtggctacttttgcactagccttttacctgggaggtgatatgtctttggcagtggatatcggaaaatcaatcaaccgacaacatgatactggctttcgggagctcttagaacccaaagtctggactgataagcatttggcaggtgaagtacaaagctttgctgcattgatgaagcaggcattaactgaaatgactgatgagtatcatgtcgcaaatgctatggcaaaaatccctcaagcaccttcctcagatcttgtatttataccactacaagcctacctgaaggttctcaaatttatcgagtgtgttcaatatggcaaaaaggagcgtggccatgaaccaaaacgcgatgggatgatcaattaccataacctgtctaatggtacacatgcagaaataagaaacctctttacactggtggtttttgacacactgtaccctacagacacggaggatgaaaatgactgcagttcttagagagacatcatgattgggatgaattcaatactttgccagacatcaataaatactccatttgtcccaaaatatatttctttctagtcttttttttggtccacattcatcctaatgatagtgaatgtagacatacatacaaactatattcgtagattaattaatgaatgtttgtttagtttaaaacgaattatattttgggactgagagagtaataaataataaatagccagggacaactggagctgctgcatcagagtgaag

SEQ ID NO: 4837 - DNA, 1169 bp, Zea Mays
aataaaaaagaaaaacagaaaataagcacatcctcctccatcaccaaattgacgattatatcgaaaatctggacggcggcggactcgattgtagcagcagccgccgggaacaagatggcggcggcgttgtcgcagctggacgacgagatcgtccgcggcatggccatcggcgctgtcttcaccgactatgccgggaagataaactgcctcgacttccaccgcaaggaagatctcctcgtcacttccagcgaggacgactccatccgcatgtacaacatcaccagcgcgacgttgttaaagactacatatcacaggaaacatggtgctgaccgtgtctgttttagtcatcatccaagttctatcttatgctcttcacgatacaacctagagtctgcagaatcacttcgttatctgtcattgtatgacaaccgttgcttaagatacttcaaaggacacaaagacagggcatactaaggctgcgtggtagaccttctgtcgcatatgatcagcagggacttgtttttgctgtagcaatggaaggaggtgctattaagttatttgattcccggtcatatgacaagggtccatttgacactttcttggttggtggagatacagctgaagtttctgacatcaaatttagcaacgatggcaagtctatgcttttgacaacaactaacaaccatatatatgttctggatgcatatggaggggataagttgagtcatattatcttacccattttctttgcttcagatacccatccttgtggtgcacattttctgatgttacatccttttgctaatatctcaacgtaatttgcagaggtgtggctttagtttagagccatctcccaatgtaacaaatgaagctgctttcactccagatggtcaatatgtaatttcaggatcaggtgatggaaccctgcacgcttggaacatcaatacagtacaagagattgcttgttggaacagtcacattggtccgattacagcattgaagtgggcccctcgtcgagcgatgtttgcaactgcatcaactgccctaactttctggattcccaaccaatcgaattaggatcaggtgcatggagaaagaagggatgtgacttcatcaatgtgaggaagtccggtctgtgtcaagcatacgatggagtaacagctcctgag

SEQ ID NO: 4838 - DNA, 3193 bp, Zea Mays
gttagtacttctcatccgctcagtacggttgttagatcggattgatccaatatgggaacacggggacaatatatctccgattcaggtgcaagtactgcaagaaacagtggaagggggtggtgctacacgtttcaagcaacacaatgcatcgcttgggaggaatgtgcatggttgtcgtaatgtttcgctagacattgcctttactttcggcgtgagattgacaaggtcgcaggccgcatttgcaggattatttcacaaagttcaaggatgattggccaacatatgaacctaccatcatgtgcgactcatggacaggaccaacccaaaagtgagcgattaatttcatgttattttgcaatggtgttatgttcttccacaaatcaattgatgcaactggtaaatttcaagatgcgaactatttacacaaggtaatttcattaatcgttttatgtctgtatttgtatcttcgatgttgtttgtgaactataaaacaatgccatgtaatgtatttgaactgttaaatattgttattggacttttgttcaaattatgggacttcaatgtgatttatttgcaaaaaaacatatacctgagtttctgcatcagtgccgccagtttatctggtcaggagccgattaatcggtcttatcggttgactaatcggttttaaattgtttagaattcaaactaggttgactttaatttctattggttttcgtcgatttatcgtggtttacagattatcgatggacaccggtttgtgtgtcctcaatccggtttggtgaactctgatcctctaaagattttacagatttccgtagcagtacttgttgcttgaatccacattttcttcaaaggtacgtttagactgtgtcatttaaaaaattgttttgtcctgtttaacaatataaattgcaacatttataaagataaccttataacagaggaagagcaatggaaatcacatgggtcacgtctatctacaatctactagactactactgtacgcctgtatggctgtatcgtacaccctaggtgcgtgtgcgtacttgttgcagtaatacacaagtcaccactatatcactctctacaagcccactactgctcctgccactcctactatacagtatacactgcccagttgcgctagtgtagcgtaggaatactgtaggcgatgatcgacggtccactgtgcccagccctcgacaagtctcagtcgcttcatgcacgtcgcggtgccagtctcgttgctcctgctcccttatcctgcaaagctgaaagctgcaaggcctgcagatcacttccagtcttcaaaagtacagttcgcgaaagttgaaacgagcgagcgacgaaccgaaccaaccaaccggcggtggccacgtagccccccctgacacaaagacaaagctacctagaagctagcccgtggagcggctagactactagactatcatgtctcggtactgcgtcaacgagcagtcgagcacccggcctcatcctgcctcggcaggcagttggcacggcagcaccccagcaggcagcagcccctccaatttaaagcaagcaacgacgggcaaagagcagctcggcgggggctgctgcagcgccgcgcgtttgcgagtccgggacgacgacatggggaggggccgcagcgagataaagcggatcgagaacccgacgcagcggcagtccaccttctacaagcgcagggacgggctcttcaagaaggcaagggagctcgccgtcctgtgcgacgtcgacctgctgctgctcctcttctccggctccgggaagctgtaccactacctctcgcccaccgtgcccactgtcaaggacctggtcgagaggtacgaggccgcgacgcacagcaaggtctgggccgacgttcgccaggagcggcgcgcggagctggagaaggcggagcggatgtgcgagctcatggagaaggagctgcggttcatgacggtggacgacggggagcagtacacggtgccgtcgctggagctgctggagcacagcctggaggcggccgtgcacagggtgcgctccgagaaggaccgcaagatcggcggcgagatcgactgcctccagaacattatcagaggacgccacgaggagcgctacgggttgtgcgacaagcttgctcattctcaggcctggaacaacggcggggaaggtggagggtcgaccccaccaagcggcggcggcggcctggaactcaaactgggtttcaactgacgctggctggcttggaagctcgaggatggatcgaagactatgagctccttcattgtgccctgtcaggctacctacccctgcaccctgttggttatggtttaaaatggttattgaccaaagttgtcctgcatcaaacaaggctcagcttgatgttaatgtgctgagggatctaatgtattattagcgttatccagctcttgtttacgtgctccatctcaatccatgcacgttaggatggattgtctaatctagttcaaatttcgtatcaatctattccatcccatacaaattaatccatgtggattgggtggtattgagtcggtttaattctatagcaagtcaaaatccatcccaatccatcccaatacacaccaatacacatggaattgaaataaccgaaccaggcctaagatggatatctgaaccctaaaccctaaacacatgtattcatattaaaattaaggtgcatacatgaccttagcacatatattcaaactgtgttgtagtggataggatggaacggctccaggaataacgcaggcaagtaaatttcgccgtttgtgaatccagaacgattcggtaatgacacgctgaaaaccagattaaaccctgaacccaaatagaactaaaagcatgtgcgcctggcgctaggagctcagcaagaacgtagcaatatagagatcgataatcacgtctcaaagatcattactgaaaagatctcatcactgctccaaggattacgcaacgagaggcaagaaagaagggcgaatgacagcgacaaacgagaaagcaaaatcaaatgaaggaaacctaacatagcgtagacgaattgggtacgaaggaatccgccgccgccggcttagcttcacgtctcacaatggaaggcaccagccaccaggaccagccgtccaggtagcccctggccttttaccggcgggctgtgctgcgagcggag

SEQ ID NO: 4839 - DNA, 2608 bp, Zea Mays
cctgaccaacagacgaccccgttgaacccgccgccgccccgcccgcttgtttccccattcccttcctccttccgcagcaagctccagcctcccaaagcccccactcccccaatagaccatgccggccgctgcgctctagccgaccgccgcccctcccttccccctcctcgccgccatgtccatcgccgccgtgtccgcggatgggctcctcgcgttggccgacgaggctgagcgccggtatgacttttccgccgcggccgcttgcctcgagtccgcgctgcgtccgccctacgccgcagctctcctcccactcaccgaagcccgcgcgcggctccgcctcgcttcgctcctcctcgcgccccgcgggtcctcccgcgtcccgcgcgccggcgctcccgccgccgccaagacgcacctcgagcgcgcgctgctcatcctctcccctctcccctccgcgccaccgcggctcaagctgttggcccactcccacctcgcgggcgcctatgctgtcctgggggcgatcgcgtcgcagaagcacgtgctccaccgcggcctcggcctcctggattcggcttccgcctcggggctcctccagcgcgagccagcgcttctatggacttgcaacttccaggcgcagctcgggtccgttttcaccaatgacggggacgccgcgtcagcgctgtccgcactgtccgtgggagcatccgccgccgccgagctcgggagcccccagctcgagctcttcttcgccgcctccgagctccacgtccacctcctctgctgggaggacagcgctgccgttgagaacgctgtcactcgtgcctcgctgctctgggacgcactcacagccgagcagatggagcactgggttggactcttcttctacacgcagctgctgcagactttctacctgctcaggatctgcgactacaaggctgcctcacagcacgtagagaggttggatacagctgtgaagagtgagatgcagagaggacgccaaattacggcgcttgctaatgatctcagcacactggagaggacactagggcagtctgggctgaaggagcgggagatgctggcattatcgcacaagcaaaggcagctcaagggtcagctgcgagcattgtgtggctatgactcattgaatgatgtgttggattatggggataagctgcttttggcaccaccgctgatgcatggggagtggctcccacggacggcggtgtttgtgctcgtagatctcatggttgttatggtaggtcgcccgaaagggatatttaaggagtgcgggaagagaataaattcaggactccggctcatccatgatgaacttgtgaagcttggcattgtggatggtgtgatggaggcagatttggaacactcaacaatatggacagcagggctgtacttgatccttttacttcagtttctggaaaacaaagttgctgtggaacttacaaggctttagctcagatgaaaaactggtttactcgcttccccacaattcttcaaggttgcgaaagtatcattgaaaatttaaggggacaatatgcacattctgttggctgcttcgatgaagcagctttccactttcttgaagcaaaaaagctgacagagagtaaatcaatgcaatcgatgtgtgaaacctatgcagctgtgtcatatatttgtaagggtgatgcagagtcgtcttcacaggcactagaactggttggtcctgcctatagaacaatggactcatttgttggtgtgcgagagaaaacctgtatcatttttgtttatggactattacttatgagacagcataatccgcaggaagcacggaaccgccttgcaagtggtttgaaaatagcgcaccaacagttgggtaacatccagttagtttctcagtatttgacaatactgggcacattggcgcttcagctacatgacgcagcacaggctaaagagatcctgaagtcttcgttgaccttagctaagacgctatttgatattccaacccaaatctggatcttgtcagtatttacagagttatatcgtgaactggaagagaaggaaaatgaaatggagaactctgagtacgaaggaaagaaggaagacgatctgcagagaagactttctgaagcttattctcattcttttcaccatgagctggtggaaaaatcaagaatccagccgctgcacatgtcaagtaagcagccagagatggctgttccatcagctaatggtgatcttgacatcccagaatcagtggggctttccgctccccagccattcctcaaaagacttgttgaggccgagccgatgaggcgcagtaccaggaggcggcggtagtaatgaaactagtactgtaattaatagcgtagtgaatttgttggttaagtgttgttatgacttgtaacttttagcagtttaggtttttattttcttttgtttgttgtgttgattatgtgtatcttggtttagaatttatagatttggagaactgttggattgacaacattctgagtggtaaaataccaattattccactgtgttgggacggcgtgttacacctgcatctccaccatcagcacctgagggtcttcgttcggctcgcgtgcaaggg

SEQ ID NO: 4840 - DNA, 2790 bp, Zea Mays
agctagcctgcactagcttgcacccttaagaaatacagcgagagagatgatgagagtggccgtggtcggtggtggcctaagcgggctagtggcggcgcatgagctggcgaggagcggcggcgcacgcgtcaccgtgtacgagaaggaggaccatctcggcggcgccaagaccgtcgccgtcaatggtggatcaggccctgttctggtcgacctcgacttcatggtcttcaaccgggtgacgttctcaaacatgatggaatggtttgaacgtctgggggtggaaatggagaaatcggacatgtcattctcagcaagcttacggttaaacgaaggtaaaggctttgagtggggtacccgcaatggtatatctagtgttctggtgcagaagagtaatttgcttagccccagattctggctcatgatcaatgagatattcaagttcaagaaccatgccctcaagtaccaagaggactatgcacgaaaccctgacaagaatgagactttcggtcaatttattcagtcacatagatattcacagctgttccaggatgcttaccttatcccaatgtgcgcatgcatttggtcctgtccaccacagaacatatttggcttccctgctggttttgtgctttcatttttttgtgataatcatcttctcgagttgtttagtcccctacagtggctaaatgtcaaaggtggttctgggtgctacgtgaaaaaggtaagagaggaattggagagcatgggttgtcaaattaaaaccggatgtgaagtgagatcagtttcaagatttaatggaggttaccggattttggaggctgatggctcagaagagatgtatgacaggatcatattttgtgttcatgctcctgatgctctaaaaatactaggagaagaagcaacacctcatgaacggagagttctaggagctttccagtatatctacagcgatttgtatttccactgtgatgaaagttttatgccacgtaattcttctgcatggagtgcgatgaacttcttggggactacaagcagtggtgtttgtgttacctactggttaaatatacttcagaacattgaatctgccggacctttccttgcaacacttaaccctcctcgtgttcccgatcatgtattgctaaaatggcacactaggcacccgattccttccatggctgctgcaagggctactcttgagctcaatagcatacaagggaagaggggaatatggttctgtgtcccatatcaacaaggttatggaaatcatgaggacagcgtgaaggctgggaaagcagtaactttagggttgcttggcaagaaatgtgaccttttggtgaacccgaaacccatgatcgtcccatcatggactgaggccggcgtacgatatatggtggcaaaaaatctaggaaaattcataaccattggtaacttcagcatgctcgaagatggaggcacttctcttagttttggcaaaacatgtgaaagatgtcaactaaaatgtgtgatacgggttcacaacccccagttctattggaagattgcaaccgaaggagaccctggttttgcatattcctacatcaatggttatatctcgtttgttgataaaaaagaaggcatccagaatattgtcgagattattattgctaacagaggtgaacggaaaaggttgagcagtacccgtgccaggaataaaagtggttatgtaaaaaagggctggtggacacccttgtttaaaaaaaatggagctgcaatggcaaaatatgttttgcatgaagtcttaaggagaaacactatatcaaaagctcgtaaaaatatctctgcacactatgacctggcggaagatgagagtttagaagcagcgcagctacgtaaacttgacaatctaattaataaggctaaggtggatccggggcatcatgtccttgacattggctgtggttggggctcgttagcaatacgtttggtgaagagaactggctgcaagtgcacgggaattacattatcggaggagcaactgaaatacggaaagagaaaggtgaaagaatttggattagaggaccacataactctcctgctttgtgattaccgtcaaataccgaacggccagaagtttgataggattataagttgtgggatgcttgaacacgttggccatgagttctacgaagatttctttgcctcctgcgagtatcatttggccgaacacggcctacttgtcctccagtccatcgcggtcccagaggaactgtacgacaaaatgaggacgaagcctgacttcctgaaggaatatatcttcccaggtggctgcataccttctttagctcggattgcatctgccatgtctaacgcatcaaggctgtgcatacaacacgttgagaatattgggtaccactattaccccactctgattcactggagggagaactttgaggctaatgaagaaaaagttttggccctaggatttgatgaaaaattcatccgtacttgggagtactatttaaactactgtgcagctatgttcaaatcacacatgggtttagattaccagatagtgtttgctcgcgcaggcgatgcgaagttgccgagctatgtcgccattgcgtaaatggaggaggacgtcgtgtttatgttttatatgtgagacagaacattgtattttctttgttagttaggaagtccaacattcgccaaataaaaatggtttgctagagatgactcgagggtgagacaagtgtcaaagccgcatgatgattaggttgtcaacttccgagagtttttcttggcggggca

SEQ ID NO: 4841 - DNA, 2828 bp, Zea Mays
aatacagcgagagagatgatgagagtggccgtggtcggtggtggcctaagcgggctagtggcggcgcatgagctggcgaggagcggcggcgcacgcgtcaccgtgtacgagaaggaggaccatctcggcggcgccaagaccgtcgccgtcaatggtggatcaggccctgttctggtcgacctcgacttcatggtcttcaaccgggtgacgttctcaaacatgatggaatggtttgaacgtctgggggtggaaatggagaaatcggacatgtcattctcagcaagcttacggttaaacgaaggtaaaggctttgagtggggtacccgcaatggtatatctagtgttctggtgcagaagagtaatttgcttagccccagattctggctcatgatcaatgagatattcaagttcaagaaccatgccctcaagtaccaagaggactatgcacgaaaccctgacaagaatgagactttcggtcaatttattcagtcacatagatattcacagctgttccaggatgcttaccttatcccaatgtgcgcatgcatttggtcctgtccaccacagaacatatttggcttccctgctggttttgtgctttcatttttttgtgataatcatcttctcgagttgtttagtcccctacagtggctaaatgtcaaaggtggttctgggtgctacgtgaaaaaggtaagagaggaattggagagcatgggttgtcaaattaaaaccggatgtgaagtgagatcagtttcaagatttaatggagaaacaggttaccggattttggaggctgatggctcagaagagatgtatgacaggatcatattttgtgttcatgctcctgatgctctaaaaatactaggagaagaagcaacacctcatgaacggagagttctaggagctttccagtatatctacagcgatttgtatttccactgtgatgaaagttttatgccacgtaattcttctgcatggagtgcgatgaacttcttggggactacaagcagtggtgtttgtgttacctactggttaaatatacttcagaacattgaatctgccggacctttccttgcaacacttaaccctcctcgtgttcccgatcatgtattgctaaaatggcacactaggcacccgattccttccatggctgctgcaagggctactcttgagctcaatagcatacaagggaagaggggaatatggttctgtgtcccatatcaacaaggttatggaaatcatgaggacagcgtgaaggctgggaaagcagtaactttagggttgcttggcaagaaatgtgaccttttggtgaacccgaaacccatgatcgtcccatcatggactgaggccggcgtacgatatatggtggcaaaaaatctaggaaaattcataaccattggtaacttcagcatgctcgaagatggaggcacttctcttagttttggcaaaacatgtgaaagatgtcaactaaaatgtgtgatacgggttcacaacccccagttctattggaagattgcaaccgaaggagaccctggttttgcatattcctacatcaatggttatatctcgtttgttgataaaaaagaaggcatccagaatattgtcgagattattattgctaacagaggtgaacggaaaaggttgagcagtacccgtgccaggaataaaagtggttatgtaaaaaagggctggtggacacccttgtttaaaaaaaatggagctgcaatggcaaaatatgttttgcatgaagtcttaaggagaaacactatatcaaaagctcgtaaaaatatctctgcacactatgacctgagtaatgatttctttgctctttttctggatccgacgatgacttactcttgtggtattttcaaggcggaagatgagagtttagaagcagcgcagctacgtaaacttgacaatctaattaataaggctaaggtggatccggggcatcatgtccttgacattggctgtggttggggctcgttagcaatacgtttggtgaagagaactggctgcaagtgcacgggaattacattatcggaggagcaactgaaatacggaaagagaaaggtgaaagaatttggattagaggaccacataactctcctgctttgtgattaccgtcaaataccgaacggccagaagtttgataggattataagttgtgggatgcttgaacacgttggccatgagttctacgaagatttctttgcctcctgcgagtatcatttggccgaacacggcctacttgtcctccagtccatcgcggtcccagaggaactgtacgacaaaatgaggacgaagcctgacttcctgaaggaatatatcttcccaggtggctgcataccttctttagctcggattgcatctgccatgtctaacgcatcaaggctgtgcatacaacacgttgagaatattgggtaccactattaccccactctgattcactggagggagaactttgaggctaatgaagaaaaagttttggccctaggatttgatgaaaaattcatccgtacttgggagtactatttaaactactgtgcagctatgttcaaatcacacatgggtttagattaccagatagtgtttgctcgcgcaggcgatgcgaagttgccgagctatgtcgccattgcgtaaatggaggaggacgtcgtgtttatgttttatatgtgagacagaacattgtattttctttgttagttaggaagtccaacattcgccaaataaaaatggtttgctagagatgactcgagggtgagacaagtgtcaaagccgcatgatgattaggttgtcaacttccgagagtttttcttggcggggca

SEQ ID NO: 4842 - DNA, 2584 bp, Zea Mays
tagtaaacatttgtgccgcgtatgctcgtatgtgtgtgtgtttgaagagttccctcacgacaagggcccccacaatccgaggggcaaaatggtccagtcaaaaaagccctacttccgagattagacaaaacaaaactcccccgacgtcggcttctccagcgccacgctctcctctccagtctccaccaacgtcctccccccaccgcaccgcaccgccctcccctcccctcccctccccgcgcgtgcgccgccgccgcgagatccggggcgcgatgtggcgcagctgcgtctcgcggggcctctccagggccaaggcctccgcctccaggctcctctccacggcatcgtcgtcttacacggtggtggaccacacctacgacgcggtcgtggtgggggccggcggcgcggggctccgggcggccatcggcctctccgagcacggcttcaacaccgcgtgcatcaccaagctcttccccacgcgctcgcacaccgtcgcggcacagggaggcataaatgccgcgcttggaaacatgagtgaagatgattggaggtggcacatgtatgacactgtgaagggaagcgattggctcggtgaccaggattctattcagtatatgtgcagagaagcaccaaaagctgttatagagcttgagaactatggattaccattttcaagaactgaagagggaaagatataccaacgtgcctttggaggacagagcttagattttggcaaaggtggacaagcctaccgttgtgcctgtgctgctgacagaacaggacatgctatgctacacacattatatggtcaagcaatgaagcacaatactcaattttttgtggaatactttgcattggaccttctcatggacaatgatgggttatggcagggcatatttctcagcaacctcagcacacacttgtactggagatggcaatgctatggtcgcacgtgctggtttacctcttcaggatcttgagtttgtacaattccatcctacaggcatttatggtgctggatgcctgattactgaaggttctcgtggtgaaggtggtatccttagaaatagtgaaggtgaacggttcatggaacgatatgctcctactgcaaaagatcttgcttctcgtgatgttgtttcaagatcaatgacaatggaaattagagaaggacgtggtgtagggccattgaaggatcacatttatttgcatctgaaccatctgccgcctgaggttctcaaagaaaggctccctggcatttctgaaactgctgctatttttgctggtgttgacgtcaccaaggagcccattccagttttgcctactgtgcattacaatatgggtggtatcccaacgaactaccatggggaggtagtggatatcaagggtaataatccagatgctgttatccctggtctaatggctgctggtgaagcagcctgtgcatctgtccatggtgcaaataggctaggcgcaaattcacttcttgacatagttgtttttggcagagcttgtgcaaacagggtagcagatatttctaaaccaggtgagaagcagaaacctctggagaaagatgctggagagaagaccatagcctggttggacaagctgaggaatgcgaatgggtcattgccaacttccaagatccgtctcaacatgcaacgtgttatgcaaaataatgctgctgtgttccgtacacaagaaacacttgaagaaggttgtgaactgattagcaaaacatgggaaagtttccatgatgtgaagctcagtgaccgaagtctcatttggaactctgacttgatagagaccctggaactggaaaatctgttgataaacgcatgcataactatgtattcggcagaggctcggaaggaaagcagaggagctcatgctcgtgaagatttcacgacaagagatgacgagaagtggatgaaacactccctgggatattgggagaacgagaaggttcgattggcatacaggccagtgcacatgaaaacattggacgatgaagtagagtcattcccgccaaaagcacgtgtctattgatcgattcaagcctaacacctcgggaattccgtgtaaggtgttaataaagcagatgggcgttcctggctgagaacatgacctggatttgtgtccctcattttctgtgtttctgtattctgcctagtttgctagaaataaaagggtaagatagaacacatgctaatccctggctgatgtttgtgtacatgaaattttgcatgggttgttacctgttaatgctctgcctggtatcattaacccatgattcatgaatgttttggtgattcatggcatggtgcgacgttgtcaaacaacgtagatttgtacgcctgttccttggatatagtataatatatatgtacacatgtgttggagcagaaaaaagccacttctccagtttagacagtagtagtataatgcagtcttatggagagctgctgctacgtactggcacaactacagctatagactagagtgtattttctggatgctaaataggagagccagagctgttttacccccgaagttttcttgttatatgaaccgtactgtatgagag

SEQ ID NO: 4843 - DNA, 1632 bp, Zea Mays
cttttctagactttgccatgtcaggcatctccttcccttccctggtcccccatctttccccaccgcccctcctccccctacaacctgaccacattcatcccgtctcctcgccatcgaagacctccacgaggacctctacaggtctatcttcgcgctctacctcgctggccgttgcagggcctcctggagttcattgcctcgacagattggtcacacgcgaggctcgacatcaagcgccactgcggcgagcacctcgacccacatttaatgaacccctttgttagtgtgtccttctgtggcgtcaagccagagttctgatatgggatctgatctcgtgtcgcacccgcaaaactcgatatcaagcgctgttgcggcaagcacctccatccgcagctatggaaccctttcgtcgacgtgaccaggtccttccctggggtcaagcgagagttctaagatacgatgtagtcccaccttgctacccttccccaatggccccattgcatgttggctcctggctgacctctgtaccatgcgactcccttgcgcggccgcgcgtgaacactgtcgcctcgctcccagatccttatctggggattgcagctgcttcagatacatgactaccagaaaattttgattgacatagagagtcccattttgacctttgtaccactgctttaatttgaatgtggtacaaggagaaacataccaaagttcgagaacttttggtagacatagcgggtcctagtttggcctttctaccagtgctttcatttcaatgcggtacaaggagaaacataccaaagtttgagatttatggcatacacacaatgataccagtatcagtgtgtgtctgttgccggagatagaaggactgaccttccttgagtggacacactttatcttcctgaaaaaagtaaagatggtggatttcatctccatcatgagcatgttctaggtcaggtcaaggctctacacttctttcatctggtactctaattagatctactacatatttaaaggtggaatagattgtaggctgataaacttggatatttttgagcatgtaaagctttcgaaagtctttttacagtctgtcaattacgccagttcgaaccaggaaatccaggcgcattgctgccagagtagtagtgctagacctttctgtagtagtcaatgtcacagttttgcttgatcaagctttgtttactgtctttgctaattcctagccacacatgtattgcgccattatgttgtcgttccttctctactctgaaattactagccacacatttgttgtgttattgtgcatttcttctgttatttatgcactgttactccaataattattgtcgagcatgctgtcactattactgtgttggatgccaggttctttttataggatagcaatataagtttgcagttgtattaagttgttcccttgatcttagatatggatttattttggaagagagggacttacagtgctatctggaatcatattgtttgtattgtgtaaacttaattcttttttatgcattcagacatgtactatgactatatgtgatggtacatgactgtgataattattatgtgtgtgctggaacacacatatagtagtgtttttctatggat

SEQ ID NO: 4844 - DNA, 2898 bp, Zea Mays
atggactggcctggtcgctgtgcgccctgtgcgggcttccgccccgaactggggcgggggcgggggcgggggcgaggtgttcgtgggtaagggtcgcgggcgttgtgcggctgggaggcggctaccgaggcgacggaaataaagcagtagtagacgagagagccacgatttataaagcgggttttgtgtgggtgtggctcgctgctcgcctctcctccactcctctcactgctcctcccacctcgcgtttgttcggcgggctcaggtggctgcttgctggccttgctgctgcttcagatccttatcccctccgctacatcgaggccgttcggagctgtcctttctgcttcggatgggagtggcggagcagtgcatggaggtgcggggcgcggcgaatcggaggtgatcccggtcatggggtagagtggagggggcggagtgtgtgtggtatggagccgtcccgtggcgccactggcggcgcgcggcggtggggggaggcggagaccgaggttgatgcggcggaggaagggagacgggcggaggacggcggcgaggtgagcctgcgggagtggctggaccggccgggccgggcggtggaggcggcggagtgcgtgcacgtgttcaggcaggtggcggaggcggtggccgtcgcgcacgcacagggggtggccgtgggcagcgcgcggccgtcgtgcttcgtcgtgtcgccgcccttcgcgcgcgtcgccttcatcgagtccgcctccggctccgacgcctcgggttcgtgctctggctccgacgcctccgaggacgccgacccggacgcctcgcctccgcggcgaggggacggcgccggacgcggcgaggagcgcgcggggaagtcgttcccgctcaagagcgtgctggccatggagctcaactggtacaccagtcccgaggaggcggacgacagcgccgctaccttcgcctctgacgtctatagactgggtgtgctcttgttcgagctgttctgcacattcgaaacaatggaggacaagatgcgggcaatggcgaatctgaggcaccgggtgttgccgccacagttgctgctcaaatggcccaaggaagcatctttctgccagttgctaatgcaccctgtgccagaaaccagaccgaagatgagtgaggtgctgcagagtgaattccttaatcagtcaaggaatagcctggaagaacgtgaagcggcacttaggttacgcgaagagatagaagaacaagaattattgctggattttcttcagcagttgcagaaaagaaagcaagatatggcagacagtttgcaggacactgttgctttttctctcttctgacatcaatgaggtactccaccagcagtctgcacttggccactgtgtgaacttctcaccagatttggataaagaggtgtgctctggaactgttgaagatcagagtgattgtggatccaggaagcgttttagacctgagctgcaaggcgttgatatggaggaaaataatcgtagtgtggaagaatgttcaagaacagtgccgtcctctgagttaatccaggaaaatgttctgtcaaaaagctccaggttgatgaagaacttaaaaaaacttgaaacagcttattttctaacaaggtccaagttggcgaagcaagttggcaaccagataaatagttgtaatcgagttgttaagaggactactggttcagctgttgggacagaagcaagttcaatagatgatttttctttggaaaggcaatatggtagaaggcaaagagttatatgaagagccatatagcatctagtgattttgagggtatagtgcaggtttgggatgttactaggagtcaagtttttgttgagatgagggagcatgagcgacgtgtgtggtcggtggacttctcaattgtggacccaacaaaattggtcagtgggagtgatgatggatctgtgaagctgtgggatatgaatcaggctgggagtattggcactattaaaacaagggcaaatgtgtgttctgtgcaatttcaacctgatactgctcgctccattgccatcggctctgcagaccacaaaatttactgctatgatctacgtcacatacgagctccttattgtacactagttgggcacacaaagactgtaagctatgttaagtatctggatgcatcgacaatagtatctgcatctactgacaactcattgaagctttgggacttatcgatgagtccaggaaggataattgacagtccagttcaaacatttaaggggcatacaaatacaaagaacttcgttggcctttccatatctgacggttacattgctactggctctgaaacaaatgaggtttttgtgtaccacaaagaatttcccatgccagtgttggcctataaattcagcgtgacggaccctatatcagggcaggagattgatgaccagtcacagttcatttcatgcgtctgttggagagggcagtcttcaaccctactttctgcaaactccagcggcaacattaagatcttagaaatggactgaggattggagttgggcatctgctgagtctcagctataaatggactgacttcttaccaagttgtgtgcgtgtgaatttgtggcaacggagttgccaacggtgcgtggtgcagagttgggagaggtaggagtagctgtaacaggtttagcatggtttgataggattaaactagcgtggtagcaaaagtagcataaataggaaacagaattgaggtgtggggtagtactgcaaggaaaggttttgtacatcattggttcgaggtatacttgtacagccaatcaatccagtttttacctagcagcaccaggcttttgctcgtcgtagtgttacttgaaaggcaaaaagtataaagtggtctacatctgttgaatcagataa

SEQ ID NO: 4845 - DNA, 904 bp, Zea Mays
caaaactttgctcaacacaggggctcctgcataattaaatctggaaacagggggtttctcactgcataatgactccagtatcgctctatataacaagtggatccgatctagtcgccagtcgtcgtcgttaaaaccgagaagagaccaggccgaaggaaaacaatcctgaaaccaagccatgggtctgcaggaggaatttgaggagcatgctgagaaggcaaagaccttgcctgagagcacgagcaatgagaacaagctgatcctctacgggctctacaagcaagccacggttggagatgtgaataccgatcgtccgggcatattctaccaaaaggacagggccaagtgggatgcctggaaggctgttgaaggcaaatcgaaggatgaggcgatgaatgactacatcaccaaggtgaagcagctccaggaggaggctgccgcctcttaaaagtctcttaatagtgttgccaaacagctatttgtcagatgagctttgtgccatttcctcattagaagtatatcattcgatccattggggatctgtgaaccatgtacctgtttatgtaacttttttttttttcgaaagagcgcaggaggactgcgcacccatatattaaagtagagggaaaataaagggccataatgatgatatccatctatctatctatgtaactggtttatgtaccatgtacctgtttatgtaactggttaccagtgttatccatctatctatctataagagaaagagaaagataaaagagatagctaaattcacatagctcacagcaacttgtttttccagaactcaaagttgaaccagaatttgagttgcataataacactggtttgcaaactagtttgtatcttagataaatcagtaggtaagcataaggctgtctccagc

SEQ ID NO: 4846 - DNA, 2915 bp, Zea Mays
aagattctcgctacagagacgaccatgtgaaagaatttaaatctagagtacaacgtgaaggaatggcgttgccgtcggccaccgtgctgtggacggccagcatcaccttccggcttgcacagaacatggtggtgttgttcttcctggcggcgctactggcggccccggcgcgttcgtcgtcgccgtcgtccaacaacggcgccggtcttcagcagcccaccctgaccctctgctccggtcactccactgtcgccaagagcggcgagttcgccagcttcctcgcagccgtgtgcgccggagcctacggcggcggcgtcgcccacatgtcccacagcatgtcctcgtacgtcgccgccgagaaccggaccatgtacggggtcgcgcagtgccgccccgacgtgtcggcctccgactgtactgcctgcctcgctgcagcctcgtccaagctcatcaccgggaccgcgtgcgcgacgtcggcggtctggcacgacgcctgcttcctccggtactcggaccgcgacaccggccggttccgcgaggacgaacacacggagaccgtgttcaacgcgagccgcgcgctgtcgtcgttgccgccccacgttggcgccaacaaagcggtggtggtgaggcgcctacttgccgccgtcgcggacagcacgaggagcggccacatgtgcagcgacatcggtgtcggcactggtgcggcaggcggcggccggatctacggactcacgcggtgcgccgccgagatctcgtgcgcagactgccgccgctgcctcggcggcgctctcgcggtggtagagcgcgagtacaacggcagcgcggggatgcaggtcctgcggctcagctgcatggccaggtacgagagctaccccttctacaacaccaagttcttgacccggcgattgctggcgtcggcgacgagcgggagcccccggccgactcatggaggaatcgtctttaactcttctatatcttttgggccttttgggctcgtgcactctggcggtcctaacccaccgccttcaccgccagtatcacctccaccaccagcattcacgaccatctccgtgcctgctagtgtgggcactgcacaacccaccccaccgccttcacggcctgcacaagcacagccatcaccacctccaccagcagcatccatgatcgtctccgggcctgcgactgcgactccgagggctgcacaagcacaacccaccccagcgcccccaggcggtcataacccaccgcctgcatcacctccaccagcatccatcatgaacatctccgggcctgcgactgcgactccgactccgagggctgcacaacccaccccagcgcctcctggcggtcctaccccacagcctgtagctgccgcaacgaatgaaaacaaagggaagggaacattgaatacaccaaaatggcagatcgtctctattgcaactgggttggtggctgctttcatcatcctcgcactcaccgtatggtgccgtcggaaacagcaactgtctcagagagaacatgtcatagaaccccatgttttgaatcatcaagcagatggagtgccaggtgagactatgcatcacctagaaaagaaacatttgggctccgaagaagacgacgacggaggaagaacaagctgccaactctacagctacctggttcttgaggctgctacatgtcgcttctcaagtagaaacaagctagggagcggtggatttggaacggtatacaagggcacgcttgagaatgggaaggacgtagcagtgaaaaggctcagggactccaagagggcgatacaagaactagagagggagatctccatcgtggctagcttgcgccataagaacatcgtgaggtttttagggtactgcttccaagaggaagggaggttcttcatctacgagtatgtgcttaacaacagccttgataaattttggtacaaaggggaataagcaaacaaggtctaacagggtagagattaccaaggagaaaacaaacacccaaaaagttggcttgcaattgcagcatcttctcaatgccagaagctagagtgggctacatggttcaacatcatcttaggggttgctcgcggccttctgtttctccatgacatggggatcattcatcgggacctcaagccacacaatatacttcttgaccgtaacttcaacccaaagatcgctgatttcgatctcatgaggatgtatgatcaacagaaaactcacgagagcactgagaaggtcgctggaacatttgggtacatggctccagagtgcacgtccggacgaaaattcctactttcgatcaagtctgacgtgtacagctacggggtgttagtgctggagatcatcaccggccacaagatctacactttcgaaggccaaaactctgaaggcctcgtcgaatacgtgtggcagcactggtccactggatagagaagagagcgagcgacgtcatggatgctgacttaggtgtggaagggcatgagcacgcgccacggcaagcgctgcggtgcgtgcacgtcgcgcttctctgcgtgcagtctgaccggtcgaggcggccaaccatggggcaggtcatcgccatgcttagcagtggcgacgacgggacagatgacctgccggagccatctctgcccgggtacgtcctccgtccaatggcggcgtcaggtgtccagctatgctttgggtgcaggtagcgccgcttgatgacgtacgacggtccatggccagtacaaacataggtaataatctctggtctctccatcaacaaaatggatgtaatcctagcaaggcttaaatttgatcaactataaactttagcggacccagtgtttgatcatagcctgagcaaatttcattgagctaatcaaatcgtgtattttggaacacgggctacaattgaaacacaaggac

SEQ ID NO: 4847 - DNA, 4694 bp, Zea Mays
gggccggccggtttgactcggcggcggacggcgacgcgccgacgtgtctccgccgccccgctcacatccgcccccgcgccatccgtccacgtgttcgcgcctctggaacggactcccccgcctgcaccttcttttccctcgcgccgcggcgcccgttctttccgagtcccgcggatataactacaaccagccgcccccttcctccgcagctccgctccccttcccccctcgtttttcctctgcgcactttttctcgtttccagccttccaggcagccacgcctcgcccgttctcggatcccctccaaaacggtcaaagccaaaccagccaaatcgcgcgcggcggcggcggcgacgagaacgagacggacgcgcgcgcgctagctgaatcaggtcaggaaggaggagagccgccggcgagcacagcagcaatgccttactgcgaggtgggcaggtacgcggacggcgacaagtgggagggcgtccgcgtctactaccgccgctacggccgcggcgccaccaaggtgctcctcatcatcggacggcaatcatggcgacggatgccttggccttgatggatcatttggggtggaagaaagctcacgtctttggccactccatgggtgccatgattgcttgcaagcttgcggcgattgcgcctcacaggctatgttcgctggcattgcttaatgtcactggaggtggctttcagtgcttcccaaaggtagatgggcagatgctttctcttgcattccgtttcttaagggcaaaaacaccagaggaaagagcccttgtggacttggaaacgcattatacgaaggaataccttgaggagactgttgggtcgtgtaccagaagaatggtcctctatcaagaatatgtgaagggcatatcgtcgacagggatgcaatctaattgtggttttgaagggcaaatcaatgcatgttggactcacaacatgactactaaggagctagatacaatacgatctgccggctttctagtttcagttattcatggaaggtacgatatcattgcgcaattgtgccatgcaaaacgtctagcagaaagccttcttcctgttgcaagaatggtagaacttcatggtgcacatctagtgagccatgaaagaccagacgaggtaaagtgagaactctcataaaacagcaacatgtgccactgaaacattaagggcattgatgtgattggttgttttgcttatttgcttaattaaactgaaactccccaaaattgctaagcaatgaaggtaacatcccaagctgtggctttgcaagtttctcaaaattgagctagctaacactaaacttttgtctaaccaaactaggaaggagcaccgaatgagaaatttctgttgcaacttgtccatagttgctgaacgagcaagatgccagccatctcagttaactgaaagcatatttcatcacctaaacgtgcaacagaataccagaattgccgagtgaactaagacgacaccagacatctcagttatccgaaagcatcatccatcacctaaacgtgaaacagaatacatgttgcttttgaaggcagctgttccccattactaggtttagcatgaaaagacagaattataggatccaataggttaccaaaagttataacgaaaccaagttgcctcaagtatctaggtatgtggcttactggcttaccacatgctcaagcatggcacacatctagggaaccatgaaaaactagatgaggtaaaatgcggacttcaataaaacaatagcgaaatgtgccactgaaatgctaggaaggacattgatagaatctatcgatctgcttattttcttaaactgttgtatagtggtgcaaaatcccaaaaattatggccaacaacgaagataacatcaaaaacagtgtctgtctgcaagcttctcctgagaaatttaagctttctaatgctcaagttttgtctaccaaactaggaagaagaattgagtgagaaaaatctgctgcacttttgtcatatatactgagcgaacttagatgacatcagacgttgcagttatctgaaagcatcattggtcacctaaccaaatgttactcttggagatagttgttccccattactaggtctagcagagaataacggaattatacgacacaataggttactaaaagtcgtatttgggatcaagttgcctcaagtatctaggcatgtggcttagcacgcactcagcacaatactttctggtgtttgcttctctcgcttggtcacagtctatcatgaaaagttcagtaggaactcatgtaaccttctacgaattgcaggtgaacaatgcacttatggatctgataaaggccaccggatctgcgatgaaacctgaagagtggtcagcccagcctgagaacacatcggagaccggggcactcatttccgcgaggcccattaccgtcacgatgcgaacagatgaaggggtgatagtcatggggtttgagcacatcaggaacattgtaaggataatgaagccagcaagggttgcaccaattgactcgtgaggaccaaaatacgtgtaaattattctttgagaccttgttgtgggagtcgagatgatactttttcacttctcccccatacctggagatgatgattttagagtagcatctccaacacatgtgaaactcttcggaggaaaggcctgtataaagagtatctgtaacttgctgcttctatttcacggccacatgctgtgctggtgctgtccaccatgcttctgtaccatactgaaatttcaaaaccattctttgttgctcatttccgtgtggcttgctccgctgtctgttttctgcagtagcagatgtaggtgctctgagtgggttattgcagcagcagttaatctgttccgatcgagctgacatcatcatctttcttgcaaagacatacactgcgcttaagcggccgaaacgctgcaaacgtgaagatgctgcaatacatttcagcaaatagtagcatagggtaaaactgaaaagcgaacgagagcggcagccacagatctgggtttcacgacgtacaacacgataatatccagggcctagacgatctggctgggacggcgtgccaaccttaagccttgttcggttaatcccgttacccatggattggatgagataaagccttgttcggttaatcccgttacccatggattgggtgaaaccttaagccttgttcggttaatcccgttacccatggattggatgagataaagccttgttcggttaatcccgttacccatggattgggtgagattgaaaaaaattaagaaaggatttgacttagttgggatttaaactcatccaatctcactcaatccatgtggattgggagctaaccgaacaagcccttagtgtgtctgtaggacacgttagctttagggggtgtttggttagagggactaaagattagtctctagctttttgtctcatttagtcccttttttaccaaacactagaactaaaatttggactaaaataatttagtctttagtccttcgcatatgtgctaaaagagactaaaccatattaattccatatttacccttcatttagttcaattgtactaatagcaggagaatgttaaaagtcattttagtcttcttataagtcatttagtatattcttactatttttagccctataactaaatatgttagggactaaactttaatcccctaactaaactttagtccctagactaaagaaatcaaacatagtcttagttcactaaagagcatacgggtaaaacacctgaaatgacgtgcgttatctattatctctgctagctcgcggaccatccagatccagtgccacctctgatgttcttatctgacggctcagtgctcacgtagatggtgcgggctgaagaggactccatggcccggttgagcttcctaaacagagggctgacggcgtcctccttccttgtcctcctgttgttctttcattcaggtctctctcatctttcatctgcatgaacggccgctgtgcttccatgcctgcgctgcgctgcgctggttaaatagaaaatacgcggtcgtgtggaaataagctgatgcctctgcgccctgcttcttccattttgtcaaggtccgtccgacactgaatgaattctatagtttttggagaaagaatgaatatatcctgattcctgaaccccgatccacaaccgggaaagggcaccttagctgatgtattgacgtcaggcgacataagcaaacggatcaaagaagcacgccgccagttacgagacgtgctggtgaccacccttacacacacacaaactaaaaacaccacgcgagcagcggatccagaaagatacggaggatggacttattccttttattttctgtatttaaaatcgcatttttaaatttcaagtataaaattatagcagaaacttaagaggggcttccggcttccggcctccggggaccgtagcgggggctcgatcgagcccggacagcggccgccccggtgctggatgcgcccctctcatctcatgagaagtaagctagaatgaattggtgttacagagatagtgcggaggagggagggctaataaccttggcaaaatcagggactcagggtggacggctgcgctgccgcttgccgatgcctggcgtccggcgacgatccacgggccacggtgtagggtaa

SEQ ID NO: 4848 - DNA, 1661 bp, Zea Mays
agaaggcttttgagttagagttaaagtcagctgataatcgtgtcctctaggagcagctactacagaaggtcctttctctctatttttattttcaatttaaattcttcaagatgacaaagtttggtctaaaaaatcatgctaattgtagaatgtggaaatcaacgatttacaagaaacaaatttcgcattgagcaacaactctcagcaaaagtggatatatcctctgagaaggaagctgattgtacacaacatgagactattgatttgaaatctaaacttcagtccaaggaagctaaaattgagaagatgaaatatgaacatctgacgagggaggctgctttggcaaagaaggagcttcttgaagaggagtacaagaaaatgtttgatgaggcaaagaaggaactatctctcgagaatgatctagcaggcatgtgagttcttgttgctaaattgaaaagaggggctttagacatatctgatttgaatgttgatgatcgaactaaagtgtaagggcgtagcgatcaccacattgttgtctcataattggtgttaatgaaaaataacatggtgctgcacagaatctctactttctcttgtaagaaggattgttctgtcagcataatttgatttgcatgtataatgtcttcatgctttacttgcccttttgtgaaatgtggcgatcagttatcttgccttccttttctgtttctattctgcgatagaatgattggagtagattataagtatggtgctaatttcatataaataataataattgttgctaatttatggtcaagttagtaggataataatttagcccccagaataaaatgtattgttaagtcttagcaaaagttttaaagagaattgggtgccatgtctatctggatgcaaaaaatgaccactttctgcttcgttctcgcttgcgtatcgtggtggtgcagagcatttgcgcctagaagaagcgggtggcgacgaaggcgctacagggtagcgatagttacgtgccttgttttcataattattgccgttgcaacgcacgggcaccatactagtatatatatatatgtattaaagagaagaatacgttttgagagaatatgtgagtgaccatgatgagatattctaataaaattataacaatgatgagatgatctgaattaaaagtaagcactggctggaattttttgatgggtggtccataccgccgcatcttcggggttttaggcttttgtcaaggcctcaatggtacggtgcaaattgtttcactttgtagaccatacgtatagtctgtccggtgtcgtatatttcaaacataaataaccactagtcggttaccgtgcgttgcgacggctcacaacaatacccacataaattatccacaaaaaagatttcaagagattttttatttattgtctccatttttcacataatatttttatgagcgcacgggtgccgtaggcagcaaatcagataccctcatccctcgccactctcacttccaaggtttcgtagagcaggaggtgaagggaagaggcggacatatgtagggtcgagatggcggactagaggggggtgaatagtcctttctaaaactaattacaatggctaacacaaataaatacggaattaaaactattttggtttagccaagactacct

SEQ ID NO: 4849 - DNA, 1318 bp, Zea Mays
gaaaccgctgccagtgtcagtatttcaaaaatgtccatcccgtacggtcagccgacttgcccctttggcctctgtgttcgtacttcgctcggcagaaacctcttgctccagggggcgaacgcgccgccgcctccgacagccccctccagccgcgtcaaatcagcgccctcctctgctgcgccggcggtctcccgccgcaaagacgaagccccgcactcccttatcgcagatccgtgcccgccgccatgacggagtattgggtgagccaaggaaacaaatggtgcgacttctgtaagatttatatagcaaacaattccttcagcatcaggacacatgaacttggtaagcgccacaaggacaatgtcaccaaacgactgtcaacaatgcaaaaagagagtgagacaaaggaaaaggaacagcagcaagctgcacgagccctacagcagatagaagcaaaagctaaaaagagttatcaaaaagatttagagaataaccagaggaatgttgatggagacacttctgcagcacctggagatggttgtgatgggtgcttgactcggcgtcaggatattaccatgacaaatctactggactttactacgattcaaactctggcttctattattctgacagtttaggcaagtgggttacccaagaagaggcgtacaagtctgtgcaagcttcgaaatcagacgctggccaatcctcagcttcacaaacaaaagctcctgctgccgcagaaacagctgtccccgcgattaaaggaggtgcagctccaggccgggtggtaacgaaaccgttgaacccaatgagaccgattaagggcactcctgctccgtctgctgttgctgttaacaagaggaagagggatgacggcaagcccaaggcggtctccaaggaggaggaagcggccctcaaagcgcgggaagcagcaaggaagagagtggaggatagagagaagccgctgatgggattatacaagacaaggaatgccggtaatggtgtggcactggatttcagagcttttctgcatcagcaatgtgtgtccacacggtgtaatacctcatcagtggttcttgagtgaatcaagttccaatttgaatcttgtacaaggatatgttcattgttttttttacgcggatggagtgtcgtactcgtaccatatcatatactgcgaaatgaggatgtggtgaccgttctcgagatgttcaatagtgtgtttctgtcctcgacaacggagacagtattgaccagtatctgactgaacaaaagcgcttccggaaaattaattaagaaaagaataaccgtgtccgggctc

SEQ ID NO: 4850 - DNA, 2326 bp, Zea Mays
gtaaaagtgatctaggtctcccgcgccgccgccgccgccgcctaagctgcttccacctccgctttctgtgcagaggactcctcgccggagaatagccggcggcggctcgagacgaaactacggtgctcgtctcccgccgcccgccgcccttcactccccagcatacctagtccctactctaatccgtacagagcaacgcatcaagtgatggcgaagccggaggagaagctgcgctgcaccaaggaacccttcatcgaggacgtcggcacccggaggataaagagcatccggttcagcgtgctctcgggcagcgagattcgcaagtcagcggaggtacaggtctggaacaaccggatctatgaccgcgacatgacgccggttcccaatgggttgctcgacccgcgaatgggaatcccgactaagagaggcaaatgcaatacctgccatggtgaatttagtgactgtccaggtcatttcggctacttgaagctcgcgcttccagtttttaacgtgggcttctttaactgtattctggacgtgttgaagtgcatctgcaagagctgtagtagagttcttcttatcgagaaagaccgcagggagtttctaaagaagatgagaaatcccagggcagatgcactacagaaaagtgctacaatgaaaaaagtgagggacaaatgcaaactatcctgctgcccccgttgtgattacagaaatggtgtagttaaaaaaggcagagcgggcttgatagtagttcatgattgtagcaaagttttggatggacatacagaagaattgaagaatgcactacaaaataagaaagaaaaggtgtctgctagttcagttctagtgttagaccctgcaactgttctatctctattcagaagaatgattgatgaggattgtgaattactaaaccttggtgataggccagagaaacttattgtgacagagattgcagtgccacctgttcctatacggccttctgttgttgttggtaatagtagaacaagcaacgaagacagcattacagttattttgaagagcattgttaatacaaactccatccttaaggagacccttcatactgggggtccattcaccaagtgctttgattgctggcaataccttcaacttcaagttgttgaatatgtgaatagtgatgccccttctcttcctgagtcacaacatcggggccttgttcaacgactcaaagggaagactggacgatttcgtggcaatttgtccggaaaacgtactgagtacacaggaagaaccgtcatatctcctgatccaaatttgaaaataacagaggtggctattcctgtgttgatggctcgagtcttgacttatcctgaaagggtttcaaactataacattgagaagctgagacaatgtatacgaaatggaccattcaaatatccaggggctaattttgttacacaacctgatggcatgaagcagagcttaaagtatggtgatagaaggattactgctcgggatttaaagtgtggatgtatagttgaaagacatttagaagatggagatgttgtcctctttaatagacagccgagcctgcatagaatgtcaattatgtgtcacagggcaaggataatgccatggagaacactcagatttaatgagtctgtttgcaacccttacaatgctgattttgacggagatgaaatgaatttgcatgtccctcagacagaggaagctcgcactgaagcgcttatgctcatgggggttcagaataatttatgtactcctaagaatggtgagatactggttgcttccacgcaagacttcttgacctcatctttcctagttacaagaaaagatactttctatgatagatcttcctttactcttttgtgctcataccttggtgatggaatggagaacattgatttgccaacaccagccttgattaaacctgttgagctttggactggtaaacaactatttagtgtgttagtccgacctaatgcgcacacaaaggtgtttctgaatcttgctgttcaagaaaaaatttattcaaagaaaaagggaaaaaaagaggggggagaggaggtaaaggaaacaatgtgtggaagggaaacaatgtgtcccaatgatggttatgtttatttccgaaatagtgaactgttatctggacaagtagggaaggccactttaggtaatgggaacaaggatggcctttactctgttcttttaagagattataattctcatgctgcagcaagctgtatgaatcgtttggcaaaatttagaatttggtattggtcccatccccaacttcagtgaacacaacctcatcaaaggaagc

SEQ ID NO: 4851 - DNA, 4704 bp, Zea Mays
gtaaaagtgatctaggtctcccgcgccgccgccgccgccgcctaagctgcttccacctccgctttctgtgcagaggactcctcgccggagaatagccggcggcggctcgagacgaaactacggtgctcgtctcccgccgcccgccgcccttcactccccagcatacctagtccctactctaatccgtacagagcaacgcatcaagtgatggcgaagccggaggagaagctgcgctgcaccaaggaacccttcatcgaggacgtcggcacccggaggataaagagcatccggttcagcgtgctctcgggcagcgagattcgcaagtcagcggaggtacaggtctggaacaaccggatctatgaccgcgacatgacgccggttcccaatgggttgctcgacccgcgaatgggaatcccgactaagagaggcaaatgcaatacctgccatggtgaatttagtgactgtccaggtcatttcggctacttgaagctcgcgcttccagtttttaacgtgggcttctttaactgtattctggacgtgttgaagtgcatctgcaagagctgtagtagagttcttcttatcgagaaagaccgcagggagtttctaaagaagatgagaaatcccagggcagatgcactacagaaaagtgctacaatgaaaaaagtgagggacaaatgcaaactatcctgctgcccccgttgtgattacagaaatggtgtagttaaaaaaggcagagcgggcttgatagtagttcatgattgtagcaaagttttggatggacatacagaagaattgaagaatgcactacaaaataagaaagaaaaggtgtctgctagttcagttctagtgttagaccctgcaactgttctatctctattcagaagaatgattgatgaggattgtgaattactaaaccttggtgataggccagagaaacttattgtgacagagattgcagtgccacctgttcctatacggccttctgttgttgttggtaatagtagaacaagcaacgaagacagcattacagttattttgaagagcattgttaatacaaactccatccttaaggagacccttcatactgggggtccattcaccaagtgctttgattgctggcaataccttcaacttcaagttgttgaatatgtgaatagtgatgccccttctcttcctgagtcacaacatcggggccttgttcaacgactcaaagggaagactggacgatttcgtggcaatttgtccggaaaacgtactgagtacacaggaagaaccgtcatatctcctgatccaaatttgaaaataacagaggtggctattcctgtgttgatggctcgagtcttgacttatcctgaaagggtttcaaactataacattgagaagctgagacaatgtatacgaaatggaccattcaaatatccaggggctaattttgttacacaacctgatggcatgaagcagagcttaaagtatggtgatagaaggattactgctcgggatttaaagtgtggatgtatagttgaaagacatttagaagatggagatgttgtcctctttaatagacagccgagcctgcatagaatgtcaattatgtgtcacagggcaaggataatgccatggagaacactcagatttaatgagtctgtttgcaacccttacaatgctgattttgacggagatgaaatgaatttgcatgtccctcagacagaggaagctcgcactgaagcgcttatgctcatgggggttcagaataatttatgtactcctaagaatggtgagatactggttgcttccacgcaagacttcttgacctcatctttcctagttacaagaaaagatactttctatgatagatcttcctttactcttttgtgctcataccttggtgatggaatggagaacattgatttgccaacaccagccttgattaaacctgttgagctttggactggtaaacaactatttagtgtgttagtccgacctaatgcgcacacaaaggtgtttctgaatcttgctgttcaagaaaaaatttattcaaagaaaaagggaaaaaaagaggggggagaggaggtaaaggaaacaatgtgtggaagggaaacaatgtgtcccaatgatggttatgtttatttccgaaatagtgaactgttatctggacaagtagggaaggccactttaggtaatgggaacaaggatggcctttactctgttcttttaagagattataattctcatgctgcagcaagctgtatgaatcgtttggcaaaatttagtgcaagatttatagggaaccatggtttttccattggtgtggacgatgtccaaccaggagaacatctaaatcggcaaaagaaaaaggaaatagacggagggtacaaaaaatgccatgatcttatttctttgtttgcgaaaggcgcgctcgcattgcatcctggttgcaacgcagcccaaacgctggagcataacatcactggtgtgttaaatgaaatcagatcaattgctggaaatgtgtgcatggatacgcttcactggaggaacagcccattgattatgtctcagtgtggttccaaaggttctccaatcaatatcagtcagatggttgcatgtgttggacagcaatcagttggagggcgtcgtgccccagatggttttctaaacagaactcttcctcactttcctataaattcaaagacccctgcagctaaaggttttgttgctaattcattctatactggtttgactgctactgagtttttcttccacacaatgggtggacgagaaggtcttgttgacacggcggtcaaaacagcagaaactggatatatgtcccgcagattgatgaaaggcttggaagatctctcagttttctatgatcagacagttcgaaatgctagcggtggtatagttcaatttttgtatggagatgatggcatggatcctgcaaagatggaaggaaaagatggcatgcccttaaatttggatcaattgtttatgaaagtcatggccacatgtcctcaaaggggatcagatacattatctccagtgggcatcaaacagatgttagaggataagttcttgcagcatgacacctcatctgatggtggctgtagtgcagagttcaagaaaaacttaactgaattccttgataaacgtatagaattaatgaaatgcacaagaagggcactccatctacatgaggatcatgtagaaaagaaagattcttgcctagaagaatctattgctgctattatatctggtatatctgcaaaacaacttcaggttttcttggacacttgcttatctcgttatcagtcaaagaagattgaagcaggagcatctattggagcaattggagctcaaagtattggggagccagggactcagatgacactgaaaacatttcattttgcgggagtagctagcatgaatgttactcttggtgttcctcgaatcaaggaaattatcaatgctgctaaaaagataagcacacctattatcaccgctcagcttttgtcaaggaaagatgtgctttctgcgcgcattgtgaaaggatctatggagaaagcagtgcttggcgaggttgcagcaaccattcagactgtcctgaaatcaagtctgccaaacttggttgtcaaacttgatatgcaacttatagaaactctccacatgggaatatctgctgattctgtgaagctgtcaattttgaatcatccaaagcttaagttaaaatctgagcatgtccgagtcattgatagagccaagttgcgaatatatccagctggaactgacaagctcaaacttcagcttgaactgcataacctcaaatccatccttccaaaagtgattgtgaagggcattccaactgttgaaagggttgttattgatgaagttaaagtcaacaacgcgacagaaagataccaattgttggttgaaggaacaaacctcctggcagtcatgggtaccccaggagttgatgctaggaagacgaaaagtaatcacatcatggaaacgaaccaaacacttggaattgaagctgctaggagatctattattgatgagattcaatacacaatgaaaagtcatggcatgaacattgatcggagacatatgatgctcttggcagatttaatgacatacaagaacatctattcaatgcctcatacagtggtcgtcaggatcagatagagggagttagtgaatgcattatcatgggcattcccatgcagctcggtaccggtattctcaaagtcaggcaaaggctcgaccatgtgcctgaattcaagtaccaaccggacccgatactgtcgtgatacatacatgtggactgaagctggaactctgtacatatatatagctgggtcatacatgcatagcgtagcgtagcctagggcaaccctggcggcttgtcatttctccggtgaacatctaactagtctcgttccatctccatgaggcagactctaggtcaacaactccctcttcggctgcatcggcaaatgcgagagtaaaattgtggcaaacacttgctacatcttctaggcagtggtacatgatcgtgttacatatctctgcaggctaatgaagcctgggaagaatcattgtttttttcttgactagataaatatctgtgttgtaaaggaaaaataataatacaatgagaattaagaattacacgcgtgtttgccaaaccacgatacttcagtgaga

SEQ ID NO: 4852 - DNA, 1733 bp, Zea Mays
actctactctactctactccccccgtttcattcctccacttaaatgcacctcctttccgtccggaccggtccctctcctcctgtcctgggaaccaccccgtctcccgtctccgtctgccgtgccgtccccactcccctccgccccaacaacaaagcctctgcctgcccaccagcagcactgaaccagcaccagcgcaaatcctcgcccctgccgacacgggcgcgccacgcccgagccctaagcccgcacgcgcattcgccgggctcccgctgcgccccgccccgccctccgctctgtaccggcgccaatcgccggcggagggttgcttaccttgactgatataggcaattgagtatgctgctactttaatttgcccgtggaaattcatcagatggattgtctcaaccttaggacatctttccgtgttctgctctcgatacagttgctgctatcatcgttcagtcccttgattgtagcgaacttatcttcggagaagcaagcccttcttgactttgtctctgcagtctatcatggaaacaagctcaactgggataaacatacctcagtttgttcatggcatggcgtaaaatgctcagaagatcagtcacaagtttttgaattgagggtaccggctgctggtcttatcggagtaatttctccaaacactcttggcaagctttattctcttcaagtactgagcctgcggtctaatcgattgaccggaagtcttccagctgatgtggcctcccttccgtctttacgttccatatacctacagcacaatgaactttcaggagggttgccttcttccttcagtcctaacctcagtgtaatagatttctcctacaattccttcacaggagaagtacctgcaagtttacaaaacctcactcagttaaccgttcttaatttgcaagataactctttctctggatccatccctgacctcaagcttcacagtctgaaactattaaatctgagcaacaatgaactgaaaggctcaattcctcgatctctccagaaatttccaaagggttcattttcaaggaatcctggactgtgtgggctacctctagctgaatgctcacatccttcaccagcacgctcacctgaatcatctccatcgcctcaatctccacctttgacacatcatgataagaaactaggcacgggtttcatagttgcagttgctgttggtgggtttgcattgctgacgctaatcgtggttgtgtgcttttcaaagaggaaaggcaaggacgagattgatgtggaatccaaaggaaagggtactgccaccaggagcgagaagccgaagcaagaattcagtagcggcggccaaattgctgagaagaataagttggtgttcttggagggttgcacctatagctttgacctggaggatctactgagggcttctgcagaagtccttggcaagggtagttatggaactgcttacaaagctgtactcgaagatggtactgtcgtggtagtgaagagattaaaagatgttgtggcagggaaaagagagtttgagcagcagatggagctcatcgagaggttgggcaaacatgcaaacctactcccactacgcgcctactactattccaaagacgagaagctcatcgtctatgattatattgacactggaagtgtttcggccatgttgcatggagagctgcgtatgtcactgactagatattagttgcttcttttcttcaatatggttgggaag

SEQ ID NO: 4853 - DNA, 2349 bp, Zea Mays
taataaggctgctccgctccatgttagtcctaagatgcgctgaaagtcgccacatgatagtttgtttgtttaacatcgtcgcgtctcagtggttgcttaccttgactgatataggcaattgagtatgctgctactttaatttgcccgtggaaattcatcagatggattgtctcaaccttaggacatctttccgtgttctgctctcgatacagttgctgctatcatcgttcagtcccttgattgtagcgaacttatcttcggagaagcaagcccttcttgactttgtctctgcagtctatcatggaaacaagctcaactgggataaacatacctcagtttgttcatggcatggcgtaaaatgctcagaagatcagtcacaagtttttgaattgagggtaccggctgctggtcttatcggagtaatttctccaaacactcttggcaagctttattctcttcaagtactgagcctgcggtctaatcgattgaccggaagtcttccagctgatgtggcctcccttccgtctttacgttccatatacctacagcacaatgaactttcaggagggttgccttcttccttcagtcctaacctcagtgtaatagatttctcctacaattccttcacaggagaagtacctgcaagtttacaaaacctcactcagttaaccgttcttaatttgcaagataactctttctctggatccatccctgacctcaagcttcacagtctgaaactattaaatctgagcaacaatgaactgaaaggctcaattcctcgatctctccagaaatttccaaagggttcattttcaaggaatcctggactgtgtgggctacctctagctgaatgctcacatccttcaccagcacgctcacctgaatcatctccatcgcctcaatctccacctttgacacatcatgataagaaactaggcacgggtttcatagttgcagttgctgttggtgggtttgcattgctgacgctaatcgtggttgtgtgcttttcaaagaggaaaggcaaggacgagattgatgtggaatccaaaggaaagggtactgccaccaggagcgagaagccgaagcaagaattcagtagcggcggccaaattgctgagaagaataagttggtgttcttggagggttgcacctatagctttgacctggaggatctactgagggcttctgcagaagtccttggcaagggtagttatggaactgcttacaaagctgtactcgaagatggtactgtcgtggtagtgaagagattaaaagatgttgtggcagggaaaagagagtttgagcagcagatggagctcatcgagaggttgggcaaacatgcaaacctactcccactacgcgcctactactattccaaagacgagaagctcatcgtctatgattatattgacactggaagtgtttcggccatgttgcatggtatccggggcgttaccgcgaagacaccgttagattggaactccagaatgaagatcatccttggaacagcatatggaattgcacatatacattcagaagggggcgcgaagctcacccatggcaatgtcaagtcaaccaacgtactcgtagaccaagatcacaatccttccgtctcggactatggcctcagcgctctgacgagtgtgccggtcaacgcatctcgcgtcgtggtcggctaccgtgctccagagatagtcgagaaccgcaagatcacccagaagtccgacgtctacagcttcggcgtcctcctcatggagatgctcacagggaaggccccgctccagacgcaggggaacgacgacgtcgtcgacctgccgagatgggtgcactcggtggtccgggaggagtggacggccgaggtgtttgacgtggagctgatgaagcaccagaacatcgaggaggagctggtacagatgctgcagatagccatggtgtgcactgccaagtcgccagaccggcgcccgacgatggaggaggtgatcaggatgattgaggggctccgccagtccacctcggagagccgcgcgtcttctgatgagaaatccaaggagtcgaaccctccatcggtgtaaatcctgcgcagctcccttcgtccgcttgatcggttgttgttgccagttgcacctcatttgatttgttagctaatttatttatgattgagtttcttgtaaaccgtggttagcatctgctgcatttagcctcagatagaaagaactgagctttcttattgatagtctgaaactctgtttcatggcgagcgtagaattcttccgctggaaaattgaaattgttagcctgctcgattgcaaatcctttttatacagttgcatctatcagaccatttgacaa

SEQ ID NO: 4854 - DNA, 1757 bp, Zea Mays
ggccccggccacggccaatttgacacagcttttggtgctccgccaaaagaaaaagggccgagcctctctccctgttttaagagggctagaggacacgacgcctctcccagtagatgtagatgacaaacaagccatctcacctggccccggcggcaacaacaacacgccatggccctagatacctgctcttacgacgactgttgggtgttgcctccgctggattgctgggactgggcctcggagctgctgttccacactctcgaaggcgctggagctgccgccgtcttcccggagacgccaggtgtgcagtgctcgccgtcggaggcgtccagtggctacctgcacgacgccatcgctccagtgagcgcccgtcgcaacaagcggcagcggatggcggcggcgacgacgacgcctccctctcggcgtccggcgaccgtctgcggggaccttcagtgccttcttgcgggcttgcgggattctagcgccgacgccgagggaggagcagatttccgccatgatttgaacaccacgacggccgcggagacggagacacgctgcagctttgtctcaggcgggggcgacggggcaggtgcatcgagcagggaggagcagcagcggggccccagcgcgcaggtgctgctaccaacgccagcggcagcggcgaagggcggagatgaggaggcaaaggcgtccgctgtagtcccccctcgtcgcttccccgccaccgtgcgagccgctgctcccctgcagctgcaaaaggctgccgcggggacggcacacgcggcagcgcgtcgcgacgatcgcccgcgacccgtcgtcgaccgcgaacactccttccgtgcgggtgcgggtgcgggtgcggccgccacgacggcgcccgcctctgcctgccactcgttactgtcaggggaggacgagaagagaggtgtcggagtgctgtacccctttgcagtcgtcaagccgctggggttagacgacggccgcatgacgacgctggacgacgtcaaccagagaatcctcaagagaccggcaagaccagttcggcaccccgttggcccgttcgcgttcggccccgccgtgtcggctcacggcctgagtctgtccggcaaggcagtcgttagcctgaccaagatcaggacgagaggaaacggcaccataaccatcattagaacaagatgattgctgtcataccatcaaccattaccatttcctttctctatttttcctttttttaggttgcgatgcctgctgttaggtataaccatggtagattagtagctacggatgtaaatacaccctcgcgttggcttctgccttctcttatctagtttaataagacgctaaaactccactggatttaaattggacgtacataagctgcagcctcggaactttgtccaacataccagctaccacagcagcgtggtttcataatttcatgaggatgcctgcatccctgagcttggtgtctcatgctgtcatgcactcaacaaaccatcgtgccaggaactgtgtttctacaaaactcaactacttaaatcaaattacactaccatttcgtgcctgtcacattatcaaggcgcaacccaggatgagatacattaacaaccctgtaatgcaggttgacctatggcgtacatagccatgtggccatatccctgtaggtacatcaagcagcgctttatccagctagcacacataaacagatggcttgattcctccagaaatgaacactcaatacagtatgcacaagcaca

SEQ ID NO: 4855 - DNA, 1338 bp, Zea Mays
acgcattcaaccgaagcatctttgcgtgctacttcaggcgaagtcattgagttcgtctgcggtaaggcatcccatgttcctccgccgccgtctcctctccaccgctgccgctgcgaccgccgcccgcggcccaccgccgatccgcgtgtccctaacggagtccgcgggccgcggcgtcttcgctacccgcccagtatcttctggcgagctcctccactcagcgcagcccctcgtctcccacccctcccactctctgctccacgaggtttgctacaattgcctcagaaggaagcccggggaagggcgcgcttcaagcgggggtgactacttctgcagcgatgcttgcagggaccacgccaaggggttccatgacattgaaaagaatgtagattggtctttattcgattaccactgcaggagctgctaatgcagattgccttaacatacttcagccagctctgttgcaccaggggacgctgattgagatgaaagaggaatttgagttgttggaatccacttttagaaaagctggatttcaggaagaaatcacaacctttttgaccatagattggtacatcaatgtattggcaagaatacgcataaatgcttttcgtattgaattggttgcaagttcatatgaggatctcttatcctcagcggcagcctctgtatcatgtgattcatcagttggcaatgcggtttatatgctcccatctttctacaaccatgactgcgatccgaatgctcacattgtttggctgcaaaacgcggacgcgaaattgaaggctctccgcgacattgaagaaggcgaggagctgtgcatctgctacatcgatgctagcatggatgccgacgctagacagaagattcttgctgatggatttggcttcgagtgccgttgccttcggtgcttgtctggagactagaaaccatgtctactttcttcctgagcatgagtttgtcttcgattgtagcggattgaagcggttggtgctgagtaccatcagaatcttaagttgcaatcttctgtacactagttacagccacgccaattgagttgtggttaagcattactttgccttttgcacttccctaccacgacatgctagaaatgttgtggtgtaaatgttgtagccgtttttgtttagcttcttgttcagtccttagtgtcagaaataaaatttcgataatactcggatcatttgaataccggaaaccttgtagctgtagttggggtagcattacatatattatactcttgactctctccgttttttttacttgtcgtgttttagtataaaaatgaactatggagcgataaatttgagaatggacgct

SEQ ID NO: 4856 - DNA, 3359 bp, Zea Mays
cgacgcctcccacagctggagaccgtactttactggcactggcagtaatcttcccacccgcctcggcgcctcctccctctctcccaacatcgcccgctctctcctcgctgttctccgctgtcatctcccccggagaagcgtggctcctgtagccggcctcctacctgcccctcctccgcgcgccgagcaccagacgacgcgacacggccgagcacggtcgctgcttccgcggcggcgccgctccactctcgtgctgcagctagcggaacagagatccgtggggacatgaacagggtttctcctctctgttggtatgaactaaattgatcgatggtcctattgaatatagagctactattatatggcatattctgtcatgcaaatgatggtggttgtaagttgtgattgaggaactccattgtttgagaaatggatgaaacaccaactagttctgggcaatctgaagatagttcatgtgaacctaattggtggccaccagacttattagagaagatagagtctgcttccatatcaaggaaacatgatgttttgggtaatctaaggtcctcatcctggaaggcatcacaattactgtggtcaacaggatcttattcagggttaatccctaatggtttctattcaatcatcccggataaaaagttgaaggagactttcccaacaattccatcggtagatgacctgcaaactcttgaagcagatgggcttaaggctgacataattattgtagacactgagagggataagaaggttttcatgttgaagcagcttagtgctgcacttgtgaaagggttaagctctagcccagcattagtgataaagaaaatagcaggtttggtttttgactgcttcaagcgacaaaatcctgacgccagtccagcaaaaggctcgattgaagatactcatttctttggatataaaggaccacaacttctagggcagataagacatggatcatgccgacctcgagctattctatttaaagttcttgcagatgctgttggccttgagagtaaacttgtagttggtctacctgatgacggtgccgttggatttgtggactcctacaaacatatgtctgtggtagtttcgctaaactctatggaactgctagtggatcttatgcgatttccaggccagttgattccattttcagctaaggctatctttatatcgcatatatctgctgcgggtgaaagtgactcagctgaaaatgactcctgtgattctccccttgagcccaacagccctctgtatggattgtctgataaagttgaaactgaaggaattgaatcttcatcaaatctatctggacgatcactgcgtaatatgatgttgagatcaaggacattttctgaggggaaattaagcacgtcatgtagtgaaccgaatatagcgaatgccttttggaggcacagtcaaaggagaggagttgccgaggaaccccgtggtgctagttccaggcctagatggggatgacataccagagcacgggaggacaccatcgctgctcacctgttcctggagagccataactcctgagcatccattaatgagagcaaggggaagatctatacttggtggtgagaagcaatcatttcaagaatacacagaatctggagctgcttcaagatcagatggtcttgggggcacttcaacctctaatgctcgaagaataaggcgtagaagcattagcatcacccctgagattggagatgacattgtgagggcagttcgggctatgaacgaaacactaaagcaaaatcgccttcaaagggatcatgtcgaaggttcatgctcatatgttacggaagaccaaagcaacgccaatgactgcccaaataaagatgatgcatctcggataattggtgctactgacagtgactcaagaaaccgaactggtcctactcaaaaggccatgtcattgccttcttcgcctcatgaatataggggtcaagatacccaaaaaggtgatgattttataagtaaagagaagatggcattggcatggaacaaagttttccagagctccccatttcttaacaagcccttgctgccgtttgaggaatggaacatagatttctctgagataacaattggcacgcgggttggaataggattcttcggagaagttttccgtggtatatggaatggaaccgatgttgccatcaaagtatttctagaacaggacttgacaactgaaaacatggaagatttttgcaacgagatatacatcctgagccggttgcgacatccaaacgttatattgtttcttggtgcatgcattacacctccacacttgtcaatggttactgaatatatggaaatgggatcactgtattatctcatccatatgagtggtcagaaaaagaaacttagttggcgtaggaggttgaaaattattcgtgatatatgcagggggttgatgtgcatacaccgcatgaagatagttcacagggatctcaaaagtgcaaactgcctggtgaacaaacattggactgttaagatatgtgactttggtctatctcgagtgatgattgatagtcctatgactgataattcctctgctggcaccccggaatggatggcccctgagcttatacggaatgaaccttttacagagaaatgtgatatattcagccttggtgttatcatgtgggagctgtgcacattgagtcgcccatgggaaggcatctccccagttcaagtggtgtacgcagttgctaatgaaggttcgcggcttgagattcctgaaggacctctcggcaggttgattgcagattgctgggcagagcctgagaatcggccgagctgccaggagatcctaacccgtttgctggactgcgaatacactgtcagctgaaatggaagctgctcgctcgtccactcaattcctgcacaggtggaaacatttcttgtataaaacctgtaaaaaaggctgccgattctgcggacttgaggtcacatatcgaagcgctgtgtttttttttaaacaatggcgaccctttctcaaaaaaaatgtaaaaatgattccctggttatagaagaacatgtctgattcgatagacgtgccttgcatcgcagggcaagctggttgttgtaccttattctagataagtagcacgcccgcgaatgctgttcggctttcaaatagctgcagctgcaaatttttacctgttgctacagtatttcctttctatataaccaggcggcagcagcagccgaatgttgccagtacgttggagatggcataagcaactccatgttgtgaactgttccctcgcgaccataaagaacatgccatcctagatttggaataaaaatattgtcaaaatttgtat

SEQ ID NO: 4857 - DNA, 1174 bp, Zea Mays
gtcagccagtggtcacaaacagaagcgagcaactgaccgaccaacccccacgatcagaaggatccggagttccggacgggcggacggccactgcaacgagctcgcctgtcgcctcgccccggcgccccgcgacaacgagacctcctcctccgctcagccgcagaagccacctcgccgccggcagccgtcgttgtcgctgggattgcagcagcgttggcggaaaaggggtggaggcgcggcgattgttcgcgggatgagctacggcggcagcagctccctcgcgcccggtgccaagaggccgttcgagtacgggagaacgcatgtggtgaggcccaagggcacgcacaaggccaccattgtctggctccacggccttggtgacaatggaaccagctggtctcaactgctggaaacgcttccccttcctaatataaaatggatatgcccaactgcaccttcaagacctgtgtcattgtttggcgggttcccctgcacagcatggtttgatgttgctgacctttctgaggatgctcccgatgacactgaggggatggatgcctcagcagcacatgttgcaaatttgttgtcaactgagcccgctgatatcaagcttggtgttggtggctttagtatgggtgctgctactgctctgtactctgcaacttgctttgctcatggaaaatatgggaacggcaatccataccctgtgaacctaagtcttggtcactacactgttccagaggagatggatgaagtttgcaaatggctcacagcaaatttggggctcggcacttcgtcatcttgatcgcgagaaagactcgcggtgtcggtgtcttctccagggtagtaaatgggctaatagcaaatttgggcttgggtatacggccatgttctagcttttcttcacgcagacgtgtctgcgagtgctgtacgcttataatttctatattctggtctacgtcgatttggttgacacggatattgtttgtttcaaatattctgttttccggtttggaattgtgatttgcttcctccgtatggcatcgagatgtctgcaaaggttttaccgtgactgccgaatcgttttgtttgtctattgtatataatattattgccagggacggacccaagataaaataggagtgaaagcatacttacaaggaggaacatgaaa

SEQ ID NO: 4858 - DNA, 1275 bp, Zea Mays
ctcaaccacttttcccttgcaaatctgcaactgcaatgcccattttcgccaccaaacacgctctctttaagctaaccatcgcgccccccgttctcttagcacgtacacttgcacacactctgcaaactgaaggtgccggactagtagctccgtgtcactgtcaccaaccagagccagagccatgggggccagcctgagcctggtgccggtgctcgactacttcgcccgccgcgagtgcctgcgcgccggcctccaccagaacgccgtcacgctcccgtaccccgacggcggcgccggggcgacctgcaccgtccagtactgggctccgcagggggagcctgagctcccgccgctcctgctggtccacggcttcgggccccgggccgactggcagtggcgctgccaggtggggccgctctcgcgccacttccacgtcatcatccccgacctcctgggcttcggcggcagcgcgtacccgtccgagacggcgccgccgccgacggaggcgacgcaggccgcggtgctggcggcgctgctgggcgcgctgcccgggatggagcgccggcgcgtggccgtggcgggcaccagctacggcgggttcgtggcgtactggctggcccgcgaggcggggcccgccagggtcggccccgtggtgatcgccagctccgacctgctcaagacggctgccgacgacagggcgttcctgaagcgcgccggcgaagggtggggcggcgtggacgagatcctcctccccgccgagcccgccgcgctgcggaagctcctggagctggcctcctgccgcccgccgccgcggctggtgacgccggacttcctgctccgtgacttcatccagggagcggcttgtccatctgctgaaggggattacggtcgggacagagaagttccaagtgacgccaatatctcaggaagtgctgattgtatggggagaccacgaccagctgttcccggtggagaaggcgtttgcggttcagagggctctgaacgggaccgctaggctggaggtgataccgaagacaggccacgctcctcagctggaggatccggctcgcttcaacaaggtcatgctggacttcttgctggcttctcacaagcctgacccctcggttagtggtagcgcgcaataatttaccaaggtgcattggcgattggtcagtggtagccgactcgattgtttgtaataagatcgctggacaggttcagttcattccattaaatcaatggtaaatttcaaaaaggaaaaaaatatggtacaga

SEQ ID NO: 4859 - DNA, 1270 bp, Zea Mays
ctttaaaacgcacaactccataaaccctagcggacaaagccacttgctcacaccagaaccctctccgcaatctccccgcctcgctcccgcctccacccaatggcgtctctccctaacggtggcggcgccgccgcctctggctcatgcggcgcgcgccctgtggacaaggaggtggacttcgccaactacttctgcacgtacgcctacctttaccaccagaaggagatgctctgcgaccgcgtccgcatggacgcgtaccactccgccgtcttccgcaacgcgccccacttccagggcaaggtggtccttgacgtgggcaccgggagcggcatccttgctatctggagcgcgcaggccggggccaggaaggtgtacgccgtcgaggcgactaacatggcggagcacgcgcgcgagcttgctcgcgccaacggcgtcacggatatcgttgaggtgatacagggcaccgtggaagacgttgaccttccggagaaagttgatgtcattatatcagagtggatgggctactttcttttgagagagtccatgtttgattccgtcatttgcgcacgtgaccgctggttgaagccagatggtgtgatgtatcctagccatgctcggatgtggctagcacccataagaactggtttgggtgacaagaagagggaagattttgatattgctatggatgactggagcctgtttgttcaggacactcaaacttattatggtgtcaacatgaatgctttgacaaaggcatatcgtgcagaacatgaaaaatactatttgaagtcttcaatatggaacaatcttcatccaaaccaagttatcggtcaacctgcagctatcaaggaaattgattgcttgacagccactgtcgatgagatccgagaagtcagagcacaagtcacattgccaatcagaatggaagctagattatcagcactggctggatggtttgatgttcattttcgaggtagtgctcaaaaccctggggtggaggaagttgaattaactacagcgccagatgagcatggtggaactcattggggtcagcaggtattcttgctgactccacctctgagtgtgactaaaggagacaacgttaacgtttccttctcgatggttcgctcgaaggaaaatcatcggcttatggatatggagttcacatatgaattgcacgagttatctggcaggaagcacccagcagtcaaaaccaagatgtacttagagtagaacaagatgctcacacatgaagcatgctgcattgctt

SEQ ID NO: 4860 - DNA, 1402 bp, Zea Mays
ctttaaaacgcacaactccataaaccctagcggacaaagccacttgctcacaccagaaccctctccgcaatctccccgcctcgctcccgcctccacccaatggcgtctctccctaacggtggcggcgccgccgcctctggctcatgcggcgcgcgccctgtggacaaggaggtggacttcgccaactacttctgcacgtacgcctacctttaccaccagaaggagatgctctgcgaccgcgtccgcatggacgcgtaccactccgccgtcttccgcaacgcgccccacttccagggcaaggtggtccttgacgtgggcaccgggagcggcatccttgctatctggagcgcgcaggccggggccaggaaggtgtacgccgtcgaggcgactaacatggcggagcacgcgcgcgagcttgctcgcgccaacggcgtcacggatatcgttgaggtgatacagggcaccgtggaagacgttgaccttccggagaaaggtatcctagccatgctcggatgtggctagcacccataagaactggtttgggtgacaagaagagggaagattttgatattgctatggatgactggagcctgtttgttcaggacactcaaacttattatggtgtcaacatgaatgctttgacaaaggcatatcgtgcagaacatgaaaaatactatttgaagtcttcaatatggaacaatcttcatccaaaccaagttatcggtcaacctgcagctatcaaggaaattgattgcttgacagccactgtcgatgagatccgagaagtcagagcacaagtcacattgccaatcagaatggaagctagattatcagcactggctggatggtttgatgttcattttcgaggtagtgctcaaaaccctggggtggaggaagttgaattaactacagcgccagatgagcatggtggaactcattggggtcagcaggtattcttgctgactccacctctgagtgtgactaaaggagacaacgttaacgtttccttctcgatggttcgctcgaaggaaaatcatcggcttatggatatggagttcacatatgaattgcacgagttatctggcaggaagcacccagcagtcaaaaccaagatgtacttagagtagaacaagatggaaagacggaacctcacgacgccgttgctgaaacctttgctcagaagctgagcatgtagtgtgcttgttacacccatgatgggtacattgagaccatttatgttgtattagtaatatattgtttgattgcccaattaacggggtgagccattgtttcatcacaacatcgatgtgttagcagataaccacatcgccgttttaagcaaacattgagtgcggaattttgttgtctttgtgaagtccgatgaaagcatcttcttctgatc

SEQ ID NO: 4861 - DNA, 1290 bp, Zea Mays
aaacgcggtttggtggaccctgttctcatctcagcacggcaggcacggctgagcgaacgctcctccttccaaacccacgccgacaccgatgccgagagccggggtgtccagcagcgagagtagccgccgtggcgccggtgcgttcagaaccctctccgaagatcgccgcatcaccgtattctgctccgacggtcgcctctaccaagtcgattacgcgtggaacgctacgaagctggcgggcgtcacctccgtcggggtgcgtgggaccgactccgtatgcgtcgtcggccagcggagggcgaacacgcacgcgcccaaggtgaggggagagcattggcacatgaggcaaggaatcaaactgcagaatttcgtttcaattggggatatgaaatgcctcctgatgttttggcacaatggattgcagacagagcacagatctggacccagtatgtttccaagagaccttctggagttgttgccatgattctgggcattgatgatgagaaaggaactccacaactctttacatgtgatcctgctgggtattttttcggtcacaaggcagcaagtgctggccaaagagatacggaggctgtcaactttcttgagaagaaaatgaagaacaatccttcactaccatttcaggaaaccattcagatggcaatatcagcattgcagttcgccctgaaggctgacctcaaagcctcggaagtcgaggttggggttgtcaggacggatgatccaactttcagagtgctgacagaagctgaaatcgatgagcatctggaagccatcaacccagagccgcggcactctgaaatgctccccggtttattccgggataaactgacattggagaactgaaaccatggcgacctcagctgcattttgggcaccggaaagtcaaagctttcatgtggttctttacgacggctctatggacattggattagcggtttttgggcggttttttcgttccagtgactagcggttttcagtggaaaaacggtttggtaaacctactgggcacacacgaccggccatccgccaagtcaggcgagccccgcgcggtcagtgcttgacgacgtggtatcacagccgccgtctaccgtccctcagcggacggccgggccaattcatgcatcaccgagcaataccgagcaatactgacatctaaaatgttctttagccgtaccatatccaagcaatgaccatagcactagctatgaacgtggtaattattatggtttccccgttacttttcttccttaagaaatatatgccccttca

SEQ ID NO: 4862 - DNA, 1378 bp, Zea Mays
ccaagtgtgttaaaaaactgtgtaaaaatctgacaatgaatttgtggtatatttgattatatttctcagtgtaattagagctactagaagatttgctcttcacatcattgcttgccagtggtttatttagcaatttataacactcaaagatccatttatgatcatgaaggttatttgtgccttacgaatcctctaatacttaatatgctgatcggttgatgagtaactgattagcaattcagtgggacctctctcttgcaaagtaaacttctgctattttatttgttcagaactgttcctccaaaatccaatggtgtgctaatttcaactatcatgtctttaaaaaatccccatatcttgttgcttctgataatcagagttaaagttttgctaccaacatctttttgcagccacctcgtactcggcactgccatgactgtgataaatgcgtccttcaatttgatcatcactgcatatggcttggaacatgcattggcaaaaagaaccattgtcgtttttggtggtacatatctgaagaaacaatcttgtgtatctggactgctgttctctacattgagtcattgcgtttagatgtcgacaaggcctggtggaaggattttgtcggtgtgatcctgttggcagtgcttatctttatcctgatattcctactactattgtggttgtttcattcgtacattgctgtaacaaatcaaacaacctacgaagttgccagaaggaagcgaatattctacctaaggggagtacctgaaagagtccacccattcagtagaggcatatgcagaaatctctatgacttctgctgttctagccagaagggatatattctggaagctgtgcccccaagggaggagctggaagctagagctgctcgttacacgtgccgagacgtcatttgctgccgttgctgctgatagctgtactaccatagcattgtgcccatatagccagttccactgttctttgttcaaacctttcgttaatggaagcaaattttagtgacctgcggccgttagtgaactctcggagttcactatttgtgcatatgtcatttaaacagtgagaaaaatgtgtgccctttggtccagctgttcacagtttgtctgtaaaattctgtgtggccttgcatccaaataggttttcaggacaggtagaattgatctgcacattcgaggtctggttggtaatttcggaatttagtctaccgttttaaagcctttcttatttgtgttactagcgaaatattttatttatcttgataggtttttgtaacgttgtactgatacatcatgtggtactatttgcataatttgttgtttcggcattttagatgatgaatatagctgcaggctgtaaagca

SEQ ID NO: 4863 - DNA, 1594 bp, Zea Mays
gtctgccaggtaggacccgccggaacggatcccctgcttcttctaccgaaaatccgaaatcggcgccggtgaccttcccgtggcccttgtacaaaactgacccccgtcggagcaccgccatcggatgcgacggagacggcgtcaatggcgtcctcatctgctgtcgagcccagtttccgcctctctgatcgagagaggaggtcatcgctgggactcagattcacggtgctcctgatgcacgtcatgttcgttggcgctgtcttcatcctcgatccgactctcgactggcgaatccacgaggagccgtggtatatagggttgtatggagtgctggttctgctcacgctagtgcaatacttctacacagctggctcatctccagggtatgttattgatgtaatgagagctggttccatgatgcatgcaaccttcgtcaacactgctgctctttcaaaaaaaggcagtcaaattcaagaaatggaaacacaaattctccaacgagtcatgctcaactacagaaacttagcgcgatgactcctacatcatgggcacagatggttgtggatctttatcctccagggtcaaacagcagggattggacttgcactcactgcagggttgttcagccacctcgtactcggcactgccatgactgtgataaatgcgtccttcaatttgatcatcactgcatatggcttggaacatgcattggcaaaaagaaccattgtcgtttttggtggtacatatctgaagaaacaatcttgtgtatctggactgctgttctctacattgagtcattgcgtttagatgtcgacaaggcctggtggaaggattttgtcggtgtgatcctgttggcagtgcttatctttatcctgatattcctactactattgtggttgtttcattcgtacattgctgtaacaaatcaaacaacctacgaagttgccagaaggaagcgaatattctacctaaggggagtacctgaaagagtccacccattcagtagaggcatatgcagaaatctctatgacttctgctgttctagccagaagggatatattctggaagctgtgcccccaagggaggagctggaagctagagctgctcgttacacgtgccgagacgtcatttgctgccgttgctgctgatagctgtactaccatagcattgtgcccatatagccagttccactgttctttgttcaaacctttcgttaatggaagcaaattttagtgacctgcggccgttagtgaactctcggagttcactatttgtgcatatgtcatttaaacagtgagaaaaatgtgtgccctttggtccagctgttcacagtttgtctgtaaaattctgtgtggccttgcatccaaataggttttcaggacaggtagaattgatctgcacattcgaggtctggttggtaatttcggaatttagtctaccgttttaaagcctttcttatttgtgttactagcgaaatattttatttatcttgataggtttttgtaacgttgtactgatacatcatgtggtactatttgcataatttgttgtttcggcattttagatgatgaatatagctgcaggctgtaaagca

SEQ ID NO: 4864 - DNA, 1615 bp, Zea Mays
ccacgccggcctcacccagagcgcagaacccccaaccccacttgtcgggcttcggctcttcgcatcctgcccgtcccccgtcacagtgtcccaatcgcaacccccgcctgcagcacgcgtcacgccacgccacctctccccagggtccggcgatgtcggcgccctccgacgccgcggtggcagccgcagcgcccgcatccacgaccaccgccgccgcctccagcggtgggctcaccttcaagctccacccgctcgtcatcgtgaacgtctccgaccaccacacccgcgtcaaggcccaggccgcctgctccggggacagctcttccccctcctcgtccgccccgggggccgggcagccgccgagggtgttcgggtgcgtgatcggggtgcagcgcggccggaccgtggagatcttcaacagcttcgagctcgtgctcgaccccgtctccggaaccctcgaccgcgccttcctcgacaagaagcaggagctctataagaaggtgttccccgacttctacgtgctcggttggtactccactggaagcgatgtgcacgacaccgacatgctaatccacaaatcattgatggatattaacgaaagccctgtttatctcctattaaatcctacaatcaacctctcccaaaaagatctccctgtgactatctatgagagtgagttgcatgtcatcgatgggattcctcagctcatcttcgtcagatcaaattatacaattgaggtaagtgtccccccttgtgtttgtctagctatatatgatttttttaacattagtatgcttgatcaaagactgtagaggctgagaggatatctgtggaccatgttgcccatctcaaaccttctgatggtggctcagcagcaactcatggctgctcatcttacaggaatacacagtgccatcaagatgctcaatagcagggtccgtgttatccatcagtatctcgttgccatgcaaaaaggtgacattccattagataattcgctgcttaggcaagtctcaagcctcgtaagaaggctaccagctatggagtcacagaaattccaagacgacttcttaatggaatacaacgacactctcctcatgacctaccttgcaatggtcactaaatgttcaagcacaatgaacgagttggtcgagaagataaacacgagctatgagagaacgactagcaggagaggaggtcgaggtgctttcatgtagctcaccggccgtgatcctgctgctgctttcatctgtggagattttttgaaagagctaatgttctcgaggcagttttttgcatacattctattatgtgcaacctgctatacgcaggagaggaggccgaggtgcctgccttcatgcaggctacccggaggcattttttttttcatgcaatttattatgcgcaagcggctatacggcagctctcgactcacttgctaccttctaggcaaaaatgatgatttgctggaactgtatcaaatcctgcttgaagttgatctgtaaagttcatgtctcagttaggccttatttggttgggtgtttgtatctaaagggattgtatcgaaagagattggagaggattaaattttttttagttaaaattgaatacaaga

SEQ ID NO: 4865 - DNA, 2570 bp, Zea Mays
ccacatcccacatctgtgagacacgagccgccgccagaagaccaccgcgcgccccggcccttcttccacgcctccgtcttccgcgcctggccacggcccaccgccgtccgcccttcgacgcctgacgcgccccggcaccgcccaggcaaggcggccgccggtagctacggacagcccaccgcgtccgcggcaccgcccaccggcagcagctaccggcaaccgcgcccgcggctctgtacccagggagtagcctatcatggggaagaggccgaggacaactctgcggcgcacgccagcacggggccttccaaagtccaagcgggccgacgagctgccatcgatgcctgattctgacaacgacgaaattgatgcatttcacaagcagcgggacatgatccctttcgacgccaatgatgtaagggagtcggaggatgatgatgtggagcagcccgtgtttgacctcaagcgaaagtgatgacagcaaaggagaattgtccggtgacatggctgaagctgattatgaaggatgggacaaagggtatatttcgaaattaaaaagagcacagagggctgtcaaacaaattgctggaggtgatgatagcatggatgagcaggaggatgaaacacaagaaaatgtttggggcagaggtaaaaatgcatactatgctcctggtgaacaatctggtgatgatgaggtggattacgaggaggcacaaaggatacaaaaaaataaggaaaaaaggctgtctatgaaggattttggattagaagatggtgaaagtgatgaagagggtaatgcaacaaaggtatccaaccatgaatccaaaatgaaagaagactttgctgtcttatcaggcgatgagaaaatggatgtgctatacagttctgcccctgaactcgttagcttgttgtctgagttgaaggatgcccatgaagaacttagggccataggacagctaacaagtgaggtcacgtcttgtctaggcaaagataaaatgcaaccttttgaagtgaagaaagcttgtttgcttgctcattgtcaagctattaccttctatctccttatgaaatctgaggggttgtccgtacaggatcatcctgtaatttctcgcttgatagagaccaagaatatggtagagaagataaagcaaatcactttgaatccagtgagccaaaaagggtgcgctgatgaccatagtatgcattgtggcaccatccaaacagataagatagtctcattggacaaacaggagggcaaatttagcaatgtactagcactggataaagtgaaacaaggtgctgaagtctctgaatcaagaaagagtgagccttgtaataacgattatcatgaagttaatgaacagaagaacaaggatgaacgaatgggcttgcatagccttgaaatgttgaaggtaagagcaaaccttgaggaaaggttaaagaaaaaagggctctataatttgacacgctcgaagccagagaagtcgtcaaaaaccaggacaactagtgataatggcctgcagacattggatgattttgatgatgaagtgctgaagaataaccaaatgatgaagcctagcaagcttgttgcagcagctgctaaatcaaataaaagcatgtttgtttctggtgatgatgaccttccgaagagagataatatcggagaaagacggagaaaacatgagcttcgcgtcctatcaagagtaggggctaactcagcagaggatcatgagctgccagatggtgacgcttctgaagaggaggaccaccatgagttgccagaaggtggtgatgaatctgaagacgacatccatcgggatgtcaaaagaaagaggactgaaaagctatcaaccaagaatgctctgtactcgccaactccgggcgttgaacatctggaggaagaaacagaaggcgatggcaagaggacgatttcgtatcagatcttgaagaacagggggttgactcgttccaggaataagaagaagaagaacccgcggaagaactacagggataagcacaagaacaagcttgtcaagcggaaaggccaagtgcgtgatatcaagaagcagtctggtccgtatggaggtgaaacgtctggcatcaacccgaatgtcagccgcagtgttcggttcaagagttgagttgatgcaagtagtatatttaggttggacatggaaggagttgtttctggtcttaacttggcattttctttattttttgtttgcatgtcattcgaacgcataaactccagaatttgtcttacggtattagatgagtacaattttgcttgcgaaaaatatcattatcaccgttgcctgtgtgtgtgaaaactaggtggtataattatcaaggaaatttgtatattatttcgaaccatatatattagtaggggctgtttatttagataaatgtccttaccgtgagacattgctagtagcatgacagcatgcataacatggcagcctttcattcttgacaataaccagctgtggaactgatatgggtccctaggtaattctacacatatgcagcctgttcacttggctttaatccgaacccgcttagacctt

SEQ ID NO: 4866 - DNA, 1334 bp, Zea Mays
acgaacaggtctagcccatagcaacaccctcgccccctcccttctcagcctcaggcggtcaggcccactggccgtacccgcgacgtcttcctcctcggctccgccgccttccgccgatcgcctccgccgaatcgaatagaagaatcgagcgccgctgctggcgaggggctcggcgcacagcgcgggatggcgagcggcagcagcaacggggagccaagcacggcgccgcaggcgaaccggtggtacgacctccggctgggctcctcctgccgtgacccatcccccaccgccaagttctgcactctccgctatgaatttaagccagcatcaattgacaagactcaagctgggtctctgcagagtaccaaagataaccgggttactgtggaattctataataatcagcctggcaaaccaaaggtgacatttgagggaagccaagaagagtacaaggataatgatggtgtcttattttttgatggtgagacctttcgcctagagaggttgcatagggctgtcaagaggttaaggcatgtccgagttccaggagagtctgcagcagttaatttggcagctacaactactggaatgggtgcagaatcacagtctcctccattacctaaagtcaacaagtcacagagcatgaacaaacctgctgttcactcagttccagttgaggttgagcgtattgacattggtgaaccagaaaatccaggcccaaaatacaacaacaggagtacatatcaatctgttaccgtagacccatttgccctttcacctgatccaaatgagcaagagaaccttgacatacttggtgacgatgatggcaatgcttcaccaaacaacttggctgcaggacaagaggcatctgttcgtggttttgacatcaacttaccaaatcaggacgatatggatgatgaaattgctgatgtagatgtaaatgatgacacggatctgtggatcaatgcagccgatgcgctgcgagctcaagtgaacgcagaggagcatcaggagcagcaggacagctcaagctctagtgggagcagcagcagcagcagcggaagtgagagcggcagtggaagtgggagcagcagcagtggtagcgatggtagtgatgctgattcggcaagttccggaggtgatgttgatatatgagcttgatacgcaagcttttgttttgacacatgccttgcttcacaagttttcattcacaagacctggattggaagaatagaatctgtaaacatatctgtacaactatttgcttatgggaccatggatgttacaattgttcggttgaaatgacaaaaggtatactgctatgcttgcctatt

SEQ ID NO: 4867 - DNA, 1308 bp, Zea Mays
atactcatggccaacatcacacttcagttcacgaccgaattctggatcgctcaccagcttctgttctctgcaaaataaaagaacaaataattgacctctttgtgtactttttcccctaaattcaaagcctttttgagtcactgagatattgataatgtacactgatgctcagctcaactagaaacactgagataataataaaataataataaatttgagatagctctagacatcctatgaaatatgcttcgaatgtaggtgcagatcgacgtccacaccaagagcctagaatctcaattttgcagtggaactggaagagaaacctgctcccaattccatgctgaggcagaagatggtgtcggtatacccgaggatgtcttgaatgacacaaggtttgagagggccatgcgattttatttcgtgtatctccgattggattggctctggtcacttaacctatttgctttgattctattgaatttcctagagaagcctctctggtgtcaaaagtacgccccacatacttgtgatcaaagggatctttactttcttgggcagttgccatacttaagcaaaacagaatcactcatatatgaggcgctaacccttgtcattcttgtcttggatatcttctacccactttcctacgaaggtttaaatctattctggaagaactccatgaataaattgaaggttcttcttctcttcatcttagcatgcgacatacttgtgtttatgcttagttctggacctttcagagtagctccgtacattcgtgttgtgtttctaattatgacaatcagctggctagcctatgtaacatttgaggacacaccacaaggaaagaccattttcacatcatacggtacaacattatatcagatgtttgtcctgttcaccacatccaataatcctgacgtatgggtccctgcttacaagagctctcgttggaacgccctgtttattgttatttatgtgctgttaggagtttatttcctaacaaatttaattcttgctgtcatttatgatagctttaaagagcagcttgcaaaacaacttgctcaaatggactctataaggaaaagtattctacagaaggcatttgatctcatcgatactaacggtcagggttaccttaacaaagaacagtgcatatcgttactggatgagctaaacaagtacaggtcgttgcccaaaacctggagggaagattttgaactaatcttttccgagcttgatcggagtggtgatttcaagggaatgaattatttcttaaagttcattagcaccatgatgaagaaaaagtag

SEQ ID NO: 4868 - DNA, 1678 bp, Zea Mays
atcccgggcaaccaaaggagccctcaaggtggagcgatgacggaagtggaggcgccgctcatcaccgaggtggagggggtggagggccgtggcttctgcggttccgcgtccaccggagggggcagctctggtctcggcagcggcgtgcggggcacgaggcagtaccaccgccgctcggacgcgctcgcctacggcgaccgctaccagaaggcggcagcactcgtcgacctcgcagaagatggtgtcggtatacccgaggatgtcttgaatgacacaaggtttgagagggccatgcgattttatttcgtgtatctccgattggattggctctggtcacttaacctatttgctttgattctattgaatttcctagagaagcctctctggtgtcaaaagtacgccccacatacttgtgatcaaagggatctttactttcttgggcagttgccatacttaagcaaaacagaatcactcatatatgaggcgctaacccttgtcattcttgtcttggatatcttctacccactttcctacgaaggtttaaatctattctggaagaactccatgaataaattgaaggttcttcttctcttcatcttagcatgcgacatacttgtgtttatgcttagttctggacctttcagagtagctccgtacattcgtgttgtgtttctaattatgacaatcagctggctagcctatgtaacatttgaggacacaccacaaggaaagaccattttcacatcatacggtacaacattatatcagatgtttgtcctgttcaccacatccaataatcctgacgtatgggtccctgcttacaagagctctcgttggaacgccctgtttattgttatttatgtgctgttaggagtttatttcctaacaaatttaattcttgctgtcatttatgatagctttaaagagcagcttgcaaaacaacttgctcaaatggactctataaggaaaagtattctacagaaggcatttgatctcatcgatactaacggtcagggttaccttaacaaagaacagtgcatatcgttactggatgagctaaacaagtacaggtcgttgcccaaaacctggagggaagattttgaactaatcttttccgagcttgatcggagtggtgatttcaaggttacctccgaggaatttgctgacctatgcaatactattgcaataaaattccagaaagaaccaccaccttcatatctggagaagtacccatctttctaccattcaccacagtgtgaaaggttgaagtcctttgtacggagtcgcctgtttgagtatattgttgtctttgttcttctggtgaacctaattgctgtcgttattgaaacaacgctagatatagagaacagctcttcacagaaagtgtggcaagaagtggaatttgtctttggatggatctatgttgtggagatggcacttaaaatattttcattaggatttggcgcctattggatggagggtcagaataaatttgattttgtgattacttggactatttaacaaattttcttttggaaagcgcaggagagctgcgtttcattgatcaaagagagaaagaaggctccatacaaccccaactcatacgggccatgtatgagagaagggaacacacacctctaggataagcaacagaaagaaaacacacacttgacctgac

SEQ ID NO: 4869 - DNA, 2518 bp, Zea Mays
acgcctccacggcgactccggctcctccacggctccagctccaggccccagctcaccctcccccctcccctcgaggcggaccgcccccacgtcgccggcgatcgaatcggcggccgtagcctcgcgcttccagcgtcggagagtgcgcccgtccggcggatgagatggcgctgcggcacctcgtcacgggccagaataactgcgtgccggacggcgcctcgtcgtccaaccccctcaacgccctcgccaacgccttcctcggccagtcctccaaggcgcagtcaataaaggaacttcctggttctgttaatgtcccatctacatctgactttagcgtgtctgctcctttgtcaaacatccctggttcagaaaatgagttcaaacaagaccagcgacctcttgcacggggtgctgactttattcgaggtggtcctgctaatgattggattgagtcttttcggcctccgagggttcctcaacttggtgtagaagcacaatttccagattttgagcaaatttataacaatgcagggacaacctttcagtttcagccgccattggatggtccaccacaaagagtgttgtccggtgtcttgcattcctttctcacaagtggcccagctggtgtgccatttcaaccacttccggtaccagctgctcttggtttatctgaaagcgacaaacaatgcattcgtgatcgtagctgcataatggcacggcatattttttctgaccaaccagaagaatatatacagagtcaggtcaatactttgctgcattcgcttgatattgacaaccgtatgagaggacctatgcatgggcaatacccagaactacaggagtactggaagcagtcccaaagttctacgcgtcctgccccaatgcataatgctgctgataaatggattactgagtttggcaagcaaaataataatccagaaaattgggcgaactctttcgaacaacaatatggccccaatgggtgggcctctgagtttgaacagcatcagtctcagatggccatgcgccagatgggaggagcgaacatggccaacctggctgctatggagcaatcccgagtgcttgcacaaactttagcaagtaataatgatcccaagtttcaggttccaagaacacttgtcatctttcaaacaaagtccgggcgcctctcgaggggtttatgttttttctgagaacaacccgtatgttggtcaccctaatccaatgcaggaaggacaggagctcttccgcaagggcctcttaagtgaagctgttcttgctttagaggctgaagttttgaagaatcctgataacacagaaggttggaggttgttaggcgtaacacatgcagaaaatgatgatgaccaacaggccattgcagcaatgatgcgtgcgttggaagctaatccaacaaaccttgaagttcttcttgctcttggtgttagtcacacaaatgaattggagcagggggaagcattaagatatctttataggtggcttcagaatcaaccaaaatatggtggccttgtccctctgcagtcaactgattcaccttatggtcctgatgttgttagattgtttaatgaagctgctcagatgtcacctgaagatgcagatgttcatatagttctgggagtcttatacaacctatcaagagagtatgataaagctatagcttcatttaagacagcactacagctcaaaccacaggactattcactctggaacaagcttggtgcaacccaagcaaacagcatccagagtgctgatgcaatattggcgtatcagcaggctctggacttgaaacccaactacgtgcgtgcatgggcgaatatgggaatcagctatgccaaccagggtttgtatgaggattccattcgatactatgtaagggcagttgcaatgaacccaaaagctgacaatgcctggcagtacctgaggatctctcttagcaatgcttcgcgagcggacatgattgctgcatgcgacgcccgcaaccttgacgctcttcagaaagagtttcctctgtgagccctccggtccaaggcattagagcttccatggaaggaagcagcacactagcaagccgagtgactgcacctgtggtcatggaaatggaattggaaaccagtagcgttttgtatttgcctgttgattcttatatttatttttaggaagtgggggaatgtgtagcaactaggaagcgagggaacaacatccagttgatgtgaagcattcatggcacagtaggcaatagtggcaaaggggtactatacatacacacttacgggacgcacaacataaataaagaatggttgattaataaactatttattttggggacacacccctaggatcaacccctacttgtttcgagtttgaatactgatttgtatcaacaggcaataaataatgcgctttgtaaccttttatatcataatgtaatgcgcacgcccaaatcagttgtgtctaagaaaaaacttgacaaaatgaagtaacaaaaagaggaacttctgtg

SEQ ID NO: 4870 - DNA, 1726 bp, Zea Mays
gagctctgctatccttgcacagggctccgaacacgcgtttccatggctctcctccgactccaagagcagtgctcgctcctccgaatctccagctcccaccacccaaaccccatcgatatcccaagaaatcctcgcaagaaccaacttttagtgcccaatgcggccaagattgccaacgcctccgaaattccggttcctcgcatccccactagcacttccaaggccgcaatcctggcccggaaggccgcgctttggcgggacgcccttgtccccgttgccgccgccttcgcgtcctgtccgctcccttccctcgcggcggagggcgacgggaaagagtacgtcttcaagaagtacaagcccgtgagcgccatcgacgcgttccgcaagcttcgcgacgtgccggaggtgcagctgctggacatcaggcggggcaagagcgtgcggttcatggcgccaccgaagctgaagcttatcgacaagagcaccgtgcaggtcgagttcgacgaggaggacgagaaggggtttgtcaaggaggtgctagcgaggttcccagacccggcgaacaccgtcgtctgcgtccttgacaagtagctttgatggtaattcttcgaaagttgctgagctactagttgagaatggttttaaggaagcctatgcaattaaagggggcttgagaggtccggaagggtggcaggcggttcaagaaaactatcttcccccatctgtccatgttttcccgaagaaaaaaaggggcgcgaaattagctcacacagatgcaagcaatgatggaacatacgttcagcaggagggaagcgaggaatcatcggctcctccaagcaggtttgtagtcaacacaagcgctgaatccaaagatgtttatgaaaatcccaatggaagtacaactgctgcaaaacatgcaactaggagaccgttatcaccatatccaaattaccctgacttgaagcctccatcatccccaacaccatcaaaaccgacgaattaagagcaatgcaggacaataacatgtgtggaactcaaaaggtcagaagtagttgtctcctgcacaaacatttttgtatacttccaaccgtggatgtccaggagattgactgggatggcatggaagaggaccagcagtggtgtttggagctcttgctgctgttgaggccatggtgaattcttagttgtgtaatttgcgaagcttgtacccgtatgttgtactattaagtgggggcgaaatgacattttgtacctgacttgatacagtttggggtgccttagcgttctcaatttgacaattgtgcttaactcagttttattatcactggctcagacaccgtatataggtggcatcactataattgtaacagaggttcagttcattcacgctacgtacatgctggaagtggtttacattggggataccagtttgagcaacagcattacatcaaacaaagttcaaaatcttaatcaaaacgaatcaagtttgagcgacaacaattcatccaacaaagttcaaaatcttttacaaaaagaataaaaaaaatggcccatgcaggtctcgatccacgctacgtacatgctggaagtggtttacattggggataccagtttgagcaacagcattacatcaaacaaagttcaaaatcttaatcaaaacgaatcaagtttgagcgacaacgaatcatccaacaaagttcaaaatcttttacaaaaagaataaaaa

SEQ ID NO: 4871 - DNA, 3148 bp, Zea Mays
ctaagatggccttgcggcgacgggaaagaaaggctgctctcagatccttgatgaagagatggaaaaatgtgcctgctagctggggaaagtccagtccttgcgacatgccgtgggatggtattttgtgtgatgaaaatggaagggtcacatcactgaatctgtttgggatgggcatgggaggcactctgagtgatgatataggaagtctgactgagctaacgatcttagatctgtcctcaaacagagatcttggtgggccattgccagctgccattgggaagttgtttaagcttgaatctttagcattgattggttgcagtttcagtggtcctgttccgagcgaactaggaaacttgtcacaactcacattcttgcaagctctccaatgtcacctggctggaccttgccgataaccagctgaccggacctctcccaacctccagagataatagaactggattggaccagcttcttaacgcacaacacttccattttaatcgaaacatgctggaaggttcaataccagactctctcttcagctccagcatgcacctcaaacatatcctttttgacctaaacagatttactggacagattccagcttctattggtgcaattccatcactcacagtacttcgtctaaataacaatggtttcatgggaccagttcctgctctcaacaacctgactaatctccaagttttaatgctttcaaataacaagctaagtggaccaattcctaatttgaccgggatgggctcgctagaaaatgtggatatcagtaataacagctttgatccttctaacgtcccaagctggttctcagatttaaagagcataatgacccttacaatgcagtcagttgggctttcggggcaactgccacagaagcttttcagttttcctcaactgcagcatctagtactaagtgataatgaactgaatggcacgcttgacatgggaaacaatatgagcaagcatcttgatcttgtcgatattcaaaacaacaaaatcacctcagttacagtgtacaacagcttcaaaaacctcaagcttgaaggaaacccactctgcaatgattctcttctgtcagacacaagtccatgcatgggcctgcaaactgaagccccacctcagccttatcaatttgatgttcaatgtgcatatccttttatagaaaccatcgtattcagagctccttcctttgccaacgtattcgagtaccttcccgagctacagaagaacctgtctaaacaattgaacagctgtaccccgaactggctaggcttggtaccttacttcgacgaagatgcatacctaaatgtgaatattaaggcatgcccagtaaagcagaaaaggttcaactactctcaagtgttaaactgcttcaacctgacccgtcagacttacaagccacccgagatgtatgggccttactatgtgaatgcacatccttacgcattccacgataaaacatctcgcgctgtgttgattggcattgtgactggatctgttctcctggtcgtggggctcactctggttgtattttacgctgtaaatcaaaagaaacgggctcagaggcttgtgtccatcaacaatccttttgcgtcttggggatcattgggagaagatattggtgcagcaccacaactgaagagtgctaaattcttctcattggaagaactcaagttatgcaccaatgatttccgagaaattaatgcgattggagctggaggctatggaacggtttaccgaggaaaacttccagatgggcagttagtggcaatcaagagatccaaggaagggtccatgcagggtggccttgagttcaagacagaaatagaactcctttccagggttcatcacaataacttggttggactggttggtttctgctttgagaagggcgaaaagatgttagtttacgagttcatacctaatggaacactaagcgaggctttatatggtatgaaaggaatacaattagactggagcaggaggctcaagatagctttggattcagctaaagggctagcatacctccatgaccatgccaatcctcctatcattcacagagatgtgaagtccactaacattctccttaatgagaagatgaccgcaaaggtttcagactttggcctgtcgttgctggtaacagacagtgaggaagggcaactatgcacaaacgtcaaggggacactgggctacctggacccagagtactacatgacccaacaactcacagcaaagagcgatgtctacagcttcggcgtagtgctcctagaactcatagtgggtaagccaccaatacacaacaacaagtacattgtccgtgaggtgaaaatggcactagacgaagacgatggcacgcactatgggctcaaggatgtgatggaccctgttcttcagaaaattgggggcctctttggcttcccacggtttctaaaactagcactgcaatgcgttgaagaggtggcaaccgcccggccctcgatgaacagcattgtgagggagattgaggcgatcatgctggacaatgggctcacaccgggctcaatgtctacgagctcttcattcagcattgaatcaagaacgatgaaggttggacctaagcacccatactccagttcatccatgtcaacctcgacgtttgatatggatagcagggcctttgagtacagtggggtgttcccttcttctcatggtagcttgaagccctgaagatcagaacttttggactccaacaatctgtacgagctgttatatatgtttcagtaggactgtacagaattgatgaactttgattcgttttgcctagagagacaaaagtatcttttggtttttttctttttaaagaagagatgtatataatattggccaaaacttttctccagtgatattgaagcttaggtgaggatgaaccaattataatgaactctcgagaacatgataagtactccctgtgtaattataatttgtttcttcttgtattagccatatatatatatatatatatatatatatatatagcactgggcttccaataactagagaaagcccaggtcagagagtgcaatccggtcgagccggatcaggtccagacgtctataaaagaaaacccagagtgctagggttcagtttttcacgc

SEQ ID NO: 4872 - DNA, 3177 bp, Zea Mays
ctaagatggccttgcggcgacgggaaagaaaggctgctctcagatccttgatgaagagatggaaaaatgtgcctgctagctggggaaagtccagtccttgcgacatgccgtgggatggtattttgtgtgatgaaaatggaagggtcacatcactgaatctgtttgggatgggcatgggaggcactctgagtgatgatataggaagtctgactgagctaacgatcttagatctgtcctcaaacagagatcttggtgggccattgccagctgccattgggaagttgtttaagcttgaatcttttttcagtggtcctgttccgagcgaactaggaaacttgtcacaactcacattctttgctctgaactcaaacaaactaacgggtagcatcccgccctcattaggcaagctctccaatgtcacctggctggaccttgccgataaccagctgaccggacctctcccaacctccagagataatagaactggattggaccagcttcttaacgcacaacacttccattttaatcgaaacatgctggaaggttcaataccagactctctcttcagctccagcatgcacctcaaacatatcctttttgacctaaacagatttactggacagattccagcttctattggtgcaattccatcactcacagtacttcgtctaaataacaatggtttcatgggaccagttcctgctctcaacaacctgactaatctccaagttttaatgctttcaaataacaagctaagtggaccaattcctaatttgaccgggatgggctcgctagaaaatgtggatatcagtaataacagctttgatccttctaacgtcccaagctggttctcagatttaaagagcataatgacccttacaatgcagtcagttgggctttcggggcaactgccacagaagcttttcagttttcctcaactgcagcatctagtactaagtgataatgaactgaatggcacgcttgacatgggaaacaatatgagcaagcatcttgatcttgtcgatattcaaaacaacaaaatcacctcagttacagtgtacaacagcttcaaaaacctcaagcttgaaggaaacccactctgcaatgattctcttctgtcagacacaagtccatgcatgggcctgcaaactgaagccccacctcagccttatcaatttgatgttcaatgtgcatatccttttatagaaaccatcgtattcagagctccttcctttgccaacgtattcgagtaccttcccgagctacagaagaacctgtctaaacaattgaacagctgtaccccgaactggctaggcttggtaccttacttcgacgaagatgcatacctaaatgtgaatattaaggcatgcccagtaaagcagaaaaggttcaactactctcaagtgttaaactgcttcaacctgacccgtcagacttacaagccacccgagatgtatgggccttactatgtgaatgcacatccttacgcattccacgataaaacatctcgcgctgtgttgattggcattgtgactggatctgttctcctggtcgtggggctcactctggttgtattttacgctgtaaatcaaaagaaacgggctcagaggcttgtgtccatcaacaatccttttgcgtcttggggatcattgggagaagatattggtgcagcaccacaactgaagagtgctaaattcttctcattggaagaactcaagttatgcaccaatgatttccgagaaattaatgcgattggagctggaggctatggaacggtttaccgaggaaaacttccagatgggcagttagtggcaatcaagagatccaaggaagggtccatgcagggtggccttgagttcaagacagaaatagaactcctttccagggttcatcacaataacttggttggactggttggtttctgctttgagaagggcgaaaagatgttagtttacgagttcatacctaatggaacactaagcgaggctttatatggtatgaaaggaatacaattagactggagcaggaggctcaagatagctttggattcagctaaagggctagcatacctccatgaccatgccaatcctcctatcattcacagagatgtgaagtccactaacattctccttaatgagaagatgaccgcaaaggtttcagactttggcctgtcgttgctggtaacagacagtgaggaagggcaactatgcacaaacgtcaaggggacactgggctacctggacccagagtactacatgacccaacaactcacagcaaagagcgatgtctacagcttcggcgtagtgctcctagaactcatagtgggtaagccaccaatacacaacaacaagtacattgtccgtgaggtgaaaatggcactagacgaagacgatggcacgcactatgggctcaaggatgtgatggaccctgttcttcagaaaattgggggcctctttggcttcccacggtttctaaaactagcactgcaatgcgttgaagaggtggcaaccgcccggccctcgatgaacagcattgtgagggagattgaggcgatcatgctggacaatgggctcacaccgggctcaatgtctacgagctcttcattcagcattgaatcaagaacgatgaaggttggacctaagcacccatactccagttcatccatgtcaacctcgacgtttgatatggatagcagggcctttgagtacagtggggtgttcccttcttctcatggtagcttgaagccctgaagatcagaacttttggactccaacaatctgtacgagctgttatatatgtttcagtaggactgtacagaattgatgaactttgattcgttttgcctagagagacaaaagtatcttttggtttttttctttttaaagaagagatgtatataatattggccaaaacttttctccagtgatattgaagcttaggtgaggatgaaccaattataatgaactctcgagaacatgataagtactccctgtgtaattataatttgtttcttcttgtattagccatatatatatatatatatatatatatatatatagcactgggcttccaataactagagaaagcccaggtcagagagtgcaatccggtcgagccggatcaggtccagacgtctataaaagaaaacccagagtgctagggttcagtttttcacgc

SEQ ID NO: 4873 - DNA, 3440 bp, Zea Mays
ttttatccacctcgctttccttcacttggtttctaatacgcaattcgcggggaacccaaaaccctaatcctctctctccacgccgccagagagccgtgtgggagctcggtcctcggacttctgcatcgatctctgctatgagtgctatctaggtttctcagatgggtgacctcaaggaggttttccgctccctccaagaactcttccctgaggttgatcatcgtatactaaaggctatcgcaattgagcatcgtaaagatgttgattccgcggttgttactgttcttgatgaagtcatgccgttcatgacgggttcagctggagtggatggttctgttgggaatttgtcatctatggatggttctgttgggaatttgtttggtaatcacagcacacatgaagtgggaagttcatcatctgtttggcgtgatatatgtatcaatgagattgatgcaagtgtttactctgtgcaatacacttcttatggggatgtcaaaactggcaagcaagaaaacataaacaacacatatgtgggaagacttgcatcaatcgaaggggtcaatgagcaactaaatctacattcttatcctatcccaaatggtggtcaacatgatttgcttcccaaccttgatgtgctatcttcaaataccgatccagagaaaacgttggccaacacagataatgaagttggatacagtggattatttagtgaatgtttttcccaaccaccgacaggggaagatggtggtaatatcatagccccacaaccctgtgatcaagatcctaatggcatgattccagttggggattactttccacagaacagttcaatggagttcttcagtggctatgaggactacaattttgatgacggccttttgcctattggttctaatgatcaaatatcttttcgaattttgggtactgaaaaagatccttttgcgcctgtgctagatgttcctggtcgagataaagaagaatcatccactgagacttctggatttatagaatcctccaataatgttgcagatatgcttcctgatcttaatctgaaccattttacttctacggcttcaactcactcaaaccattctgttagtattgagtctcttgaggattctgttgctgatgccagaagcaataaggttatgcattatgcttgttgtgcactggaacgtgctgcccatgccgtcgtcctgatgctgttgctcggatttgaccgcagacgcctccaagtccaaggtgacactgtacagtacggctgtagtgtcgagggtgctgttctcggctcctttgatgtacgtagttccgggtcataaaactgcacacatggttccggcttgtgcgcctgacctggcacgctggcctatatcacagacctcggcgccaagatctatggtgccgaggtctgccacgtgagctgcaagttcgatccatgtacgtcaccggggccagcacctcggcgccaagatctgtggcgccgagacgtgttacctcggcgtcacagtttatggcgctgagcaacgggtataaatttggaaattgtttctacaggagtctaaatgtgaaatttcttcattaaaaagggctaagatgaaaaaaaatcgggattgacgacagccactccaagccatcttgcacattaatcagtactctgaaccctacgtaattacatacccccattccaaattataagacgtttggcttatttagatacatagcctttatgcacttaggtatatatcactgttcatctacatggccgtttagcccgtgtacaaaccgtgtaaacgctacacaatggcttaccgtgttcgtttaatcagccatttgccccgtttaatcaccatttagtctgtatggccgtttgccctgaataaatagacaaacggtacatgatcatttaaacgtttaggctaacattggtctatattattatagtaaaaacaacatatatagaaaatccaaagcgtcttataatatggaacggagggagtattttatttaagttgttgcggtatatttttccaaaagatatgttgggaagtcatttatttagtttcctactaggatctgtttctttgtcatgagcctgaattttctgaataacgaggactgccaattatagttcctcaaaagaaaaacttctatgcaatgtatatttcttcttgcatatatgtacacaggggcaagcctagtgcagtggtgagagctgtctcacttagtcaccagtttgcggctcgaagtagcctctctgtatttgcggagagaaggcttgcttcagtttattctttccttagaccccactcataatgatctgttaccttctatagaattggttacaaaaatgatagaggatgttgagcttctagaagaaaaggctaaagtggccaaacatgaattgtccgttgctgggacaggcattctggcaaaagttgaggagctcagagaaatgataacttatgcgaaggaagcaaatgatatgcatgctggtaaggttttaggcgagaaagctattttaaccacagaggcacgtgagcttctatcacgacatcagaggctttcggatgagaggaataaatatctggtgataattgaagagatacaccaaattcttgctgaaagattggttgctgcacaacaagaaattgcagcagctgagaaagaaaatgctgaaaaggaggctgctgctcaggcagtactcgatgaacaggaaaaaatgatgaattctatcgtagaagaatcaagaaagctgcagaaagaagctgaggagaacctgaagctgaaggaattcttggttgagcgcggtcaaattgttgatatgctgcaaggtgagatggctgtgacatgtgaggacgtttcgttgctcaagcgagtggtagatgagcgcctaccgttgagcaagttgcagcgctcagctatgtcgagcctctcttcttcactgcattcttctcatcacaagagctggacttcctcggataaagccattagatctccagataagcacacccttgctgaacctgcaagcccagtggggaaagatctggatggcaacgagtgcaccgtggaagtgtcagatggcaacgacagtggtgaaggcattttgaagcgcgtggattccaaggaggatgtcgatggatgggagctttgctgaagatgttcaggaatagcggcgttgccagaggatgctgaagcataaactaacaataattgtgtataaacgcatactagcacggtgctaatctaatcgttttcacatgaatcgggaagtctcgctggctcaccacagttgtacgtgagatgagtccaactggcaactgcagcttgatgtggtatatataaaagtgaaggtttcagctcccttactgtccaaattttatgtcgtttctaattttgttctaggttaaatatctgacttttactatgtcttctaaaaatat

SEQ ID NO: 4874 - DNA, 2568 bp, Zea Mays
cttcccaatcaaaccgaggccgtcatccttatctgaatcgcgtgctttccagccctctgcccgctgtgccccacccccacgcccggcgacccgcaggccgcacccacccacccacccgcacccagcgccatgtccaccgcggccaccgcgtgcgccacgcgggcggcggcgcgtccgcccctcaacacggctccggcacgccgcgcgccgccttctgccgtgcgcccgccatcggccacccccgcccgccgcgccgccggctgttgcttctgcgccgccgcctcctcggcgtcgtcgccctccacctgggattggacccgatggagccgccacttcgacgaggtcgaccaggcggagagctacgcatccctcctccagttccagctagaggaggcggtggagaacgaggatttcgcggaggccgccaaactcaagagggacatcatagaggccaccggaaacgacgctgtagcccacgtcatggccgagctcaagaatgctatagaggaacagcggtaccaggacgcgtcaaggttgacaaggcttgctgggaccagcttggttggtgggtgggatatgctaaggacactgatgattccatcgggagaattgtacgaataagccctggtgtcgggagatatgtggcgaagagctacaacccaaggcaattggtcactgcatcttcaggaactccattatttgaaattttccttgtcaaagaagatgatgagacatatacaatgaaggtggtacacatgcgaccaacaaaaggaacttcaggtgcaccatccatatcatcaacaataacagaaagcccagcaaaggtagagaatgaaaattcatcagaaagtagtgctatatctgacagtgttacagaggaggcaaatacagatactacggtaagaggaaatgaggatgctgaagagaaagcacaagatgttggtagcagcaaggatagtagtgtcgaaggattaaaaagtgttttgaatttttttaagtctcggattcctgaattcaaagttcaggtgataaatgttgatgtggctgaggaaactgaattagctgcaaattcgtctgaagaattagtgcaagatgatgtgaaaagtactccagaaagctcattggaagagccagccactgaggaactcgagcaggaggaagatgttccggaagaaaatacggatgaagaaagtaaaagcacggaagtgaagctttttattagtggagtggttcacaataaagaagatgctggagcaaaatcatatgttcgagttccagctgaaataaataacatggaaaaggactcctttgaactgtacattcctggagaaggttctgatcgtgatttggctgaaacaaaggctgcaaaacagaaagttgcagatatggctgctaaattagcctcagagcttatgccgtctgatgttgccaaggcattatggggtacagccaagagttcttcaaagataaataaagaagttcaggagcttttaaggcttacgttaagcaaggcccgagtcaagctgaccgaaaataccatttttaaacgaatcattatggacactaacagcacagatccatttaatggtctctatgtgggagcatttagtccatatggaccagaaattgtgcagcttcgtcggaagttcggccactggaacagtactgatgacgttgagtttttcgagtatgtcgaagcagtaaagttgactggtgatctgagtgttcctgctggccagataacgttccgtgctaagattgggaagggcaagcgacttgagaatcgaggagcatatccagaggaatttggtgtggtaatttcgtcctgccgatctgattgtttgaaagatgctaagatattgccagttacaaaggtcagggtagaatagctcagcctggattcaaaaatcctcgatgggtggatggtgagctgttggtactcaatggcaagagtacaattccacaccttggaggcgcagagctcggtttcctgtatagtgtacctgagcagagttttctggttctcttcgatcggcttaatcttcccgagtgatgagactcctaaagggagcagactcctcacatgtagattgcatgaacgcgcagaggccggccacagctccaagtgaccgaaacaggtctggggggccgtttccccatcgtcttctgccctctgggcttcctgccaatcctttctccgcacctactttttaggagctcatgtgcttaactcgtttcagagtgtgagggaaagtcgacaccattgctggtctaaactaacggaggagtcttaatactaataatatatatgttatagcatggtagtttgctctccaatgccacagttgtagctgtattgggtatgggcatgacagttttgcgagttttacccgtcatcgttgatttcagtaattaccgaattgaataaaaatcgttctggtgtatcgtgatgttacaattataataatataaaacaaggcaaataaagtctcatgatttatgatcgtttttctcttgtaatatggtcgagatacttttattcctgtcctattagattttgatattgac

SEQ ID NO: 4875 - DNA, 2143 bp, Zea Mays
ccacgcccgccagttataaatagccaagcgtatggttggggccacagacagagagagaccctcccctctggcggtctggcctccgtccccacaaccaaactgcgcgagcgcgaaggagcacggacagcacagcggcacagcgcagacgcggcggcggcccaatccggagggcgcgaccgttcctttttctgtccgtcccttcctccctcccttcgttcgttggcctcctcctcctgttcctcttcttggcgcggcaagaggaggaatagcaggagaggggcgccccgatccatagggcaacgaccaacggcacgccgccgccgccgctgccacgacaagatggcgcggttcatccttagcctgatggagctcggggtcagcgccaccgtgcacatgctcttcggcctctacgtcttcagcacggccgtcgccgcagacatctcgcaggcggccgcggcgtcggggtgtctcctactgcgccggccaccccccgcggcggcgggctcgaccgggggagcgctcgtcgacgtcgccgcggcgggtgagagcgacgagctcaggggcgccgcgcccgtcatcctcgatgcatcgccgccgcccatcgtcctcgtccacggcatcttcggcttcggcaaagggaggctcggtggcctctcctacttcgccggcgccgagaagaaggacgaccgcgtgctcgtgccggatttggggtcgctcaccagcatccatgacagggcgcgtgagctcttctactacctcaagggtgggcaggtggactacggcgaggagcacagcaaggcttgcggccacaacagggcactatcctgtgtgggacgagcacaacccagtgcattttgtggggcactctgctggcgcgcaggttgtgagggtgctgcatcagatgcttgccgacaaggctttccctggtcatgatacttctgaagattgggttgtaagcctgacttccttgtcgggtgcacttaatggaaccacaagaacttactacgatggcatgctggtcgtagatggtaggtccatgaaatctatctgtcttcttcagctctgccggctcggagttattgtctacgattggctagacattccttggctgaagaattactacaattttggttttgaccactatgagatgtcgtggaggaaagtaggcttttcaggtctaattaatctactgctggggcacacgggcccatttgccagcggggattggattctacctgacctcacaatccaaggatccatgaaactaaactctacacttaggacctttcccaatacattctacttcagctatgctacaaagaaaacaagaaaaatatttggaattacagttccttcaagtgttcttggagtgcaccccattctctttctgagagtcctccagatgtgtatgtggcggcaccctcaaaatgcacctctgccttacaaaggatacagggatgaagattgggaagacaacgatggggctttgaacacaatctctatgacacacccccgcattcccatcgagcatccacaccattttgtagtcgatgattctgactgccatcctttgcaacctgggatatggtattacaagattattgaagctgaccacattctattcattgtgaaccgggaaagagctggagtgcagtttgatttgctgtacgatggcatttttcagcgctgcaggaaacatgcctttaggaagagcccacctactgtaccaaacgaaacgagccgatagcaaaactaagctgaagtatgtgtaggtagtacataggaagaaacaaggtgccacgacattttcattaactgtaaattacattgttgattgaacggcaataacatatttgcttctccaattttcggaatggggttcatggagactgggaacttgcatgctttcttgtcataatactccgactgccaatttaatgcttcgccctacagtctaatgcaaaaaaaaggtatggatggatggttgtacggacaggctgaataatgcaaaaagtgatatggatggagggttgtaccgtacggatggtgtaacattgtactagtaagggtttagtgagaaggcacacagatgacattatttcaagtggactattgataatcttcttttcaaaatatgctttgt

SEQ ID NO: 4876 - DNA, 2005 bp, Zea Mays
actcgcatctaaaccctagcccctcaccgttctcaatctcttctcccttgatcggcacagccacaacctccttctccaatactctctccctcgccgccggccacctccgcctcctcccacgcgccacctccgcctcctcccacgcgccacctccgcctcctcccacgcgccacctccgcgacaaaccactgaaggagggagaggactcgctcatatcgtccgatggaggaggactcgatcaaggggatgatctccgcgatatcctgggtgcccaggggcgccgccaagagcgtgcccgtcgttgccgacccgcccactcaggaggagatcgccgaggccatgaagaccttcgacctgggcagagactccgggagcgacgctgacgaggatgatgatgctgccaccatggaactcgacggtgcggcggaaacggtggaggaggttgatgaggctgcccgagccaaggccgtagccaaggcgctctgcaagggctctagcaaggcggacgacgtcgctgatgagctccgcgaactcaacatggacgcgtacgatgatgaagatgaagaggtcgatattttcggctctgggctgggggacttgtactatccgagcaacgcaatggacccatatctgaagaagaacaatgaggatgatgaggaggacgacgatgatgatgaggaaatcgaagataagatgatcatgcctactgattttgttattgtctgtgcacatagtgaggacgatatcttctctcttcaggtcaacattcttgaagaaacaaatgatggtgaacaaaatatctttgtgcatcatgacgttcctctcgctgattttccgctatgcacagcttggatggattttaatctgaaaggtggtgaaaaagggaattttgtagccgttggaaccatggatcctgccatagaaatatgggacttagatatggttgatgaagtgcaaccgcacatggtgctaggaggactttcaaaaaagaagaaaaagacaaagggcaaaaaggggaagaagtataagaaaggaagccacagaagttctgtgcttggtcttgcatggaacaaggaagttaggttcaagcagttgcttggagcccacagtcacctgaagttctgcttagcggatcctttgataaaacagttgccatgaatgatatgaaagatggtgggcagaattgtcataaatggtctgttgaagcagacgtcgaaagtttagcttggaatccacacaatgaacattcatttgtggtcagtcttgaaaatgggatggttcaagccttcgataagcgaacagcttcatcaagttcttctggccagtctatgtatacccttcatgcacacgataaggctgtttcttccatctccttcaacccgtctgcccctaactttctcgcaacaggctcagttgataaaatggtgaaactatgggatctatcaaacgacaaaccatcatgcattgcctcccaaaatccaaagcttggagctattttttcggtatcattttcaaatgacagccccttcttgttagcatgtggaggttcaaaaggcaaactgaaggtttgggacacgcttacggagcctgcagtagccaacaagttcagcaaatagaactgccgctgtttgccattataagttatttcccggcacacacatgtttgggtagattgaagttatagtcgaagttttgcccttgtgagttgaggagcccaattgtataatgaactcatgaaatcaatccaagcattgatttatgtattagtggtgggcagaggttttggagtggacgtattaactttatgacggtgcgagttgggttgtgacttcccaattttttgtgaaagaagttagtgatcttcagaccagctcactttatctcgatccaatttgaaactttggacaatagttttacatggaacagctcgactgtataaggctatctttagcagcggtacacatctttgtaaatctataccactgtataattcatcagtttaaac

SEQ ID NO: 4877 - DNA, 922 bp, Zea Mays
gttcatccacactgttcaggaaatattgtatcatttaattcaaggaagtaatggtggtggttcatctagaactcattcgattccaagttctagctatggccatgatcggacatcaaatgcacaaaaattgtcaggagatgtaaactgtgagtgtgagttgcaactagcagttgatgaagctttagctagagagttgcatgaaatggagagcaaactagccaacacttcacttaatgacaataatggaagaaagacaacatcatcttcagcatttgatagaggcaataattctgcaagtagacctcctcaggtattggaggaggatgtgattgatccagataatatgacgtatgaggaactgcaacagctaggggaagccattggtacccaaagcaaagggctgcctgaaagtgtcatagcactcttgccaacttcaacttacaaaactgggatattctccagaaaggaaaaacatgatgaatgtgtgatctgttgtatggcatacaagaaccgagataggctgactaaattgccatgtggacatcactaccatcaagcttgtgttgctaaatggttacagatcaataagcagcaattatcttcgtcggtaagatcggtcattccgcaataggacgatttcaggttcatggatggaattcaaacttgtggggtccctaaatgatttgaaaatgatggtattccatcagcaagcagcccatgcatggacaaacttgcgtgtttcaaagctgcgttacaaggcaatacttcttattacaatactgtaattcagaagacacaaaacacgccacgaaaccacgcgcgtcacgctcatctggaagttgatgcaacgaacctaatgacgtaactgacgccctaccatgcacaacggaaattgagccaggtatgaatctcactgtagcta

SEQ ID NO: 4878 - DNA, 1267 bp, Zea Mays
cacatagaaaacaggcctcctcgcctccgtccgtccagctctggtccgagcccatggaaatcgttgccatatcagatcagctccgccatggacccccatctatctgcgaccctcggtgacgcgctccgcccaccgccgcccgggaatggctcgagcgctgctcctgctgcgagtagctgtagcccgctaccctcctctcccggcctcacccgcgctcctccagccgctgctgcgccgccacgcgccctcccagtacaggtcccagctccgcttcctctcctccctctcctcctcgtccgtgtccaccagctcagatgctcccagcgacggcgggggcggccgcgacggggaagaggatggcgcgaagagcggcggccgcgtcgactacttggggatgagcgacgaggagctcatggagcagtgcgatatgggcacgttcaaggcgtccggccccggcggccagcaccgcaacaagcgcgagtccgccgtccggctgaaacaccttcccaccggcatcatcgcccaggctgtggaggatcggtcacaacataagaaccgagcgtctgctttatctcggcttcgaaccctgattgctcttaaagggaatgcaagctttattagacctgctgtttgctgttgaaggttctgtatcagatgcagcaaagattttaggcctaagcactggtgctttgtcaagattgattctgtcagatgattctctccgaacggccgcgaatgaactgcgagcttcgaagggactgaagcctttgagatgaaatcctttgtaaaatcctcagcttcaagtgcaccatatcccataggtgccatgttcgacagatgtcaggaggcattatttctagggaaaacctttgaggtttcatgcggtttgtttaagggatgttcgtcgtcattagattgccgtaaatatgttcagtaggcagctagtatatcttcagaatatcctcgtttcgtattacatatacccccaatgttctccagcagggcaacaccattacaccacttaaccaatatttttccttgaggacctgttaacctcaaacttttatttgccagccaaaagttgttgaagcggctgtgctgaattgctgatttaattggctgtaactacctcatgggtacacaattctaatcttgtttcctttcagcgtttgatgatgcttttatatcaaattggtgctcttaaatttaaatgcaccatggatctgtttttagcttccattgtcattgcatgaaaactgaaattata

SEQ ID NO: 4879 - DNA, 1013 bp, Zea Mays
agggctcgcgcctcctctcctccgacccctataagcacccaaccctagcgcaaaaccccgcctccgctggacaccccgctccgcctccactcctcgcgccgctgccgcatctcctctacagaaggagagaaagagggcgaaatggtgaagcacaacaacgtcatccccaacgggcacttcaagaagcactggcagaactatgtcaagacatggttcaaccagcccgcccgcaagcagaggcgccgcatcgcacgtcaaaagaaggctgtgaagatattcccacgaccaactgctggccctcttcgtcccattgttcaatgccagactctcaagtacaacatgaagtcaagggctgggagaggctttacccttgaggagttgaaggctgcgggcattccaaaaaggcttgctccaaccattggcatttctgtggatcaccgccgcaagaacaaatcccttgaggggctgcaggccaatgtccagaggcttaagacatacaaggccaagctggttatcttcccaaggcgtgctcgcaaggtcaaggctggtgactctactctggaggagcttaccactgctacccaggtacagggtgactacatgccaattactcgcggtgagaagcgctctgtagaggttgtgaaggtcacagatgagatgaaggcgtttgcggcctatggcaagctccgccttgagcggatgaacaagaagcacctcggtgcccgccagaagaaggcagctgaggcagagaaggaagacaagaagtgaagcagccaaactttgtagcctgttttgttctgttcagtcatagcgagatgctacttccatcaagtgcttgttccaagttttttttgggtgctggaaatagagaccagtcaaatattttggtgtcctactgtttgataccttgtatttgtttgcgaactcagctatctaatgggttaatgaattcttggcgacgcacgattctgccttcaaaaaaaaaaaaaaaaaaaaaaaaaaagcagcatgtg

SEQ ID NO: 4880 - DNA, 2655 bp, Zea Mays
actgagtaaaaattagatgactccataaactttaattaagcttttttttcctactagtgtagataaaagtagacggcaataaaaagcgttgagcagaaggtttcattgcattgcactggggggcgtgcgcagtaggcgtggatcggaggagcatgtggaggctaaagatcggagagggaggagggccatggatgcagacggcgagcgacttccatggccggcaggtttgggagtacgacccggtcgccggcaccgacgaggagcgcagcaaggtggagcagcttcgccgggcgttcacagagaaccgcttccgaaggagggaatcgcaggacctcctaatgcgtatgcagttcgctggacaaaaatatgtgcatgcggatctgcctgcggccaccaagatagaggaggaggatggcgacgaggtgccggtgacggaggagaggttgcgggagtcgctgaggcgagcgctgggttgcatggctgctctccaagctgaagatggccactggcctggtgattacagtggggttatgtacctcatgccgttctggattttcgcactgcacatcacaggcacggtcgatgctgtcctatcgaaagagcatagacgtgagatctgccgccatatctacaaccatcagaacgaggacggaggatggggcttaaatgtcatagacgagagcgccatgttttccacgtgcttaaactacaccagcttgagacttctgggtgaggtgcagcaggaggagaacgatgggctagctaaaggtcgagcatggatcctatcccatggaactgcaactgcagcaccgcagtgggcaaagatactactctcggttattggtgtatatgactggcgtggcaataatccagttgtgcctgaactatggctggttccacgtttcctcccaattcacccagggcggttctggtgcttcaccaggattatgtacatgtcaatagcttttctttatggcaaaaaatttgttggtcccattacaccaactatattagcactaagggatgaactctacagttcggcttatgttcacattgattggagcaaagctcgtaattcttgtgccaaggaggatatgcgcaataaaccttcaggaatattcaaatttatttcaacatgtttgaacatgtttgtggagccagtgttgaactattggccacttaaaaagttaagagagagagctttgaaccacatcctagaacatatccactatgaagatgagactactcaatatattggcatatgttcaattacgaaggcactaaacatgatttgtcgttgggtcgaaaacccaaactcagatgccgccaagcgacataatctaaggatacatgattatatgtggattgctgaagatggaatgaaaaccaaagtatgcaatggcgctaacaactgggagttagcatttataatccaggccttgttatcagcagatactaccaatgaatatggtccaaccgttgagagggctatgggatacataaagagagcacaagctactacaaaccctccagggaacccaagttactggttccgacataaatcaaaaggatcatggccactttcaactgtagactatggctgggcttcatcggatactactgccgaagtaactaaggcaatgttgttgctttccaaggtatatcccaacctcgttgaaaattcaaatggagatgagtggatgttgaatgccgttgattgccttctttcatttatgaataaagatggttcagtttcgacatttgaatgccaaagaacttattcttggctagagattctgaatcctgcggagagttttcgaaatattgtcgccgattacccaacggttgaatgtacatcctcagtgttgcaggctttggtattatttggtgacttcaattcagagtaccgcagtaaagaaataaaagaaaatgttgacaaagctgccatatttatcgagagtaatcaaaacaaggatggatcctggtatggcacttggggaatatgttttatctatgggaccctccatgcgataaatggcttagttgctgctgggagaaattatgagaacaatatttgcattcggaaagcatgtgaatttttgctctcaatacaactcaaaactggtggctgggcagagagctatcgttcctgcgaaagacaggtttatgtagagggccttagcactcatggtgtacagactgcttgggcgatgctagctttgatttatgcaggacagatggaacgggacccaacaccattacatcaagcagcaaaagcattgattagtctgcaactggagtcaggagattatcctcaacaagaacatgtcggcaacaccaactgctctgtatacttcaactaccccaactaccgtattttgttccctgtttgggctcttggagagtatcaccgcaaagtacgtgccaaaactaattgaagggatccatggaattcaaaaaagtcatatgtagtattgtgttaaatattaaaggaaaattatattggaatcaataaaaccacttgtattttatatcatgaaatgtaataggtaggatttcgattgatcatgcatgtaattctgtgtacaattttattatgatgtatgcatactgttggggatttattctcaaatgctatgagttaagaacaaggca

SEQ ID NO: 4881 - DNA, 3168 bp, Zea Mays
tcggctcccccgtaaaccaaaagggggaaaatagagagagaaggggaacgaaagcaagcaaggagcaccgcaccacgccactccagggaacaaaggtgtctgaactcagagctatggcatgcatgcgcagggccccttgtgtccctgcctgtggttgggagccgggtcgtctactttcctcagggccatagtgagcaggttgctgcatcaactaataaagaagttgatgctcaaatcccaaactatccaaacctacctccacagttaatatgccagcttcataatgtcacaatgcatgctgatgcagagactgaagaggtgtatgcccaaatgacactgcaaccattgagcccggaagagcaaaaggatccttttcttccaattgaattgggtgctggtagcaagcagccaaccaattacttctgcaagacgttgactgcaagtgatacgagtacccatggtggattctctgttccgcgccgagcagctgagaaagtcttccctccattggatttttcacaacagcctccagtgcaagagctggttgcaagagatctgcatgataatgaatggaaatttcgtcatatttttcgtggtcagccaaaaaggcatctactgacgactggttggagtgtttttgtaagcgcgaaaagactagtagcaggggattctatcatatttatctggaatgataataaccagcttctcttgggaattcgccgtgcaagtcgtccacagactgtaatgccctcttctgtgctatcaagcgatagcatgcacattggtcttcttgctgcagcagctcatgctgcagccacaaacagtcgtttcactattttctacaaccctcgggctagcccttctgagtttgtcattccactggctaagtatgtgaaagctgtttaccacacgcgcgtatctgttggaatgcggtttcggatgctttttgagacagaggaatcaagtgtcagaagatacatgggtacaatcacaggcataagtgatctggactcagagcgctggccaaactcgcactggcgttctgtgaaggttggttgggatgagtctacagctggtgataaacagccaagagtttcactctgggagattgagccactgacaacctttccgatgtacccaactgcttttccattaaggctaaagcgtccgtgggcttcaggactacctatgttcaatggtgggaggagcgacgagttcgctcgttattcttctctcatgtggcttcgagatggaaaccgaggggctcagtcactgaacttccagggacttggagcatcaccatggcttcagccaagaatagataatccattgttgagtctgaagccagatacttaccagcagatggctgccgccgcactagaagaaattagagctggggatcatttgaagcaggcatcttctctcctgccagttcagcagactcaaactttgaatggtggattagatcatttgtatggaaatcctgttctacagcagatgcagttccaatctcagcagtcaacactgcaagctgtgcagcaaggttatggtcagaatgcaaacgactctgggtatgttcaaaatcaactgcagcagctgcagctgcaaaagcagcaggagccaccaccaccacagcagcagcagcagacacaagtccttcagcgacaagcacatcaggaaatgcaacagcacctctcagctagttgtcatgatattgctaatgtagcttctggtgtgtccatgtctggatctgcttgtcaatcacaatcttctctgctttctgggtcatcgttctaccaacagaacatctttgatggaaatggtggtccagatctgcatctgcacaacagtttccacaacttttcaagccaagagtcctccaaccttcttaacctcccaagaagtggccaattaatggcatcagagggatggccttcaaagaggttggctgtggaatctcttgctggtcatgagatccaacctctgcagcacaagcttgagaaagttagtcaccagagtactgtgtctcactgttctggcaccttgccgccactatcagcaagagacggttctagtgcccaggcttgtggtacaaatgttcagagtcacctgcttccatcatcatttgcaatccatgatggattgtcaaccatcaggagtggtggtgttggcagtggaactgatgcgataaccatagcttcgttgagatatagtgatgcgaatttgctacctgaaaactccatagcaacttccagttgtttgggtgaatcaggaaccttcaattctcttgacgatgtttgtggtgtaaacccatcacaaggtggaacctttgtgaaggtttacaaatcagggtccctcgggagatcgctcgacatcaccagattcggcagctactacgagttgcgtgtcgagctcgagcggttatttggtctcgaaggccaactggaggaccctgcaagatcaggctggcagcttgtattcgtcgaccgggaaaacgatgttcttctcctcggcgacgacccgtggcaggagtttgtgaatagcgtagggtgcataaagatcctctcgccgcaagacctgcagcagatggcccgcggcggcggaggtgaccttctgtctgcgcctggagcgaggatgctgcagggcagtgtctgtgacgactattctgcaggccacgacgtgcagaacctcaccggcagcattgcgcctgtggtgcctctggactactgaagaggactgaggcgaaggccgggatctgaagctctgaaccaaaaccggcaatccagcatttgcaggatttgccatccgcaagtcgtttcgttcctgtgttatgatcctctcagtctcaggccctgttgatcgggaataacctagtcgtttaatatagctagatgatgatccatgtatcattatggtaatggacatgctgtacgatagctactgtagctctaaatgcaggcaaggcaagaattgatctatcaaagaacgaatgaatgcaggcactcactgtagaggtgatgtagccctgtactcctaagtcctaagatatattctcatagctaaaactgatggttccatgtggcattggcacccaagctattgaaaccagtcacctttgccgattctttcttcacctcaatttgcggttgttcggtcctgctgcatgcc

SEQ ID NO: 4882 - DNA, 3268 bp, Zea Mays
atggctgcttcagctgctgtttcaaagatgatcacagcgtgtgcgtaaggtgtaccaaagcgtccacttgcgacgctttctccaaaacaacccacatggatcctggtttacttcttggaggaagaggatccagccagtcaaagctcaaaaccttccaaagccacacactacagattcatcttcaggggaacaaaggtgtctgaactcagagctatggcatgcatgcgcagggccccttgtgtccctgcctgtggttgggagccgggtcgtctactttcctcagggccatagtgagcaggttgctgcatcaactaataaagaagttgatgctcaaatcccaaactatccaaacctacctccacagttaatatgccagcttcataatgtcacaatgcatgctgatgcagagactgaagaggtgtatgcccaaatgacactgcaaccattgagcccggaagagcaaaaggatccttttcttccaattgaattgggtgctggtagcaagcagccaaccaattacttctgcaagacgttgactgcaagtgatacgagtacccatggtggattctctgttccgcgccgagcagctgagaaagtcttccctccattggatttttcacaacagcctccagtgcaagagctggttgcaagagatctgcatgataatgaatggaaatttcgtcatatttttcgtggtcagccaaaaaggcatctactgacgactggttggagtgtttttgtaagcgcgaaaagactagtagcaggggattctatcatatttatctggaatgataataaccagcttctcttgggaattcgccgtgcaagtcgtccacagactgtaatgccctcttctgtgctatcaagcgatagcatgcacattggtcttcttgctgcagcagctcatgctgcagccacaaacagtcgtttcactattttctacaaccctcgggctagcccttctgagtttgtcattccactggctaagtatgtgaaagctgtttaccacacgcgcgtatctgttggaatgcggtttcggatgctttttgagacagaggaatcaagtgtcagaagatacatgggtacaatcacaggcataagtgatctggactcagagcgctggccaaactcgcactggcgttctgtgaaggttggttgggatgagtctacagctggtgataaacagccaagagtttcactctgggagattgagccactgacaacctttccgatgtacccaactgcttttccattaaggctaaagcgtccgtgggcttcaggactacctatgttcaatggtgggaggagcgacgagttcgctcgttattcttctctcatgtggcttcgagatggaaaccgaggggctcagtcactgaacttccagggacttggagcatcaccatggcttcagccaagaatagataatccattgttgagtctgaagccagatacttaccagcagatggctgccgccgcactagaagaaattagagctggggatcatttgaagcaggcatcttctctcctgccagttcagcagactcaaactttgaatggtggattagatcatttgtatggaaatcctgttctacagcagatgcagttccaatctcagcagtcaacactgcaagctgtgcagcaaggttatggtcagaatgcaaacgactctgggtatgttcaaaatcaactgcagcagctgcagctgcaaaagcagcaggagccaccaccaccacagcagcagcagcagacacaagtccttcagcgacaagcacatcaggaaatgcaacagcacctctcagctagttgtcatgatattgctaatgtagcttctggtgtgtccatgtctggatctgcttgtcaatcacaatcttctctgctttctgggtcatcgttctaccaacagaacatctttgatggaaatggtggtccagatctgcatctgcacaacagtttccacaacttttcaagccaagagtcctccaaccttcttaacctcccaagaagtggccaattaatggcatcagagggatggccttcaaagaggttggctgtggaatctcttgctggtcatgagatccaacctctgcagcacaagcttgagaaagttagtcaccagagtactgtgtctcactgttctggcaccttgccgccactatcagcaagagacggttctagtgcccaggcttgtggtacaaatgttcagagtcacctgcttccatcatcatttgcaatccatgatggattgtcaaccatcaggagtggtggtgttggcagtggaactgatgcgataaccatagcttcgttgagatatagtgatgcgaatttgctacctgaaaactccatagcaacttccagttgtttgggtgaatcaggaaccttcaattctcttgacgatgtttgtggtgtaaacccatcacaaggtggaacctttgtgaaggtttacaaatcagggtccctcgggagatcgctcgacatcaccagattcggcagctactacgagttgcgtgtcgagctcgagcggttatttggtctcgaaggccaactggaggaccctgcaagatcaggctggcagcttgtattcgtcgaccgggaaaacgatgttcttctcctcggcgacgacccgtggcaggagtttgtgaatagcgtagggtgcataaagatcctctcgccgcaagacctgcagcagatggcccgcggcggcggaggtgaccttctgtctgcgcctggagcgaggatgctgcagggcagtgtctgtgacgactattctgcaggccacgacgtgcagaacctcaccggcagcattgcgcctgtggtgcctctggactactgaagaggactgaggcgaaggccgggatctgaagctctgaaccaaaaccggcaatccagcatttgcaggatttgccatccgcaagtcgtttcgttcctgtgttatgatcctctcagtctcaggccctgttgatcgggaataacctagtcgtttaatatagctagatgatgatccatgtatcattatggtaatggacatgctgtacgatagctactgtagctctaaatgcaggcaaggcaagaattgatctatcaaagaacgaatgaatgcaggcactcactgtagaggtgatgtagccctgtactcctaagtcctaagatatattctcatagctaaaactgatggttccatgtggcattggcacccaagctattgaaaccagtcacctttgccgattctttcttcacctcaatttgcggttgttcggtcctgctgcatgcc

SEQ ID NO: 4883 - DNA, 1002 bp, Zea Mays
tggctgcatctaactaccggcggggccaacgaccttagcttctccttcccgcatgttctcgtcctctcctctcctctccgctcgtcgtccacccacccctcgtgctcgtctcactcttcacctccagctccggatctgaaacgccgagcaatctttcgtcgtttcgagtctcatccagagcttctcggtgagtgcgacaattgggccggagaactgggaaagcctcgaggagacatggatgggttgcccagagagctgtgcctcaagatcttccacctcctggatcaccagtccctcgcctcttctccccaagtttgcaggaaatggagggcgttgacctcggatgatgaactgtggcgcaagctgttcaacgacaggtggggagcggacgctgcagcgttctacgcgccggagggctccaagtcttggaaggacgtcttcgccgtgcaggaccggtgcgaccgatacggactgtaagccgccactcgcccatctgctccagctccactgcttccgattgccatcagcagctggtgttactgctgtcgaccaacagttcagccgcctcctttccctttgtttttgtttggcctgggtgtcaggatcatcagggaagggaaggactactacctgatctaccagggcgagatccagaggtacttgggctcccgccaggacacggatggcgactgcggcgaggacgcgccacggcgggacgctggagacgagcatcggcagatatccgaccggatcctgttcttcctcggggatctggagaaagcctgcgccgacgccaaacgtgttaaggcctgaacacgcgctacccttgtgcccctgatcatcatcagcacaatattccacgctgagtcttgttaatttgtgcatgtctcgtgcatagtttctcaccatcaattcatgtagttggaaatcatgctcacatcgacactgaaattataattcaagtacagtcgtttagagggtaaaactacctgatccccacaa

SEQ ID NO: 4884 - DNA, 608 bp, Zea Mays
acaaactggataacggcctcttccgtcccgtcccgttcgcggttcgcccactccccatccccaacgctatcatggcctcgctccaccccacgacggcaatgctgctggcccagcgccattctcctgcaccatctctcaggtctcagcacatcgtcgctctcatggtctgcctccgtagccatcttcagcatcgagtcggcccctggcctcgctctctactcaccggtcccgcctccggcaaccgccagagcacggtggtgtgtgcggcgtggacgcggcggtcgcgcggggagacggagcagcggcccaaccgcaagtcgtggaaacagacatgaccaccgggaggctcatcgccgagaggtccatggacgccgacgtctttgctttggcctatgagcccaagaagaacgagagtcgagagcaagcttggcatcgtgattgagaccattaaggagcacggcatcgtctttgtataggcgagtttcagggtaggagtgtggctgttgtgttttagtttcgaatcctgtagcctggaaattgttactttatttagatcaaaacaaatggaaattgttgctgacaattgctgctgtcagttcagaagttcg

SEQ ID NO: 4885 - DNA, 1955 bp, Zea Mays
aacaatccgtggtatccagagtcagtctagaccgccatacggaggttgggcgtccgacgcgcgccggcggtgcttccagagcccctgcccccctgccgcgcgtccccctccgacttcacccgtgagtcttcttcctcccggtcatgccccttcttccctgagtaggaggcgacagatcagaatcctcctagctcgtgcggcaccgtgcgaggagcacggttcggctccggtgcccccacgcgtggaaggagcgcgggcgaggtgttggcggctccggcggcgcggtgtgcaaggcgagagcgtctccgggctgaggccaccgaaggtcgagcgcgcaggagggctatctgcttccgcgtgcggagctcttatctcagcacgacccacccctcccgacgggatagagtattgaagtacacaagtgcatatgcagctggatttggagtggtaaagacgggaaccgaagagctggtggattagaggtgtggggagatgtaccgtgggggccttgaccgcttcaagaaggcacagaccttggagcccttctcagtgaagtctgagtcaggcaccaagaaggcacctgcagctgcaggaacagctaaagcactggctccgttgacactgccactggattctaattttgtgccaggtcagaaccaccaaagtcctcaaggcaccatctcaagggtggctgggcaagatggtgatgctccagggcatgttgggacacaggtcggtggagggcagtcgacgtggcaacctccagactgggcgattgagccgcgcccaggggtctactatcttgatgtggtgaaagatggggaggtcattgacaggatcaatctggacaacaggaggcatctattcgggaggcaggttcctgcttgtgacttcgtgttggaccatcagtctgtgtcgcgtcagcatgctgctgttattccacacaggaatggaagcatctatgttatcgacttaggatcggttcatggcacctttgttgcgaatgagagattaacaaaagacaacccagttgaacttgaagttggtcagtcacttcgctttgctgcatctaccagaacctatatcctgcgaaagaacgcagctgctctattcccaactcctagccttccatcggatgttagtttgccatctcctccggaccccaatgatgaagatgctgttgtggcatacaatacagtacttaaccgatatggtataagtaaatctgacatattatccagttccaaagattcttcaggaggcgcctctagtgcaaatgatggtaaacatgcagttgaaaggctcttaaagagagatggtgcagatgttgaaactgaaccgggccccataggtgtaaaggaaggcagtcttgttgggaagtatgaatctcttgtacaggttactgtcataccaaagggaaaggagcaagcatcacgaaaagaatgtacctctacctcaccgagtggggtaacagataagctacaagaggtgcttaaaaaagtaaagagcgcaacaagacctggaatctacgatgacctttatggggattctgttccagcaaaagtgggctcatcttgggcatacaaatcagatgatcaacctgttgaggagaagacgcgtggcatgaatttaaacatgaattcagccgatgacagtgacgacttgtttggtgactagtgattcagaattgtcagtggatacaaaaaaatatatattcttcagaattttgtggcagggttgtttcatttgctagatgctttttttttcttagtttatacatgattgtaccctgctgcaaatcaaggtatgttcttttgcctaatgttagcaacctaaggacatgctttcttgtagtgatgctcttggtgagtttaaccttgtttgcccctattttttcttaatcactttggtgattttttacctccgctgtttcctttagccaaccagctgttata

SEQ ID NO: 4886 - DNA, 2004 bp, Zea Mays
aacaatccgtggtatccagagtcagtctagaccgccatacggaggttgggcgtccgacgcgcgccggcggtgcttccagagcccctgcccccctgccgcgcgtccccctccgacttcacccgtgagtcttcttcctcccggtcatgccccttcttccctgagtaggaggcgacagatcagaatcctcctagctcgtgcggcaccgtgcgaggagcacggttcggctccggtgcccccacgcgtggaaggagcgcgggcgaggtgttggcggctccggcggcgcggtgtgcaaggcgagagcgtctccgggctgaggccaccgaaggtcgagcgcgcaggagggctatctgcttccgcgtgcggagctcttatctcagcacgacccacccctcccgacgggatagagtattgaagtacacaagtgcatatgcagctggatttggagtggtaaagacgggaaccgaagagctggtggattagaggtgtggggagatgtaccgtgggggccttgaccgcttcaagaaggcacagaccttggagcccttctcagtgaagtctgagtcaggcaccaagaaggcacctgcagctgcaggaacagctaaagcactggctccgttgacactgccactggattctaattttgtgccaggtcagaaccaccaaagtcctcaaggcaccatctcaagggtggctgggcaagatggtgatgctccagggcatgttgggacacaggtcggtggagggcagtcgacgtggcaacctccagactgggcgattgagccgcgcccaggggtctactatcttgatgtggtgaaagatggggaggtcattgacaggatcaatctggacaacaggaggcatctattcgggaggcaggttcctgcttgtgacttcgtgttggaccatcagtctgtgtcgcgtcagcatgctgctgttattccacacaggaatggaaggatcggttcatggcacctttgttgcgaatgagagattaacaaaagacaacccagttgaacttgaagttggtcagtcacttcgctttgctgcatctaccagaacctatatcctgcgaaagaacgcagctgctctattcccaactcctagccttccatcggatgttagtttgccatctcctccggaccccaatgatgaagatgctgttgtggcatacaatacagtacttaaccgatatggtataagtaaatctgacatattatccagttccaaagattcttcaggaggcgcctctagtgcaaatgatggtaaacatgcagttgaaaggctcttaaagagaggtaaaaagcgcagagtgtcatttagagatcaggttggtggagaacttatccaagtggttgggatttcagatggtgcagatgttgaaactgaaccgggccccataggtgtaaaggaaggcagtcttgttgggaagtatgaatctcttgtacaggttactgtcataccaaagggaaaggagcaagcatcacgaaaagaatgtacctctacctcaccgagtggggtaacagataagctacaagaggtgcttaaaaaagtaaagagcgcaacaagacctggaatctacgatgacctttatggggattctgttccagcaaaagtgggctcatcttgggcatacaaatcagatgatcaacctgttgaggagaagacgcgtggcatgaatttaaacatgaattcagccgatgacagtgacgacttgtttggtgactagtgattcagaattgtcagtggatacaaaaaaatatatattcttcagaattttgtggcagggttgtttcatttgctagatgctttttttttcttagtttatacatgattgtaccctgctgcaaatcaaggtatgttcttttgcctaatgttagcaacctaaggacatgctttcttgtagtgatgctcttggtgagtttaaccttgtttgcccctattttttcttaatcactttggtgattttttacctccgctgtttcctttagccaaccagctgttata

SEQ ID NO: 4887 - DNA, 2752 bp, Zea Mays
ccggagcagcggcacacacagcgcgactgcagcaaagcagccttcgcttcgctttcctcgcagcgtgaccgactgaccgcgaagccgccgtgaaccctcctcatccccgtcccccctgctccggcttcgccgggctcctctctcccacttgcgccaacattcaagccccgaccccaattcacatccgaggcgctcgcccctttccatctccatcgcccacgcccacgcccgcgcgtctcgtgtccacgcctcgccgcgacttctcccccctaaaccccgcgagaggccgaggtacatgagagagtgatcggcctcgccttcgcgcccacgctcgcgccgagagtgtgatgggcaacacgtgcggcgtcacgcttagatccaagtacttcgccagcttccgcggcagcgcgtcgcagcgccgtgacgcgccggggtactcacctgtcgccacctccgcggccgccgatgaaccctcgccgcatgggaacgggaagcgagccacgcgtccgtcccaggctgcagcggcggcggacgggtcagccccgccccccgccccaggcatgcggcgcggggtgccggcccccgcggagctcacggccaacgtgctgggccacccgaccccgagcctccgcgaccactacgcgctcggccgcaagctggggcaggggcagttcggcaccacctacctctgcacggacctcgccacgggcgtggactacgcctgcaagagtatagccaagcggaagctcatcaccaaggaggatgtcgaggacgtgcgccgcgagatccagattatgcaccacctggctggccaccggaacgtcgtcgccatcaagggcgcgtacgaggaccagctgtacgtccacatcgttatggagttctgcgcgggcggggagctcttcgaccgtatcatacagcgggggcattacagcgagcgcaaggccgcggagctcacgcgcattatcgttggggtcgtcgaggcttgccactcgctcggggtaatgcacagggatctcaagccagagaacttcctgctctcgaacaaggatgacgatatgtcgctcaaggccatcgacttcggcctctccgtgttcttcaagcctggtcaaatttttaccgatgttgtgggaagcccttactatgtagctccagaagtgctgcgcaaacgatatggaccagaagctgatgtgtggacagctggagttattctttacatacttctatgtggtgtaccgccattttgggcagagacacagcaaggaattttcgatgctgttctgaaaggtgtaattgattttgatttggatccctggcctgtgatctctgagagtgcgaaggatcttataaggagaatgctgaatcctatcccatcagagcgcctaacagcacatgaagttctatgttagttagtttcacctgtacagagtttgttgcttcccttttctctactagtttcgttggtcatccatggatttgtgaccatggagttgctcctgatcgtcctcttgatccagctgtcctgtcacgcatcaagcagttctcagcgatgaacaagttaaagaagatggctttgcaggtaattgctgagagcctttcggaggaggagattgcagggctgaaggaaatgttcatggcaatggatacagataatagcggtgcaattacatatgatgaactgaaggaaggattgagaaagtatggctccacattaaaggatactgaaattcgtgatctcatggaggcggcggatatagacaacagtgggaccattgattatatagaattcattgctgctacattgcacctcaataaactggaacgtgaggaacatctagttgcagcattttcgtattttgacaaagatggcagtggttacattactgtggatgagcttcaacaagcgtgcaaagagcataacatgccagctgcttttcttgatgatgtgattaaagaagctgaccaggataatgatgggcgcattgattacggggaatttgttgccatgatgacaaagggcaatatgggagttgggaggagaacgatgagaaacagcttgaacataagcatgagggatacgcctgctggtgccctctgaagtctgagcatccaagaaatttgttgcagtatgagagaacgcctggtacgggctgcggaaagcttcttctaatcctttcctacacgaattctgcctacattttttggttgctatatctgttgaagcattgtagggttgtttcaggaattccgggtagggtaactcaactcctgctctttcctcgatgagaagtgtgaattgttatgcgttagttggattgcaaatgttcgtagacgtcgggcgtgtttgattttcttgtgcccttgcctcacctaacctagctgggcaagggtaccctcgccagccgaggcaagctgaagcggctcacctgatacctggccaagcatggaaaaatctttacggcacgggaaacgaggcagatggtaaagaatccaatccaaacacaaacaggctggattttgtccagacaggcgaggcaagcgcttggcgtcttggcgaggaaaccaaacgttcctgttgccctcactaattgcaagttttcatatgcagctgggccatcacgccaaaaaaaaaaacttctctacgtgtaaacgtgtatattcgacatcctgatataaataggaatttcaagctggctcaagcatatgtcatacttaatcatttgctttcgctcattcattgtttggtgcaatgcgt

SEQ ID NO: 4888 - DNA, 3884 bp, Zea Mays
ccgcggcgtccatccaccccgacccatccaatccgttccattcctacgtcggctcggacctcggagacacagggatcgtcttcgtccccggcctctcgccttcctccacccccctctcctctctctcgctggctcgtggccaacccacccacccacctccgctccgccccgcttccatcgatccattccgcgatcggccttacacgtctaacagtacatgagtttctaactggtgcgagcccaagtaaagttctgtaattagtcacattcctgcacaatgtcgactgcgaaagtggtgcttgagcctgcatttcaaggagctggccataaaccagggacagagatatggaggatcgaggatttcaagccagtcgctttgccaaaatcagactatggcaaattctactgtggagattcttatatagttctgcagacgacatgtaaaggaggtgcttttatttttgacatccatttctggatcggaaaagattccagccaggatgaagctggaactgcggcgatcaagacagttgagcttgacagcatgctcgggggccgtgcggtgcagcacagggagccacagtgctacgagtctgataaattcctctcgtattttaaaccgtgcatcatacccatggagggcggctttgcttctgggttcaaaaagccagaagtggacaagtttgaaacacgtctatatatctgcaaagggaagagagctatcagagttaaagaggttccattttctcgttcatcgttgaaccatgatgatgtctttatcttggatactgagaacaaaatatatcaattcaacggtgcaaactccaacatccaagaaagagccaaagccttggaagtgatccagcatttaaaggaggaataccatgacggagtgtgcgctgttgcaatcgtcgatgatgggaaactgcaagcagaatcagattcaggagaattctgggtcctttttggaggttttgcgccaatagggaaaaaagcaataagtgatgatgatgttgttcttgaaactacatcaccaaagcttttcagtatcagtaacggccaactgaagttagaagacgctgtccttacaaaatcaattttggagaacaccaagtgctttttacttgactgcggggctgagctattcgtgtgggttggtcgggtaacacaggtagaggacaggaaagctgccagtgcagcagttgagaaatacattattaaagaaaatagaccaaagacaacaagaataactcaagtgatccaaggttacgagaatcatacgttcaagtctaagtttgagtcatggcctgtaagtaacacgtcagggagtgccagcacggaggaaggccgagggaaagttacagcactcttgaagcagaaaggtgttgatgtcaaaggaatctcaaaaactagtgtgccagtaaatgacgaagttcctcctttgctggatggcggtggaaagcttgaggtttggtgtattgatggcagtgccaagactgctcttccaaaggaagaacttggaaaattctacagcggagactgctatgttgttctctacacttatcattctgctgaaaaaaaagaagagttctatctagcttattggattgggaaaaatagtgtacaggaagatcaagaggcggcttttcaaatagctaatacaacttttaattctttgaaaggaagacctgtccagggtcgtatttatcaaggaaaagagccaccacaatttgtggctattttccagccaatggttattcttaagggtggtactagctctggttataagaaatttgtagaagagaagggtctgaaagatgaaacgtattgttctgatggcactgctctcattcaaatttctggaacagcggttcataacaataaaacgcttcaagttgatgcggtcgcaacatccttgagttccacagattgttttgttttgcaagctaaaaactcgatgtttatatggaatgggaatgcaagttcttttgaacaacaacagtgggctgctaaagttgctgaatttctgaagaccggtgttgctgtcaagcattgcaaggagggcactgagagctctattttctggtcttctattggtggaaagcagagttatacaaatagaaatgctgcacctgatgttgttattagagagcctcatttgtataccttctctctgaggaatgtgaccctaatttttcattttcattttttggcttcaatcgcgataacatcgtcaccatttgtcagggaagctggagatgatctgttgaccgaagacatgatgatacttgatacacactgtgaggtttttgtttggatgggtcagtgtgtggagacaaaagaaaaacagaaagcatttgacattggccagaaatacgtacaacatgccgtggcctttgaaggtatttctcctgatgtgcctctctataaagtcaatgaagggaatgaaccttgcttcttcaggacatacttctcctgggatagcgcacgatccgtgattcatggaaactcttttgagaagaaactttcagttcttttcggaatgcgttcagagggtggcaataagggctcaggtgatggtgggccaactcaaagggcatcagccttggccgctctttcatctgcattgaatccatcgtcgcaaggaaaacagtcagatgagaagcccacaagctcagatgacagcgagcatactcaacgagcttcagcaatggctgccttgtcctctgcccttaatccatcgacaaaacctagcagcacacagacacaatctcattcaggtcaagggtctcaaagagccgctgctgttgcagcactgtccaatgttttgactgcagagggatctcatagcccccgccacagtaggtcgtccccaacagcagatgcagacaagactgaattagttcctacttctccccatcaattagaaacagggactgcagaagatgtccgaacagagcctgatgtctcacaggaacaaacagctaaagaaaatggaggccagacaacctttagctatgaacgattgatatcaaagtccactgaccctgttagtgggataaacaacaagcgcagagagacatatttggtggacagtgaattcgagaccgtatttggcatgactaaggaggagttctacgagcagccaaggtggaagcaagagttgcagaaaaagaaagccgatcttttctgagacaaggctggcttcgaactaataaaagcccttacgtcgcacaggattgtccagcattctcatcatgctcgttccgcgtatgatgatcgatcaccagcagctttatccgtgagttgtataggctactcttttatctgcacatggtttgggagcattatatatatatcccccttgcccgtccattattctgaggtcgttcttgatgttgacctttcacgtgttttctttttttattgtattataaaaaatcaaactggtgtaaatggcattactagtgagatttttgtaagtaatggtgcatgggcaccaaggtgtatgcaacatatttttgttgtaagacttcagcttctattgttctggtggtgttctattgaccactggtctaatcatctttactggcttaggtaatggccaacatatcatggaccatgcaaaacactgtttcacattatagattactttatttataaaataaagtttgaaataaaagacgtagataagtaagctgctggagatagcattaccgctgagcactgcagctgtgctcaatgatgatatggttggtttgacaccctactagtcttcttgatggtgtggctgcggctctggaaggagaggaacaggctattttcaaagtatgaatctgtatggtgatgataaaaatttccaattagcctttcataaaaaagaa

SEQ ID NO: 4889 - DNA, 656 bp, Zea Mays
tttgcattcactggaccttaaagtaaactcaggccggttagtgtcgtaccaaaatttccatgtagtgttatcccaaatccagttgcaactgaaggtgaaccagaagatgatgctaactctgacagcaagcattatgtactggtatttgaaaaggccaacatcacaatcattggactctgaaaacgggagttcatgtgaaacaacctccatcacaacttcagatgattctgcatctgaatcatcgattgatgacaatacaactagataaaagagcagggtcatgaaaataattgatatgacctgtcattttgaaaacttgggattgattgtttgctgtaattttaagggcaaatacattcaagaccgaggcaagggaaatggttaagggctttgggtgtttttttgaggtttaatagtgtgattgggtgaaagatgtttgacatcctgtaaatatatctataactagtgacaataggttgtccaaaatccactatttgagttagaacaatttgagttacaatgtacaataaattagtgtcctatccgttaaagcttttaggcgcatgttgtcatatgcttatggaataactacaacattttccttgaaatatgcttaaattaacacgagcttaaatcgcttgtgatttggcttgatg

SEQ ID NO: 4890 - DNA, 2197 bp, Zea Mays
ctgccaaagcgtagttctgcgacatctaaaggagtgtggaaggcggctgccttgtccgcccggcctcttccgtctcggagcgagaaatcagcggcatcgccgcgcgcatccgaagcgcacacgacaatgcagggcggatccagcggcatcgtctatggtggcctcaagtaccaggcacggtgtatcgccgacgtgcgcgcggacgccagctcgaccaccttcctcgccgggaccctcagcctcaaggaggagaacgagtaggtgcacctgatccggctttcgccggcggagagtgagctggtgtgcgatggagtcttctaccaccccaacgagatctgggatctcaaatcatgtcccttcgatcacagggtcttctccacagtctacacatctggtgagggctttggtgcgtcagtttggaagatcccagagcttaatgggcaatcaaactcaccgcagcttgagcagctctttgagcttagtgggcatacgggcaagattagacggtggactcctgtttctgttggtttttggctgctctagagatatttgatctacttactgtactaaattctcatatgttttgaatttgagactttgtgtccaacatttgttggatgaaatgcaactctgtggttaatgttccttcctgacccacatggtgtttatttgtagttacttgatgattgtggccgcacttgtgtgactgcattacttgttcttgcatcacttgttcactagtcactacacatgaacattgagataagagtatagttactaagaaagatgcaataaatgttctgtcctgtcttccatgctgcacctgtttcacattacaccagcacgttttaaacaatatacaaggattatgtcccacagtgctcatgaaggacataatggatgagaatattttatttcaacttctgctgttatgtctttctataatcttttaaactagtctcacttgctctatattcttaaaagctgctagcgatgtgtatcatctttattggttcttgacacctctaagctgctcattttgtagtgtgatctggtggccacttggaaagcatgataaactaattagcattgatgaccgaaatatttttctttggaacgtagacatgtcaaataaatcagctaaggtgatctcacagggatcagctgacatgcttccaaatttgagtggtggggcttgggatccacacaatcataattcaattgcttcaatatctgattcatcacttcatttgtgggatctacgttctatggaaaaatcatctgcaattgaacatgcacatatacgggatgtggattataaccccaagaagcaacacattattgcaacaacagaagatgactttggaatttgcttgtgggatctcagaatgcttaagcttcctctgaaagacctccctgggcactcacattggacatgggctattcagcacaatcctgagtatgatgagctgcttctgagtgctggaacagattcaactgtaaatttatggttggctaaagttagcaacaatgattctgaacctaatagcccttctggttcacccaatagacaagaagaaccattacttaactcatatactgactatgaagacagcatctatggtattgcatggagctcccatgatccatcattattcgcttctttgtcctatgatggaagggttgtcttggaatcagtcaagccctacttgcagagaaaatgaatcttgctggtctaacttttggattgtaagcaatggcagaaaaaacataataaggatgttgcagaaatcatcctgcttgacatcaggtcttcaaccctcttgattgaagccagcaatggctccaaaacactcagatctagcttcagttgagatattacagcacagttgagattgtcagcagtttcctttcctgtatcttcaaattttgtccactaggatttcatgttcagttgctagaaatttggctgtgaagatctgatctgtatgttaataactgttgcccatctgtctgaaatagttttctatacttgattcttaggatgttgtatatttgaaaagtgttcacaaaaagatattgcggtatatgatgaggtggagttggactgaatttgtaaaaccattcagaatttcaaattcccaggattagcttgttttatgaaatattctgttgcgcattgaaaattcggttcttt

SEQ ID NO: 4891 - DNA, 2796 bp, Zea Mays
atgaagctcctctcgccggcggccgcaccgtcgtcctcgccgttgttccctcctcgcatcgtcgaagctcgtcaatcaggtccatgccgtatccgcatccgtatccgtggcaaagcagcagcagcaggaggaggaggaggcgcgggcgcgacggggccccgcggcagcctcaggctcgccgggtggtggagagcgcagcagcaggccccggccacggcgacgacaacgcagcagcctgacaacgtctccagtgctaaagtgttccagaccagccgtgtggaaaccgagtccgaaattgcgaaatggccagggaaaccacaagaccttgaggatgagcaccaggctgaggaggcagagctgcagccacttatcgaccaggtgagggcgatgctacggtcgatgaacgacggggataccagcgcctcggcgtacgacacggcgtgggtggcgatggtgccgaaggtgggcggcgacggcggcgcccagccccagttcccggccaccgtgcgctggatcgtggaccaccagctgcccgacggctcctggggcgactcggccctgttctccgcctacgaccgcatgatcaacaccctcgcctgcgtcgtcgcgctgaccaagtggtcgctggagcccgcgaggtgcgaggcggggctctcgttcctgcacgagaacatgtggaggctagcggaggaggaggcggagtcgatgcccatcggcttcgagatcgccttcccttctctcatccagacggctagggacctgggcgtcgtcgacttcccgtacggacacccggcgctgcagagcatatacgccaacagggaagtcaagctgaagcggatcccaagggacatgatgcacagggtcccgacgtccatcctgcacagccttgaagggatgcctgacctggactggccgaggcttctgaacctccagtcctgcgacggctccttcttgttctctccttcggctaccgcttacgcgctgatgcaaaccggtgacaagaagtgcttcgaatacatcgacaggattgtcaaaaaattcaacgggggagtccccaatgtttatccggtcgatcttttcgagcacatctgggttgtggatcggttggagcgactcgggatctcccgctacttccaacgagagattgagcagtgcatggactatgtgaacaggcactggactgaagatgggatttgctgggctaggaaatccaatgtgaaggatgtggatgacacagctatggctttccgactactaaggctacatggatacaatgtctctccaagtgtgtttaagaactttgagaaagatggagagttcttttgttttgtgggccaatcgactcaagccgtcactgggatgtataacctcaacagagcctctcagataagttttcaaggagaggatgtattgcatcgtgctagggttttctcgtatgagtttctgagacagagagaagaacaaggcatgatccgtgataaatggatcgttgccaaggatctacctggcgaggtgcaatatacactagacttcccttggtatgcaagcttgcctcgtgtagaggcaagaacctatctagatcaatatggtggtaaagatgacgtttggattggaaagacactctacaggatgcctcttgtgaataacgacacatatctagagttggcaataagggatttcaaccattgccaagctctgcatcagcttgagtgtaatgggctgcaaacgtggtacaaggataattgccttgacgcttttggagtagaaccacaagatgttttaagatcttactttttagctgctgcttgcatttttgaacctagccgtgctgctgagcggcttgcatgggctagaacgtcaatgattgccaatgccatttctacacatcttcgtgacatttcggaagacaagaagagattggaatgtttcgtgcactgtctctatgaagaaaacgatgtatcatggcttaaacgaaatcctaatgatgttattcttgagagggcacttcgaagattaattaacttattagcacaagaagcattgccaattcatgaaggacaaagattcatacacagtctattgagtcttgcatggaccgaatggatgttgcaaaaggcaaataaagaagaaaacaaatatcacaaatgcagtggtatagaaccacaatacatggttcatgataggcaaacatacttacttttagttcaggttattgagatttgtgctggacgaattggtgaggctgtgtcaatgataaacaacaaggataatgattggtttattcaactcacatgtgctacttgtgacagtcttaaccataggatgttactgtcccaggatactatgaagaatgaagcaagaataaattggattgagaaggaaatcgagttgaatatgcaagagcttgctcaatctctccttttgagatgtgatgagaaaactagcaataagaagaccaagaaaaccttatgggatgtcctaagaagtttatactatgctactcattccccacaacatatgatcgatagacatgtttccagagttatctttgagcctgtttaaaaatgtttaagtggtagaccattatgttaggtgtaaatgtgtacataaaagttatcataaggagtaatggtagcagaagcatgcagttgtaagtttatttgttgcttagaatagaaattagtgtagctataatatcaagaatgttcctatataagtaatcatattatggatagaggtgttcatatgaataataattttatatgttaagtgttatcttacctaattttagtagca

SEQ ID NO: 4892 - DNA, 2470 bp, Zea Mays
ggtcgctatagagcaaggatcactatcaaatcttatagcctgaacgtacctgtagatgttagtgactaaaaattaattaaaacaagtaaacattaatcgctaaattgcatggtgatttatttctttttaatattgcttgtatatttatttcatggtttgtttatgtatggacatgactataatatgcaattgtgttctttgtgcttatatgatattagattcgagttgaaagtcgtttcaaatgtttgttatttatttgcattcgtaataatttattcaaatgtctattatttatttggtaatttttttatcaatttttgattaatttaaaaatgcatttcgaaataaaaaaagaaaagaaaaccctccctaaccctaaggcccactagggcccatctacctaactctccctcccacgccgtccctgtctcctcccaacatcgccgtcgtcgcccactcgcccccgtccctgcagtcgcccgtgctccgcccgctccaccagggcgcctcgccctaggggatggtctccgaccacctcccttcaccgccgccacgtgctcagtgacgcctaggtcatcggcgctgaagtttggaggccctgtacgtgcttcacagagatcgccgaccatgggctacgcagagatcgccatccgcccctctgggagcggcaagttgagcagaggttcctggagaccatgaaggccatacagggggcactgataatgtcctccagcattcagatcattctaggctacatccagctatgggaaaatacagaggcagggtggcctatctcgaagattttcaaatgtgtcctattacggtctcacaaccccgccatataaactggatgctctggaaccttatatgagcaagaggacagttgaacttcactggggtaagcaccatcaagattacatggatggcttgaataatcagctggctaccagccctctgtatggatacactctggaggatctgataaaagaagcttataacaatgacaatccattaccagaatataacaacacagcacaggtaactcgtttatgataccccattcattatattttgcttgcactgaccatcttcttcctgtcatttgttttctttcaaaaagaaaaataatgcaatttgtgctttcgccaataataggatggttgggtttggcttgtctgtgagtttctttctattttttctgaagtacaggcaccactgattcaagctactgatttcctgaattgctctttctatagcaagtttataagttcagtttatattccattgaatatttgttgcagtgaagagaaatgagagaaagcttttggttgttcatacacgaaatgctatctccccacttgcttttggtgacattgtatgtttactagactccctttttcctttttttgtgttttctaaaatgttttctaaaattttatttcgtgccaaatattgactcttcttttatctccagcacgcttactacttagactacaaggtgtgtgttccagttctcttttttggtccttaacacttaattttgaattttgacaagttagttatagcttagcagaaaacttctatggttctttgtttgtcaacttttcaggatgataagctaacatatgtcacaaacttcatggaccatcttgtctcttggcatactgtcactctacgcatgatgcgtgcagagtcttttgtgaaccttggtgagccaaatatcctagaggcttgagctacagatacaccctagttatcataatgaggcattcttcggatacatcggatcaaatcctgctggaggagccagagagttggaaaatctcatgtctcacaagaaatgcttatcaccccaatgtcatatacgccaagataagctgctgggatttcaccattgcccttggatattgctacaaggaaatcactagtcagcatccagtttgaagacatgcaacaaaacaactctagaagctatggagctggtagattctggagttggcagtaaggcagtgatccaacttgggctttgaagccatggtgctttctctagacggctattatgtctgtagtgttgttagaataatcctggttctgtgttttcataacttcatcatgctagtgttctgttgtagcggaacacagaatggaacggaacgatattcttgttttactggttgagcactacacgacgattgtttttctagggtgttctggacaaagaaagcttgtaccttaaaacaggaggatacaagaagctggagtggttgtctgaaggcttttgaactgcttgaagcattaggttagctctggagattttgtgaatgatctagctagctatctgtaaatgatctagttgtgaatgatattataattctgatgcttttgtgaatatataattgtgtttgtgtatattgattaactgtgtatgtctttatgatttgtgtataaaaatctgtgatttgtggtgctt

SEQ ID NO: 4893 - DNA, 5120 bp, Zea Mays
atgacgccaaaggctccaagaataactagagaattgaagcctgattggagatcacggggaatcttctccacagccctgctccaccagtcatcaaggctgcaaagagcattgtctggtgattcatatataactggtctcttgagtgaccttgagaaagctttgcagagtggtgttttgattataaaacttcattatgcaatcgacttccttgatctagtctctagatattaccctcatgaagtttctcgagctgcttcccttgttttgagtggtgctgtttctaatagatcatttcagccttatgaatcccacattccatatcttcttcactttttggttgactacaacttgtatggaatggggcacatacatgtcaaaaacttcaagtttcgtcctccattgccagttgattttcatcctaagtcatctcttcgcaggaaggcacagtcagataatttagaaataaatagtccaacagtttggatatcttcaacagtgtcgcattcttctatcctgggtagttctgccccttcgcatcatttgggaggaaccaatttgagcttcgctattcgacagagttcttcaatgcttgaagctgattctagagtagaagttccaccttcaggtatcctaaatgagaaatataagatgtacacttctctttctcaaacaacagaagatacaaaaatggttcagtcacttgtagcagtttgggaggaacttgaacgattaagactgttggaggaaacaaaatatgctgatctgggtagacctttaagggaagaagttcttaaagattttcttcatggtattaagtatgagagtgccctttctgtgttgttttcacaagaggggccacatcacaaagtttccaccatagaagagtctgaaaggctagaaaggtgcttaaaatcgttgactgatattattgggactgttacattctcacaggataactactgtggtaatattgatgttggtaattctgctgatgtgcaaaacgacaaacccgatgcaagtctttgctcagggtcattagaacaaaacatgcagattatatctccagagagaaacagtgaatatcctgtgtcttcatctgtacaccaaagaacactatctcagttatctgataaaggtgaaaagcatctggatgctgaggctcttggacttttaagctggctggcctcttcacaagctgcagaggaatcaactgatgatgaattaactaatgaagtcatcctcagccctttgtttgccaataagtccattgaagttgctgtggagtctgctcaattggattttgatagcgcttctcagcaggagtgtcaggatattcttgattcagttgaccccattagggcagtagaagaaccaaacatacatacatcttacctcgattctgtgaaaaaaaagaggcaacatggagatgctgatgattcatgcagtgcaatgtcaccgcagaaggatttaagtgcatctaagaagagtacaattgataaggactatcatgataccataggcagcactgattcagaatcttctagttttttaggtgtacatgattcagtttgtcattctgtgagggatttgatgaggcggaggagatcttttcggcgtgaacagttggagtttggttgttctggagctgcaacatgcaccatggataaagagagcgaaactgtgaattctgggggattggaatttcatgatttcacaagtgacatcccaaacttagcactgacacggatggcttttgttcagaagcctccattgaaggatgatgcatgttctggtttggagagcccttcagattgtgagcaacgtggatctgaaaaatcgggattagctgatcttctaccatttttcaatcagaatatggaggagaataagcagaatgaatcatttcaagatatggaaagcacaggggatgtattgggtgtcccaactcattttcaaaatgatggatcagccctatatttgctgacacatgcactttcgccaccatctgcaggagctgtgggccattggctaacccaacaatctagttccagtattttctcgggttacaccaactatgatggagtcgcagctgataaggaagaggcacacagttctactttatcacggaattctcctaccagatttaccaaggagaattctgcaaataaaatgcatggagatgtgatgggatcggctctatcttacaaagaaagtaaacatttggacgaatggcatgatttttcccagatatcagctggaaatgagaaggataggctcacacctctaagtcaaattggatttcgtgaccctgctagtataggtggcgggcaacaactgactatacttagcgtggaggttttaacagaaagcagaggagagctgcgtcctgatccacggtttgatgccattaatgctgtgtctttggccatcgaagatgatgctgacaatactgttgatgttcatgtgtttatacgtggcaacaatgtcaaatcacataggagaaatctggatggtattgctggctgtaatataaatgtcttccctgaagaaaaggacgttttgaacaatcttattagtgcaatatgttcaattgatcctgatatcctagtcggatgggagattcagttaggatctttaggatttcttgccgaaagagctgcttatctgggtataggcttactgaaaagaatttcaagaacaccacatgagttgaatcatccacctaagatcccagttgataactctagtcaggtgctttctgaaacatcttctgcggatgatattattgatgatgtcagtgagaatgattggagccatactcatgcgagcggtatacatgttggtggaagaattgtgcttaatttatggcgtctcatgcgtgcagaagttaagcttaataattactcccttgaagctgtagctgatgaagtactgaggcgaaagataccactgataccaagcaggatattgaaccgatggtttgcaacaggtcctggacgaggaagacaccgatgcatagaatacattagcaatagagctagaatcaaccttgaaataatgaatcaaatggacctggtgaatcgaacatctgaacttgctcgtgtatttggtattgattttttttctgttctttctcgggggtctcagtatcgtgttgaatctatgctcctgagattggctcatacacagaactaccttgcaatttctcctggaaatcaacaggttgcttctcagccagccatggagtgtttgccgcttgtaatggaaccagagtcggccttctaccctgatccagttgttgtgttggattttcagtccctctatccttcgatgataatagcatataacctttgttattctacatgcttgggaaaagttttcccatcaaagtcagatgtacttggtgtcagctcatattcagcagatccacatacacttgtagatctgaaaaatcagctgctgcttactccaaatggggtcctgtatgttcaacctgagataagaaaaggtgtacttcctcgccttctagaggagatattgtcaacaagaattatggtgaaacaagcaatgaaaaagttgagtccatcacagcaagttcttcacaggatattcaatgcacggcagcttgctttgaagctgatagctaatgtcacgtatggttacacagctgctggattcagtggtcgaatgccttgtgcagagcttgcagacagcattgttcagtgtggccgtagaacactcgaaacagcaatatcatttgtcaaccagcatcctttgtggaaagctagggttgtgtatggtgatactgacagtatgtttgttctcctaaaagggcgttctagggaagaagcattcaggatagggaaggagatcgcctcatcaataactgcaatgaatcctgatccagtcacattaaagtttgagaaagtgtaccagccatgcttccttcttacaaagaagagatatgttggctatagctacgagagtcctgaacagaatgagcctgtctttgatgcgaaggggatagaaacagttcggagggacacatgcccagcagttgcaaagattttggaacggtctatcagaataatgtttgaagaacaggatttgaccaaagtcaggacatatttggagcgtcagtggacacacatattatcaggaaaagtctctattctagatttcatttttgcgaaggaggtccgtttaggcacttatagtgcaagggcttccacgctgccccctgcagcaattgttgcaacaaaagctatgttgtctgacccaagggcagagcctcggtatgcagagagagtgccatatgttgtaatccatggggaaccaggagctcgtcttgccgacatggttattgatccttatggtctgctagaagttggctccccttatagattaaatgaacaatattacataaccaagcagattattcctgcattgcagcgtgtttttggacttcttggtgctgacctgaacaagtggtttaatgagatgcctcgccccatacgatcaactcttgcgaaacgccaatttgctgctgctcatggttcattctctcgtgatggcagtttcatccgattaggattgaataataaaacctcagccaaaggaggcagaatagatacatactacatgtcaagccactgctcaatttgtggtgatatgattcaaggatcagagtccttctgcaacaattgcttgaaaagcgaagctgttgttgccacagtagtcgctggcagaacttcaaagttggagcgagaaatccaacatcttgctgctatatgtggccattgtggcggtgcagactggattgttgaaagtggagtcaagtgtatttcccttgcatgcccagtcttctatgaacggaggaaagttcagagggagctggtagtcgtctcagagtcggcaggagaagcagggtattaccctttctgctgcgctgaactcttttgagaacatttttttggggctgcgtttctctgtccataccgtgtaaattgtggaatctgtaacctttacatcacacgtgtgtatagttgttgtatgtaacactgaagaacatgtactggtgaaagaatacatacaatgtataccgtgtcgctcgctgttca

SEQ ID NO: 4894 - DNA, 2154 bp, Zea Mays
aacgttctaatcattcgttcgctcgtccacatccatcgcccccctccctctcgctcctttccccccgccttcccctcccggatccccttgggcagccggatccggcgaggcagaaggcgcggctcccacagatccgaggcgcctccgctggggactcgtccggtttcggtgggctcgaccttacaggcggggggcgtaattctgacaggacgacggagccgggtggtgcatgagcgctgagaggccccgccgccgctctgcgtaggagcacggtgcgccgccgtgaggcgccatgatcgagcagttcgttaatttcgtcatccggccgccccggtcagaatataatccagatcagtatctatgggagaaagagtttatccttgctggacgtaaatacaaacgactagacttggagcttacaaatgcaagaggctatatcttaaaatgcagccactatgttcctgcttttatcccagagaatactgccctcccatgtgtggtctattgccatggaaataggtctatccggcggggattatgtcagtttgggttggcatgagaaagaagacctcaaatgtgcggtgtcatgtcttcgggacaataaacaagtttccactataggcctttgggggcgatcaatgggtgccgttacatgcctactctatggagcagaggacccttctattggtggcatgatattggatagtgccttcactaacctgtatgacttgatgatggaacttgttgacgtttacaaaattcgagttcctaaattcacggttaagatggctgtacagtacatgcggcgaatcattcagaaaagagctaagtttgacataatggatctaaatgttttaaggttggctcccaagatgtttatccctgtactatttggacatggtctgaatgatatgtttattcagcctcaccattgtgatcgtattcaccaggcatatgggggggataaaaatataattaaatttgatggtgatcataattctccaagacctcaatcatattatgattcagtttctatattcttctacaaatctttgcatcctcctctgctgcctgcagcacgatcaaagcttcatatgggagcatttaaagttggtaacataaccaatgagaatttcttctttgaaatcatcaatggtctacggccagcaaacactgcaggttgcagttcatcaaccgatgcacctaacatcccacatgatggcacatctgtaattgaattgttgtctgatagcatgaaccaactgtccattaagaatgagaatcacttggactttcttttagatgaaaaccacagcctgccagagattgatagtgatagtgttggatcacgattgcaggataaaagaagtaggcgcaatgaggagtcattttcattcacaagctctaacagagaaagttggggcagatgttcatctttaggagcagccagtgatgaatcattctcaggcgataataatgataagcagaatttgacagtcaaggctttggctacgcctgtaagacaaaaccagaggcaaagccagaggaaaccgattgagaaagctaagcagaagaagattcaagccctatggaagaagattaagcgcgaaaaggtggagatgggggacagcctatcttcgcgtttgaagatgtgcctagggcaatctccgcagcacaagaggaatagatcgtctggaaccattacaacttcatagctctgacaactctactgaaccactgattgtccaccatagattctcccttattctgacctactcattgccacgttgtaacctatataccctaggtgaatatatgctacatgaccgcattgtagcatgccaggatgttcgaaagctgagaaagcacttgtatcatctcttgtaattgcctgaaacaagtgtaattgccatctctggctcgttgtcgcatgcaatttcctttcccctcttgcatcctgtgggccttgtatcatctcctgtaattgcctgaaacaagtgtaagtgccatctctggttcgttgttgaatgtaatttctttctcttgcatcctgtagtttgcggcgctgcaacgcaacaacggcatggtgatgaaatggaatggtacaatgggtttgttgttttcatcttcaatcgccattgttcgcaattatat

SEQ ID NO: 4895 - DNA, 2252 bp, Zea Mays
atccgcttcattaacgttctaatcattcgttcgctcgtccacatccatcgcccccctccctctcgctcctttccccccgccttcccctcccggatccccttgggcagccggatccggcgaggcagaaggcgcggctcccacagatccgaggcgcctccgctggggactcgtccggtttcggtgggctcgaccttacaggcggggggcgtaattctgacaggacgacggagccgggtggtgcatgagcgctgagaggccccgccgccgctctgcgtaggagcacggtgcgccgccgtgaggcgccatgatcgagcagttcgttaatttcgtcatccggccgccccggtcagaatataatccagatcagtatctatgggagaaagagtttatccttgctggacgtaaatacaaacgactagacttggagcttacaaatgcaagaggctatatcttaaaatgcagccactatgttcctgcttttatcccagagaatactgccctcccatgtgtggtctattgccatggaaatagcggatgccgagcagatgcaaatgaagccgctgttatacttcttccttcaaatatcactgttttcacacttgacttttctgggtcaggtctatccggcggggattatgtcagtttgggttggcatgagaaagaagacctcaaatgtgcggtgtcatgtcttcgggacaataaacaagtttccactataggcctttgggggcgatcaatgggtgccgttacatgcctactctatggagcagaggacccttctattggtggcatgatattggatagtgccttcactaacctgtatgacttgatgatggaacttgttgacgtttacaaaattcgagttcctaaattcacggttaagatggctgtacagtacatgcggcgaatcattcagaaaagagctaagtttgacataatggatctaaatgttttaaggttggctcccaagatgtttatccctgtactatttggacatggtctgaatgatatgtttattcagcctcaccattgtgatcgtattcaccaggcatatgggggggataaaaatataattaaatttgatggtgatcataattctccaagacctcaatcatattatgattcagtttctatattcttctacaaatctttgcatcctcctctgctgcctgcagcacgatcaaagcttcatatgggagcatttaaagttggtaacataaccaatgagaatttcttctttgaaatcatcaatggtctacggccagcaaacactgcaggttgcagttcatcaaccgatgcacctaacatcccacatgatggcacatctgtaattgaattgttgtctgatagcatgaaccaactgtccattaagaatgagaatcacttggactttcttttagatgaaaaccacagcctgccagagattgatagtgatagtgttggatcacgattgcaggataaaagaagtaggcgcaatgaggagtcattttcattcacaagctctaacagagaaagttggggcagatgttcatctttaggagcagccagtgatgaatcattctcaggcgataataatgataagcagaatttgacagtcaaggctttggctacgcctgtaagacaaaaccagaggcaaagccagaggaaaccgattgagaaagctaagcagaagaagattcaagccctatggaagaagattaagcgcgaaaaggtggagatgggggacagcctatcttcgcgtttgaagatgtgcctagggcaatctccgcagcacaagaggaatagatcgtctggaaccattacaacttcatagctctgacaactctactgaaccactgattgtccaccatagattctcccttattctgacctactcattgccacgttgtaacctatataccctaggtgaatatatgctacatgaccgcattgtagcatgccaggatgttcgaaagctgagaaagcacttgtatcatctcttgtaattgcctgaaacaagtgtaattgccatctctggctcgttgtcgcatgcaatttcctttcccctcttgcatcctgtgggccttgtatcatctcctgtaattgcctgaaacaagtgtaagtgccatctctggttcgttgttgaatgtaatttctttctcttgcatcctgtagtttgcggcgctgcaacgcaacaacggcatggtgatgaaatggaatggtacaatgggtttgttgttttcatcttcaatcgccattgttcgcaattatat

SEQ ID NO: 4896 - DNA, 2259 bp, Zea Mays
aacgttctaatcattcgttcgctcgtccacatccatcgcccccctccctctcgctcctttccccccgccttcccctcccggatccccttgggcagccggatccggcgaggcagaaggcgcggctcccacagatccgaggcgcctccgctggggactcgtccggtttcggtgggctcgaccttacaggcggggggcgtaattctgacaggacgacggagccgggtggtgcatgagcgctgagaggccccgccgccgctctgcgtaggagcacggtgcgccgccgtgaggcgccatgatcgagcagttcgttaatttcgtcatccggccgccccggtcagaatataatccagatcagtatctatgggagaaagagtttatccttgctggacgtaaatacaaacgactagacttggagcttacaaatgcaagaggctatatcttaaaatgcagccactatgttcctgcttttatcccagagaatactgccctcccatgtgtggtctattgccatggaaataggattttgctttgactcaatgcagcggatgccgagcagatgcaaatgaagccgctgttatacttcttccttcaaatatcactgttttcacacttgacttttctgggtcaggtctatccggcggggattatgtcagtttgggttggcatgagaagacctcaaatgtgcggtgtcatgtcttcgggacaataaacaagtttccactataggcctttgggggcgatcaatgggtgccgttacatgcctactctatggagcagaggacccttctattggtggcatgatattggatagtgccttcactaacctgtatgacttgatgatggaacttgttgacgtttacaaaattcgagttcctaaattcacggttaagatggctgtacagtacatgcggcgaatcattcagaaaagagctaagtttgacataatggatctaaatgttttaaggttggctcccaagatgtttatccctgtactatttggacatggtctgaatgatatgtttattcagcctcaccattgtgatcgtattcaccaggcatatgggggggataaaaatataattaaatttgatggtgatcataattctccaagacctcaatcatattatgattcagtttctatattcttctacaaatctttgcatcctcctctgctgcctgcagcacgatcaaagcttcatatgggagcatttaaagttggtaacataaccaatgagaatttcttctttgaaatcatcaatggtctacggccagcaaacactgcaggttgcagttcatcaaccgatgcacctaacatcccacatgatggcacatctgtaattgaattgttgtctgatagcatgaaccaactgtccattaagaatgagaatcacttggactttcttttagatgaaaaccacagcctgccagagattgatagtgatagtgttggatcacgattgcaggataaaagaagtaggcgcaatgaggagtcattttcattcacaagctctaacagagaaagttggggcagatgttcatctttaggagcagccagtgatgaatcattctcaggcgataataatgataagcagaatttgacagtcaaggctttggctacgcctgtaagacaaaaccagaggcaaagccagaggaaaccgattgagaaagctaagcagaagaagattcaagccctatggaagaagattaagcgcgaaaaggtggagatgggggacagcctatcttcgcgtttgaagatgtgcctagggcaatctccgcagcacaagaggaatagatcgtctggaaccattacaacttcatagctctgacaactctactgaaccactgattgtccaccatagattctcccttattctgacctactcattgccacgttgtaacctatataccctaggtgaatatatgctacatgaccgcattgtagcatgccaggatgttcgaaagctgagaaagcacttgtatcatctcttgtaattgcctgaaacaagtgtaattgccatctctggctcgttgtcgcatgcaatttcctttcccctcttgcatcctgtgggccttgtatcatctcctgtaattgcctgaaacaagtgtaagtgccatctctggttcgttgttgaatgtaatttctttctcttgcatcctgtagtttgcggcgctgcaacgcaacaacggcatggtgatgaaatggaatggtacaatgggtttgttgttttcatcttcaatcgccattgttcgcaattatat

SEQ ID NO: 4897 - DNA, 1937 bp, Zea Mays
atggggctgggggctgcgatggcactgggcgacccaccggcggactacgcatccatcgcggcggtggggctgtttgtggcactcatgtgtgtcggcatcatcgtcgggcacctgctcgaggagaaccgctggatgaacgagtccatcaccacgctcttcatcgtgttaagccaagatgagacaccattcttgtacagcctcgtgtttggtgaaggtgttgtcaatgacacaacttctgttgtgttgttcaatgcaatccagaactttgatcctggaaatatcagcggtgccaaattactgaacttcattagcagtttcctttatttgttcggctccagcaccattcttggagtagcttctggacttcttagtgcttataccattaagaagttgtactttggcagcccggtaaagtctatcgctttgagcaacaccattttagccttggtgctggtttcaagagctgcttttgttttcccactatcctttctatcaaatttgaccaaaaaaactccaaatggaaagatatcttttaggcagcaggttctgtggaagtgcgaggcattttgggaggtgtgcgaggcattttgggagggacatcatcatgcccaacttgaagtcgtccgtgaccacaacagcgagcgcggtggagtacatggatgaagtattgaaggcgttgccgctaggtgaggccaggaatgaggattcacgaacactgcaattcaattatggttcattcaaacataaggcattggataaatccttaactaaaaaggttcctaaaaatcgtttgacttcaaatactaaactaacacaatgttgctctattgtagggatttttgaagcactaactgcattccccttctccccttctcccttcctgctgtgcgaagccgtgccccaaaccctctaccatcttatttcagttcccactctctaccatcttccaggaaaaaacactagcaatcttacatgagttccaagttttgcaggtcgttgctgtttgtgaatgtggtttggattatgacagacttcagttctgtccgacagatatgcaaaaaaagtactttgagaaacaatttgagttggctgaagcagtaaagctgcccattttcttcacatgtgtgctgctggtgaagacttctatgaaatcatgacacaaaatttgcacagattccctggtggggttacacattccttcactgactcaacagaagatcaggataggctactttcttttgagaagatgtttatcggtgttaatggttcctctctgaaaactaacggaaatcttgaggttgtacgaggcattcctgtcgagaggttgatgatggaaacagattctccatattgtgacataataaatactcatgctggaagccagtatgtaaaatctgtctggccatccaagaagaaagaaaagtatgagccagattcaacagtaaaaggtcgcaatgaaccttgtttagtcaggcaagttcttgaggtagtggcgggaagcaaagaaatttctgacatagaaggcctgagtagaactctgtaccacaacacatgcaggctcttctttcctcaggatcttgacgcgtctactaatgcgcagcttgagagtggtactgccgtccaggattgctgatgtcagagtgattttttttaaaaaatgtttccttttggttggcgtttggtttcgtacaacttccaatatgcctatgaaatgtttttggtcttataattttccctcgctgccaattttgccatgtttcatgagcctgatgacatgtcaggcaagtcctgactatgtacaagtaccctactgagactatgccctaaaatcatttagggctgagcatgtacaagtacagtttgatggctatgttgttcactacaatcaaacaacaactaagctctatatctatattttatacaaatttttaaattcc

SEQ ID NO: 4898 - DNA, 1671 bp, Zea Mays
aagagagagaaagaaacaaagcaacgaactaaagtctaaagcacacacacacacagagagagagagagagagagagagatagagagacgagcacttcaaggaggaagaagagaccaagattagtaccacttgtactgtacactcctcgttccgcgtgcgaagcgaaccctgttccatgttcttgaatctctctgagcccagtccttgtagctagcagatcagatcgctcaggcggaaagatcgagagaaggtcgccccaggatcgagatctagagcgagaaaggtttaagagggaaaggcgcggcaaggagtcgagagaatagaatgttcccttcctccaagaagcaggccagcaccggtgccgcgaacccaaatgatcggcctatgtgcgggcaaggcggcgactccggcggtctcgtcctcaccaccgaccccaagccccgcctccggtggacacccgagctccatgaccgcttcgtcgatgccgtcgcccagctcggaggcccggacaaggcaacgcccaagaccatcatgagggttatgggagtcaagggcctcaccctctaccacctcaagagtcaccttcagaaattcaggctagggaagcagcacaaggagttgggtgaccatacagcaatggagatgcaacgtagcgtggcctcttcttcaggcatgatagcaagaagcatgaacgaccgcagcgtgaatgtgaacgaggccttaaggatccaaatggaagtccaaagaaggctccatggagaactagagaagcacctccagatgagggttgaagcccaggggaagtacatgcagtccatcgtggagaaagcataccaagccctcgggtccagcgactgcgccacgtggcccgctgggtacagaactctaggcagccaaggggtccttgacatcggcaccagctccacgagcttctcgtccgtccaggacctgcagtgcttctatggaggaagcagccacatggaccagctcctgcatcagatggagaggccaatggatggcttcctgacgttgggcgagagctgcttcattggctcagcagacaacaaaaaggaccttaataaccattgcagctccagtggcaagagctcgatgatgtgggccagcgaagagcagcaggcaaagagcggcaacgatcagcttcagatggggtcgtcgacaaggatggagggtgcaggcattgatgtcatggatccagtcaccgggctgtacgagggcgccgtgtcgggagactccatggacagcaagggttttgagggttcgaactccaggctcgagatgaagccgcctgcacaacaagcacctgtaggaagtcagaggatacgcatatagtcgtccaatatataatggtttggaactcacgtaaagaactgtatactacaatatatatggataagcaaggtcaagctaaggtatttaaatgcaagtgtcagttttgttgtgaaccatcaaagttcagacgattagcatgtgatcggagttgtagtacatgcagtcattagttttaattgttggatacaagatattatggagatcaattctccatatatatgtttgtttattttgtccctaagattcgccatatatatgctgtattatattggatttgtgtgacaccgttgtaacattgatcagagatcttttgtgggtgca

SEQ ID NO: 4899 - DNA, 1021 bp, Zea Mays
ctgcaactcgagttatttttctgacactatcatcactaatttaatgctagcgtaggcaatgaagcacggaacctatagctgacctagcgagctgatcggctctactcccttctcttgttcctttcttctctccgggctcacctaccggatcatcctccatggccaccctcgccttgccgccgaccaccaaggctgccggccaggacgccacccaggaaagcctagcagagaatcctgccaaggacgccgcagatccgggcagcatggagtccgagtgggttcttctcggaaaatcggacatcgtcccggccgatgtggccgccgccgccgccgcggggcaccaccacctcaacttctcgccgctgccgatgatccctatctgatggttctcgggggcgtggtttacacggctgtgccgttctacaagagggtgctgaaggtcgaaggtgaaacgttggccaatgtagaaactgcagtggaggtcgtggagcatgtcgccgaggtgacggagaagttggctgcagatgcggccagttccctgccagagaacggatccctgcacaaggttgccgtggaggtggagtgcgttgctgaagcggtggataaggatgcacatgaggttgaagcagtcatcgataaggttgaggaggtgagcgagaagatcgatgctacagtggaaccggtcatcgaagagcttgagaaggacctgataccgaaccccagatcctctagtggatcagatgcccagaaatgacagttcatgtaaattgggagggaaagctggcgtgtgcgtgtccctggctgtctgtaaatttgtaaatctctcttcgttgtttcctaatgccctatgcgtgtaaactgtaaatacaactaagatacctcatgaactgcaacgacgccacggaatagtaagacgtggtacatgattgtgtcattgtgtgtgtgtggctgtgcgtgctcgaatctggacatctgattgtcaaaagtactggcaacatttacttgcaaaccaaacgccatg

SEQ ID NO: 4900 - DNA, 2190 bp, Zea Mays
gcctaagcgtccgctcattttggtgtccaacacctcctctctttctcctccgtcgtaatcgcaatgtctgctcaatcgaacaactgacccagccgaattacaagccgctcaccccccaaaaaacccgaagtaattagtagatacgatgcatttctgtttctgttatttccatgattgcagaaaagaaaactctgttcaaccacccgccgagttcagcagcactctcctccgccctcttccaggtccagcaaagattggggacgcgtaggcatcggagattgcctcgggagcgcgtttcctggtcaactaaggccggcatgaagggctgctcagagcgcttgctgtttctgctgctgctgctggcatcgtcgtcgttactgtccgctgtgattgccgcgcagcagacttgccccgccgacctcgacagcaaatgcgatggtggcgcgtctgatgatgattgggagggggagttcttccccggcgtcccgaaaatcaagtatgagggtccaacaagcaagaaccctcttgcttataagtggtataacaaggaggaagtgattctcggtaagaagatgaaggattggatgcgcttcagtgttgcattctggcacacgttccgtggtactggcgctgatcctttcggtgctcctacaaagacttggccttgggaggacggcacaaattctttggccatggctaagagaagaatgagagctcactttgagttcatggagaagttgggagttgacaaatggtgcttccatgacagggatattgccccggatgggaagactcttgaagaaacaaattctaacttggatgagatagtccagctggcaaagcagctgcagggtgagaccaatataaagccattgtggggtaccgcacagctctttatgcatccacgttacatgcatggcgctgctacgagcccagaggttaaagtatatgcttatgcggctgcacaagttaagaaagctttggaggtcactcactacctaggtggtgaaaactatgtgttctggggtggaagagagggttaccaaactcttctgaatactgatatgaagagagaacttgaccatctggctaactttcttcaagctgctgttgactacaagaagaagattggattcaacggaacactattgatagagcctaaaccacaggaaccaacaaaacaccagtatgactgggatgttgcgactacgtttgcttttctacagaagtacggtcttacaggagagttcaagattaatgttgagtgcaaccatgctactctatctggacacagctgccatcatgaattggagactgcacggattaatgggctgcttggaaatatcgatgcaaacactggtgatcctcaagttggttgggacacagatcagttcatgacagacattgcagaggctactttggttatgtcaagtgtagttaagaatggtggacttgcacctggtggtttcaactttgatgccaaattgcggagggaaagtactgatgttgaggacatgtttcttgcccatatctccggaatggacaccctggcacgtggcctccgtaacgttgccaagctgattggggatggttccctagatgatcttgtccgcaagcggtaccagagctttgatagtgagattggtgccttgatcgaggctgggaaaggagactttgagacgctagaaaagaaggttctagagtggggtgagcccactgttgcatccggcaaacaggaactggcggagattctgttccagtctgccctatagatgatggtgccatgtccataggtccaggaataagcaagggtgcgccctcctccgaacacgcactcgtcctcctcaccacggggatgttatggttccgtgcgatggactacctacaatacagcatggaactgagataattaggatgtaatctgtcagaaaatttccagaattgttacctccttttgtttagagtggattagtggaatcaaactggagttagttaaagcttatcctacattttggtgtggcgatcgtgtttggtacttccttgaatgctgtttcatagtgtggcaacgatgttgctgcttagtcctacaactggtggtagtaatgtatcatagttcgaacgtttcttcacaataaattatgatctttaataaattttattagttcaaaaataaataaaaatagagttcga

SEQ ID NO: 4901 - DNA, 2267 bp, Zea Mays
gcctaagcgtccgctcattttggtgtccaacacctcctctctttctcctccgtcgtaatcgcaatgtctgctcaatcgaacaactgacccagccgaattacaagccgctcaccccccaaaaaacccgaagtaattagtagatacgatgcatttctgtttctgttatttccatgattgcaggtccaaacaaactgccccccgagccacctcatcggatatgcttcattgctttcatctcatctcatatatttatattagaaaagaaaactctgttcaaccacccgccgagttcagcagcactctcctccgccctcttccaggtccagcaaagattggggacgcgtaggcatcggagattgcctcgggagcgcgtttcctggtcaactaaggccggcatgaagggctgctcagagcgcttgctgtttctgctgctgctgctggcatcgtcgtcgttactgtccgctgtgattgccgcgcagcagacttgccccgccgacctcgacagcaaatgcgatggtggcgcgtctgatgatgattgggagggggagttcttccccggcgtcccgaaaatcaagtatgagggtccaacaagcaagaaccctcttgcttataagtggtataacaaggaggaagtgattctcggtaagaagatgaaggattggatgcgcttcagtgttgcattctggcacacgttccgtggtactggcgctgatcctttcggtgctcctacaaagacttggccttgggaggacggcacaaattctttggccatggctaagagaagaatgagagctcactttgagttcatggagaagttgggagttgacaaatggtgcttccatgacagggatattgccccggatgggaagactcttgaagaaacaaattctaacttggatgagatagtccagctggcaaagcagctgcagggtgagaccaatataaagccattgtggggtaccgcacagctctttatgcatccacgttacatgcatggcgctgctacgagcccagaggttaaagtatatgcttatgcggctgcacaagttaagaaagctttggaggtcactcactacctaggtggtgaaaactatgtgttctggggtggaagagagggttaccaaactcttctgaatactgatatgaagagagaacttgaccatctggctaactttcttcaagctgctgttgactacaagaagaagattggattcaacggaacactattgatagagcctaaaccacaggaaccaacaaaacaccgtatgactgggatgttgcgactacgtttgcttttctacagaagtacggtcttacaggagagttcaagattaatgttgagtgcaaccatgctactctatctggacacagctgccatcatgaattggagactgcacggattaatgggctgcttggaaatatcgatgcaaacactggtgatcctcaagttggttgggacacagatcagttcatgacagacattgcagaggctactttggttatgtcaagtgtagttaagaatggtggacttgcacctggtggtttcaactttgatgccaaattgcggagggaaagtactgatgttgaggacatgtttcttgcccatatctccggaatggacaccctggcacgtggcctccgtaacgttgccaagctgattggggatggttccctagatgatcttgtccgcaagcggtaccagagctttgatagtgagattggtgccttgatcgaggctgggaaaggagactttgagacgctagaaaagaaggttctagagtggggtgagcccactgttgcatccggcaaacaggaactggcggagattctgttccagtctgccctatagatgatggtgccatgtccataggtccaggaataagcaagggtgcgccctcctccgaacacgcactcgtcctcctcaccacggggatgttatggttccgtgcgatggactacctacaatacagcatggaactgagataattaggatgtaatctgtcagaaaatttccagaattgttacctccttttgtttagagtggattagtggaatcaaactggagttagttaaagcttatcctacattttggtgtggcgatcgtgtttggtacttccttgaatgctgtttcatagtgtggcaacgatgttgctgcttagtcctacaactggtggtagtaatgtatcatagttcgaacgtttcttcacaataaattatgatctttaataaattttattagttcaaaaataaataaaaatagagttcga

SEQ ID NO: 4902 - DNA, 933 bp, Zea Mays
cgcgggtgctgctgcggaggcccaggaccgaaattgaactgcagttggtgaggtggcggcggaccgggtggcggcgggggcgggggcccagcgtggtagggcggcaccggcatcctgttgtagggcgcctgcggcggcggcgtgtacggattcatctgcgacgggtagccgccctgcggaggcggcggtgcgtacgacctgtaagacgccatcgcgcggcagctagggttcctcggaacccgagccctagcacacagacaccgcgcctgcggacactgctcgctccccttctcctccgtcgccgccaccgcagaagcctctaccacgcgcgaccagctcgccgccgcgcccgccggggccgacggcctgcacgcgctcgccgagcaggtggtgcagctcgtgctcgccgacggctccggcgccagcagcccgcgcgtcgccttcgccgacggcgtcttcgtcgactcctcgctgaagctcaagccggccttcgaggaggtccccgtgggaaagtacagggccgacacccagtccgtcgacttccagaaaagtggtcatatcaaccagaacttatcaaggaagtgtgaagcattagttgtgtcaggtttggcagaatatggtgatgaaatagatgggattgtcccagctgatatcatgaagattcagcctatcctacaatggtcgtgatagatgaggtagattcttttctcttcagaccacatgttgggcttagggccaagtaccaggcaatatattcttcttgcaaacaagggagattgacctaaaattgcaaaacagttggtggatgtctacgcgcgcagtttaaggttccaagtgaagaagaaacagttctttcgaaacttcattactattacactgtttggtgcagttggcaccttgatctcttttactgtaatatcccttggtaggttc

SEQ ID NO: 4903 - DNA, 1094 bp, Zea Mays
aaatggtcccaagttggcgttaagatagtggcacacatatacttacatgttgagatgatcaaaatctatactatttattaagaacgcaagggtagcctgcctccttgcgttctgccgttagacaatctcaaccgtccgttctatccttctctgatctaaaccgtccgatcccacacaacagtcccactcctcgatcctgcccaccagccccgaagccgtcgcgggtgctgctgcggaggcccaggaccgaaattgaactgcagttggtgaggtggcggcggaccgggtggcggcgggggcgggggcccagcgtggtagggcggcaccggcatcctgttgtagggcgcctgcggcggcggcgtgtacggattcatctgcgacgggtagccgccctgcggaggcggcggtgcgtacgacctgtaagacgccatcgcgcggcagctagggttcctcggaacccgagccctagcacacagacaccgcgcctgcggacactgctcgctccccttctcctccgtcgccgccaccgcagaagcctctaccacgcgcgaccagctcgccgccgcgcccgccggggccgacggcctgcacgcgctcgccgagcaggtggtgcagctcgtgctcgccgacggctccggcgccagcagcccgcgcgtcgccttcgccgacggcgtcttcgtcgactcctcgctgaagctcaagccggccttcgaggaggtccccgtgggaaagtacagggccgacacccagtccgtcgacttccagaaaagtggtcatatcaaccagaacttatcaaggaagtgtgaagcattagttgtgtcaggtttggcagaatatggtgatgaaatagatgggattgtcccagctgatatcatgaagattcagcctatcctacaatggtcgtgatagatgagattcttcttgcaaacaagggagattgacctaaaattgcaaaacagttggtggatgtctacgcgcgcagtttaaggttccaagtgaagaagaaacagttctttcgaaacttcattactattacactgtttggtgcagttggcaccttgatctcttttactgtaatatcccttggtaggttc

SEQ ID NO: 4904 - DNA, 1914 bp, Zea Mays
agcgacgccgctgctcgctgttagccaaggaagccagacacccggccataccaattaccaaaaccactcatcaggtcgcgttgccagccgcacaaaccaagacagacccccctaatctctctggcatcgcggctcgtgctaagctaatcgaggcgcccccaaccacctctggccaagatctcgataaggactagcccatgcctttcatttgtcctcttcgcttctctggatcaacctgccaatgcgcgtatcggttggagtagataagcggcgccatgggtatgaggagcaggcacccaaaggcgttgggtttccgctgccacccggcaagccaccggtccctaactctggcactatggagcctagcggcattggtcgtcgttgtgaatttccatcttctcatcgttcataaggaggacgatgagagtatgagcacacacgagatccgccgatcgattatgagggagctggaggtggtggaggaggagaagttccggctagctcctccccggagccggaggaatccccgggctgtgcgccgcaagggagagaagaagaagcctacaatagtggatgagttcctggatgagtcttcggctgtgcatgacatgttcttcccagaactgaatacggctgtagatccaatcaatggtgcaaatggcagcaagtacttctactacccaggcagaatttggttggacactgacggaaaaccaattcaagctcatggaggaggtgtcctctatgataagaggaccaccacctatttcttctacggggagaataaggatggcaaaacctacagagctcataggaagggagcagacagggttgacatcattggagtaagttgctattcttcgaaggacctgtggacatggaaaaacgaagggcttgtcctccgtggcgaggagaagaatgtaacacatgatcttcacaaatccaatgtcctggagagacccaaggtgatatacaatgatcggactggcaagtatgtgatgtggatgcacgtagatgatgctaactacaccaaagcttcagttggtgtggccatcagtgactctccgacaggcccattcacttacctctacagcaagcgtccgcatgactgtgagagtagagacatgaccatcttcaaggatgatgatgggaaggcctacctgatatactcttccgaggacaacagcgagctccacattggcccgctaaccgatgactaccttgacgtcactgatgccatgcgaaggcttctcatcgcgcagcatcgagaagctcctgcgctcttcaagcatgaaggcacctactatatggtgacctctggctgtacaagctgggctccaaatactgcgctggcccacgcagcgacatcagtgatgggaccttgggagacactggggaacccctgtgtgggagggaatgaggtcttcagatcaacgacattcttctcccagagcacatttgtcttgccagttccagggctgccgggctcattcatcttcatggctgatcggtggaacccgtctgatcttagagattcgcggtatgtttggctgcctctgacgatcgggggagtccctgatgaagccgcagactacagcttcatgttccctctctggtcccgggtgtccatttactggcacagacggtggcgtctccctgaggagtggagggattattgaaactctgaagtttctttttttttcataagaatcgaaggtcttatacgctgttacattgatagataccaaagtaaagtattgacatttgacacgttggtctacattgtataggtcagatgtagatgcagggttcgtaaatgtttagttttttgagtttgcactcaaatcaaataaaactattgtggccttttgggcgaggtagtttctagaataatctgtctgcattggtcttttc

SEQ ID NO: 4905 - DNA, 732 bp, Zea Mays
aagaaaaacgaaaaacgaaaaactagagggtggaggacaacggtgtccagcaaaagagagagaagaggaggggaggaggtggaagtagcaagaatggcgtgctccaccaatctctgcttctcggcgtcgattcctcctcttccagcctcttcttcttcttctgtctcctcccccttcctcacggtggagcgtgtgtcctatgttccgtccttgtccaggtggacaatccgatacaagcaattggggcatgcatatcagagaagccacgttctggcctttgctagtgcagataggcgcagtcaagcagaagctatcaatgggccattggcaatgataggactgactgctggattgatagtggaagctcagacaggaaaaggcatcttagggcaggagctgatgacacctgcaatggaatgatgagtctattgcttcgatttaacgtgtgattacatatatcttgaacttattataagccagtatgtcgcctgtagagtgtagacaggtacttttataatatataatcacaacttccatatgtactgatacattttatctttgttctgcttgctactgttttaattgaatacaagacatactatggaatatttaaatttgtcatttgtagtagttgtgtttgtaactgcaagctaaaaaacaatctgttgagcatgtgctatatgtaagtagcgtggatcggtttagggtccgtgcatgttaatgagatatgcg

SEQ ID NO: 4906 - DNA, 5638 bp, Zea Mays
gccggcgggggagatggcaatgccacccgccgcggtggcgcggctgcgggagctggtgccggcgccggggacggaggaggagctggagctcgacgtcgccggcgcggccgcgctcgtcgagtgctgctccggcctcctccgccctggcggcggcggtgacggcgacgccggggccgcgctcgaggcgctcgaggcactctgcgctgcgggcggagggggcgcgatgcgccgccatgccgatgggctcgctccgctggtcgtcgcgcgcctcggcgacggacacgcggccgtgcgggaggccgcgaggaggtacctcgtgctgctcatggagatgaaggagatgaatgcaagaacggaaaacacagagccaaactcaaacgtgccaaatgaccaacacgttcactatacgacaatcgaaatggaatcttctaataccagccaagcaagaaaaaattccaaagagaaggtcagcgcaagagacatctcgcttcttgcaggagaaggagatattacaaggaagttagtcgaacctataaaggttttctctgagaaggacctactaagggagataggaaaagtagtatctactttgcagccagataatgagtggtcaatccggataactgcaatgcaaagagtggagggtttagtgcttggaggtgctgcggactattcggccttccccatgctcctaaaacagctcatgactcctctaataactcagcttctggataggagatctagcgttgtaaaacaggcatgccatttattaaacttcctatcaaaagagctactacgtgactttgagccatacgcagagctgcttattccggtccttcttaagaatgtcgtgatcaccatccttgtaattgctgagtctgctgataactgtataaaagagatgttaaggaactgcaaggtggctcgtatactaccaaggattattgaatttgcaaagaatgatagaagtgctgttcttcgtgccaggtgttgtgaatatgcaacactaatgttagagtactgggttgatactccagaaatacagagatcagctgacctgtacgaagaccttataaaatgttgtatagcagatgcaactagtgaggtccgatcaagcgcaagggcatgctacaggatgttctcaaggatttggcctgaccgttcgcatcagctgtactcatcttttgaaccacccagacagaaaatgataaatgatgaagatactgagacacctcaagcgcatcttcctccagttaaaataagtcatcttcaacctagttctttcgttccagctgtaatagataaagttgttaaggtcgattctgggatatcattttcttccggagaccttcaaacatcagacatactatacctccagtgtgatgatataatcgcaaaaggcctagatgcgggcaataacgatgacacactgactattggaagttcttttgaggataagatcacactaagagaactagaaactagagacagagatactgagaaaaatgattcaggcaacagtacaggtgtcaattcatcggctcgtgaccaaccaactgccactcccattacaatagaagcaccttcagaaatgtcactggatgatgcaactgttgtaacaattgttcaagacaaggctgaatgcaagctgaatgttgaaccgataaatcagcaagttcaagcacaagaagatccttctgacttgacatgcctgtcacctgcagttaactcgaaaggtgcagggaacttactaaaggaaaatcctgttgaagtaagctctgatgctggatcaagtggaaaagtaggaactcataagaagagtgctgtttctaagaagccacgtggtagttacacccctaacttccggcgacctctcttgagtaagcagatgacaaattggttttatgccagtaccaaaagtgatatacatgagaagcaactcattctgggagaaatggtcaacaacatggatgtgccctcatctattacagaggcactttctttgggtcttaacccaagatcagattggatgatgaaggtatatgcattcagtttcttaagacagtgtttgctagaacgtggatcaaaaggcactcaggaagttgcacaaaattttgagaaggttatgaggcttgtttgtcgatatctagatgatccccatcacaaagtggcacatgctgctctctcttcactagctgatatcatgccagttttcaagaagccttttgaacattatctcgacaagacactgccccatattttctcccggttaaatgatccaaaggaatcaatcaagcagcagtgcttggcaattttgaaacatgcaaatgaaagttatcccattgattctctcttacccgccttacttcgttcgctagatgagcagaaatctcccaagtcaaaactggcagttcttgagtttgcaaatgcctcttttgtgaaatgcgaagtcaattctgaaagctattgtagcagcagcttcctcaagccatggtttggaaaacttgcccatttgtttaacgataaaaacaagaaactgaaggaggttacagtggttggtttctcatctatttattctcactatgatcctacatccatgttaagctttttggtcaccctgtcaatggaagaacaaaagcggctaaaacgggcaatgaagcaattaataccatcaatagaaagtgacatggaagagttcttgcaacagaagagacataagcaaaagactccatcttttgatatttttactgcaaaatcaccacttcatcctgcatttcaatctgcaaaatcaccactgcatcctgctcatcgatcttctaaatcaccactccatcctcgatttgctgagtcgcccggtcattccgcatataaatacgccaagtcaccgctgcatccctcgtatcaacctgctaactcaccgctgcatccctcgtatcaatctaactatgtcaaggctgatgattgtttcagttctgcactccagtgtctcccggatacatctttggaagtccaggaggaccgtactggaaggattgagatcgaatctcctaataaatcttatgggcacaaagctgaaatgatggacaagaagtcctgtaccgtgaggtcaaagaatgatctcccgagaagaagtgacttcagtgtgatatcaaataacatagttcagaatgcaagcagtagggacagtcggagtacaaagatacttgatgaaccaaacgacagtgaactgcacataaatacccgaaaaaacaaagttacgaggacgaggaatgatttgcaggatcatgagaatttacaccagatgtcttcttcccttctcgagatgcttgatgacccagatatggccacaagagagcttgcactttctctgctggctgaaatccttgaaaagcacaaggcgatggagaactgcgttgagcttcttgtagttaaactgctgcatgcaaccaaagacggtgccttgaaggttgtaaatcaggcccatatctgcttgacaactgtggtcactcagttcgacccactcagatgccttggggtaagcttgttttgcatcgtcgttaagtgttgctgtttaactacaagaaatcttgtgttgctgttttttttttttgtttgccgtcgtcactgcaagtaatcttgtgtttctcatgtaaacgtgcaggccatcgcttctcagctggccagccaggatgagaaagttcttattgtaagcatcaatagtctgagcaagcttgtgatgcgattctcggaggacaacctgatggctcatctgccaacgtttcttccagcacttgtggatgcttccaaaaaccgcagtccgtatgtccgcaaggctgcgatggtgtgcgtggtggacgcgtacctgaagctggggccggcgctgctgccgtacctggagggcctggacagcgcgcagctgcagctgataaccacccacgccagccgtctgtcccaggcaagattgattgcgtcggacggctgacgcagcggggcacgccggacgggccggccggccgaggatgttccggggcagagcagcgtgcgtcgtcgtcgtcggcgtaccacccgctcctccttataacgcccgtgcgcgccccggaaggaggaggaggaggaggaggaggaggaggaggaagaagaagaacgatgccctgctgtgactactgcgctcccaatttatgagcatacagtagaccgcactgcgctgcggacggaagtgtactgcgagcagcaatggctgcgcctggtttttcttcttcttgtggcttgtatttagagatatatagagagagagagagcgtgtgctatgcgtgcggctgttgtcatttaagggcttgttcggttatttctatcccatgtggattggatgtgattggaaaaaaattgtgaaagattttgacttgtttgggattgaaatccatccattcccacccaatccacatggattgagagcaaaacgaacaagccctaaagtgggaagtaaagggtgaacagtcagtcggttatgaaatactgcagcgatggatttgaatcaaaaaagaagaaggttctgtgtgctggaacctggactggattggatgctactcctgtagatacaacaggttggtgatctggtctatggagatcgagagcagcagaggctgcatgtgcaccgcaatccctgccgtgccgtatggcgtcggctttggttggcttggctgcccagtgcccagtgcagtgcatgaatgaggaaggaagcggacgaacctgcgccggtgccgtgccctgtccacccggagactggacgatatagaaagagagatggagagtgcaccgggggatggcatgatggggtggcagaagggcgaagagaaggccgccggcggcaatcatcgagcggagcggagtccatcaggtcggtcgaatccaagcccaagtccagttcagccagctggcacacgtgggcgatgaagcaacaccgtgactgtgagcgtcacgtcacgccaaatggccagttgcaggagaagaagattagtgcagtacgtagtatacgtaacgtaatcgaggagaacaacaccggtatagaaagaaagaggagaagcgggtgcctgcctaccgcggcccattaatggtgcttcacgtgacctgccacgcccccacctccggccccccctaccctactgtgcacggtggctacaccactactactactaggcagccgagctcctcgcctcgctctcgctctcgctcctccaccttccctcccttgggtccgtccgtttgccgtgcgccattgcccattgcccattgcgccctgcgccccctcccttggccaagttgccatttgccttccctttccctccgcatcggcccatcccagtatcctaccctccccctcccactcacggcagctgccattgtcgccctgtctgcccccctccacgctctccctatccaccacagcacagcacagcacagcgccacgcacgatctcgccggtgccaccgtgctcccccaccttcaaatgtcgggcctccttccaccggcgccccgcggcacggagcactgagcgcagtccggtccggcgctgccccactgcgacaaggaggacgggcaagcgccgccagccgcgcggggcctccgctctgctcaccctcgc

SEQ ID NO: 4907 - DNA, 2170 bp, Zea Mays
agcacctgggcccaggtggcggtgtgagttagtattgagtaaatgacgcgggagacgagcaggacggcagcccacacatcgtcttcttcggttcgtctctgctctgctgctgggatcaccgtcaccggcaaccgcgagggagggagagggacagagcgaagagagagaaaactgaagaaacaacattttccgtttttcttgcttagtgaaaccagtggaagagggagagaaaagaagacgaagacgacaatataagtaaataaaaaaaaggcagcgagcgaggtggggaaaaaggggcgagttgatagagagaaagatagagagagaaggcgagggaggcagggatcacgaggtgtgcttcctcctccgcccaatcgggcccaaccaaatcccgccagcgccgcctcctttatactcccacctctttcccggagcttcttggatcacgggacgcgcgccgcgggccggtacgctgctggtgctggaccgctcgactctcgcctaccagctgctgctttggctggcgcgccggcgagagagagagagagagagggacgcgacggcgatggaccgggcggcgctcaccgtgggcccggggatggacatgcccataatgcacgacggcgaccgctacgagcttgtccgcgacatcggctccggcaacttcggcgtcgcgcgcctcatgcgcaaccgcgccgacggccagctcgtcgccgtcaagtacatcgaccgaggcgagaagattgacgagaacgtgcagcgggagatcatcaaccaccgctcgctgcgccaccccaacatcatccgcttcaaggaggtcatcctcaccccgacgcacctggccatcgtcatggagtacgcctccggcggcgagctcttcgagcgcatctgcaacgccggcagattcagcgaggacgaggcgcgtttctttttccaacaactcatatcaggggtcagctactgccattccatgtatgccatcgtgacttgaagctagagaacaccctgttggacggcagcaccgcgcctcgcgtcaagatatgtgatttcggctactcaaagtcatcagttctacactctcagcccaaatctaccgtgggaactccagcatacattgctcctgaggttcttctgaagaaggaatacgatgggaaggttgccgacgtgtggtcgtgtggggtaaccctctacgtgatgctggtcggcgcgtatccattcgaggacccagacgagcctaagaatttcaggaagacgatccagagaatactgggcgtgcagtactcggttccagactacgtccacatatctccggaatgccaggacctaatctccaggatcttcgtcgccaacccgtccaccaggatcaccatgcccgagatacggagccacccttggttcctgaagaacctcccggccgacctggtggacgacagcgcgacgacgacgagcaagcagtacgaggagcccgagcagccgatgcagggcatggacgagatcatgcagatcctgggcgaggccaccattccggcggcggggtcccgcgggctcaaccagttcctgaacgacggcctggacctcgacgacgacatggaggacctggactcggacgccgacctcgacctggagagcagcggggagatcgtgtacgctatgtgacggcgccgagtgctcagcgacgaggcaatgtctcgttgcgctcgcaggttgccgagataactagagagacggagagggtgggtgtgtgctgctgctgcctgcagcctgcgtgtagttgtgtgctttcaggtctctgctgctcatgcctgatgccgtcgttcgtgatggcccctttttaccgtcctgttgtgtttggccgttgttatttggtgcgccttcagtgcagtgttttgcaacggtttagccatttggaatcgctactgctacaacctcgttcatccgagaggaccctttgtttctgcatccccagcgatgtacttgtattactacactgtatcatatgttatatttggtgtaggaaaataaaggaactccattgcccgttctctgtctgtccccatctttatttcatccgtatctcagttttgtgagaacccgctggagatctttctcgattttggtgtcttcttggctcatatatctcaagtcgtgcacaccctctatcagagcaaat

SEQ ID NO: 4908 - DNA, 1317 bp, Zea Mays
acgctcatgacttttaagagtgtcgacccttggcttgggtccagccttcagacttcagaggcaggctgcaagagagttcatcgatctagctagctagctagcgtgtgtttagggtacctagctagctagcttcaacatatatatcttagttgcacacacagctcaaaagaaaggaatcatcgatcgatcggcagggagggatggggctgagggagatcgagtccacattgccgccggggttcaggttctatcccagcgacgaggagctggtgtgccactacctctacaagaaggtggccaacgagcgcgccgcgcaggggacgctggtggaggtcgacctgcacgcgcgagagccatgggagcttccagcttccgggaccgcaagtacgccacggggtcgcgcaccaaccgcgccaccaagacggggtactggaaggccaccggcaaggaccgcgaggtgcgcagcccggccacccgcgccgtcgtcgccatgaggaagacgctcgtcttctaccagggacgcgcacccaacggcgtcaagtcctgctgggtcatgcacgagttccgcctcgactcgccgcatacgccaccaaaggaggactgggtgctctgcagggtgttccagaagcggaaagacagcgagcaagacaacggcggcggctcctcctcgccgccgacctttgccggcgcgtcgtcgcagggggtcgttctagatctgccggacgaccagcagcccagcatgacgatggccggcgcgtacgtagcagtggaccaccaccagccaggctcttccgccgtcgggttcgcactgccgccgcatgcgcaggacaacggcctcggcgatggcggcctggacgcgttgctgatgaacggagcgaccatgtggcagtacagctcatcggccctcgccgaccacttcccgccggaggaagtgaccgccgcgcccatgatggggctaggctccaggggaggaggtgacgggtgcagcttcttctacgacagcggcttcgacgacatggcgaacatggggttcccgcagggatggatgggctgaggaggcaaggcaccaactgcaacaacgccatgggatgatggattgtgaaggaaacgattgaattgattccattagtggtagtattgtacagtaggtacgtagtgtgaggttagtttattggaaattattagagtgcacctccccaatccaaaacaacggaatgaaaagtagagcgcatgacgacaattgtatgtatccattcactcctactactatgcttgtacattaattaattagtataaacgaatccaagtacgtacatg

SEQ ID NO: 4909 - DNA, 1028 bp, Zea Mays
tggagatgctctaagagaagaaccttattttctaagaatttttatttttccaagtaaaattaacttaatttttgtcagaaaaataaaaatcccttaaaaataggactaaactaaccctaagtatacgaaacccaaagtttacggtcctaaaaatcaattatctcacccacgagcgatcgctttctacctcgctatgcccacgagctcgctttctactagctctcgacgcgtcgccgccgaccacagcacggctggcgtgtggatccctcccgctctcctcgccggatctccacccgcctcgctctctctgagtccagtggggcagagatccgtgagcgcgaggactggtcccttcttgggttggatgttggattatggctggaagaaattaaccttggtggctacagacaagtatttgaagaaaatggtgtcaacggagaatatctagaaagcttgtccatgtttactactgagcagattctgcgttttattaggcggtgccatatgaaatggggagactttatcacactgtgcaaagagttgaggcgcattaaagtcgcctgcctcaaaggggagcaagaagtccgcaggccatggtgggcgccggcatgcctctccatagttggcatggaagctgtctgttttcgctcttggtgcatcatgcacaactggtctctctctctctctctctctctctctctctctctctctctctctctctctcttatcccttgctacttgttcttcatatataggtttggaacagtagtatgttgtagacaaagaaagaaacatataatgtgcagatggtctctggtctgctcttttcttgcaaatcttcctgagtagttatggtggtgcatgcgatttgctaaaagaataaaagattgtctaccacttagttgtccagtgcacctacttcacgaattctggacttatacacccatgatgtctagactcggcctacatgcccgtattttctctatttattttatggacacatttagtggtagataatacactctgcc

SEQ ID NO: 4910 - DNA, 1584 bp, Zea Mays
tggagatgctctaagagaagaaccttattttctaagaatttttatttttccaagtaaaattaacttaatttttgtcagaaaaataaaaatcccttaaaaataggactaaactaaccctaagtatacgaaacccaaagtttacggtcctaaaaatcaattatctcacccacgagcgatcgctttctacctcgctatgcccacgagctcgctttctactagctctcgacgcgtcgccgccgaccacagcacggctggcgtgtggatccctcccgctctcctcgccggatctccacccgcctcgctctctctgagtccagtggggcagagatccgtgagcgcgaggactggtcccttcttgggttgggtctcttctccagctcgcgagttcgccactggttgacactgattgtagcacttcgtggtgcctgattggatcgcgggtgcggtttgccctccacaaatttgggtttggttccactgaacccccatgacccaagcgaagtccgctcctggaaggaaggagatgggccgtgggcggtcgccggaaccgctcgatttcttcatatggactgtcgaggagtttctgatctggaatcatgccgtatgttaagctttatagtttagaatcatatttggatcagcatagtacgtttagtttattatgactacaattggtaaggtccaatgaaagagttcaaggctatattgtcacctcaagatgtttgaccattcacctaatagtttaactattttctttcaggatgttggattatggctggaagaaattaaccttggtggctacagacaagtatttgaagaaaatggtgtcaacggagaatatctagaaagcttgtccatgtttactactgagcagattctgcgttttattaggcggtgccatatgaaatggggagactttatcacactgtgcaaagagttgaggcgcattaaagtcgcctgcctcaaaggggagcaagaagtccgcaggccatggtgggcgccggcatgcctctccatagtgttcgtgagggcagccaagcagaacaggaagtcccgtgtcgtctccttgaagctggaaccataatgcttgtcaagcacttggaatcgtcgccgcctgtgctccaatcctccagctctataggaggcagcctgcgcacaccatcgtgcgctagtccagagtggcatggaagctgtctgttttcgctcttggtgcatcatgcacaactggtctctctctctctctctctctctctctctctctctctctctctctctctctcttatcccttgctacttgttcttcatatataggtttggaacagtagtatgttgtagacaaagaaagaaacatataatgtgcagatggtctctggtctgctcttttcttgcaaatcttcctgagtagttatggtggtgcatgcgatttgctaaaagaataaaagattgtctaccacttagttgtccagtgcacctacttcacgaattctggacttatacacccatgatgtctagactcggcctacatgcccgtattttctctatttattttatggacacatttagtggtagataatacactctgcc

SEQ ID NO: 4911 - DNA, 2004 bp, Zea Mays
tggagatgctctaagagaagaaccttattttctaagaatttttatttttccaagtaaaattaacttaatttttgtcagaaaaataaaaatcccttaaaaataggactaaactaaccctaagtatacgaaacccaaagtttacggtcctaaaaatcaattatctcacccacgagcgatcgctttctacctcgctatgcccacgagctcgctttctactagctctcgacgcgtcgccgccgaccacagcacggctggcgtgtggatccctcccgctctcctcgccggatctccacccgcctcgctctctctgagtccagtggggcagagatccgtgagcgcgaggactggtcccttcttgggttgggtctcttctccagctcgcgagttcgccactggttgacactgattgtagcacttcgtggtgcctgattggatcgcgggtgcggtttgccctccacaaatttgggtttggttccactgaacccccatgacccaagcgaagtccgctcctggaaggaaggagatgggccgtgggcggtcgccggaaccgctcgatttcttcatatggactgtcgaggaatttccatgttcctatttgggcctacccttgagcgttcataaactctcaagagctgaacttcacaagattgttgacaaggtggcagacaacctcccaaaatggaagggagcactcataaacaaggctgcctgactggtcactgtaaaggctgtcctgtccgccctaaatatttatcacatgactgcccttgatctacctaaatgggtgttcaaggcaattgacaagaagcgcagaggctttctttgggtcggaaaagataaagctaatggaggaaactgtatgatatcttcggattcaatacaacgacctctccaatatggtgggctgggtgttctgaatttagaggtaatgagttgggcccttcatgtctggtggatttggctggaaaaaacagattcttgcagaccttggaaaggattacccatccatgtgccaaataatgcccgagctctctaatatggcagtccaaacaataatgggggatgggcaaactcttgttttgggtagacaaatggctggagggaaatacaatccaagagttggcccccaacctcttcaaagccatccccaagagaataatcaagcatcggactatgtcccaagcgctgctgaacagggggtggattgtcgacatcaaaggtgcactcactgtccaagttctaagtgagtaccttctgctttgggacttagtgcataactggcacttgcagcaagaggctgctgatcaacacctaaagaatggttcttactctaccaaatctgcctataatgctttctttgtgggaacaatacattttgcaccttggaagagggtctggaggtcctgggctacccccaaatgcaacctttttatgtggttggtgctgaaaaatagagtttggactgtggatcgtcttgcgaagagagggctgccgcacctagcagcctgcccgctttgtgaccaggaggcagagttgatacaacatcttctagtttcatgtgtttttgccaaacaagtttggtttctaatcctacatggcctgggactgtccgttttgcctcaaccctagggaggaagttttaagggatggtggagtaatgctgtatgcatggcatcaaaggaactaaagaaaggactcaacgctcttttttgtaatggtatgggagatttggatgcaccggaatgcttgtgtgtttgaaagcgtcagtctggaggccctggtggttcttctaaacatcaccaatgaaggatcgctgtggtgtgcggctggagccaaggaccttcggttcttgttaaggggatgttggatagacttggttagccctgtccggcctggtggttccctggtcaagtagtttttgtgtcttttctgtaataggtccttttatgtttgccctggggtgtaaacccctgttgtttccttcttaatgaaacgatgcacaac

SEQ ID NO: 4912 - DNA, 2062 bp, Zea Mays
tggagatgctctaagagaagaaccttattttctaagaatttttatttttccaagtaaaattaacttaatttttgtcagaaaaataaaaatcccttaaaaataggactaaactaaccctaagtatacgaaacccaaagtttacggtcctaaaaatcaattatctcacccacgagcgatcgctttctacctcgctatgcccacgagctcgctttctactagctctcgacgcgtcgccgccgaccacagcacggctggcgtgtggatccctcccgctctcctcgccggatctccacccgcctcgctctctctgagtccagtggggcagagatccgtgagcgcgaggactggtcccttcttgggttgggtctcttctccagctcgcgagttcgccactggttgacactgattgtagcacttcgtggtgcctgattggatcgcgggtgcggtttgccctccacaaatttgggtttggttccactgaacccccatgacccaagcgaagtccgctcctggaaggaaggagatgggccgtgggcggtcgccggaaccgctcgatttcttcatatggactgtcgagaaacccacatgatgaagattggtccctaattactaacatcctggcttgtgacatcaaggaatttccatgttcctatttgggcctacccttgagcgttcataaactctcaagagctgaacttcacaagattgttgacaaggtggcagacaacctcccaaaatggaagggagcactcataaacaaggctgcctgactggtcactgtaaaggctgtcctgtccgccctaaatatttatcacatgactgcccttgatctacctaaatgggtgttcaaggcaattgacaagaagcgcagaggctttctttgggtcggaaaagataaagctaatggaggaaactgtatgatatcttcggattcaatacaacgacctctccaatatggtgggctgggtgttctgaatttagaggtaatgagttgggcccttcatgtctggtggatttggctggaaaaaacagattcttgcagaccttggaaaggattacccatccatgtgccaaataatgcccgagctctctaatatggcagtccaaacaataatgggggatgggcaaactcttgttttgggtagacaaatggctggagggaaatacaatccaagagttggcccccaacctcttcaaagccatccccaagagaataatcaagcatcggactatgtcccaagcgctgctgaacagggggtggattgtcgacatcaaaggtgcactcactgtccaagttctaagtgagtaccttctgctttgggacttagtgcataactggcacttgcagcaagaggctgctgatcaacacctaaagaatggttcttactctaccaaatctgcctataatgctttctttgtgggaacaatacattttgcaccttggaagagggtctggaggtcctgggctacccccaaatgcaacctttttatgtggttggtgctgaaaaatagagtttggactgtggatcgtcttgcgaagagagggctgccgcacctagcagcctgcccgctttgtgaccaggaggcagagttgatacaacatcttctagtttcatgtgtttttgccaaacaagtttggtttctaatcctacatggcctgggactgtccgttttgcctcaaccctagggaggaagttttaagggatggtggagtaatgctgtatgcatggcatcaaaggaactaaagaaaggactcaacgctcttttttgtaatggtatgggagatttggatgcaccggaatgcttgtgtgtttgaaagcgtcagtctggaggccctggtggttcttctaaacatcaccaatgaaggatcgctgtggtgtgcggctggagccaaggaccttcggttcttgttaaggggatgttggatagacttggttagccctgtccggcctggtggttccctggtcaagtagtttttgtgtcttttctgtaataggtccttttatgtttgccctggggtgtaaacccctgttgtttccttcttaatgaaacgatgcacaac

SEQ ID NO: 4913 - DNA, 1267 bp, Zea Mays
caacaggccacctagtccaacgagccccattccaattcggcaattcccatttccccttcccaacaggccaaccccctctacctatctttttcctcagcaaccgtgctcggttcctcctccctcgaaacggctcccacccccgcgccgcgataagaaaacccaccaaaccctaaccctagcagcggtgccacaaccgcccgcgttcccggccggagaggaagccgagccagcaaggatgccgcccgggtcggcgacgcaatttcggtacacgcagacgccgtccaaggtgctgcatcttcggaacatgccatgggagtgcaccgaggaggagctcgtcgacctctgcaaacccttcggccgggtcgtaaacaccatgtgcaacgtcggcgctaaccgcaaccaggcattcgtcgagtttatcaaaaccaggcaatttcaatggtgtcctattatgcttcatcttcagaacctgctcaagttcgtggtaaaactgtatatatccaatattcaaacaggcaagaaattactaacaataaaggcactggggattcttctggcaatgttctacttgtcacttttgaaggtgttcagcctaatgatgttaccatagaagttattcatttggttttttcggcatttgggtttgttcacaagatagctacttttgagaaagcagctggtttccaggcacttatccagtatactgatgccccaactgctcttgaagctaaaaactcattggatggaagaagcatcccaaaatatttacttccagaacatatcggtgcctgccacatgcgcataaccttttctgcgcataaggatttgaatatcaaatttcagtcgcatcgcagcagggattacaccaatccttaccttcctgtgaaccaaacagcaattgaggggattgtgcagcccacggtgggccctgatgggaaggtaaaggagcctgagagcaatgtacttttagcatcaattgagaacatgcaatatgctgtgacagtggatgttctgcacactgtgttttctgcttttggagctgttcaaaaaattgcaatgtttgagaagaatggtggaatgcaggctctaatccaatatccagagaggtgtcggagttcgtgaaggcttaaaatggacatctgcaactttccacagctataaaatataactaccgcagccgttgctaaacaagctttggagggacactgcatatatgatggtggttactgactaatgaataacgaattctgctcaattagtaaaaaaa

SEQ ID NO: 4914 - DNA, 2154 bp, Zea Mays
atccccaatcgaaacggctcgcagctcatctcaatccgatccgatggcccgcgccgccgctcgcctcctccccatcttcctcccatggcggcgtcctcccccgccctgcctcctccgccggggcttcctaaaccctagcagccccagaacctccgcgcgcgtcgacaccctcgttctccctggagacgagcgcttgcccttcccctcgcccccacgcctcccgaaccagctgcgtcctgactacgggagtggcggcggaggcggcgctccctcgaccatcgcggccatcgtcacctcactcggcggaggccctgcagcggtggggatcgtgcggatctccggccccgatgccgtcgccgtcgccgaccgcgttttccgcccagccgggaccaggagggcgtcgacgccgtggcaaccgcgcagccactttgttgagtacggactcgcgctcgacgcggacggcagcgttattgacgaggttttggtggtgccaatgctctccccgaggtcctacacgcgagaggatgttgtggagcttcagtgccatggcaacgatctctgcttgcgccgcgtgctcagggcttgcttggaagctggagccagacttgctgatcctggtgagttcacccttcgtgcattcctgaatgggaggttggacttggcccaagcggagaatgtgtctaggcttatttcagcaaagtcagcagctgcagcggactcagctttggctggcatccagattttgaagatgagatgcctcctttggacccagtgatgcttgtcagcaaaattaattgtatgaggaaggaggttcaggatgctttggacacttccaattatgataaattgttacaatctggtctacagatagcaataattggccgtccaaatgttggaaagtccagcctccttaatgcttggagtaagcttgcagagtgaaagggctattgttactgaaatagccggaactacacgggatgtagtagaagcaaatgtctcaattaatggtgtacctgttactcttttggacactgctggtataagagaaactgatgatgttgtggaaaaaattggcgtgaaaagatccgaggctgctgcaatgggagctgatcttattgtaatggcaataagtgcagttgatggatggactgatgatgacactaaacttatggagcatgtttcggtaaatagggttctgcagttccgatggttcttgtaatcaacaaggtagattgtgcgccatttgttcctggagaacagttcaaacaattcagtggcctcttcagaaaacacgtacagacatgtgcagtcaccggtaaaggcatttctgatttggagagcgctgtaatagaggtcaggggtattgagcatgtgccttctgagggacgaaggtggaccgtaaatcagaggcaatttgaacagctgttgaggactaaagaagctttcgcacgtctagagtcatcaatcaacgagcagttaccaatggacttttggactgtggacttgagggaagctgcgcttgcccttgcaacaatcagcggggaggacatctccgaagaagttttgagtagcatattcagcaaattctgcatcgggaaatgatctcgcaagatgctgcatccagtagtttggagcagaagctttttccttgactgagaacaggaaccaacatgctgagtggcacttggttcgcggcatcagaatggtgaacaggcgtgcttgttctctgaggtgccacaaagaacacaagggaggtgaagccctgtccatcctagtgcacaccgtatagatgctaaggatggaaccatcgagttcctgtcttcgacgtcggatacgaatcctgtatactcgtggttgatatgagaaaattttattagacctaattgagaacgcaaacagtttcattcatccgtcttgctgtacgggacgcaacatacccgaattgtgaccaggagacattaaggtgccgtctggttcagacgttgtaacaggaatcgtaatgagatcccttaccggcggtaatgtaatggttattggctgatcccttaccggcggtaatgtaatggttattggctgtaattagattggatagtaccagatactacttgaaagagctcagtcaaataaaggtatcggtctaatccgtttgcgttg

SEQ ID NO: 4915 - DNA, 2237 bp, Zea Mays
atccccaatcgaaacggctcgcagctcatctcaatccgatccgatggcccgcgccgccgctcgcctcctccccatcttcctcccatggcggcgtcctcccccgccctgcctcctccgccggggcttcctaaaccctagcagccccagaacctccgcgcgcgtcgacaccctcgttctccctggagacgagcgcttgcccttcccctcgcccccacgcctcccgaaccagctgcgtcctgactacgggagtggcggcggaggcggcgctccctcgaccatcgcggccatcgtcacctcactcggcggaggccctgcagcggtggggatcgtgcggatctccggccccgatgccgtcgccgtcgccgaccgcgttttccgcccagccgggaccaggagggcgtcgacgccgtggcaaccgcgcagccactttgttgagtacggactcgcgctcgacgcggacggcagcgttattgacgaggttttggtggtgccaatgctctccccgaggtcctacacgcgagaggatgttgtggagcttcagtgccatggcaacgatctctgcttgcgccgcgtgctcagggcttgcttggaagctggagccagacttgctgatcctggtgagttcacccttcgtgcattcctgaatgggaggttggacttggcccaagcggagaatgtgtctaggcttatttcagcaaagtcagcagctgcagcggactcagctttggctggcatccagggaggcttttctaccctagtaaagtcattgagatcaaggtgcattgagttgctaacagaaattgaggctcgtttagattttgaagatgagatgcctcctttggacccagtgatgcttgtcagcaaaattaattgtatgaggaaggaggttcaggatgctttggacacttccaattatgataaattgttacaatctggtctacagatagcaataattggccgtccaaatgttggaaagtccagcctccttaatgcttggagtaagcttgcagagtgaaagggctattgttactgaaatagccggaactacacgggatgtagtagaagcaaatgtctcaattaatggtgtacctgttactcttttggacactgctggtataagagaaactgatgatgttgtggaaaaaattggcgtgaaaagatccgaggctgctgcaatgggagctgatcttattgtaatggcaataagtgcagttgatggatggactgatgatgacactaaacttatggagcatgtttcggtaaataggtcctcaggttctgcagttccgatggttcttgtaatcaacaaggtagattgtgcgccatttgttcctggagaacagttcaaacaattcagtggcctcttcagaaaacacgtacagacatgtgcagtcaccggtaaaggcatttctgatttggagagcgctgtaatagaggtcaggggtattgagcatgtgccttctgagggacgaaggtggaccgtaaatcagaggcaatttgaacagctgttgaggactaaagaagctttcgcacgtctagagtcatcaatcaacgagcagttaccaatggacttttggactgtggacttgagggaagctgcgcttgcccttgcaacaatcagcggggaggacatctccgaagaagttttgagtagcatattcagcaaattctgcatcgggaaatgatctcgcaagatgctgcatccagtagtttggagcagaagctttttccttgactgagaacaggaaccaacatgctgagtggcacttggttcgcggcatcagaatggtgaacaggcgtgcttgttctctgaggtgccacaaagaacacaagggaggtgaagccctgtccatcctagtgcacaccgtatagatgctaaggatggaaccatcgagttcctgtcttcgacgtcggatacgaatcctgtatactcgtggttgatatgagaaaattttattagacctaattgagaacgcaaacagtttcattcatccgtcttgctgtacgggacgcaacatacccgaattgtgaccaggagacattaaggtgccgtctggttcagacgttgtaacaggaatcgtaatgagatcccttaccggcggtaatgtaatggttattggctgatcccttaccggcggtaatgtaatggttattggctgtaattagattggatagtaccagatactacttgaaagagctcagtcaaataaaggtatcggtctaatccgtttgcgttg

SEQ ID NO: 4916 - DNA, 1646 bp, Zea Mays
aagccaattggcgtcacgtcgtcgcctctgcggaaaccggcggtccacgggaaaggaaagaggaaacagggaggcgacgccgtcacaattcgttctcgcgatttgcccttctccacctccccgtccatgtcgcgggaaatcacgcgcggcgacgctggattcacttagatccaacagggtaatcggcacggggcagcctctccacccattcccgcagccggttgggcgagtcgtcggttcagataatagactgggcgtgtggatccaagaggtttgatccctttaatttggattgaagtgccagctttcggtcaggaaggtgatgctggatgatgctgacggactttgaaagcataccggttcaaagaagtgttgcctgtcaccatgaggctcaacgttgggctcctagtgcccttgatggcacaatactccgcacccacatgggctactttagttgctgggttcttcatgctgcttgcgctttcgctctccacgtacctgatatttgagcatctctcagcatacaacaatccagaggaacaaaaatttgtactgggtgttattctcatggtcccttgctatgcaattgagtcatgtatttctttgataaatccaagtacaagcgtttactgtggcatcctacgtgatggttatgaagcatttgcaatgtactgctttggaagatatattactgcatgtttaggtggggaagataaaacaatagcctttttaaagagggaaggtggctctggttctgggcagtctctactgcatcacacgtccgagaagggaatcatacaccatcattttcctgtaaattatgtattgaagccctggagactggggacgcggttctacctgattatcaaatttggaatcttccaatatgtgatcataaagaccctcacagccaccttatctcttcttctagaatcttttggtgtttattgtgatggagaattcaatttacgatgtgggtgatcaaagattttaagttcactgttaaccaagcagtgcgaccagtggagaagcgcattgataaattgatgaaaaagaatgataagagtaagaaaagccaggacgacaactgggtgagtgcagcaacaccagagaggcctgttcgtgggattgatgatccattattaagcggaagcgcaagtgacagtggtgtcacaaagggcagaaaatatcgcagagttgtgagctcagttactgctgtggacagctggggaggtggtgatcaagcttctgacggatatgagatcaggggtcgccgctgggctgtaaaaagctaacgatttacatagcgagatggtaaattcgaaccatatcgcgtggggggaaaaggacttttaggtttgcaactgtttctgcgatactggccatttaggagccttcgcaagttcagattgtctttgtataggtacttaggtagctgataatgatatgtaacctttttgcgtagattgtttaattttcttttctttttcttggtcgagtcgtactgacatttggtattgcaaaatttgaaagtacaatagtttttttcattctttggaaatggaaacagagttcagcgagtgtgtccatttggacggatttgtatagtttcgttacacgcttacatgcatctttgatctgaaaaa

SEQ ID NO: 4917 - DNA, 1925 bp, Zea Mays
agcccctctactcatgaattctgtccagccaccacccaccccctgtgcagtggagcctaccactaccagcctcagcctacttcgtagtagtccccgaagccgcgagtcgcgcatacctttaccgcacgccgagaaaggatggcgtcgtggtcgtcgccctcagccgccgccaacgccgcctcgggcgcccgattcggccccttcccgagcggagggcagcggctcgcgccgtgtccgtcgctcgtccgcggaactcccgccccgacgctcgtcctcaggccccacccggacggccgtggccatggcctcctcgcgcacaccgcctcccctccctccttgcggtgccgcgccgtcgccgccgaggtcgggggcctcaacatcgccaacgacgtcacccagctcatcggcaacacaccaatggtgtatctcaacaacgtcgtcaagggctctgtcgccaatgtcgctgctaagctcgagattatggagccctgctgtagcgtcaaggacaggatagggtacagtatgataaatgatgctgaacagaagggcttgattactcctggaaaggtgatttgtaagcataggcacattttggcttcactcacatagttccttgcttagtgatactgatacgagtacgattttcgaaaaaatgtggaattggtgtagagaggtagcccacatgtgccttagtgatgtttctgatcactgttgaaaataaaatcatttcaacagcctcttgttctgcctttcccttgtaccctggatgacttgttttgcttgtctcatgtttctgctcagagtgttttggtggaagcaacaagtggaaacacaggcattggtcttgctttcattgctgcttccaaaggatataagctgatactaacaatgccttcatcaatgagcatggagagaagagtcctccttagagcttttggtgccgaacttgtccttactgatgctgcaaaagggatgaaaggggccttagataaggctacagagattttaaacaagacaccaaattcttacatgcttcaacagttcgataaccctgccaaccctcaggtacattatgagactactggtccagagatctgggaggattcaaaggggaaggtggatatattcattggtggaattggaacaggggggacaatatctggtgccggccgttttctcaaggagaaaaatcctggaattaaggttattggtattgagccttctgaaagtaacatactctccggtggaaaacctggtccacataagatccagggaatcggcgcaggatttgttccaaggaacttggatagcgatattcttgatgaagtaattgagatatcaagtgatgaagctgttgagacagcaaaacagttggctgttcaggaaggattactggttggaatctcctctggagcagccgccgctgctgccataaaggttgccaaaagaccagagaatgctggaaagctgatagtggttgtgtttccgagcttcggcgagaggtacctttcatctgtcctctatcagtccataagagaagaatgtgagaacatgcaacctgagccatgagggagccgtcactttaagcgggcatagtaaatgtttctgaaataagacgcgtagccagcatcagtttgctccacttggaatcatttggccatgctcactctatcctttcgctagcctctatgaccggacctaaactggtgtgtgagaaacatccacgactgtcctcccaactgctttcctaaagccaaacgataacactctcaataattgtctatacgattgaagctgatttgattggtaattgtaaacagcttgtctttggatctttgaagtcaaacaaagtcagttggttgaatcagatggatattgtatgccttttgtgtgtgtgtgtgtgtgaaaaaaaaatctgagttgtg

SEQ ID NO: 4918 - DNA, 3574 bp, Zea Mays
ccgaagcacgggaccggacggggcgaggagagtgaaacggcgcgcaatcgccgccaccgccgcgtcggcacgtccgccccacctcttcgcttaggcacgcgccaaaaccagtcaccggccgcaatctgccaatctcccgagccgcagtcctacgctccggctcctccacctcctaaccgcatttgttgatgacggcggagcaggagtggagtgaggtccaggtccgggccctcgacgggcgatccacggtcgtcaagctgccccttggcgcctccgtccgggacctcaaggccgcgctccggacgtccttcttgcccgcgcaagtctcccccagcttccacctcttcctgaagggtgctaaattgcgtttagacgctgagattggcagccttgctatcggcgatggggacttcattgttctcgtacccttcacaaggacgccacagcagcatttttcagttagcacagcaagtcaagatcagggccactgtccaccaaaacaaccagaagtgtcttctgcggctaattcagcttggcaagacattatggatgacctctcagcaatgccagccagcccacagtctgatgctgcttccaaagatttttactcctcatgtgacccgtgctctgggagatttacggaggatatgaaagcgggtcaaatttcgacaagtgggtcatcaaggaaaaggaggaaaacatgcaaggaaaacggaaatggttccccacaaatggtgtcctcgtctgaagcaaatggtacagctgagaaacacaacataagcaagaaaagtggggtggccaaatctgctgctatgttatgtcatgatatgcaacctttgaaacctgctgaaatggttgaacatctgaaacaaggacttggaaaggaggggcagatcgtacatatccaagagatatcatctagagaggcatcatttacagaacttccttgtaatctttcagaagctatgagagaagcgctgaagagtattggaatatctagactgtatagccaccagtctcaagccataacatcctctatttctggaaggcacattgtcgttgcaacttctacatcaagtggaaagtctctatgttacaatattcctgttcttgaatgtctttcccaagacttgatggcgtgtgctctgtacatatttccgatgaaggctttagctcaagatcagttgaggactttaataaagttgaagaatgcatctcatattgatgttgatgttaaaatatatgatggtgatactcctagagaagatcgtttgtggatcagggataatgctcgactgttaattaccaacccggatatgttgcatgtgtcaatcttgccgtatcatggtcaattccagagaattttatcaaatctcaggtatattgtcattgatgaagcacattcatacaagggggcatttggctgccatactgcgctcataattcggagattgaagcgtatttgttcaaatggaattggccaatttggatgaagtcgagttgattcagaatgatggaagtccttgtggttccaagtactttctcttgtggaatccctcactacctatgacagaaggaaggtcaaaagctagttcagtacataggcgctcaagctcaatagtagaggtttcatatctattttccgagatggttcaacatggcctccgctgcattgcattctgtaaaagtaggaagctatgtgagcttgttctagcttacacgcgtgaaattcttcaggagactgcaaaagaattggtagattctatctgtgtatatcgtgctggctacatagctgaggacagaagaaaaatcgaggctgatctttttggggggaaacttcatggagtcgctgctactaatgctcttgagctaggaattgatgttggacatattgatgcaacattgcatcttggatttcctggtagtattgccagcttgtggcagcaagccggtaggtctggaagaagagctaaacaatcactagccatttatgttgcctttgagggtcctttagatcagtatttcatgaagttcccacataaactatttggcaggtcgattgagcattgccaagttgattcacataatctaaaggttttagaacagcaccttccttgtgctgcttatgaacatcccttgtgcgtgcaatacgatgagtgctactttggctctagtctcgatagtgtaatgacaacccttaaagacaaaggttatatcatcaataatcgagctggacctttttcttcaagcatgtggaactatattggacccgagaaaagcccttcacaggctgtaagcatacgggcaattgagcaggacaggtataaagtgattgacaagttaaatagtcgattacttgaggaaattgaagaaagtaaagccttttttcaggtttatgaaggtgctgtttacatgcatcagggtgccaattacttggttgaggaacttgacttggcatcaaggacagccttctgtaggaaagctgatttgaaatattacacgaaaacacgagactacactgacatcaatgttctcggaggagaatttgtatgttctcaaggctattactactctagcttcctttacattttcttcattattgactcatcccctggagtggttttcagcactttattttgtttactacttttctgtcttgtttatttgactctagtctagttcatcaaatattatgaactcctgcactttgactcttccaatatatgttgaaggcttatcttcctacaagtatatgtagaactaatcgggtgaagacaactgctcaagcaaatgactgcacggtgactactaaatggtttggtttttatcgcatatcaaaatctagcaatacaatatccgacagcttcgagcttaacctgcccccatactcctttacttcccaggctgtttgggtgcgaattccccactcagtaaagatgaccgtggaggaaagcaaactagaatttagaggcggctcacatgctgcttcgcatgcactcctgaatatagtgcctctgcatatgatgtgcagtgcttctgacctaggaacagagtgcgctaatcctcatgaaagccgtggcatcccagacagaatccttttatatgatagacatccaggtggtatcggcatagcatcacaggcccaaatgctcttcgaggaactcctcctggctgctttagaagtcgtttccacgtgcaactgcacaagtgccgttggctgtccaaactgcatccaatcactgacgtgcagcgaatataacgaagttttggacaaggaggcagcgattttgattctgaagggagtaatcgactacgagagatcgtattttgaagcggaagacgcttctcagcgaagctgctgacgtcgaggctacagtaggcagcgaggagtgacgtgttcattactgtttgttcgtttggtgtttctctcgtgtatgtagatgggagaggttcggtctgtatctgcactcacatttgtagcctcgtcatatcaaagttgatatcatatcctacgacaatcaggtccatacatctgtacaacagtacaacccaaacatgtgagagctactggcga

SEQ ID NO: 4919 - DNA, 1231 bp, Zea Mays
cagcagcggagacgagaagcgcctggacggaagaactcacgagatgaaaaaatggcgcatgggctacgagagacttgaactgggccaataggacacgtttggggaaccaaaactttctctatttgtagttgcaaaatttctagaaaagctttcctctcaaacggagagatgtactcggatcagatctccaccgggcgcaagcgctccatccatgaccgccttgacggcgacctccctgccggcacgggcgccggcggccgtgtccgtcacacggtgtccaagaggcaacgacagatagatgaaaaatggaagcatgatctgtatcgggaagatgatgaaccagcttcaaatccgaaggatttgcgattgaagcttcagaggcgaagttttcaacaagattttaccagcacaagaagttctggtgtgcgtgatctacgtgagaagctatctggtataatgaacccacagccatcaaatgctgacccaccaaagccaaagccaaagccagtatcggaggttgttaacatctcaaggcgtcaaattgctgatgaaatgcatgcacgccaaaataagaaaccaccaaagcagacttcatcgaagaagacatctcagccaaaggctgaaagtccactcgacagtttcctgagttcccttgggcttgagaagtactcaattaccttccaggcagaagaggttgacatggcagccctaaggcatatgacggacagtgatctaaaagctttgggcattccaatgggtcctcggaagaagattatccttgccttggaatcgagagcataagggaatgacaagggagtacagtgtaggaaggtgggggatatgctaggcatgctcgtgtgcaagttcgacaaaaactttgtatccacatatcttggaaagggtacaacaacaatgattttatgggtctcttgtaacgcataccctgtcctgttgagcatgttcagcgaagtttaggattgctagaaggcaggccacggcgtctattgctgtaacttgtttccgtgttaattaagtggtgcggtatacatgttgaggcagttgggttcgtcttggaatgctatatcctataactacttgggtgtttggttcgaagaatgagatattacatcatcttctcacttttcactatttgtttggtttgtggaatggaatgagtttatccatcactccttactaactcattccttagttagtactaatataatgttat

SEQ ID NO: 4920 - DNA, 1549 bp, Zea Mays
cctgtccccgcctctgccaacgctcctgccccgcacacccacccgccgctcccgcgttgtccgcccccgtcatgaattgccctcttccatgtgcaccacagaaatctcggcgcgagatccccccgaaacctcgccataccctactgcgaggcgtaccattcggcagcgaggccctccttggcgggaacggcgtggtagtcatggaggctaagacgctccacctcgacgtgtgcgttgaaccacacgctgtgcttgtccttgcataacctggtgaggatttggccgcatcgtcccgctgagcatcacgtgcgacggcaggccctgctgctcccaggtgtcggtgcgagataggagagcgcgaacctggccgagctccatgtgaggcagtcccagggcacacgggcctcgcggtggcccaaggacgtcgggcggaagtcgcgccgagctacttccctgtctacgccaaggacgcccaacgcagagaagaggatgcccaccagcgacgtcccgtgctgcgaccgccacgcgaagaaggctgacggcatgccccgctccgatatgcccaacagctgggaccgggaaaaagacatgggacaaatagaagacatctaaagctttccaaggcagatgcctccagaggatatctactctctggtcatatgatcgatgcatagatcacttcagacaatcaaataacagtagtatacatagaaatgcaacattacatggaagcaaggtttatgatcagatttttgtataccagagaacactcaagtctcccaactgcccgcctgccgaggttggatgtggctccaccagctctgcctccctacttcctctactgctgcggctactgctacatcatctatcgtgcctgtttttctaggaatcttaatggcatcaggctggcattttgttcaactcattagctggttacagtaacaaggaaccaccattttaatgcaaaggagcagatgcgacaggatcacaagtaggaggagcggcgacgatgctgtagcgagagacacgggtgccaaggtcgttgtgctgcggtggtggcaggacaggaaggaaacgaaaaagcaggagccagggctgttcaacaacgtgaccgagtcgctgaggcgaggaagagtaaggtgaaggcactcgtcgacgcctttgagactgacagagcgtcatctcgctgcaggaaaccagcaagcctgctgctgctccagctatgaaagtaggtgtcgtgccatgagtgcttcttgacctgcagtgtgcatgatcacctttcttggaatttttggtcttttttggttgttagtgaccgtaaaagtggcgcttgttgaggtttgctcgttcccatgtaaactgagttttctcatgggagtttccatacttttgtagtgctagaaaaaaggaaagtctgtacaggttttgtgtctatgcaaggcttgagaagttggcattgtactgataagtgataagtaaacaagttattgtaatgatttaaactagattgttttgaaaggaaatggaatgcataaagcaaattaaactt

SEQ ID NO: 4921 - DNA, 581 bp, Zea Mays
ctagctcttacgggtaaattcaggtacccacccgtcaccactacggcactacccttcagccccagatttctccaagcctccgggacgaggcgcatccgtccatgggggccaaggcggcacaccggcgtggggtgctggacctggaggcgcagttcgccttcttccggtcgcagcaccggcaccccgtgaacgcggcggcgcacgtgctgctcacctggcccatcctcttcaccaacctcttgatcctccacttcctgccgctgccgctgcccgtctcccccgcgctggccctcgcgctcgcatacgccgccgcctacctcgctgtcgaccgcagagccggcgcagtcgcggggctgctcttcctcgccgcatgggccgccagccgcgccctcgcggcccgcctcggcttcgctctctcctggaagcttgtcctcgtcacgcagctcttctgctggacctggcagttcctcggccacggcctcttcgagaagaaggggccgagtgttagtgatcttcctgaggtgttcttgatggagccgttcctcatcttcctgcagcctccgctggttcttcgtgtgcac

SEQ ID NO: 4922 - DNA, 1058 bp, Zea Mays
acgggtaaattcaggtacccacccgtcaccactacggcactacccttcagccccagatttctccaagcctccgggacgaggcgcatccgtccatgggggccaaggcggcacaccggcgtggggtgctggacctggaggcgcagttcgccttcttccggtcgcagcaccggcaccccgtgaacgcggcggcgcacgtgctgctcacctggcccatcctcttcaccaacctcttgatcctccacttcctgccgctgccgctgcccgtctcccccgcgctggccctcgcgctcgcatacgccgccgcctacctcgctgtcgaccgcagagccggcgcagtcgcggggctgctcttcctcgccgcatgggccgccagccgcgccctcgcggcccgcctcggcttcgctctctcctggaagcttgtcctcgtcacgcagctcttctgctggacctggcagttcctcggccacggcctcttcgagaagaaggggccgagtgttagtgatcttcctgaggtgttcttgatggagccgttcctcatcttcctgcaggtaaccacaggcacagctgacaaacatatactgaacaaactgttcggctatgagccgtatcctgggttctgcaagaacgtggacaggaagatcgaagccgatctcagggcgagcgagagctcaagcagaggaaggacaacctgattgattgggaattcgggagtgatcctccggagcggtgcgcgaaattgtaccatctatacatgtagcatattgcctgccatttgtgttgttttattcaggtatatgatatctgcgcaccattatatagtgtagtaaacatcagtcatgtgtgttgaagtcagcttgaatcccgggaggaaggtagagagcggtaataatctcctcgtttactgccctataatttgctatgtttaaattactatgtttaagatgaactaaattttacatgatccaccccccttcatagaaaggggaggatgagtgtcaacacaaccaaacgacatttgggttatcatcggtagcatatctcttatcctagctaatctc

SEQ ID NO: 4923 - DNA, 1690 bp, Zea Mays
cgatcaagctcagagattatgatacaagcatgactggttcttgaacactatacaaggctttggagagatgggatgtgctgcttccaggttagaagatgaggaggctgtcaagatgtgccgggacagaagggacttgatcaagcaggcactggagcagcacaaccgatttgcatcttcccacattgcttacattgagtccctgaagcgtgtttcggtggctctccaacggtttgttgccggagatgatcaccatgagctaatcttcgatacattcatctcccctatcaagcaacagaagccagagatgcttggtctgccttatggttcatatgagaagagaactattcatgtttcaaggtacctgaggtcagggcctaacccatcagtgtccattgaggagcacccacgtccggtggaaacagtccgtgtcgagtcaaattaccctatggacaacgacagtggcatggtggatagattcctaccaacacactcttcaccagtgagatcgtcttcatactacccgccaccttataacaggccaagctacccacctccgtcaccccaggagcaggaatcatcaccgtgggacttcttctggaacccattctcatcactggacagctttacatatccccgccctcggagtagctatgacaatgtggtcactgatgatgaactcgtgaggttacaacgggtacgagaggaggaaggaatcccagaacttgaagaggaagatgatgagtgtcaagagcatgtacagatggacagaaaagaggaaaaagaagagcacgacaatgcagatgatgatgaagacgatgatgaagacgatggcgaggaatgtgagcattcagatgagtgtatggtttctaatgtgaattttgatgccaatatgaagcaagaaacaaagggatttgaatccaaaggtattcagtgtactgaagcaccagaaccttgcaagacagtagaacttgagataaaggcacacaagaaagagttgatgagaaacagagtagcaaatgcagaagaaactcctggtttcacagtatatctgaatcgaaggccagcaagcttggttgaggccatgaaggatatcgactgtcagttctcggggatatgtgacgctgctcggaaaatctcagtaatgttggaggcaagtagagctcagtactcaacctcaaacgatctttctgcgaagatgctgaacccagttgcacttttgcgttctgcgtcatcccgttcatcatcatctcgtttccttcttgctccctctagctcaatagatgatctctttaacaatgagactagcagctgctactctgaagaatcttgcagtaccatgtctggaagtcaccactctaccttggatagactctatacatgggagaagaaattatacaaagaagtaaaggcaggtgagcggttaagaatcgagtatgagaagaggctgacacatttgaggaaccaagatgtgaaaggcgaagaacctatctctgttgataagacttgtgcagcattgagaagcttgcatactcggctgaaggtgtcaatacacacagttcagtcggtatcaaggaggattgaaattctaagggatgaggagctgcatcctcagcttatggagttgattgtggacacggagacgatcagcaagcacgacgtgatcagggattttccttcgcatctcctgtag

SEQ ID NO: 4924 - DNA, 1141 bp, Zea Mays
tcgtgtctgtctcctggagccgcccgccgctagccgcccccgccacgtcacggccgcccccgcccgcccccggccccgaccccgtccgccgcggccgcccccggcctcgttctcctcctcgcaactctcttgtccatacatcgtagccgccgcctgtctctcaccgccgacatcccgacagctctcagcccagatcgagcttccccgttcccaaatcgggtcctggttgggctcccgccaccgcctccctacaccaggtgccaaggccttcgccgaccacttcgccggcgaagagcgcccaacagatgaatgtagcggtgccaccacaatctccacatcttcgtctatatgactgcgccaagagtgccatcatcaaaatttttgcctttccttatgctacggtatgtgacctgtattgcgatagtggaatggatacagacaagtggtgtgatgcccaggttggccactacataggcatcgatgcctctgcatcgggtgtcaactatgcccgtgagctatgggagaacaggaggaaacctttcactgctgaattcatcgagttggatccttctgatgatggttttgaagctcaagtgcaggaaaagggcatccaagcagatatggtttgttgtatgcagcacttgcagatagtcatgctttgagaatgaagaacgggcaaagaagcttctgaacaatgtatcatcacttcccaaacctggaggctacttctttggcataactccagattcatctacaatatggacaaaatatcaaaagaatgttgaggctgcacataataagggtttgaagactgttccaaatagcattcgctcagagaactataccattacctttgaagtcgaggaagagaagtatgagttgaaattgtatactaaatacacctagaaacttttgttacactgacttcctgaccatgtatgagatattgtctcttattagtactagatgatgagatgtgtctttttatgactatggatgagacttttgtgatgtaattgatgagactatggatttaaatattgttatgtgattgtgtgtgagatgttttatgtgaaaatatgttgtgctatatagctgttgatatatttgttatattatggaatatggtgtaaaataaaaa

SEQ ID NO: 4925 - DNA, 1165 bp, Zea Mays
tcgtgtctgtctcctggagccgcccgccgctagccgcccccgccacgtcacggccgcccccgcccgcccccggccccgaccccgtccgccgcggccgcccccggcctcgttctcctcctcgcaactctcttgtccatacatcgtagccgccgcctgtctctcaccgccgacatcccgacagctctcagcccagatcgagcttccccgttcccaaatcgggtcctggttgggctcccgccaccgcctccctacaccaggtgccaaggccttcgccgaccacttcgccggcgaagagcgcccaacagcggtgccaccacaatctccacatcttcgtctatatgactgcgccaagagtgccatcatcaaaatttttgcctttccttatgctacggtatgtgacctgtattgcgatagtggaatggatacagacaagtggtgtgatgcccaggttggccactacataggcatcgatgcctctgcatcgggtgtcaactatgcccgtgagctatgggagaacaggaggaaacctttcactgctgaattcatcgagttggatccttctgatgatggttttgaagctcaagtgcaggaaaagggcatccaagcagatatggtttgttgtatgcagcacttgcagtcatgctttgagaatgaagaacgggcaaagaagcttctgaacaatgtatcatcacttcccaaacctggaggctacttctttggcataactccagattcatctacaatatggacaaaatatcaaaagaatgttgaggctgcacataataagggtttgaagactgttccaaatagcattcgctcagagaactataccattacctttgaagtcgaggaagagaagtatgagttgaaattgtatactaaatacacctagaaacttttgttacactgacttcctgaccatgtatgagatattgtctcttattagtactagatgatgagatgtgtctttttatgactatggatgagacttttgtgatgtaattgatgagactatggatgagactaattttatgatgtaattaatgagactatggatttaaatattgttatgtgattgtgtgtgagatgttttatgtgaaaatatgttgtgctatatagctgttgatatatttgttatattatggaatatggtgtaaaataaaaa

SEQ ID NO: 4926 - DNA, 1209 bp, Zea Mays
tcaggcactccggcttgccatttccttcccatctcttgccggcccgggcacggtcagacggtcaccatccgcccgtgcggtggctcggcgcttcccgcgcccgcatcgaagccacccacaccatccacgcgtccctctccggctctccctctcatataccgccccttgcctccgcttcgcccgcccgcccgttgccgtagcttccgtccggaaccgccgcggccggcacgcacccacccgctggcctgacccgctccggcgcatgcggcgagacgccgtcgccgccgcgcccacggcggccggcgcctcgccgccgatccctgccaccgtcctcccgacggatgctgttgtcatcgatgtcgagggagagccgcttccggcggaggcccccgggctggggtgccggatctgccacctcggccctgaggacgatgagtcagcggtgccaggttccgaggtgatgctgctaggctgcggctgcaaggacgagctcggcgccgcgcaccagcaatgcgccgaggcgtggtttaggatcaagggcgatagttgccatgcaggcgctgtgaaatatgtggttcagatgccaaaaacatcaccgggttggaagtgaaaaaattcatggagcagtggcatggccgaagagtggcacacgcacaaactactgaggagagggaaagccattgttggagacagcagcccttctgaactcaaactggaaagtgcagggtcgatggctgcttggtagaagaacaattccagaagtatggggcacccagtttgacggtctggcatctcagccatttgggattcagaaatctttactattaattatattgctgtgatccttttgtcaatcagcttctttgccggttaactattttgttctgtgtatacgaggatataagcttaaatccgatgagatgcatgagttcagaggaattttcatgtagtttggcagagaataaggtctcacaaatgcattatatttatgtttggcccaatgaagcagccctttgaactgctctgtttacctttattatgagcctggtacatatttctcgaagacctcttgtacttctctttgcttatatgactcttcagtcatcattgctgccatgagagaggttattgtgttctgaaaatgaagagtgatgtgactaggatatatccaaatgtcactctctcccttaccagagatttaggactctg

SEQ ID NO: 4927 - DNA, 412 bp, Zea Mays
cagataaacagatgctgaatcagaaggagttgtagtcagacctggagcgacagtgaagtgtgacccaggagagttctggtgccatgtttcacaggctattccattattcccaaaagcagatgatttccagtgatggggatgaatgtgagaggtcaaatgaagaagatgaagactccaaaggacttctactcgaaagtgaagtagcattcatggactatgttagggaagttcgttattaggcaactgaattgtgggtttgcgtttactgctacaaacgggctctaaggcagcatcacaatgtccgatgcgtatttgattattgtgggttgttggaaagttgctgttttttctgctcaacagaatgtgtaattgagattttcttgaattagaaagttgttgttttgcaacgggt

SEQ ID NO: 4928 - DNA, 665 bp, Zea Mays
aggagttgtagtcagacctggagcgacagtgaagtgtgacccaggagagttctggtgccatgtttcacagttgttggtcttttaagatagcattacatgatagaaaggggaatgaggaggtgagagtttttgtgaaggttgatggaaaagagttttggattggaaaactatcagttgacaaataccctcagtgtaaaactagtttggtattcgagaaggagtcccggatcgatgggatcgaggaacgggaatgtgtattggacatccctaatgtttttttatcacttggcataaacaacatggtgattgatgtttcaaatgatgaatctgatgaggaggttccacaggctattccattattcccaaaagcagatgatttccagtgatggggatgaatgtgagaggtcaaatgaagaagatgaagactccaaaggacttctactcgaaagtgaagtagcattcatggactatgttagggaagttcgttattaggcaactgaattgtgggtttgcgtttactgctacaaacgggctctaaggcagcatcacaatgtccgatgcgtatttgattattgtgggttgttggaaagttgctgttttttctgctcaacagaatgtgtaattgagattttcttgaattagaaagttgttgttttgcaacgggt

SEQ ID NO: 4929 - DNA, 1253 bp, Zea Mays
aaaaacagtatccacactaatccacatcacaaaccccatcccaattcccaggccccgccgcgtgcttgtggccgccgccgccgccgccgcgagagagagagatgtcgctctgctgctgctgcagcaccgccaccggccgcggcgttctcctccctagcctcctcctcggccgacgccactggacgggtcaccacctcctcaacctccgggccaccacgaccgtcgtatcctcctcctccgcggccgccacctcctccctctcgccgccgcagcagcgccagatcaccgtctacgtggacactctccttgaatggaaccagagaatgaacctcaccgccgtcaccgacgaggccgaggtcatggcgcgccacgtggccgactctctcgccatgctgcccccgctggagcgtgtgtaccgcggccgttccacctccgctggtggcgctatcgacggagtcaggcttattgacgtcggctctggcgctgggctcccgggtctgatccttgccgttgcgcggccgagctggaagtttacgctgttggagtcgatgcggaagcggtgcacgttcttggagcatgctgttgaagccatgaacttgtcaaatgtggatgtggtgtgtgaccgagctgaggacagaaagttggccaaagtcttgatttcagagaaagttatgatatagtagctgcaagagccgttgctgaactgaaagttctagcggagtactgcatcccattggttcgcattggtggtttgtttatagctgcaaaaggacatgatccccatgaagaagtcagaaatgcagaaggtgcaataaagaaattgggtgcttcaatgcttgattgaatcaatgggacctcatggtcaacgaacagctgttctatacgtcaaagaacgtgccactccaaaaaagtacccgcgccttccaggtactccttccaaggcgccattatgaggagcatgtagactttttctatcaattaaagaccgataattgtgattgacctagttagtaggccgtcttgctttacaaggatggcagggtatcttggaatcgaatatctgctaagggtttcaggtatatctatgtatggctcatcgtgcttcgtgccaaacaagtttgtacaggaaagcctaaaaaacttttggttcgtgctatatcagtccgaagtgtaaaaacagtggctcaggctagcccgaaaccacgttataccttcgttgggtcatgccggttcaagtccggtccgtatatttg

SEQ ID NO: 4930 - DNA, 1288 bp, Zea Mays
cgcttctatgtaaaaacagtatccacactaatccacatcacaaaccccatcccaattcccaggccccgccgcgtgcttgtggccgccgccgccgccgccgcgagagagagagatgtcgctctgctgctgctgcagcaccgccaccggccgcggcgttctcctccctagcctcctcctcggccgacgccactggacgggtcaccacctcctcaacctccgggccaccacgaccgtcgtatcctcctcctccgcggccgccacctcctccctctcgccgccgcagcagcgccagatcaccgtctacgtggacactctccttgaatggaaccagagaatgaacctcaccgccgtcaccgacgaggccgaggtcatggcgcgccacgtggccgactctctcgccatgctgcccccgctggagcgtgtgtaccgcggccgttccacctccgctggtggcgctatcgacggagtcaggcttattgacgtcggctctggcgctgggctcccgggtctgatccttgccgttgcgcggccgagctggaagtttacgctgttggagtcgatgcggaagcggtgcacgttcttggagcatgctgttgaagccatgaacttgtcaaatgtggatgtggtgtgtgaccgagctgagaagaatctatctggacagaaagttggccaaagtcttgatttcagagaaagttatgatatagtagctgcaagagccgttgctgaactgaaagttctagcggagtactgcatcccattggttcgcattggtggtttgtttatagctgcaaaaggacatgatccccatgaagaagtcagaaatgcagaaggtgcaataaagaaattgggtgcttcaatgcttgagttatgtaatgttgaatcaatgggacctcatggtcaacgaacagctgttctatacgtcaaagaacgtgccactccaaaaaagtacccgcgccttccaggtactccttccaaggcgccattatgaggagcatgtagactttttctatcaattaaagaccgataattgtgattgacctagttagtaggccgtcttgctttacaaggatggcagggtatcttggaatcgaatatctgctaagggtttcaggtatatctatgtatggctcatcgtgcttcgtgccaaacaagtttgtacaggaaagcctaaaaaacttttggttcgtgctatatcagtccgaagtgtaaaaacagtggctcaggctagcccgaaaccacgttataccttcgttgggtcatgccggttcaagtccggtccgtatatttg

SEQ ID NO: 4931 - DNA, 1828 bp, Zea Mays
cctcgtccccatcccgcaaccgcaagcaaccaccgatccagcccgttcggcctttcggcgaatggtgacgaaccaggacgcggaggcggcatcggcggcagccccggggccaggggcgacggtggacccgatgcgcctagcgtcgcggtggcggtcccagacggagtgggaccgcgcggtgccggagctggaggctgagccggagccgtccgagctcaacaccgtcaacagttcgggactcttctccgtcgtctctacggacaagttgtccgtgaaatacctcggcagccatcaccacggccacgacgtcggtgtcgtgcaggccgaccgccccgctcccacgcgccgggccgtgtactacttcgagatggccgtcaggaacgcgggatacaaggggcagacatccatagggttcacgagcgagagcttcaagatgaggcgacaaccgggttgggagtcaaacagttgtggataccatggtgacgacggccacctttaccggggtctagggaaaggcgaaccgtttgggccaaaattcacatctggtgacataattggcgctggcatcaactacttgtcacaggagttcttcttcacgaaaaatggagctccggttggagccattccaaaagaaattaaaggcccactatatcctacaattgcagttcatagtcagggtgaagagttgactgtaaactttggaaaggaaccattctgttttgacattgagggttatattcttgaagagaaaatgaagcagcaatcggtgtctgataaattgaacttggagacggacatcagtcattggattgtccgctcatatctcctacattatggataccaagatacattaaatgcttttgatatggcaaatgcaactgacccccccaccaatcgccaaaatggtcatgcagaacctcccgaaacgtatggtcttagccacagaaaacttttgcgtcagcttatcatgagtggagatattgactctacattcaaaagacttggggagtggtatccacaagtgataaaggatgagaaatcggttatttgcttactactccattctcaaagattcatagaatatatcagggctgaacaactggaagatgctgtgcactatggtcgtgctaacctggcaagcttcttgacacacgaagcttttgagtggctgctgaaggatagtgtggccctgctggcgtacgagaagcctgcagaatcatgcttgggatacctgatgggctctccccagcgtgaattcgtggcagacgcagtgaacgcggctgtcctgtcgacgaaccccaccatgaaggaccctgagagctgcctctactcgtgtctcgagaggctactaaggcagctcacagtttgtagccttgagcgacgtgcattcaacaacgaccaaggagatgcattcttactccacaaagaaatgcaaaactatgaaaggtctaggcgctcatagcctcataggcatcaggattgttgcgcttctgaagtctgcagcgcccctcagctttcgcaagggtgagcaccgaattgcatggacacagctcaggcgcttcgggaggtgttctaacctctctgtaatcagaaaactcacagtgagataaagccaacgtttcagatttcccctattttgttggttggctaatatgctgtttgacactatgaatgctaaaaagtaaagacgcttcgacatatgcccctggtacaagatcttgtatcatgtcccacgccacgtttgtctacagcatggacatggtcatggagtcacgtacgaccaagcccgacagatatgctgttggcctggtttggtgacagcggctag

SEQ ID NO: 4932 - DNA, 2049 bp, Zea Mays
cctcgtccccatcccgcaaccgcaagcaaccaccgatccagcccgttcggcctttcggcgaatggtgacgaaccaggacgcggaggcggcatcggcggcagccccggggccaggggcgacggtggacccgatgcgcctagcgtcgcggtggcggtcccagacggagtgggaccgcgcggtgccggagctggaggctgagccggagccgtccgagctcaacaccgtcaacagttcgggactcttctccgtcgtctctacggacaagttgtccgtgaaatacctcggcagccatcaccacggccacgacgtcggtgtcgtgcaggccgaccgccccgctcccacgcgccgggccgtgtactacttcgagatggccgtcaggaacgcgggatacaaggggcagacatccatagggttcacgagcgagagcttcaagatgaggcgacaaccgggttgggagtcaaacagttgtggataccatggtgacgacggccacctttaccggggtctagggaaaggcgaaccgtttgggccaaaattcacatctggtgacataattggcgctggcatcaactacttgtcacaggagttcttcttcacgaaaaatggagctccggttggagccattccaaaagaaattaaaggcccactatatcctacaattgcagttcatagtcagggtgaagagttgactgtaaactttggaaaggaaccattctgttttgacattgagggttatattcttgaagagaaaatgaagcagcaatcggtgtctgataaattgaacttggagacggacatcagtcattggattgtccgctcatatctcctacattatggataccaagatacattaaatgcttttgatatggcaaatgcaactgacccccccaccaatcgccaaaatggtcatgcagaacctcccgaaacgtatggtcttagccacagaaaacttttgcgtcaggaaagtggcagttggtctttgctctcagctgccttgcaagcctgagctcttttatctttggatgtgcagcgcaaatatgttgtagtattacatttatccacatcattccactgtatcttgcagatgcagctgtatcttgatttgacattgccctcttttgatttttttggcctctggtatgccttcggccttctgaaaacagtttattttatttgataaagcttatcatgagtggagatattgactctacattcaaaagacttggggagtggtatccacaagtgataaaggatgagaaatcggttatttgcttactactccattctcaaagattcatagaatatatcagggctgaacaactggaagatgctgtgcactatggtcgtgctaacctggcaagcttcttgacacacgaagcttttgagtggctgctgaaggatagtgtggccctgctggcgtacgagaagcctgcagaatcatgcttgggatacctgatgggctctccccagcgtgaattcgtggcagacgcagtgaacgcggctgtcctgtcgacgaaccccaccatgaaggaccctgagagctgcctctactcgtgtctcgagaggctactaaggcagctcacagtttgtagccttgagcgacgtgcattcaacaacgaccaaggagatgcattcttactccacaaagaaatgcaaaactatgaaaggtctaggcgctcatagcctcataggcatcaggattgttgcgcttctgaagtctgcagcgcccctcagctttcgcaagggtgagcaccgaattgcatggacacagctcaggcgcttcgggaggtgttctaacctctctgtaatcagaaaactcacagtgagataaagccaacgtttcagatttcccctattttgttggttggctaatatgctgtttgacactatgaatgctaaaaagtaaagacgcttcgacatatgcccctggtacaagatcttgtatcatgtcccacgccacgtttgtctacagcatggacatggtcatggagtcacgtacgaccaagcccgacagatatgctgttggcctggtttggtgacagcggctag

SEQ ID NO: 4933 - DNA, 2058 bp, Zea Mays
cctcgtccccatcccgcaaccgcaagcaaccaccgatccagcccgttcggcctttcggcgaatggtgacgaaccaggacgcggaggcggcatcggcggcagccccggggccaggggcgacggtggacccgatgcgcctagcgtcgcggtggcggtcccagacggagtgggaccgcgcggtgccggagctggaggctgagccggagccgtccgagctcaacaccgtcaacagttcgggactcttctccgtcgtctctacggacaagttgtccgtgaaatacctcggcagccatcaccacggccacgacgtcggtgtcgtgcaggccgaccgccccgctcccacgcgccgggccgtgtactacttcgagatggccgtcaggaacgcgggatacaaggggcagacatccatagggttcacgagcgagagcttcaagatgaggcgacaaccgggttgggagtcaaacagttgtggataccatggtgacgacggccacctttaccggggtctagggaaaggcgaaccgtttgggccaaaattcacatctggtgacataattggcgctggcatcaactacttgtcacaggagttcttcttcacgaaaaatggagctccggttggagccattccaaaagaaattaaaggcccactatatcctacaattgcagttcatagtcagggtgaagagttgactgtaaactttggaaaggaaccattctgttttgacattgagggttatattcttgaagagaaaatgaagcagcaatcggtgtctgataaattgaacttggagacggacatcagtcattggattgtccgctcatatctcctacattatggataccaagatacattaaatgcttttgatatggcaaatgcaactgacccccccaccaatcgccaaaatggtcatgcagaacctcccgaaacgtatggtcttagccacagaaaacttttgcgtcaggaaagtggcagttggtctttgctctcagctgccttgcaagcctgagctcttttatctttggatgtgcagcgcaaatatgttgtagtattacatttatccacatcattccactgtatcttgcagatgcagctgtatcttgatttgacattgccctcttttgatttttttggcctctggtatgccttcggccttctgaaaacagtttattttatttgataaagcttatcatgagtggagatattgactctacattcaaaagacttggggagtggtatccacaagtgataaaggatgagaaatcggttatttgcttactactccattctcaaagattcatagaatatatcagggctgaacaactggaagatgctgtgcactatggtcgtgctaacctggcaagcttcttgacacacgaagcttttgagtggctgctgaaggatagtgtggccctgctggcgtacgagaagcctgcagaatcatgcttgggatacctgatgggctctccccagcgtgaattcgtggcagacgcagtgaacgcggctgtcctgtcgacgaaccccaccatgaaggaccctgagagctgcctctactcgtgtctcgagaggctactaaggcagctcacagtttgtagccttgagcgacgtgcattcaacaacgaccaaggagatgcattcttactccacaaagaaatgcaaaactatgaaaggtctaggcgctcatagcctcataggcatcaggattgttgcgcttctgaagtaaactcggtctgcagcgcccctcagctttcgcaagggtgagcaccgaattgcatggacacagctcaggcgcttcgggaggtgttctaacctctctgtaatcagaaaactcacagtgagataaagccaacgtttcagatttcccctattttgttggttggctaatatgctgtttgacactatgaatgctaaaaagtaaagacgcttcgacatatgcccctggtacaagatcttgtatcatgtcccacgccacgtttgtctacagcatggacatggtcatggagtcacgtacgaccaagcccgacagatatgctgttggcctggtttggtgacagcggctag

SEQ ID NO: 4934 - DNA, 2151 bp, Zea Mays
gaaaaacgcagcaatacagcaccggtatctccagcggctcggctgacggccctccactgtagtctctcgatcgagctcggctcggtcctcccctgcgaggttccccgtcttcgtccgcgctgcaatccaacctggcgccgccgaacccttctctcgcccggtgctgccgaagccgaacccttctctcgcccggcctgccgtagtcctccactccgccggatcctctctcagctcgagcggtcttggagatccgtccgtcccgggatcatttggcgcggaggtttggcctgggaaaatggcaaacatacgtgcacttctggtcggcttatcgcgggcaaggggatccttagcagaggctggacgatgtgcttccacgaggccatcaattctagcatctctgggcgcacattacaagatccccatgccagcccgctggttctcatctacagggcttcctccacatctggtggtcggaatgccagcactatctcctactatggtaacatcgcgaaatggagaaaacaggaaggggacaagatagaggttggtgatgtgatatgtgagatagaaactgataaagccactcttgagtttgaaagccttgaagaggggtatttggccaagattttagcacctgaaggttctaaagatgttcaagttggacaacccattgctgttacggttgaagacgttgaggatattaagagtataccagctgatacatctttcggtggtgaacaaaaggaagagcaatcaacagaaagtgcaccgcaaaacaaagtagttaatgtgtctgaacaaagctcaacagtgagccggatcagcccggcagctaaattactgatcaaggaacatggactggatacatcatcactgagagcatcaggcccccgtggcacccttctgaaaggggatgttctggcagcattgaagtcaggtatcaattcaagttcaaccaaagaaaagaagtctccagctcaaccttcgtctcagccaactcgagattcccaatctcaagcatcctctatttcacaaaaggatgatacatatgaagatattccgaatagtcagatacgcaaggtcattgccaaaaggttgctcgaatcaaaacagacgactccacatttgtatctatccaaagatgttgtgctggatcccttgctcgctttcaggaatgaactaaaagagctacatggcattaaagtttcagtaaatgacatcatcataaaggctgtggcaattgcgttgcggaacgtccctgaagcaaatgcttactggaacaatgataaggaagaaactcaaaagtgcgattcagttgatatatctattgctgttgctacagagaagggcctgatgaccccaataataaggaatgcggatcaaaagactatatctgcaatatccgcagaggttaagcagctggctgaaaaggcaagagctgggaagcttgcacctaacgaatttcaagggggaactttcagtatctcgaatcttgggatgtaccctgtggaccatttctgtgcaatcattaaccctccacagtctggcattctcgcagtgggtagaggaaacaaggttgttgaacctgttgtggacagcgatggaaccgagaaggctgctgcagttacaaagatgagcctgacactatctgctgaccatcgtgtatttgatgggcaagtaggaggcaagtttttcacggagctggcgctgaatttcagcgacatcaggaggctgctattgtaaatgaaaggaggcaattaccgtgttttgacgtattctttgggagcgaaaaccgctcaggaaaagagaacatttggatgcaacccgtggtctgctgcttgatcggcatcccgtacaaaagtaaccaattttgtaataaatttataataagaatgcactggcaccttcacggttttttaacccgttttccattagttgggaggaggcatgtcctgagaatttagcaggtacggtgccattcaacttcgtggttccgcaacaatgaccacccttagattatgcaatctgagcggttctggatggacgcccattttgttgatgaccttgtgatacatggaagtaataacagaatgcttttgttacatttcccccccaaatgcaacagtattctggttgctggtttattgttac

SEQ ID NO: 4935 - DNA, 996 bp, Zea Mays
atccacctgcaagcaagagactctgcagccatctgggcgaaaactcaagcacgcggcgatgctgcgccttcgcgcttgcggcggcacggcaccggcatcggtgcccgcgctcgtcaggtcccgcctctccaggagatcctcctccgcagcctacgccgccgctaccgtcgcttccgcttcctcctcttcgtccaccctggaagacctcgccgccgagcacagaggtttggcaaaggtcattttaaagaaggggaagacccaaatattccgagatgggagcccaatggtgtatagcggtgctgttaataggataatcggtcgacctcctccgaaatctggcgatattgttctagtagctgatggaacagagaaacctattggatggggtctctataactctgtgtctatgttttgtgttcggttgatgcagctagaagaagaggcaagaaggtgacatagagatcccacatgcgcacttaatatggaaagactgcttgaagcaaggatttcatccgctgttggtttgcggcacagtttgggtctcccttcagctgacacaaatgcttatcgcctcatcaacagtgaaggagacagattgtctggtctaatagtggacatctttgctgatgttgctgtcattgcttcatctgctgcttgggttgagaaatataggcaagaaatacaatttcttgttagcaaagttaatggcgtcagccatataaagtggaggccatcgacagatattttgaaagaagaaggattggatatatcagagcataaggagcctgcttcaacatgctcaactgtcaaggaaccaatgtgtctcttacggctttgctgccaatatggctgctgcttgctgaggaggagggccagctttgggcaatggctggagcgcgaggatctccttcttgttggcccttgttcctagtggctaggtcgttggtatatgtaagaaaaggtgtgtatgtcattttgtgatccaatggttgtgtg

SEQ ID NO: 4936 - DNA, 2361 bp, Zea Mays
gtcccgtcccgttctgcctccacacgccgccagaacgagaatccccctccccgtcccggcgtccccggctcccgagctccccctccagcctccccttccccggctcggccgcaccccgtccccggttcgttagagcgcgagcgcgcggcagccggccagccccaggcagccggcgccccgcggccaggttggctctcgctctcccctccggcacacctcgtccccggttgtccggctccggctccggatcagcagcgccccgagcacgagcgggaacgcgcgaacgccgggacgcggcagggtgcggcggggcggggcagctaggctctgaggcacggcagacggcttgcagtcaagatctctcaccagctgaattgccgattcacacatccagccatctcgacaacttgggtacacacgggacttcatcttaagagaatttagaacaaaaaagagagcatgtcagacctgcttcctgaagatgtacttgtcaacatcattggtcgtcttgcaccacgctaccttgccatatcccggtgcgtttgcaagacatggtgcaccaccattgatgcccataatctgctgcgtctcatacaattccaacttagaccctgcaatagaggaattggaatggccaccttcgccttgcatcgtacaagtgttgtcatcaaggacaaagttgtgggaggagaggttgtttgttcgagaaggagaggctgcaggtaatgtcgctgacattcggttggattttcaagctgttcaggagaatgctgtctattggcggggagtactttatgtaaattaccaatccaaatttattatgaggctatccaaaaacctttatttgggaaaatcagagaaaggggtgtactgtgctttgcgttatccgtcaaccgtttccttttcgatttacattctcgatgaatctgacggcaaaacggagtggataatgaagcctcactattatctcgggagtcaaggaattgacgggcctggaccctggactctacaagatatcaactataactgggacacccagtatgaagacagtatggaggaaaagttcgagtgggactccgacagcgataatgttgtcgagaacagaagcaacggtggatatccttgccttcctcgtatagaacttcttgggtttcacccctacaaggatgttgtcttcttgagcgacacgctgagacgaggattggcctatcacctagacagctcaaagatccaagacctgggtaacctccatccaacatattatggaactgaacaggggattcagccatttctactgacggctttcccatacacaccctggaggggatggtttccagaagacacataatggtacatacagagtaccgaacgtaagacataaagaaggcattagctgatctgaaaccgaagttctgaccgggcatggcgaaggtccctccttcacggtttcctgatgctgctgccgctctggatcgacagacttcagcttgagagtagtttagccagctgcttagcgccgtggacgtggggatggacacgtcgcattgcgcgcttagtggctggttttgtgcgttgtttggctaagtttttttttttttggttagaataaaagggagaagagaaaacactccagttgcgcagcaccaaaaccggttcaccactctcttgtcatttgttttgtttgttctcatcggggcgtgccaaaattttgctttctggcagctagcctagcggacccaatggtagattcatccttggggaggatggcagttagggaaaggttgtgctatgcgaccgtggagcgtggatgtggatgatgctggtaggcagaaaaaggtttcggagggcgattgggatcggttgcgagcgaccagattttgatgcgcaccccagcagcatctcagggcagcgtagtcggtctccgcccaaggcgatgcgatggtatttagggtcctaacgaattctgaacaagtatttgaatcataattcattaccacgtctagttctatccctccaactgaacaagacatatgctaagggaggtgcttggggccttcatctctgatagattcgagccttcaaccacagggtaaggtataaaatatcgatggatacattctcaaattggtgggatatcatgcttcaggaagggaagtagtagtagtagtcgagaagaagcggcctcaagacgacggtggtggaagagaattagatggaaatgtaccagcagttgacatagccattaaaattttcattttgcagcgcaatgtgatcccactgtcaccatggtctagcactctagctagtgcagggattagcagcgttgccatgccatcaccatcaatccatcatcatcatcat

SEQ ID NO: 4937 - DNA, 2492 bp, Zea Mays
atcgttcacccttacggcccaaaggttaagaagaggaggccagacgccgagtcccgtcccgttctgcctccacacgccgccagaacgagaatccccctccccgtcccggcgtccccggctcccgagctccccctccagcctccccttccccggctcggccgcaccccgtccccggttcgttagagcgcgagcgcgcggcagccggccagccccaggcagccggcgccccgcggccaggttggctctcgctctcccctccggcacacctcgtccccggttgtccggctccggctccggatcagcagcgccccgagcacgagcgggaacgcgcgaacgccgggacgcggcagggtgcggcggggcggggcagctaggctctgaggcacggcagacggcttgcagtcaagatctctcaccagctgaattgccgattcacacatccagccatctcgacaacttgggtacacacgggacttcatcttaagagaatttagaacaaaaaagagagcatgtcagacctgcttcctgaagatgtacttgtcaacatcattggtcgtcttgcaccacgctaccttgccatatcccggtgcgtttgcaagacatggtgcaccaccattgatgcccataatctgctgcgtctcatacaattccaacttagaccctgcaatagaggaattggaatggccaccttcgccttgcatcgtacaagtgttgtcatcaaggacaaagttgtgggaggagaggttgtttgttcgagaaggagaggctgcaggtaatgtcgctgacattcggttggattttcaagctgttcaggagaatgctgtctattggcggggagtactttatgtaaattaccaatccaaatttattatgaggatatcattgtcaaatgataaataccaagtaatcaagccacctgtagattttgaatggtttgaatttgaaaatgaatccaggctatccaaaaacctttatttgggaaaatcagagaaaggggtgtactgtgctttgcgttatccgtcaaccgtttccttttcgatttacattctcgatgaatctgacggcaaaacggagtggataatgaagcctcactattatctcgggagtcaaggaattgacgggcctggaccctggactctacaagatatcaactataactgggacacccagtatgaagacagtatggaggaaaagttcgagtgggactccgacagcgataatgttgtcgagaacagaagcaacggtggatatccttgccttcctcgtatagaacttcttgggtttcacccctacaaggatgttgtcttcttgagcgacacgctgagacgaggattggcctatcacctagacagctcaaagatccaagacctgggtaacctccatccaacatattatggaactgaacaggggattcagccatttctactgacggctttcccatacacaccctggaggggatggtttccagaagacacataatggtacatacagagtaccgaacgtaagacataaagaaggcattagctgatctgaaaccgaagttctgaccgggcatggcgaaggtccctccttcacggtttcctgatgctgctgccgctctggatcgacagacttcagcttgagagtagtttagccagctgcttagcgccgtggacgtggggatggacacgtcgcattgcgcgcttagtggctggttttgtgcgttgtttggctaagtttttttttttttggttagaataaaagggagaagagaaaacactccagttgcgcagcaccaaaaccggttcaccactctcttgtcatttgttttgtttgttctcatcggggcgtgccaaaattttgctttctggcagctagcctagcggacccaatggtagattcatccttggggaggatggcagttagggaaaggttgtgctatgcgaccgtggagcgtggatgtggatgatgctggtaggcagaaaaaggtttcggagggcgattgggatcggttgcgagcgaccagattttgatgcgcaccccagcagcatctcagggcagcgtagtcggtctccgcccaaggcgatgcgatggtatttagggtcctaacgaattctgaacaagtatttgaatcataattcattaccacgtctagttctatccctccaactgaacaagacatatgctaagggaggtgcttggggccttcatctctgatagattcgagccttcaaccacagggtaaggtataaaatatcgatggatacattctcaaattggtgggatatcatgcttcaggaagggaagtagtagtagtagtcgagaagaagcggcctcaagacgacggtggtggaagagaattagatggaaatgtaccagcagttgacatagccattaaaattttcattttgcagcgcaatgtgatcccactgtcaccatggtctagcactctagctagtgcagggattagcagcgttgccatgccatcaccatcaatccatcatcatcatcat

SEQ ID NO: 4938 - DNA, 3712 bp, Zea Mays
caaccacagtcacgtcgctatcgccagcgccaccagaaaaacgcatcccacgcagaacccctcgcactcctactccctctctgcctccctttcctctccttgtgcccgtcgcattgaaatggagcagcagcagcagaagcacttgcgccggtgctagctgcgacgtgagcccgcagcagccactgccaaggacttcctggcccgcccggcttcgctgttgccggaaaggcggtggctttgggggaagcaaaagcaagcgacggttgcggaaggttcttgcggattcgcgcgcgggaggaatggcagcgcggtcgtcggcggcagcggtggcggtgctgcttcttgcggctgcgggggctgcggcggcagcaggaggagcggagggcgatggggacggccaggcgctgatggcggtcaaggcggggttccggaacgcggcaaacgcgctggcggactgggacggcggccgcgaccactgcgcctggcgcggcgtcgcctgcgacgccgcctccttcgccgtcgtcggcctgaacctgtcaaatctaaacctcggaggggagatctcgccggctatagggcagctcaagagcctacagttcgtggatctcaagctgaacaagctcacaggccaaatcccagatgagattggggattgcgtctccttaaaatatttggatttgtcgggcaacttgctgtatggagacatccccttctccatctctaagctcaagcaacttgaggacctgattttgaagaacaaccaactcaccggacccatcccctccacactgtcacagattccaaatctcaagaccttggatctggcgcagaacaaacttaccggcgacatccccaggctcatctactggaatgaagtactacaatacctaggcttgaggggtaactcactgactggaactttgtcacctgacatgtgccaactgactggcctgtggtactttgacataagggggaacaatctcacaggaacaattccagagggcatagggaactgcactagctttgagattctggatatttcatacaaccaaatctctggagaaataccatacaacataggttaccttcaagtagccacactgtcacttcaaggaaatagactgattggcaaaattcctgaagtgattggcctcatgcaggctcttgctgtcctagaccttagtgagaatgaactggtggggcctattcctcctatacttggcaacctgtcctacacaggcaaactctatttacatggcaacaaactcactggacatataccaccagaactggggaacatgagtaaacttagctacctgcagctgaatgacaatgaattagtgggcacaatcccagctgagcttggcaaactcacagagttatttgaattgaatcttgccaacaacaatcttgagggccatatccctgcaaacatcagctcttgcagtgcactgaacaaattcaatgtgtatggcaatagactgaatggctctatccctgctggtttccagaagctggagagtttgacatacctaaacctttcttcaaacagtttcaaaggccagattccctctgagcttggtcacatagtcaacttggacacactagatctttcctacaatgaattctccgggccagttcctcctactattggtgatctcgagcatcttcttgaattgaatttgagtaaaaaccatctcactggatctgtgcctgctgaatttggaaacttgagaagtgtccaagtgattgacatgtccagcaacaacctgtctggctacctccctgaagaacttggacagctgcaaaaccttgatagcctgattcttaacaacaacagtttggctggggagatccctgctcagctggctaactgcttcagtttagtcagcctaaacctgtcatacaacaacttctctgggcacgtcccgtcatcgaaaaacttctcaaagttcccaatggagagcttcatgggtaatctgatgctccatgtgtactgccaagactccagctgtggacattctcatggaaccaaaggcttcgtcatattgctctgcatcgtgctgctggcgatatacaagaccaaccagccacagctacctgagaaagcatccgacaagccagtgcaagtgtcccaggaggactcatctatcactttccttgaccacattgcagggccaccaaagctggtggttcttcagatggacatggccgtgcacacgtacgaggacatcatgaggctgaccgagaacctgagcgagaagtacatcatcggatacggcgcgtcgagcaccgtgtacaggtgtgacctcaagagcggcaaggccatcgccgtcaagcggctctacagccagtacaaccacagcctccgggagttcgagacggagctggagacgatcggcagcatccggcacaggaacctcgtcagcctccacggcttctcgctctcccctcacgggaacctgctgttctacgactacatggagaacggctccctgtgggatcttctccatggcccgtcgaagaaggtgaagctggactgggacacgaggctgaggatcgcagtgggcgccgcgcaggggctggcgtacctccaccacgactgcaacccgcgcatcgtgcaccgggacgtcaagtcctccaacatcctgctggacggcagcttcgaggcgcacctgtccgacttcggcatcgccaagtgcgtgccggccgccaagtcccacgcctccacctacgtgctgggcaccatcgggtacatcgacccggagtacgcccgcacgtccaggctcaacgagaagtccgacgtctacagcttcggcgtcgtcctgctggagctgctcacggggaggaaggccgtggacaacgagtccaacctgcaccagctgatactctcgaaggccgacgacgacacggtgatggaggccgtggacccggaggtgtcggtgacgtgcacggacatgaacctggtgcggaaggccttccagctcgcgctgctgtgcaccaagcgccaccccgcggaccggccgaccatgcacgaggtcgcgagggtgctgctctccctcctgccgcccgccgccaagcctcccgcgtccaaggcggcggcggcttcggcggcggccggcgactacacgcgcttcctcgcgacggcggccgacctgaggcgcggcggcgtggccgacgacgacaccggcgacaacagctcctccgacgagcagtggttcgtgcggttcggcgaggttatatccaagcacacgctgtcatgatcgtccgtccgtccgtctccctaactcccccccagaaagttttctcccaagtagagatcgaagtgaaagcataggagcacagcgcaggaaatagacgtagggttatgttgtgaggtccgccgtagaatggagacgatgtccgttggttcaggagtggtccaaatggaaggagaggcgttggttactctgccgctgctgctgggacgacgcatttgcagtggttggtttggttgtccttgggtgtaatcacacggcggcacgacaggtgccccccccccccccccccgtccccgtgaacggacgtaagttttcttggatcctagcaggaaccgcattgaatcggaccatgcatcctgcctgcattggaccagggtcgttgtaaatgagatgcatcaccgtattattatttttggctgccatttatgagctgcaccgcggcttgctttcgt

SEQ ID NO: 4939 - DNA, 3733 bp, Zea Mays
caaccacagtcacgtcgctatcgccagcgccaccagaaaaacgcatcccacgcagaacccctcgcactcctactccctctctgcctccctttcctctccttgtgcccgtcgcattgaaatggagcagcagcagcagaagcacttgcgccggtgctagctgcgacgtgagcccgcagcagccactgccaaggacttcctggcccgcccggcttcgctgttgccggaaaggcggtggctttgggggaagcaaaagcaagcgacggttgcggaaggttcttgcggattcgcgcgcgggaggaatggcagcgcggtcgtcggcggcagcggtggcggtgctgcttcttgcggctgcgggggctgcggcggcagcaggaggagcggagggcgatggggacggccaggcgctgatggcggtcaaggcggggttccggaacgcggcaaacgcgctggcggactgggacggcggccgcgaccactgcgcctggcgcggcgtcgcctgcgacgccgcctccttcgccgtcgtcggcctgaacctgtcaaatctaaacctcggaggggagatctcgccggctatagggcagctcaagagcctacagttcgtggatctcaagctgaacaagctcacaggccaaatcccagatgagattggggattgcgtctccttaaaatatttggatttgtcgggcaacttgctgtatggagacatccccttctccatctctaagctcaagcaacttgaggacctgattttgaagaacaaccaactcaccggacccatcccctccacactgtcacagattccaaatctcaagaccttggatctggcgcagaacaaacttaccggcgacatccccaggctcatctactggaatgaagtactacaatacctaggcttgaggggtaactcactgactggaactttgtcacctgacatgtgccaactgactggcctgtggtactttgacataagggggaacaatctcacaggaacaattccagagggcatagggaactgcactagctttgagattctggatatttcatacaaccaaatctctggagaaataccatacaacataggttaccttcaagtagccacactgtcacttcaaggaaatagactgattggcaaaattcctgaagtgattggcctcatgcaggctcttgctgtcctagaccttagtgagaatgaactggtggggcctattcctcctatacttggcaacctgtcctacacaggcaaactctatttacatggcaacaaactcactggacatataccaccagaactggggaacatgagtaaacttagctacctgcagctgaatgacaatgaattagtgggcacaatcccagctgagcttggcaaactcacagagttatttgaattgaatcttgccaacaacaatcttgagggccatatccctgcaaacatcagctcttgcagtgcactgaacaaattcaatgtgtatggcaatagactgaatggctctatccctgctggtttccagaagctggagagtttgacatacctaaacctttcttcaaacagtttcaaaggccagattccctctgagcttggtcacatagtcaacttggacacactgaatttgagtaaaaaccatctcactggatctgtgcctgctgaatttggaaacttgagaagtgtccaagtgattgacatgtccagcaacaacctgtctggctacctccctgaagaacttggacagctgcaaaaccttgatagcctgattcttaacaacaacagtttggctggggagatccctgctcagctggctaactgcttcagtttagtcagcctaaacctgtcatacaacaacttctctgggcacgtcccgtcatcgaaaaacttctcaaagttcccaatggagagcttcatgggtaatctgatgctccatgtgtactgccaagactccagctgtggacattctcatggaaccaaaggcttcgtcatattgctctgcatcgtgctgctggcgatatacaagaccaaccagccacagctacctgagaaagcatccgacaagccagtgcaagtgtcccaggaggactcatctatcactttccttgaccacattgcagggccaccaaagctggtggttcttcagatggacatggccgtgcacacgtacgaggacatcatgaggctgaccgagaacctgagcgagaagtacatcatcggatacggcgcgtcgagcaccgtgtacaggtgtgacctcaagagcggcaaggccatcgccgtcaagcggctctacagccagtacaaccacagcctccgggagttcgagacggagctggagacgatcggcagcatccggcacaggaacctcgtcagcctccacggcttctcgctctcccctcacgggaacctgctgttctacgactacatggagaacggctccctgtgggatcttctccatggtgaggccgggttcctgagctctctttcttttttttttcttaattcatgtcgcttcgtccttccgataacccacgggccacggccattcccaggcccgtcgaagaaggtgaagctggactgggacacgaggctgaggatcgcagtgggcgccgcgcaggggctggcgtacctccaccacgactgcaacccgcgcatcgtgcaccgggacgtcaagtcctccaacatcctgctggacggcagcttcgaggcgcacctgtccgacttcggcatcgccaagtgcgtgccggccgccaagtcccacgcctccacctacgtgctgggcaccatcgggtacatcgacccggagtacgcccgcacgtccaggctcaacgagaagtccgacgtctacagcttcggcgtcgtcctgctggagctgctcacggggaggaaggccgtggacaacgagtccaacctgcaccagctgatactctcgaaggccgacgacgacacggtgatggaggccgtggacccggaggtgtcggtgacgtgcacggacatgaacctggtgcggaaggccttccagctcgcgctgctgtgcaccaagcgccaccccgcggaccggccgaccatgcacgaggtcgcgagggtgctgctctccctcctgccgcccgccgccaagcctcccgcgtccaaggcggcggcggcttcggcggcggccggcgactacacgcgcttcctcgcgacggcggccgacctgaggcgcggcggcgtggccgacgacgacaccggcgacaacagctcctccgacgagcagtggttcgtgcggttcggcgaggttatatccaagcacacgctgtcatgatcgtccgtccgtccgtctccctaactcccccccagaaagttttctcccaagtagagatcgaagtgaaagcataggagcacagcgcaggaaatagacgtagggttatgttgtgaggtccgccgtagaatggagacgatgtccgttggttcaggagtggtccaaatggaaggagaggcgttggttactctgccgctgctgctgggacgacgcatttgcagtggttggtttggttgtccttgggtgtaatcacacggcggcacgacaggtgccccccccccccccccccgtccccgtgaacggacgtaagttttcttggatcctagcaggaaccgcattgaatcggaccatgcatcctgcctgcattggaccagggtcgttgtaaatgagatgcatcaccgtattattatttttggctgccatttatgagctgcaccgcggcttgctttcgt

SEQ ID NO: 4940 - DNA, 5280 bp, Zea Mays
aatcaatctgccggcggccggctgttgtccgagcgaccggcgcatggcagccaccgtgcgtctctgtccggtgggccgcggcccgcggcccgcaaaccaatgcccgagcacctcccctcgcctctacccgagcacctcccctcaagagcgcctccctcgccggagtcagacacgcctccccccgccgcgcgcatctctgcctaagcgccgctccgcccctcccctacgagagcactcttcgcccaaggttgcaggctgcagccaccaggcctctacggtggaggagaagaatggaggatgctgccaaacggttgagatgagactccgcttcacaagacagtctccacggtttctctgcaatgggtagctcactgcagtctgatggaaattggagagatgcctgctgcttggacccttccctctgcaccaacttgacaatcccacaaatttgcatggtgagttggtgacctcaccctgcaagttgcacgtgccagcggggaattccccaagtatcacctctgtctccgctggatccatcagtgttcagtgaggctatttgtggtgatggcagcgtgggacgtcatttctttgaaccgcatgatcactggtttcattcgagatggtaccagcaaccgagcacttgtagtttacaagtggatggttgcttcaggcctgagagagacccctcacaccttctctgcagttctcggtgcgtgcaacagctgcgaggggctgcaactgcatggccgggtactggcattgggcctgcgctccaacccgttcgtcatgtctgcgttggtcaacctgtatatgcgcgttgaaacaccttgtgctgccctcctgctgtatgacgagatgccattgcagagcacagccatgtccaacgctgttctgggtggcttgtgcaacctgaagttggccgaggacctcttccgatctttgctagacatgagacggcgtggtctggagttgaatggcctttcctactgctacgcgatgaaagcatgctaccaagatgaggactggctggaacaaggcaggcagctgcacggagtggttctcaaggcagggtgggttccgtcgaacattttcctgtcgaactcgcttgtggatctctacgcagcaaccggagacttggtggacgctaagagttctctcgatgacatcccttctgaggacgtcatctcgtggaactccatcgtctctgtctgcgcgagcaaagggcgtacgaaggaagcaactggttacttgaggcagatgctttggcacggcaagacgccctcagtccgctcctttgttgggctcttcgccttatctggtcagaccggacacctccaagttggggttcagatgcacggtatcgctcttaagctcgggttcagctggagcagcgcgcacgtccagactgcactcattagcatgtatgggaactgctgccattttgattgttgcttggcaatcttcaacgaaaccccaagccttgcactggagtgctataatgcaatgatcacgtcatcaattggctgcaaggttttccactccgcgctggaggtcttgtactgtatggttgtcgagggagttatgcctgacaacgtgacgctatctgcgaccatgaaggccatatctttgtcagcttcgccgagtctaatcagctgccagatgctgcattcctgggtcttcaagctgggcttcgaagcggacatggttgtgtgctcctccttgatcagcgcatacgctcgagccggtcaggtgcacagctcccgctcggtgttcgaaagcctgcggagcccaaacgtcgtctgcttcacttcgatgatatctgcgtgcgcgcgacacggagatggcgcaaaaggagtggagctgctcagggagatggtttgtagggggctcaaacctgatgacgtcaccttcctgtgcgcgatcactggatgtgatcaggcaggactgattgaggaaggcaggctggtgtttgagtttatgagagcgacccgcgagctgggccctgacgagaggcacttggcctgcatggttaaccttctcggccgagacgggtttgtggaggaggcgatgaaggtgatgatggagcagcactcgccgctgcggcactacaccaaggcgtggagctcgctcgtccagagttgcaaggcacatggcgaagacgcgctgggaaggagagcggcagatacgctggtagacatgggacgagaggacgcggccaccagcttgcaggtgtcgagatacttctacgagattggggacggcgagaatgtctcgaggattaaaggcatggcaagtgggcaacgggtgaaggagatcagcggtcgcagctcggtcgagatcggccacggaataatctagcagccgaggttaaagaacggtatggattgttcaattccgtagttggctggctggttggttggttcacaatgtttaatatacaactgatggtctgaacggatgggagataggaaataccaaagtagaatctctttaggtggatcggggaattgttgtgtttagtactcatcaatatgtgattatcgaagcttcacaacttgaacatgataacaatttctggtgaaaacaatcgagttccaattcaaccacatactgcttggttggttggttcacaaagtttgagctggtactggcaacctacgcatcgcaggaggaaaggccatgctgccagcgtactaggtctggggcacaagctctccttgctccagatctgaatcttgggcaaggcacatgttgtctgtgcaggcaggctggtctcattcgtctttcctatcgtcttttcggacactgcttgctctcacaatctggggcccgtcgaatgtctctgcacttggcagcaacaggatggtgcccctcctccctgtactgtacttacgtggatgcgaagtgcaactgtgcagtgcagtttcctgaaagcggaaaaggccaaaccgggtggtgcaaatgtgtaaacagagtgtagtttgaaacaaggagtcaaatatgtgttagggcagtgatgctgttggagataaacttaagcatgcagtatagatatacgatgatgctgatggtggtgcgtctttgtatattttattttatttgtgctccccaccaccaccaccatcacacacctacctaccaccagttgccatccatccaatcatgcagtgacactaatagctgttatacaaagacgaaaacacactctgttcctgttagttacttggtaaactgaagttgggtttaggactctgagctgggctggtacagtgacatgataaaccaccagtaaatggcctgaaatgaaaagacagacagcgcatggatacccaactgtgtggcacaaacaagcagtgaaacaatgtgaatcaggaaacaaaagagaagaaaagaaaataaaggagaaagattcagtggtggtgctgggtgcggggtgtatcaaatatttccctgagccccggataaccggattccagagcggcggcctgcgacaggaacagtgggtggggccgggagcgcctctcgctctccactaccagtccaccacctcgctcgcagctctttcctcctccttttccttccttttttctttttttcccagcccacctcgctcgctcccttcccttcccagtggaagtggattggttgattgatcgcacagagctcgcctcacatccacacagcccgagctgctgcccgcccacccgcctgtagctcccctcctcacggagcaggcaggcaggcaggctgggattcccgtcgaagcagggcaggagctagggcgggtggaggagcctttgcccgggaacgaggagaggaggtggcagtggcaccccgcggctagggcagcgagagaggggcgaagaggaaggcggcgggcgcgtccgccatggctagcgaggaagtactccacaaggtccagaatcttatagagcgctgccttcagatgtacatgaacaagaaagaagtggttgatgccctctcccaccactccaggatagagccttgtatcactgaacttgtttggcaacaacttgagcaacagaatcctctgtttttcaaagcatacgatatgaggctaatgcttaagaatcaaataatggtcttcaacaggcttctccaggatcagttcgagattatgaataaagagttttcttcagggatcccttctatgtctcttcctaatgactctaattccaacctattgaagcaagattcatgctttttgccagagactgctcctggaaatgcaatgccagatggtataatgcacaatggaagttcaagtggtataataaatgacacaccatctggcgatcagttacttaatgctagtaaagacttgcatggccttcatagtcaaatagatgcttcaactagtctacagtcagaccagaatgcaactgctgtgctgtatggtgtagacaacgagacaagcgcaacaataaagaccgagtcttgctactcgagtaatgctgattttgccttctgtgggaacactttcctggaatcatgccagtcgataggtgatgcatctggtggtggatccttcagcagctcagagttgaatgggcaaccactaaacgattcaattttggatatggagtcatcatcatttagcttcttgaaccaaatgccccaaagcttcatgttttcagacctggcagatgatttcaaccaaaatgcagaaataacaccatttctcactcctgagacaaatttctccgattcaacagggggagaccatacaggttgagcgggtcatgcacagcgtaccaaccatttgtacataggcacatgggcagtcgaatctgcattggtgaagaacttgaggaccttttgatctagcttgtttatttctctagtttttgcgtcttgatattgtggtagtttggggcttcgggtctggtgggttgtctagcccatcagaacgcgtaatgggtacggagtattggtcttccagtatgttttcagcgttaatttggctaatttcccccgcttggcttgtacaacaaattttatcagtactgagtaccatgagttgtactgctgtatatgctgcttcccactctctgaattggcagaatgattgatgagaagacactgcttggaggagttgcctcagtttcacactgcatgtatgcagcaagttttggacaagaactcatcagctgcttggaatttcaatagtaaacacctggacacaaaatacaacacaactacatttcctatttactgtgataacagtctaaaaaaatcatccagtttctttgacgagaa

SEQ ID NO: 4941 - DNA, 5598 bp, Zea Mays
aatcaatctgccggcggccggctgttgtccgagcgaccggcgcatggcagccaccgtgcgtctctgtccggtgggccgcggcccgcggcccgcaaaccaatgcccgagcacctcccctcgcctctacccgagcacctcccctcaagagcgcctccctcgccggagtcagacacgcctccccccgccgcgcgcatctctgcctaagcgccgctccgcccctcccctacgagagcactcttcgcccaaggttgcaggctgcagccaccaggcctctacggtggaggagaagaatggaggatgctgccaaacggttgagatgagactccgcttcacaagacagtctccacggtttctctgcaatgggtagctcactgcagtctgatggaaattggagagatgcctgctgcttggacccttccctctgcaccaacttgacaatcccacaaatttgcatggtgagttggtgacctcaccctgcaagttgcacgtgccagcggggaattccccaagtatcacctctgtctccgctggatccatcagtgttcagtgaggctatttgtggtgatggcagcgtgggacgtcatttctttgaaccgcatgatcactggtttcattcgagatggtaccagcaaccgagcacttgtagtttacaagtggatggttgcttcaggcctgagagagacccctcacaccttctctgcagttctcggtgcgtgcaacagctgcgaggggctgcaactgcatggccgggtactggcattgggcctgcgctccaacccgttcgtcatgtctgcgttggtcaacctgtatatgcgcgttgaaacaccttgtgctgccctcctgctgtatgacgagatgccattgcagagcacagccatgtccaacgctgttctgggtggcttgtgcaacctgaagttggccgaggacctcttccgatctttgctagacatgagacggcgtggtctggagttgaatggcctttcctactgctacgcgatgaaagcatgctaccaagatgaggactggctggaacaaggcaggcagctgcacggagtggttctcaaggcagggtgggttccgtcgaacattttcctgtcgaactcgcttgtggatctctacgcagcaaccggagacttggtggacgctaagagttctctcgatgacatcccttctgaggacgtcatctcgtggaactccatcgtctctgtctgcgcgagcaaagggcgtacgaaggaagcaactggttacttgaggcagatgctttggcacggcaagacgccctcagtccgctcctttgttgggctcttcgccttatctggtcagaccggacacctccaagttggggttcagatgcacggtatcgctcttaagctcgggttcagctggagcagcgcgcacgtccagactgcactcattagcatgtatgggaactgctgccattttgattgttgcttggcaatcttcaacgaaaccccaagccttgcactggagtgctataatgcaatgatcacgtcatcaattggctgcaaggttttccactccgcgctggaggtcttgtactgtatggttgtcgagggagttatgcctgacaacgtgacgctatctgcgaccatgaaggccatatctttgtcagcttcgccgagtctaatcagctgccagatgctgcattcctgggtcttcaagctgggcttcgaagcggacatggttgtgtgctcctccttgatcagcgcatacgctcgagccggtcaggtgcacagctcccgctcggtgttcgaaagcctgcggagcccaaacgtcgtctgcttcacttcgatgatatctgcgtgcgcgcgacacggagatggcgcaaaaggagtggagctgctcagggagatggtttgtagggggctcaaacctgatgacgtcaccttcctgtgcgcgatcactggatgtgatcaggcaggactgattgaggaaggcaggctggtgtttgagtttatgagagcgacccgcgagctgggccctgacgagaggcacttggcctgcatggttaaccttctcggccgagacgggtttgtggaggaggcgatgaaggtgatgatggagcagcactcgccgctgcggcactacaccaaggcgtggagctcgctcgtccagagttgcaaggcacatggcgaagacgcgctgggaaggagagcggcagatacgctggtagacatgggacgagaggacgcggccaccagcttgcaggtgtcgagatacttctacgagattggggacggcgagaatgtctcgaggattaaaggcatggcaagtgggcaacgggtgaaggagatcagcggtcgcagctcggtcgagatcggccacggaataatctagcagccgaggttaaagaacggtatggattgttcaattccgtagttggctggctggttggttggttcacaatgtttaatatacaactgatggtctgaacggatgggagataggaaataccaaagtagaatctctttaggtggatcggggaattgttgtgtttagtactcatcaatatgtgattatcgaagcttcacaacttgaacatgataacaatttctggtgaaaacaatcgagttccaattcaaccacatactgcttggttggttggttcacaaagtttgagctggtactggcaacctacgcatcgcaggaggaaaggccatgctgccagcgtactaggtctggggcacaagctctccttgctccagatctgaatcttgggcaaggcacatgttgtctgtgcaggcaggctggtctcattcgtctttcctatcgtcttttcggacactgcttgctctcacaatctggggcccgtcgaatgtctctgcacttggcagcaacaggatggtgcccctcctccctgtactgtacttacgtggatgcgaagtgcaactgtgcagtgcagtttcctgaaagcggaaaaggccaaaccgggtggtgcaaatgtgtaaacagagtgtagtttgaaacaaggagtcaaatatgtgttagggcagtgatgctgttggagataaacttaagcatgcagtatagatatacgatgatgctgatggtggtgcgtctttgtatattttattttatttgtgctccccaccaccaccaccatcacacacctacctaccaccagttgccatccatccaatcatgcagtgacactaatagctgttatacaaagacgaaaacacactctgttcctgttagttacttggtaaactgaagttgggtttaggactctgagctgggctggtacagtgacatgataaaccaccagtaaatggcctgaaatgaaaagacagacagcgcatggatacccaactgtgtggcacaaacaagcagtgaaacaatgtgaatcaggaaacaaaagagaagaaaagaaaataaaggagaaagattcagtggtggtgctgggtgcggggtgtatcaaatatttccctgagccccggataaccggattccagagcggcggcctgcgacaggaacagtgggtggggccgggagcgcctctcgctctccactaccagtccaccacctcgctcgcagctctttcctcctccttttccttccttttttctttttttcccagcccacctcgctcgctcccttcccttcccagtggaagtggattggttgattgatcgcacagagctcgcctcacatccacacagcccgagctgctgcccgcccacccgcctgtagctcccctcctcacggagcaggcaggcaggcaggctgggattcccgtcgaagcagggcaggagctagggcgggtggaggagcctttgcccgggaacgaggagaggaggtggcagtggcaccccgcggctagggcagcgagagaggggcgaagaggaaggcggcgggcgcgtccgccatggctagcgaggaagtactccacaaggtccagaatcttatagagcgctgccttcagatgtacatgaacaagaaagaagtggttgatgccctctcccaccactccaggatagagccttgtatcactgaacttgtttggcaacaacttgagcaacagaatcctctgtttttcaaagcatacgatatgaggctaatgcttaagaatcaaataatggtcttcaacaggcttctccaggatcagttcgagattatgaataaagagttttcttcagggatcccttctatgtctcttcctaatgactctaattccaacctatgtaagacctttctttccagccttatcatgggcagggattgctcataattatttaacttagtgttctgatttgccttccggagtgaagtgctgtaacaatctgatggaatataaggcgtacatgttactttgcaaagtgatttaaccattgtataagttcaacaaatctggcattcattcggttgaagttttgttttttctcatgagatctcattcacacctgcacaaatacactcctctttcacttgctaataaattcaccttttgctatctccctagtctggcactttaatttggccactttatttacttgtttcagtgaagcaagattcatgctttttgccagagactgctcctggaaatgcaatgccagatggtataatgcacaatggaagttcaagtggtataataaatgacacaccatctggcgatcagttacttaatgctagtaaagacttgcatggccttcatagtcaaatagatgcttcaactagtctacagtcagaccagaatgcaactgctgtgctgtatggtgtagacaacgagacaagcgcaacaataaagaccgagtcttgctactcgagtaatgctgattttgccttctgtgggaacactttcctggaatcatgccagtcgataggtgatgcatctggtggtggatccttcagcagctcagagttgaatgggcaaccactaaacgattcaattttggatatggagtcatcatcatttagcttcttgaaccaaatgccccaaagcttcatgttttcagacctggcagatgatttcaaccaaaatgcagaaataacaccatttctcactcctgagacaaatttctccgattcaacagggggagaccatacaggttgagcgggtcatgcacagcgtaccaaccatttgtacataggcacatgggcagtcgaatctgcattggtgaagaacttgaggaccttttgatctagcttgtttatttctctagtttttgcgtcttgatattgtggtagtttggggcttcgggtctggtgggttgtctagcccatcagaacgcgtaatgggtacggagtattggtcttccagtatgttttcagcgttaatttggctaatttcccccgcttggcttgtacaacaaattttatcagtactgagtaccatgagttgtactgctgtatatgctgcttcccactctctgaattggcagaatgattgatgagaagacactgcttggaggagttgcctcagtttcacactgcatgtatgcagcaagttttggacaagaactcatcagctgcttggaatttcaatagtaaacacctggacacaaaatacaacacaactacatttcctatttactgtgataacagtctaaaaaaatcatccagtttctttgacgagaa

SEQ ID NO: 4942 - DNA, 1231 bp, Zea Mays
ttaaacttcatttgaaattctttcacgcttgcgttgcacgtgtctctctgtggcctggcatcgtggcgcgtggctggtgtcgtcgttcacgccgctcaccacgagccttgcttcttcacgtcacctcctcctcacacattttccctctcacctctcaatccatggacaccctccctgctctgatcccccccgatgctcgctgtgggtgccgtttgctgccccaacgccgttccgcgccccctccactccggccatgagctcctcccagtgaatccctctagtcccctgctcatctcccatggtggccgcagggagctctggatccatggccgtcggcctctgggcgtgagcagcccttggctctctcccctgcgacagacttcctccacggtgtctttttccccaaccatggtggccggctccctgctcctccattcggtgcccctggttcagggccggtcgacctccggcgacctcctccccatggcacagcaggccgacgcccctgcctctactccatcttccccattggacagcacgagctcctcctcgccgatacgccagcaaccctgcagcagcgccactcgatctcctctatacgtgaacaacagcaacccggatcccatccacgtcgtatgcgtcgatccgatctgtgcagtcccaacccacgacgtcgcaacacccttgccctccgtcgatgtcacgcttcgctcatcgctcctcgacgaagagccgtaaccgtggtagacatgcatgtgcgatccgaactgatttcaccaggtacgctagctgaaaatcgtgctaagcgaagggtgtggatcaaaacaacccacaagacgatgtcggccaatgagcctgaagatggatggactaagcggatgtcaaaacgaaagttgatcatcaagtggcattcatctaacaacactaacatagtgtttatcccaggcaagccccggtgcatttgccaccttcttgctgttttaaaaatattttatcacttatatgctgcattaggtggtaggagttgaatggttaaacctttgctgcataacttccttgaattattgattatcatccttgatacctgatttgaaaagctagatatgcttagcctgcttatagacaaggaacaaaatattttgatgtatgaatcatgtttttacaaggaaaaaggggctggaatgatgaaggtatcaaaggccttgatgacttcatcatttcagtagggtac

SEQ ID NO: 4943 - DNA, 2780 bp, Zea Mays
aatgaaacacacataacaggagaaaattagaggacttagttaagaatggacgacaaccactgctcaaatcatacaattaacagtgtactgactgaaattgcgcatttactgggattctagttctaaatttttctagtgaaggcgtgcaactacagatgtaacaaacaaataagctactgtgaaaacaatatgcatatgtgcacgcatcgagcaatgcacagacttcggaacttactcgatttggttcctgatcagaaaacaccatgcttatatgcattctctagactataagaaataccgctggactttgaaactcagttgggcggtatggtgtatatgaaccacatagcttttcaccagcggatgatgaatgaatgagaccgattgctaggactcccctcccatgaaacatgcatcaaacacactgatggatcagtacattacatccacatgatgctgctaacagtttcagttacgcaaacaaacctcgagtgcctgcgcaaggaaggagattttgccctcagcaaacagagggtccccggcttctcccagcggcaggagacggcagcttccctcccaacacggcgcgcagcagcaagcctcgatccagagcactccgaccagcacggcgagttggcagttccatcgcataaggggagagttgacatatgccgccgccggatattgaccaagcatctgccgatttgcgctgcaaaattagaacaaaaaaaaatcaatagatccttccgcggccgacgtaatataggacaatagatcccgtggtctgagccggccagggcaaggcaagtggactcgacaggcaggagaagcgtgagaaggaagcgggggtgctgacctgtagagtagagatgctcctcgtcaactggtgtcaaggccacggagccggcggtcggccgcggcccgtgtcggagagggatgaggtggttggatggagcggctcgcggacgggagtggccgacgacgagacgagtctgtgagggctgggcggcgaatggaccagctggccgagcccgagtcagcaattgttgggctgggcctgggcctgttgggcccaaatggacagcattttatcctctagcccactcccagggggtgaggaggaagagggctttacactgaaccccagcgacccaggcgtcagcggcgtgatgcagttcctccgaggcagcggcggcgggggcgggggcggtgggttcccgggggtggcgtgggaggtgttgcggcggcacttctctaagaagcggtccgtggacgtgaggcggatcaaccccaaggtgcccaaggaggaggccgtcgccatttccggccgactcctccagatcctctccgaccatgggcccctcaccgtcggcaacacctggaaccacgccaaggatgctggcatcgctggtctgaacagcaagacgcacatgaagatcctgctgaaatggatgacggggagaaatgtcgtgaagctgacctgcgtgcacgtgggcaacgcgaagaagttcctctactccccgtccactgaaagcagcagcagcgccggcgcatcaccgtcatccacatcggcctcgcagtgacgatttggattttctgttccacatgttttttctcgcacgatactgcaagcttctggaggagaactcatttagaggaagaactgccgactttttttacatgctcttgtttggtgctactgtcctaactagcattgttctgattggagggatgataccttacatttccgagacatttgccagaattctgttcctgagcaattcattgacgtttatgatggtttatgtctggagcaagcacaatcctttcatccatatgagctttctgggcctgttcacctttacggctgcatacttaccatggggtatgattgctggacatgtgtactactttctggaagatgtatacccacggatgactggccgccgtccgctgaagacaccgtccttcatcaaggcgctatttgctgatgacaatgttgtggtggcacagccacccaatgctgggattggtgctggtgcaaggtttggtgctatgggtctagatccccaggctcaatgatatgaattactttcagtgacctgaggctgtgactgatctgagatgcggcagtctgttcctctgcgcaagttgcggaactgtacaagtcattgttcttgtatttatacaggctagatgagaattcttgtgcataacaaaagattagtagtatccgaggcggccaaaagtttctcacctgttagcagggcccgaaggaaatggtttctgatgtgccaacaggccaaaacccctgtcgccgaaacttgttcttgcaacggtttaacatctgacctactactctttcatgcatcagtgagtttagtctaggaaactgttccaaccgaagttgaagtttgttgctttggcagcgagaatttgtatggagcgttatgatcgcagaattgtgcaaggaatggctcctaacattgtggatgcttggatggtggttcttttccctcctgatcatgttgtgctcatcgatgtggtctcctgcaaggcaagctgctatagaatactactggcggtttcattataaaacgtttcagttcaatgaaacagtatcggatgtataaataaaatgtttcagtttgatgaaacattatagtatatactcggtaagtcgttttagttttttttaagtacgtagatcttactatgcattagacatacactaactataaatctagaaaagcaagctaaatctgtcatccttcgacttt

SEQ ID NO: 4944 - DNA, 1892 bp, Zea Mays
acttccaatctctaccttgggcttccaaaaaaaatttgccgttcatccaagcaggccggtccctggcccacatgccgcgcgcacgcgcgcgcacacacgccgacacgcggcacggccagtagggcaggcgcgggccgtgtgtgtgagaaggagaggacggcaccgcgcagcgccgcagcccatccatccaatacgcccaccagccaccacacatcctctctcccttccagtcccaggagcgtggcctcactctcctcgtcgcatcccccctcctcatcttcgcagcgcgggcggcggcaatggcgatggcctccacctacgcgccgggcggaggcgcgcgggcgctcgcgcagggtagatgcagggtccgcggtcccgcggggctgggcttcctcggcccctccaaggccgccggcctcccccgccccctcgccctcgccaggcggatgagcagccccgtcgcggtgggcgccaggctgcgatgcgcggcgtcgtcgtcccccgcggcggcgcggcccgccacggcgccgcgcttcatccagcacaagaaggaggccttctggttctaccgcttcctctccatcgtgtacgaccacgtcatcaatccgggccactggaccgaggacatgcgcgacgacgcgctggaacctgccgacctcttcagccgccacctcacggtcgtcgacgtcggcggcggcacggggttcaccacgctcggcatcgtcaagcacgtcaacccggagaacgtcacgctgctcgaccagtccccgcaccagctcgacaaggcccggcagaaggaggccctcaagggggtcaccatcatggagggcgacgccgaggacctcccgttccccaccgactccttcgaccgatacatctccgccggcagcatcgagtactggccagacccacagcgggggatcaaggaagcctacagggtcctgagatttggtgggctagcttgtgtgatcggcccggtctacccgaccttctggctgtcccgcttcttcgccgacatgtggatgctcttccccaaggaggaagagtacatcgagtggttcaagaaggctgggtttagggatgtcaagctgaagaggattggaccgaagtggtaccgcggtgtccgaaggcatggcctcatcatgggctgctccgtcacaggcgtcaagagagagcgcggtgactctcccttggagcttggtcccaaggcggaggatgtcagcaagccagtgaatccgatcaccttcctcttccgcttcctcgtaggaacgatatgtgctgcctactatgttctggtgcctatttacatgtggataaaggaccagatcgtgccaaaaggcatgccaatctgagtgaagggaatgagctgcatggaagagaggatagccaacaccccgtgtaggagtctccgacaatagatgtgccctctaagagctaatttggtgagagctaatttggtgaaaattgaatagcaagaggattcctctcctatggatcctctcgtaatccttatccaccaaaccagactttaaagttttgttgcatggcctatgtgaccatagtcattttattaaggtgctgcattttgaacgaatttggttgtgtaatatttctacgaactaccagtgtatttgtatatattttctgaacatggccagatacattcatgataaacagccagatagttaggtgttaagtcctgcttgcatatctgtttgttgaagttgaaccgcagttcaaaatgttcgcttccatttatttatgtgtacttgtttcttactttttcctcactcttggtagtatcgggtactgcatagcaaatgaactgtaagttatccacattgacaaatatgatgatacatactgttgtagtattgtagcgtggattcgat

SEQ ID NO: 4945 - DNA, 1784 bp, Zea Mays
aaaccttgcgtgcgccaccgccaatggcagcaggaatcctctgatcctctttcccgcacatccaaagaggcgccgccgtcctctgaaaaatcctagccgctttctacatggccgagcccgccaaccggcggatggaggccgtccgccgtcacctccttctgccttcacccgcgccgcttcgccctaatccgttaagcagcctcgcggaggtggagcccagcccggtgatcattggcgggatggtgctggatatccatgccaagccttccgtgccgccccatcatggtaccactgtccctggaatggttaaatacatcagtggaggcgtagcaagaaatattgctgagtgcatgtcaaagcttgggacacaacccttcatgataagtgttgttggaaatgatttggcagtactggaggtcagctggattatgttcagaaggaattctgcaggttgataatgttgcaaccccagtagtatcaaatgtgtttgacggtactggagaattaatcgctggagttgcaagtgttcaagcagttgaaaattttattacttcgagctggatttatcacttccgtcatcatattgctaatgcaccacttgtaatgcttgatgcgaatttatctcctgagtcacttaaagcagcttgcataatggcatatgaatttggggtgcctgtgttatttgagccagtctcagtggtgaagtgtcgaagaattgcaccagttgcagaatatataacttgcacttcccccaatgaaattgagcttgttgccatggcaaattcattatctccatcagtgaaatataattttcacacaatagagcagttcaaggagaaagcagatactgttgaatatatttttcaaatgcttagcccagcaatgttcttcctacttgagaagggcatcaagttgcttatcgtgacacttggctcaaatggtgtttttatttgttgcaaagagcacactaacttcatgaaagaccagcacaagtgcaaacagacgcctttctccagacagctacttgaaaaaatggacgggtgttttccatcgaacaatcttgttaatttgtgcagagaaagctcttcaagaacatgtgtttttcatttacctgcaatatcggcctctgtgataagcctcacaggtgctggcgattgtttggttggtggtgccctttcagctctatgtgcaggcttcgatatcatccagagcgttgcagttggggttgctatagcaaaggcatctgtggaatctgaagccaacatacctgatgacatttctgctgcgagtattgcagatgatgcacaaagtgtattgcattctgctaaggtgctttggtgcaaatgaagaatagaaaaactaccatcccggtgtaaattgaagacagtcaggtgctattgaagctattgaactctgttactgttccaacggcacaagacggataagaatgaaatcgctatatatgatggatttttggttggaagaacagagggatcaccaatcagaattctttctactatagcatatatttttcatgtacattgtgggtgcaagttcgatcaagggagcaaattctgttgtatttttttagttagtgagattatgtgatgaaaaattggttagcgtcaaatttgcaattgcaaagtgactaatataatgacataatataatacactgataagatataattggttgcaagttcaaattcatcattgtgatgtagttatgatacaatttagggtgtgtttcgttgaactgtgattttttaagaaagctgttgtgtg

SEQ ID NO: 4946 - DNA, 1855 bp, Zea Mays
ttcgaagataatcagtacttttcatgcatgcttagaggcaccaatcatctgtgggagagaacccactgcaagtgcagaagaaaagaaattgggatctgagagatctgcagagcttagtgcaaaagtaaatcagtttatcttgagacgaacaaatgctctgttatccaatcacttgcctccaaagattattgaagtcgtttgctgcaagctgactcctttgcaaacaacactgtacaaccacttcatccattccaaaaacattaaacgcttgatatctgaagaaacaaagcaatccaaaattctagcatatattaccgctcttaagaaattatgcaatcatccaaagctgatctacgacaccataaaaagtaacaattcaggtgtatctggttttgatgactgtctacactttttcccgccagatcttttttcaggaagatctggatcatggactggcggaggaggaatgtgggtagagctatccggaaaaatgcatgtattagcaagattactggggcatctacgtcagaaaaccgatgatcgtattgttcttgtatcaaattatactcaggtcagacattggatctatttgttcaattatgccgggaaagaagatacccatatgttagacttgacggatcaacatccatcaataaaaggcagaagctggtgaaccaattcaacgatctatctagggacgagtttgtctttctacttagtagcaaggcaggtggctgtgggcttaacctggtaggtggaaatcgtttggttctcttcgaccctgattggaaccctgccaatgataagcaggctgctgctagagtgtggagagatggacagaaaaagagagtttacatatataggttcttaagcacaggaactatcgaggagaaggtatatcagcgtcaaatgtcgaaagaaggcctgcaaaaagttattcagcaggagcaagcggacaataaaatgcaggggaattctctttcaacagaagatctgcgcgatctttttatttttcatgaacatgtcaggtctgaaatacataaaaatttgaagtgtagccgctgtgacaaggatggagatccagctttggatggtactggttttgcagccactggtcataaggcttcaatacctggagtgcaagattatgctgatattggtgggtttggtgagatatctggatgtttgcagaaaatgaatagcacacatcagcagattggaagacctactgaagaagacttaggaagttggggacatcactgtgacccatcaactgtacctgatactatactgcagtgttctgctggcgaagaggtttcttttgttttcaccaatcaggttgatggaaaacttgttccagttgaatctatggtgcgatcagcagctcatcaacaaaacggaatagcagccaccggagaaaaaggagtgcagatacccaattctcctagcaaacctggaaagcaatccttaaatggcaagaatttgaagatgggatttcatttaaagaattcgtctttgaaatgttcaaccaaatccagaccatcaccaaattgcttgcaagggttgatgaaaaccagcccctttttggatcaacctcaaattaaaaagcttcatgttgcttctgatatatctgacgatgattttgtttgagtgtcaattcagaattacttagtctcatatatgttgatgtgctatctgttgcatatataatgccatcagctttgtcggtgcctattgcatcttttattcaggtttctacaattttcttttaataaaaaataggtcctaataaggtatgtacatagaaaagcaaaaactacttacaatttggaatggagtataaacaatcatttta

SEQ ID NO: 4947 - DNA, 5283 bp, Zea Mays
taaaaatctcgcctcacctctcgcagtccagccaaccccgtcgcccaccccaatctccacgcgtcgccgccgcttgccggcgagtctattcccctccgtcacgccgccgaggctacccggaccccgcagcggttcggataagactgccgcccgccgtccgccacctgccacccgccctcctttgactcccactactctcggccccgggaccgcttcggcctggatctagggttgtgtggggaggggttctggaagccttggccgcgatgggcgagtcagacgatgacgcccgcaccttcaaggtcgttttcaccaccaccggagaggagcagttccgggagctcgtgagggagaagctgcgcggattcaggaggggtctggacgacaccctcgtgaaaccataaggtcaaatccaagcggcaacggcagtaaggacatggcgacgagctgctgctgctggtgcatgttgtctgtggacatggacgacgatgtggcagtggtgcaagatagcttgccatcgttgatggctcgacgtgccatgcggcggctgtgaggagctgatacggaggggtgcgttgtcgtgcatcatgtcaataaagacgctgccatccacaaaggcggaggggatgatgtgctcgaggaggcgtgggatccatgatccagaggtagtacgtgaggtcctcgtctttatccaccacggaggagcgatggtcggggttctgttgccagcacctgcctcatccgcaaacttagtttctatctgtgcgcgcggaggtagagcgggcagaggagatgacgtgcggatgtctgtggcgccgatcgtggtattggtttgatagaaacagtagctggctggttcttgcgggttgttgcaggttcttactgttgtcgcgcgggcttgagcaatcaaaagatgtcgggccacaatgaagctgcagctctctcgcattggtcactaatgctgattttgtgggttgggttggtgggtacgttaacagcctgccccgcctgcacaagtttaggatgactgctatctgttttttttccaacttaatgtgctcactatgtacacttagatgcttataggtgagttcaactagtgtaatggactggtgcactattatgcaccaaactgttgtgtacggtatatactacatacttatgaagcctcttctcaaactgcgaatcaggatgaatatggaatgtttgtctaattgaagcatgccttagtttgtactggttcagtaactatcatgttacttggtgaccatttttatcaaactatagaatggatcttatttgttgccgcttcactacaacaacaacaaagtctttcagtcccaagcaagttggggtaagctagagttgaaacccaacatttgttgctgcttcactagtcaatatttatagttgggcatgcaaactttgtgaattagctgtctcactctcatgtgaacaaatgtacattacaaatcacaatcatcgaattgtttacccagttcaaaagtattgcatgttatcggtggtgttttttatgcaactgaaatgtaatacttatttcaagcacggtataccataccatccttgcatgttaacatatgctattgctacgagtctttgctgcattttccattcattacaattgcactattcatctacttttagccttaaatttatactattagtcaagagcacccaaacttccctaaaaacagtgctgtatgcagtttcactggtggaacaaagggaacctatgaaagaatctgccatctgccattatgcttttccctgtctttagtgaacaatcctggcctggtctttgtcttttctgaggaagcaccacattacgtgaattacattgtttatatgtatacttcctctgattgaaaatggatgtcattttatacttcctaacttttttaaaaaatgaccccactttccagtgtactataaataaagggcaacaaggtcattctactaacttccttaatccttgtgcgcaactctgaaatagcattgcattttgatttacggggagcaatacttttaattgccgtgttccatggttccatggtttaaaaggtgtcgcctaggcgacgcctaggcgtccaggcaccaaatttttctgggcgtcggcctcgccttgccctggtcgactaaggcgtccgactaggcgttgtaggcgttgccctggacgccttagccgttgaatagaaccgcccaatagtgtcttctcttctaaaaatctggcgccttccctggaaagttggtgctctttccttagaagcacgggagaactaaagaaacgagaaagagataaggaagggagagaaagagaagggagagggccagcaccagaacttggcggcgtggcacagcaccagatctgggtggcggcgcgacacagcaccagtaggtggtggtgcggcgagccagggcgcgacgcagcgaacaggcaagggcgcggcgcgcgcgcgacaagccagcaggcaagggcgggcaagcaggcaagggcgagcaagcaggcaatggcgcacgacgatcaagcaggattatgttaccatcatgctcaagaatggaaaaagtaaggatcatgccagtgaggaactccatgtatttctaggggatgatactgcagtattcatttcctggttgtggggccatctttcttcaaatatgcacttatatgtgcaaccacaagaacgaactcgggaggttaaggatgatgaggcccccaaagaagtatctggaagagaaaaatcatcagatgtgctcccgagaagcaaacatcaaactcattctgggcacacaattgaatcaagtgaagctactagtaggagacggagtaaccgggaatggaaagggattggtcggaagggtaatgaaaaatttccgcttcgaaatgtactaactgatattcttcatggggaggacaaaagatcgcaaaagtccaatgaagtacgaccccctccatcaaaacaacagaacgacaggaagcgtgaaagggatgatgagacacatcaaacaaagaaggactcctcatcacgctccatgcttggtgatggtgcttcccgtcgtcttctacagtttgctgtccgagatgctgtaaaagctgtacagccaaccagtacctctgctgaaccagcatccaagcgcctgtgctctgtggtcgccactacttctacagagcacatgcgtgataggagatcagaaagatctcaggactacctgaacgatagaagatcagaaagatctcaagacaacttgagtgacagaagatcagaaagaactaggccaatgctacaggtacatggagctgctttagctcttagagctgcagcggaagctgctgcagattctgcaaaggttagatctactggaagtgttttcaagcgattgggtcaagggaatgttgtgaaacagccatctcgttctcgtgaagagaagagagattatgaagattttgagccagttacgatcgcagatgaacatgattctgatcaatatgttaataatgaggaatccgaagaggaatctggagagctaaccatggcagatagggtagctggaagtggaatgtatgttgattcgagctctgaagatgatatggaccgagatgagggtattacaagataccaaacttctctttcacatgacgatactttctcaccatttgcagagaagaaaactgtatcggcaccatgcagtgttgaactagagactaatgcaataagaccttcaagtgtgaatgacgaggaacaacctgttccttcaacaccaacagcaagtaaagctgtcgctatttctgttgatgtaaatatggtggagcctcccagttatgcaacaccaaaagatgttcatgttgtggagaagccttatgttgcacccatgaattcaaatgccgccagtattgctaccaatgccaaagaattaggtcatgctgaagttcaaaaggattctcagcggtctgcaccatctgttccggtttcatatagcacagcgcatccgatggaggatgcagattcaagaacgctttatgttaacaatgttcactttgctgccaccaaggactcattatctcgccatttcaacaagtttggtgcagtgctgaaagtagtcattgtcactaatgccgcaacgggccagccaacagggtctgcctatgtagagttcttacacaaagaatcagctgaacgagcattgtcgttgaatggcacatcatttatgacccgtattctcaaggttgtccggcgaagttctcatgaagcagctcacttttatggttggcctggtagtggacggtcatcaatatatgggaggcatggtaggatggcatacccaagagctgttatccctggtggttcctttagagggcgtgctccgatgaaagctggtgctagaagtttacagtggaaacgggagccttcaggcactgattcaagtgcaggtgcgaaaactgacatgagtgtggcattttcctctgaacaggtgcttccacgtgcaacataggggagtatgttaccgctgagctgatataatgagaaccaagtggtatcccactcgtcgctcctggccctaatggctgaatatggacagcaagctgagaagattgttccttcctgctgcactgtaaaagaaaagtacaaaaaaaatgaaaaatataaaaatctaaaacaagagattctgggggagtttggcatcagattatggctatcattctggtgactggatttggtcctcttggccatatgcgagtaggctgacagcctgagcaattttctatggactccagcaatctgaaagaggattcacattcaaaataatcagagcttggatgtattggatggaagatgcttttcaagtagaacaagatgtgcagattttggaccaggtatttagtgacaatccgggcgtcatcgatgtaagcctcaactgtatagaagtaacctatctatctgtacccttgtgtgaatcaatctccttcccaacaaaaaggggggaaaaggcagcacaaaaaaatatgttctcttttgttttttcctctccatgaactgttttatttattgtactaatatagctgattattcagttggacattcatttttttgtcaaacagtttaacaatactttttttcctgtgtggtctacaattagattgaccgtgctacctgacttgcatttccaccatttcatgttttaagtttcaaaatccagtttactgtctgatcaatgcagtttaatctcgggatgtatttccatggttcgtgtacatctatggctggg

SEQ ID NO: 4948 - DNA, 6684 bp, Zea Mays
cgcaaatggtcacctaggcgcgcgaggccgacgcgccgctcgctccccacccaatgtcgcactgcccccgcgcctcactctccctcgcgccgccgtcgcccttcctcttcccccactgcccgtctccgcgccggcggcggcgcccgcgcggtcgcagcctccacctgacctcgcgccccctcctcaccctcgctcgcttcgacccgccgcggctgttccgcctcaaggtctccgactccagcgcctcccccggcgaggccgctcacgcccacgcccaccacagcaaccaccgcgcccacgcccaccacagccccgcgccgtcgctgctcccgtggccgcgggccctgatcggctcgctcgcgccggtatggcgggaggggctcttcctcgtgcgctgctccgtcttcgccgccgtggtctccgtcgccggcgcgctctcctggttcgcgcagctccgggcccgctccttcgtcgaggcccgcctcctgcccgctgcatgctccgcgctcagcgagtacctccagcgggaggtccgcctcggcaaggtgcgcagcatctcgccgatcgggatcacgctgcagacctgctccatcggcccgcacgaggaggagttctcctgcgccgaggtgcccgtcatgaagattagggtacgccccttcgccagtcttaggaggggaagggtcgtcgtggacgccgtgctgtccgagccctccgccctggtggcgcagaagaaggatttctcgtggctcgggattcccgcgccctctgagggcacggtcaagaggcactcgggggaggagggcatagactaccgcaccaagacgaggaggcttgccagggagaaggccgcggagcaatggaacgaggagagggataaagccgcaagggaagccgctgaaaagggatacaccattccgagcggccaatcggttcctctgtccagtaatgagattctggaggctgatgggcctaccgagattgggaagtccagtccacccctttgcgctgatcaaatgcacaagaatgatcatcacttggcaacaggcatcgactctggttcaaagcatgcagatttggagaaatcttttggcttcaaatcgcccattccagggatcaacctctggtctagggtgatttcaagccctagtaggctcaggtacatgagaaaggctcccagcaaggttattccagatgttgataattcttctcagcaaaggattcttagacgcagtgcagatgctgctgtatcatattttcagaacacaggtcacattaatattgatgattcatctcctggaccaggaaaaggctcgtcggatggtggtcatgccaatgttggtggcagtggaatcaattcaaatgatgaaactgtcagcaactctaagactgcatcaacgagtttggctgaatccccatcgcatagtcaactatctagtcagtgcagttcaagtaatttggataacttgttactatggcacaatttggaagatctgcagatcggtcaggccaagaatccttctggaaataagcctgttccacaccaagaaaatatttttgggaattttggttcatgcacacatgctcacaactgggtgccattttggccgttccaattaaagagttgtcctgtcagttttaattcaccttgggcatctctggaccttcaaattgagaaattgaagtcacaatttgccattggtcctggagatttctctgctgaacttacagaaggggttagtgagatccatcctggtggtgttcagaatgcacttccaatcaccctggattctgtgtatttcaatggaggtaacttgatgcttctgggatatggtgatcaagaacccagagaaatgaagcatgctagtggtcatgtcaagttcaaaaacaattataatcgtgtacacgtgcatgtaactgggaattgcatggagtggaggcaagaccgatcttctcaaggagggggttatctttctacagatgtatttgttgacatagctgaggaaacatggcatgctaatctcaatatagtcgatgcatttgccccgctgtttgaaagaattttagaaatacctgttgtttggcacaaaggaagagctaccggtgaggtgcatatctgtatgtcaaagggcgatagttttccaagcattcatggtcagcttgatgtgaaaggtcttgcttttcagatattggatgccccatcatcattttctgatattgtggcaaaattatcatttcgtggtcaaagagtatttctgcacaatgcaagtgggtggtttggtgacgctccagttgaagcttctggagatttgggactaaatcctgaggatggagagtttcatctaatgtgccaggttccatccgttgaagttaacgcacttatgaggacaatgaaaatgaaacctcttatgttcccattggctggttcagttactgctgtatttaactgtcaagggccccttgatgctcctgtttttgttggaagtgggattgtctcaaggaagtctttttcagtatctggtatgcctccatctgctgcttctgaagctgtgatgcaaaacaaagaggctggcgcagttgctgcatttgaccatattccattctctcatgtgtcggccaatttcacgttcaaccttgacaactctagcatgcctattggatggcggagaaattcgaggggctggtaacgcatggatttgcccagagggggagggtgatgattctgctatggatattaatttgtctgggactattctgcttgataaagtattgcatcgttacattcctggaggaatccaactgattccactcaagattggagagctcaatggagagactagactttctggttcccttattagaccgaagtttgatatcaaatgggctgcaccaaatgcagaagattctttttcagatgcacgtggcaatattgttattgcacatgattacattatggtcaactcttcatcagtctcctttgatttaaatagtcgagttcaaacatcatatattaatgactacttgttgaacaaggagacttatcaaatgaaaaaaatcatgccactaattgtggagggtgttgatttggatttacgtatgcgaggctttgagtttgctcatatagcctcttcaattccttttgattcaccacgtccattacatttgaaagcatctggaagggtcaaatttcaaggaaaaatcatgaaatctagcaatatagctgatggcaatatcaatggtgttcttcaaagtaacattgaccaaaataagcttgagaccaatgcgtcaaagcttgtaggcgacatatctctttctggaattaaactcaaccagctcatgctagcgccacaatctactggttttctttccatatcacgggattctatgatgttgaatgctactggcaggcctgatgaaaatttttctatagaagtgaatgggccattgcttttcacttcaaacgaggttattcaagatgtaaggcttctgtctatattcctccaaaagggccagctgagatctaatatctgttatcatcctgagaatttgaccagtctagaggttcggaatttgacactcgatgagctggagtttgcttcattgcgcggatttgttcaaaaggcagaacttcagcttaattttcagaaaagaagaggccatggtttgctgtcaataatccgtcccaaatttagtggcgtgcttggtgaggcacttgatatagctgctcgatggagcggtgatgttattactatggaaaaatctatcctggagcaagctaatagcaaatatgaggttcaaggggagtatgtttttcctggaacgcgtgatagatttcctgtggaaagtcagagtaatgggttcatagagaaagcaatgggagggcatcttggtagcataatgtcttcgatgggcaggtggaggatgagactagaggttcctggtgctgaagtagctgaaatgcttcctttagcaaggcttctttcacggagtacagacccagttatccgttcgagatcaaaggaactttttatgcaatgtctgcattctgttgggttcaatgctgaaagtcttaatgatcagctaaaggcattagaaatttatcatgattggttggatgatgacacaatggaagatatagcatttcctggcttagctgaactaagaggctattggcgtggctctctggatgccagtggaggtggcaatggggataccatggcagattttgatttcaatggtgaagattgggaatggggaacttacaagacacagcgagttctcgcatctggttcattcagcaataatgatggtctgcgtcttgataaattatttatccagaaagataatgccacccttcatgctgatggttcgattcttgggccgcttacaaatcttcactttgctgtgcttaacttcccagtcggccttataccagctttagttcaggctatagaatcatcaaccacagactcaattcattttctgaggcaatggttgactcccatcaaaggtattttgcacatggagggagacttgagaggtactctggcaaaaccagaatgtgatgttcaaataaggctgcttgatggcactattggaggcatcgatcttggaagagcagaagtattagcttctgttacccctacaagtcgtttcgtatttgatgcaaatttcgaaccgacaatacaaagtggacatgtaaacattcaaggtagtataccagtcacttatgtagacaacagctcgatagaggaaagtccagaagaggcagatgggaaacaaggtatcataagaatccctgtttgggcaagagacagaggatcatcgaatgagatcagtgaagcaagaatggtgagagacaagacagaggagggctgggaatttcaattagctgaaaaacttaaaggtttaagttataacatgctagaaccaggtgaagtgaggatagatgcagatataaaggatgggggtatgatgctgataactgcattgagtccttatgcaaactggcttcaaggctatgctgatgttttcctgcaggttaaaggcactgttgatcagcctgttgttgatggatcagcaacgtttaaccgggctattgtgaactctccttttcttcggacaccattgacaaattttgcgggtacaattcaagtcatatccaacagactatgcatcagttcaatggaaagcagggttgggaggaaagggagattgtcgatgaaaggaagcctacctcttaaaaatagcgagccatctgccaatgacaagattgatttgaaatgtgaagttctggacatacgagcaaaaaatattttgagtggccaagtagacagccagctacaagttacaggctcaattttgcgaccagatctttctggaatgatccggttgagtcatggtgaagcatatttgccccatgataaaggcaatggtgctgctgtcactaggttgacttcaaacaagtcgagttatcttctttctggttttgaccaatcaaccacttcgcaggatgtctcacgaattctggggtcactgtcaacatcggcagaaagagatcaatcagacacagaaaagactcttgagcatggaagttttaatccaaacattgatgcacggctaaatgatctgaagctcaccttgggaccagaattgaggattgtttatcctttaattctgaattttgctgtcagtggtgacctagagcttaatgggatggttcatccaaagtatctaagacctaagggcatcttaacatttgaaaatggtgaggtcaacctggtagctacgcaggttagacttaaaaatgatcatttaaatgcagcaaaatttgaacctgatcttggtttggatcctgttcttgatctcgttcttgttggatctgaatggcaattcaaaatccaaagtcgagcaagcatgtggcaagacaatctggtggtaacctcaacacgctctgtggaccaggatgttctgtcacctagtgaggctgcaaaggtttttgaatcgcagcttgcggaatcattattagaaggtgacggacagcttgcgttcaagaagcttgcaactgcaacgctggaaactttgatgccaaggatagaaggcaagggtgagtttggacaggcacggtggcgactggtttatgctccgcagatcccaagtttactctctgtggatccaacagttgatccgctaaaatctctggcaaacaatatctcttttgccacggaggtcgaagtgcagctcggaaaacgccttcaggcctctgtcgtcaggcaaatgaaagattcagaaatggcgatgcagtggacgctgatatatcagctaaccagtaggctccgtgttctcttccagtctactccatccaataggcttctcttcgagtattcagcaacatcacaggaatgattcattttttgttattgcgcacagcaagaattggttgtagcagctgcgtcgtacaaagattaggtggcctgataatcgttttttttgtagataagcaagctttgataagttgtacgtgtacaatcgctcagttgtattgtatttacattctttctcggaaacaaagtttctgagcctgtaaataataggtagcgatcttagcgtcgggtgtagagagaagtataaatgaatgaacgtttcctgtctcttgcgttgctgtccatacgtgaaattggctttcgt

SEQ ID NO: 4949 - DNA, 6704 bp, Zea Mays
cacgcaaatggtcacctaggcgcgcgaggccgacgcgccgctcgctccccacccaatgtcgcactgcccccgcgcctcactctccctcgcgccgccgtcgcccttcctcttcccccactgcccgtctccgcgccggcggcggcgcccgcgcggtcgcagcctccacctgacctcgcgccccctcctcaccctcgctcgcttcgacccgccgcggctgttccgcctcaaggtctccgactccagcgcctcccccggcgaggccgctcacgcccacgcccaccacagcaaccaccgcgcccacgcccaccacagccccgcgccgtcgctgctcccgtggccgcgggccctgatcggctcgctcgcgccggtatggcgggaggggctcttcctcgtgcgctgctccgtcttcgccgccgtggtctccgtcgccggcgcgctctcctggttcgcgcagctccgggcccgctccttcgtcgaggcccgcctcctgcccgctgcatgctccgcgctcagcgagtacctccagcgggaggtccgcctcggcaaggtgcgcagcatctcgccgatcgggatcacgctgcagacctgctccatcggcccgcacgaggaggagttctcctgcgccgaggtgcccgtcatgaagattagggtacgccccttcgccagtcttaggaggggaagggtcgtcgtggacgccgtgctgtccgagccctccgccctggtggcgcagaagaaggatttctcgtggctcgggattcccgcgccctctgagggcacggtcaagaggcactcgggggaggagggcatagactaccgcaccaagacgaggaggcttgccagggagaaggccgcggagcaatggaacgaggagagggataaagccgcaagggaagccgctgaaaagggatacaccattccgagcggccaatcggttcctctgtccagtaatgagattctggaggctgatgggcctaccgagattgggaagtccagtccacccctttgcgctgatcaaatgcacaagaatgatcatcacttggcaacaggcatcgactctggttcaaagcatgcagatttggagaaatcttttggcttcaaatcgcccattccagggatcaacctctggtctagggtgatttcaagccctagtaggctcaggtacatgagaaaggctcccagcaaggttattccagatgttgataattcttctcagcaaaggattcttagacgcagtgcagatgctgctgtatcatattttcagaacacaggtcacattaatattgatgattcatctcctggaccaggaaaaggctcgtcggatggtggtcatgccaatgttggtggcagtggaatcaattcaaatgatgaaactgtcagcaactctaagactgcatcaacgagtttggctgaatccccatcgcatagtcaactatctagtcagtgcagttcaagtaatttggataacttgttactatggcacaatttggaagatctgcagatcggtcaggccaagaatccttctggaaataagcctgttccacaccaagaaaatatttttgggaattttggttcatgcacacatgctcacaactgggtgccattttggccgttccaattaaagagttgtcctgtcagttttaattcaccttgggcatctctggaccttcaaattgagaaattgaagtcacaatttgccattggtcctggagatttctctgctgaacttacagaaggggttagtgagatccatcctggtggtgttcagaatgcacttccaatcaccctggattctgtgtatttcaatggaggtaacttgatgcttctgggatatggtgatcaagaacccagagaaatgaagcatgctagtggtcatgtcaagttcaaaaacaattataatcgtgtacacgtgcatgtaactgggaattgcatggagtggaggcaagaccgatcttctcaaggagggggttatctttctacagatgtatttgttgacatagctgaggaaacatggcatgctaatctcaatatagtcgatgcatttgccccgctgtttgaaagaattttagaaatacctgttgtttggcacaaaggaagagctaccggtgcatatctgtatgtcaaagggcgatagttttccaagcattcatggtcagcttgatgtgaaaggtcttgcttttcagatattggatgccccatcatcattttctgatattgtggcaaaattatcatttcgtggtcaaagagtatttctgcacaatgcaagtgggtggtttggtgacgctccagttgaagcttctggagatttgggactaaatcctgaggatggagagtttcatctaatgtgccaggttccatccgttgaagttaacgcacttatgaggacaatgaaaatgaaacctcttatgttcccattggctggttcagttactgctgtatttaactgtcaagggccccttgatgctcctgtttttgttggaagtgggattgtctcaaggaagtctttttcagtatctggtatgcctccatctgctgcttctgaagctgtgatgcaaaacaaagaggctggcgcagttgctgcatttgaccatattccattctctcatgtgtcggccaatttcacgttcaaccttgacaactctgttgctgatttatatggtattagagcatgcctattggatggcggagaaattcgaggggctggtaacgcatggatttgcccagagggggagggtgatgattctgctatggatattaatttgtctgggactattctgcttgataaagtattgcatcgttacattcctggaggaatccaactgattccactcaagattggagagctcaatggagagactagactttctggttcccttattagaccgaagtttgatatcaaatgggctgcaccaaatgcagaagattctttttcagatgcacgtggcaatattgttattgcacatgattacattatggtcaactcttcatcagtctcctttgatttaaatagtcgagttcaaacatcatatattaatgactacttgttgaacaaggagacttatcaaatgaaaaaaatcatgccactaattgtggagggtgttgatttggatttacgtatgcgaggctttgagtttgctcatatagcctcttcaattccttttgattcaccacgtccattacatttgaaagcatctggaagggtcaaatttcaaggaaaaatcatgaaatctagcaatatagctgatggcaatatcaatggtgttcttcaaagtaacattgaccaaaataagcttgagaccaatgcgtcaaagcttgtaggcgacatatctctttctggaattaaactcaaccagctcatgctagcgccacaatctactggttttctttccatatcacgggattctatgatgttgaatgctactggcaggcctgatgaaaatttttctatagaagtgaatgggccattgcttttcacttcaaacgaggttattcaagatgtaaggcttctgtctatattcctccaaaagggccagctgagatctaatatctgttatcatcctgagaatttgaccagtctagaggttcggaatttgacactcgatgagctggagtttgcttcattgcgcggatttgttcaaaaggcagaacttcagcttaattttcagaaaagaagaggccatggtttgctgtcaataatccgtcccaaatttagtggcgtgcttggtgaggcacttgatatagctgctcgatggagcggtgatgttattactatggaaaaatctatcctggagcaagctaatagcaaatatgaggttcaaggggagtatgtttttcctggaacgcgtgatagatttcctgtggaaagtcagagtaatgggttcatagagaaagcaatgggagggcatcttggtagcataatgtcttcgatgggcaggtggaggatgagactagaggttcctggtgctgaagtagctgaaatgcttcctttagcaaggcttctttcacggagtacagacccagttatccgttcgagatcaaaggaactttttatgcaatgtctgcattctgttgggttcaatgctgaaagtcttaatgatcagctaaaggcattagaaatttatcatgattggttggatgatgacacaatggaagatatagcatttcctggcttagctgaactaagaggctattggcgtggctctctggatgccagtggaggtggcaatggggataccatggcagattttgatttcaatggtgaagattgggaatggggaacttacaagacacagcgagttctcgcatctggttcattcagcaataatgatggtctgcgtcttgataaattatttatccagaaagataatgccacccttcatgctgatggttcgattcttgggccgcttacaaatcttcactttgctgtgcttaacttcccagtcggccttataccagctttagttcaggctatagaatcatcaaccacagactcaattcattttctgaggcaatggttgactcccatcaaaggtattttgcacatggagggagacttgagaggtactctggcaaaaccagaatgtgatgttcaaataaggctgcttgatggcactattggaggcatcgatcttggaagagcagaagtattagcttctgttacccctacaagtcgtttcgtatttgatgcaaatttcgaaccgacaatacaaagtggacatgtaaacattcaaggtagtataccagtcacttatgtagacaacagctcgatagaggaaagtccagaagaggcagatgggaaacaaggtatcataagaatccctgtttgggcaagagacagaggatcatcgaatgagatcagtgaagcaagaatggtgagagacaagacagaggagggctgggaatttcaattagctgaaaaacttaaaggtttaagttataacatgctagaaccaggtgaagtgaggatagatgcagatataaaggatgggggtatgatgctgataactgcattgagtccttatgcaaactggcttcaaggctatgctgatgttttcctgcaggttaaaggcactgttgatcagcctgttgttgatggatcagcaacgtttaaccgggctattgtgaactctccttttcttcggacaccattgacaaattttgcgggtacaattcaagtcatatccaacagactatgcatcagttcaatggaaagcagggttgggaggaaagggagattgtcgatgaaaggaagcctacctcttaaaaatagcgagccatctgccaatgacaagattgatttgaaatgtgaagttctggacatacgagcaaaaaatattttgagtggccaagtagacagccagctacaagttacaggctcaattttgcgaccagatctttctggaatgatccggttgagtcatggtgaagcatatttgccccatgataaaggcaatggtgctgctgtcactaggttgacttcaaacaagtcgagttatcttctttctggttttgaccaatcaaccacttcgcaggatgtctcacgaattctggggtcactgtcaacatcggcagaaagagatcaatcagacacagaaaagactcttgagcatggaagttttaatccaaacattgatgcacggctaaatgatctgaagctcaccttgggaccagaattgaggattgtttatcctttaattctgaattttgctgtcagtggtgacctagagcttaatgggatggttcatccaaagtatctaagacctaagggcatcttaacatttgaaaatggtgaggtcaacctggtagctacgcaggttagacttaaaaatgatcatttaaatgcagcaaaatttgaacctgatcttggtttggatcctgttcttgatctcgttcttgttggatctgaatggcaattcaaaatccaaagtcgagcaagcatgtggcaagacaatctggtggtaacctcaacacgctctgtggaccaggatgttctgtcacctagtgaggctgcaaaggtttttgaatcgcagcttgcggaatcattattagaaggtgacggacagcttgcgttcaagaagcttgcaactgcaacgctggaaactttgatgccaaggatagaaggcaagggtgagtttggacaggcacggtggcgactggtttatgctccgcagatcccaagtttactctctgtggatccaacagttgatccgctaaaatctctggcaaacaatatctcttttgccacggaggtcgaagtgcagctcggaaaacgccttcaggcctctgtcgtcaggcaaatgaaagattcagaaatggcgatgcagtggacgctgatatatcagctaaccagtaggctccgtgttctcttccagtctactccatccaataggcttctcttcgagtattcagcaacatcacaggaatgattcattttttgttattgcgcacagcaagaattggttgtagcagctgcgtcgtacaaagattaggtggcctgataatcgttttttttgtagataagcaagctttgataagttgtacgtgtacaatcgctcagttgtattgtatttacattctttctcggaaacaaagtttctgagcctgtaaataataggtagcgatcttagcgtcgggtgtagagagaagtataaatgaatgaacgtttcctgtctcttgcgttgctgtccatacgtgaaattggctttcgt

SEQ ID NO: 4950 - DNA, 940 bp, Zea Mays
gggaagagctgaacttcgcagagtggtggaggagatcaactaggagaattgataaatctcagaggaaatgtttcaatagcattgtggctctaggtcttcattgatgcttttctatatgtgccagtgtggattttatatctatagcatcggtgctcttgttgcttgggaaacccgcagaaaagattttgctgtaatgatgtctcatcatgtaataacatctactctaattggagtttcatatctgactggtcttgtagttttggacttattgctgttgccgttgcaatggcagctatcattccatcacattcttgaggaagctggatgaattcccaacaactttgtactacatcttgaacacaatgcttctcacattgcttgtattccatatgtactggtggaaactcatatgtttgatgataatgagacagctgaataataaaggacaagttacagacgatgtccgatctgattctgaggatgaggagtaatgggagattcattctttgacatctgcaacgtggcatttcctcgtcaatacttttctatgcctgcttccagaattgattgcttttaatcttggcaagtctcgggaacgtataggaaagtttaatctctgtatattgccttatgatatcaaacatggctagaccgggaatggatctatacatgatgacgggcatagctagcaagcttacttcaaggttccttaaaaaattttggttcacctttatttgatatggggaaagacatgagagggtgtacagctttttcctgaagcttgcagaacccccctctgtaccatgatcaatatacttcacttgtgagtagatttagttctaattgatgataataaattgattcttttgattgggaatgaatctcacctgaaccttaatgatctcatctgatgtgtattgagcattatgatgctatataa

SEQ ID NO: 4951 - DNA, 2034 bp, Zea Mays
ctcaaaagggtgagagatccaaatctccatgactccatcccatagccccgctcacgctgtcgctgtcacgcacatcatcgtcctcctcccttccccgcaggccccctcgcctcgcgcgtgcgccccccctaccccgtctcctccctgcctgcgcgagcgactagtagaaataggcgcgcgtgccgcctcggccgctcgctcctctggttaatcccccctcgccacgactcgcagccatcccttcacattatccgcgcgcgcgcgagcggacgtagcgtgtgggtagcgtcgccgtgcggacggtctcttggtgccggtgcgggccgcgtgacggtgcgtgtgccgcccgcggggaggaggtcgttcggttggttggccctcggcgacgatggcggtccacggcggagaggcggtctccgtcgcgctcctcttctccctcgctttcttctgcgctcgcctcctgctcgaccgcctcgtctacaaggtatacccccgtcccgacaccgccagattcgtgccgggttccgcgagatctctggtctccccggtttcgctcccacgccccaatgccccccggtcgcgactcgcgagtggcgacgcgggcgcggggcgtggtatccgccgccgctcgttgcaccttccttaccgatcagctgattccgctcgtccggcgggggatcatccgagtgcgtgtgacgtaatgctcccgccagtcgttaattgcgttactggtggctggctggccgctactctgttaaggaccaacggcgctggtgcggtttgcagtagtatgtgcagatgtgctcgcagtagagcatggatcaataactttgtccttatgcaaagattgttcgtaatagaaccttgcacctaacaagtctacatctggcatggcttgccaattgcatgatattttcctgaattcctgcaagccagctatacgtcttccctttctctagaaggtttgagcccaacagaggtgatgatgtaaataaggtggcaaggtgatgtatgtacaagttttttttctatataagcacagtggtactcataagctgtgccaatatgcaactcttaattatcttggcattggatcgcttctaaaatttcagtatgaatagtaccttttgatatcatatggcagtttaactacacatcttaacgctatgctttccagccattagcagtctaccttttcaacaccaaagcttctaagttgatgaataatgaggccaggcaagcaaagattgtcaagttctcagagtccatttggaaacttacctactatgcttctgttcaagcatgggtcctcatgataataaagcaggaaccatggtcattggatatgatgcaatactttgatggctggccgaaccaacccatcgtgtcttcattgatgcttttctatatgtgccagtgtggattttatatctatagcatcggtgctcttgttgcttgggaaacccgcagaaaagattttgctgtaatgatgtctcatcatgtaataacatctactctaattggagtttcatatctgactggatttttccgaattgggaccatcattctcgctcttcatgatgcaagtgatgtgtttcttgagactgccaaattgtgcaaatacacagaaaaagagctgggtgctagcttgttttttggtctcttcgctatctcctggcttctattgcgtctgatttacttcccattttggataatcaaagcctctaggtttgttttttacttctctttgtgataactttctgtttctgtagtcttgtagttttggacttattgctgttgccgttgcaatggcagctatcattccatcacattcttgaggaagctggatgaattcccaacaactttgtactacatcttgaacacaatgcttctcacattgcttgtattccatatgtactggtggaaactcatatgtttgatgataatgagacagctgaataataaaggacaagttacagacgatgtccgatctggcccagcatttctatttcagatctcttctggcaaaatgga

SEQ ID NO: 4952 - DNA, 3165 bp, Zea Mays
atcctgccttggccttcctcacacagttcgatccagcccaaccgaaccaaatctctagcagacgggaacctgggaacctgaaccctcaaaccccgccccttggcctcccatacctttcgcgccgaacacccgccgtcaccaaaactgacggctcctccccctctcccctctccccttttgtgattggactgaagtgggattcatatatcaggtgtttggattcttctctttcctctgctgatttgccgagtatcaatccgggtctccattcggtggtggctgaagcttgatttctccatgtcgctccgtgcagcttcatgaatccatgttctcaagtgtatttgatcatgattctataaacaaccatcttatattactaatctgtaggagtttttttacatgttggtggtccaagctgaaaaaaataatttaggacaaagctagattgtcttttacatttgtgattggaaggagtaggctttttcattatccagtggcagttatagacagttgttgcgctcgtgcagcttcaaatattttgggatgttgccatgttaaggtattagccttttgttgtttcagtatactagcttcctaaaggatcgatgtcggctatctccaatcagaagaaacgcaccttggaagcccttcagcaacagtatactgctgcaaaagctaagaaattgcaagatgaacaggttaagagtcagaagaagagcaattttaatacccctaagcctaaatttgatgcaccaaggggaagcaaaggtctagtaatcactcctcgacgaacatatgcccagccttctcctcataaagatgtagcattttctagttctaattgtcaacaaaagccttccacgtcctcaggtgaagaaatcaatcctgtgtatgctgaactttcttgtgcttttcatgacactttgtccaaaggatttggatggcacagaggttgttcacaatgttatatatgacataattcagaaaggtggagatgctgggaaaattacaaagggagccaaaaagttgaaactggaaaagggatccttttggatgagggaaatttggatccataccattaaaagatcaccactttggatccataccattactatctcacttacatgtgggtccacatgagtcaatgacatgtggggtccatggtatatatctaaagtttggatcttttaatggtatagatccaattgttcctttggataattatgttcaaaggggttctagattagtggatgaccaagcaagatctttgctaattcattcaaagtgataaaaaggcacatgtctctgaaacaacataagaaatgtggttcatttgatttagatggtacattccacaagtactacctctataagctaatgcatgagatgtggaaggactatatcaaagagcttatggatatgagcccatacgactccacagtatccttttgtctgttattttggacctcttatcttccttttttattttctacatatttttagcggaaataaatccatgtgttatactgaaactcaacaaaataaaagacagtctttgagtgttcttgttatgagcggcagatggctgcgagggttagaggacgatggctagggttagagggcgacagctatggttaggggcgctggggaggtcggccgcagggatttgcccacgaccggcaagagagaagggatttttcttctaatctcttgtttaccttcaattgatacaatcactcttcttatatagtgagggttacttgacccctaagcactagatctaatcttattccaaactaatctatctttatctaaacaaccttgaggggtgtgctacagtgcgccgttactgtagtgggccctcttgggccctgacagttctgctgcttttggtctcaaaattttgactcttgagtcagcggcggagtcgctgtccacccctctgggccgccggctgggctcattggcgaagttcaaaagaaatatttctttatatcaaacaaaaatactataatttgctagctaaattttttgcataatgtgggttgtccagacacctgaaagcttttggctacgctactgtctccacttgaacttttttgtcgtttaatacaaaggcaggagaagctacagatcattgcattaatgagaaagtattttagtggacaaccccacacaagcacaccacccaacatatattgaactgggttctattgagaatgctatagtgataggtggatagtataacgtgatggatttaaacccactatgtctaatgtagcaaatagttaaagggcacggatttccagactttatacaatacaataaaatgagctttcttgtataagctacgtcgagaccactcaaagactctagttttcttgaactgaaatttattgaccatatgaattatgaactaaactaaaaacactaaatcatttgttaccatataagcattatattttatgaaatatcaacgaatttgaagatttgaacaaacaagaaagacaataattaacctgagtgtgaagcaagcgcattcagagtagtggaccaactcgagcttttggaaaactttaatgtaaaccctattattgtgcctgttcctgtaatatgtacccttgagctaattacatgtcctgtcttcaccacaggaaaaataaatttactgagaaccttctttcagcagatcttcatggggcccttctaatagagacgtttggaattatatccgaggacaaccgcttccgggtttaccaaaagctggttcagttttcgtacttcaagcagaccgctggaagttcacactgatcggcgacaagctctcgcccagggagaagttgaaggaggatcagcgtcaacaacgtgcgcaatcgctaatcagatagtttccaatgtgccagctgttctctcacaaatcttttgctccacggaatacttgcttttgtttaggtcctgccactgtagcatggtagttttatcgctctagaggcgttgacatttcttagcgacttactggcagctcgagttgtggaggggtgtgtgatcatgagccatgtactccggtgactgattattgattagtataggcgtagcaaggccatttacgtttgtttcatctagtcacacaaacctgtggcaaatatttattacgcattgtttctg

SEQ ID NO: 4953 - DNA, 1603 bp, Zea Mays
gggagggaggctgcccattattaactctccctccccccacgcagaagacgacgaccggaagcaaaacagccagccaaccaaccaaccagaccagggatggatggtgcgcaccaagaaagggggcaccgcaccgagccaatgatctgcaagaagagaggcgagtgattatcgagccagtaagccatttgcaagcactgaactgaaccctcagagcgttgttgcgatggaccaaatcgctacccccgacgaaacagcacatgcctctgcaccttcagttcataagctgtttgatgctaaattaggccaccatagcgtgatggatggcaccttggcatccacgagtcagtcatcaaacatcaagacccagctgatccggtcatcaagcttgtcaaggagcatatcagttaaccttgagaagaggagccctgaatctgatcctgaaagcccacagtctcacgtctcgcatcctaaatttgcagaacccatgttctcgaattcttcgacgttctgcacaagcttgttttcgtcatcttcgacaacagagccatgccgtcaaatgggcactttacctttcctgcctcacccccctaagtgtgagcagcaggtttcagctggtcactcatcgagctcctctctgcttttaagtggtgataccggtttagatgtggctgaacagtcagatgatctgaacgacttgctcaatctttcgggagatgcttctgatggcagcttccatggagaaaacaatgccttagcttttgacgaacagatggaatttcagttcctgtctgagcagctagaaattgccatcactgacaatgagaagaatcctcatttagatgacatatacggcacaccaccacagctgtcatcacttccagtatcatcttgctccaatcagaatctagggtcaccagttaaagtccagcttagctcatctcagtcatcttctagctctgcaacagctaacaagtcaagattgaggtggacacttgagcttcatgagcgttttgtggaggccgtgaaaaagcttgaaggtcctgaaaaagcaactcccaaaggtgtgctgaaactaatgaaggtagaaggtctaacaatttatcatgtgaagagccatctgcagaagtatcggcttgcaaaatatattcctgagcctaaagacgataagaaggcttcctcggaggataaaaaagcacaattaggaaagggcagcattgattcaagcaaaaacaagaatttacaagtggcagaagctctaaggatgcaaatagaggttcagaaacagcttcatgaacaattagaggtgcaaaggcagttgcagctacggatagaggaacatgcaagatacttgcagaaaatactagaagagcagcagaaggccggcaatgtgccactaaaagctccaaccaaagcacaagcaacaaagtcgtcacctgaatcgacgtcagacgagagaactgaatccgaggtagacaccatttctccgcggccacccaagaacaggaacccgggtgtagacgcagaatgcaaatcgccgggaaggatcaagcgaacgaaggttcaggctgatcttgaaaacgagggcctgtgttcatagcgaggg

SEQ ID NO: 4954 - DNA, 1251 bp, Zea Mays
gttctctcgttcctctcctttcctaccgcacccgtctcctggcgcacctcgcccttgccccaccccggatctcagcctccagtcctcgctgctgctgctccagcgccacgaattgctcgcctcgtctccctctcccttcgaccccgcctcgtcgtggtcgtggtgaccaaggaacccaagctcggtggtggcggatcgggggccggcgacggcgacgacccgagggaagaagtctcagtcgccaccccttcctcgcagctcacgccgctgcacctggccgcgagcccgcgacactagcggaggacaagcgcgacatcctacggtaggccatcacaggggcgttgggggacgacggagtggctcgggacttgttcgagcacgcgttgagcaacgcgccggagaagcttccattgcagtcctcgccgtcaaaatccgtccgggtgtccacgacactggtcgaggtcctgcgccgcgcgcagtccacgcagaaaaagcgcacgaacgctgctcgatctgctccaggactcacagatctccgtggagtagctccacatccccactcgctagataagatcttccctcgcttgtttcttccgctgctggtccgctgtttgctcactgttctgatgttttttcaggtccacatgccgaaagcaatggcgacgctgaggagatagctgctcgtgaagcctgcccgagcctcctcgtgccagatctggccaaacttgaatcagttgtttactgatttctcccgagcatatgtgtgctgctggcaacttaccacatgggattattacagttgaagaggccaaagagttctacccactctttgggctaggtgccaatgtggcactcatcttttctggacacacattgaagtatttctcaaatatgaggaagattaggtcctagagtggatggttggccaaattcgttgaaggacatgacgagcatattggttgtaccgggtcttgtcatcactggtgtctattggggagtgaacagatttgttattgatacctcatcaatgtagcggaaaaagaaggtcaaaccaaagctcatcatgggtgagagcttgaaggttctattgtcatcttggtatgtgagggattttgcaacattggtcgttgattatggaataagcattaaccttatcgaggtggatcctttgattctattgaaaatgcaatgctcaacatttttattgttgttaacttttctaattaaacagaatgcagagtttttaacaac

SEQ ID NO: 4955 - DNA, 1939 bp, Zea Mays
gttctctcgttcctctcctttcctaccgcacccgtctcctggcgcacctcgcccttgccccaccccggatctcagcctccagtcctcgctgctgctgctccagcgccacgaattgctcgcctcgtctccctctcccttcgaccccgcctcgtcgtggtcgtggtgaccaaggaacccaagctcggtggtggcggatcgggggccggcgacggcgacgacccgagggaagaagctcacgccgctgcacctggccgcgagcccgcgacactagcggaggacaagcgcgacatcctacggtaggccatcacaggggcgttgggggacgacggagtggctcgggacttgttcgagcacgcgttgagcaacgcgccggagaagcttccattgcagtcctcgccgtcaaaatccgtccgggtgtccacgacactggtcgaggtcctgcgccgcgcgcagtccacgcagaaaaagcgcacgaacgctgctcgatctgctccaggactcacagatctccgtggagtagctccacatccccactcgctagataagatcttccctcgcttgtttcttccgctgctggtccgctgtttgctcactgttctgatgttttttcaggtccacatgccgaaagcaatggcgacgctgaggagatagctgctcgtgaagcctgcccgagcctcctcgtgccagatctggccaaacttgaatcagttgtttactgatttctcccgagcatatgtgtgctgctggcaacttaccacatgggtggcggtgttgtatgtttcttttcttataaggtggtccaaagcaaaatctgagtcgaaatagtcatgattcgacaactatagaaacaacttcatatatatttgttggatgttgccatattagctgtaaaattggccatgattcttggtatattttcatatgacacagtgtttcgtatctgcctccaaactacccaacctaatgcagatgataaatatgtagctattgataaatatatggttctcattacttgtattatttgtcaagtgttcctagaaaactctcagaggtcagagttgttctttgatttgacaaaccaccctgctctgcctagatgccgcgctactgctcccgcctactccgccaccgccacggcccccgagcccaaggacaacgcgtcgtccaggttcctgggcgtggaggcgaagacactcctctacaccaggctcactgacgtcctctccaaggaagcgctcttctacatcgtcatcttcctgttcattgccttcttcggtgcctttgcctatgtgctctaccccatgtgcgacgccatccaccctatcacgctcgatgaccacctcctcgcctcgctcgggcccaacttccttggatttgttgccatcctccgtgtctggagcttctacctcttctacgttatggctgagctccggggagcatcgtcatattcatcctcttctgggggtttgcccattagattattacagttgaagaggccaaagagttctacccactctttgggctaggtgccaatgtggcactcatcttttctggacacacattgaagtatttctcaaatatgaggaagattaggtcctagagtggatggttggccaaattcgttgaaggacatgacgagcatattggttgtaccgggtcttgtcatcactggtgtctattggggagtgaacagatttgttattgatacctcatcaatgtagcggaaaaagaaggtcaaaccaaagctcatcatgggtgagagcttgaaggttctattgtcatcttggtatgtgagggattttgcaacattggtcgttgattatggaataagcattaaccttatcgaggtggatcctttgattctattgaaaatgcaatgctcaacatttttattgttgttaacttttctaattaaacagaatgcagagtttttaacaac

SEQ ID NO: 4956 - DNA, 2207 bp, Zea Mays
gttctctcgttcctctcctttcctaccgcacccgtctcctggcgcacctcgcccttgccccaccccggatctcagcctccagtcctcgctgctgctgctccagcgccacgaattgctcgcctcgtctccctctcccttcgaccccgcctcgtcgtggtcgtggtgaccaaggaacccaagctcggtggtggcggatcgggggccggcgacggcgacgacccgagggaagaagctcacgccgctgcacctggccgcgagcccgcgacactagcggaggacaagcgcgacatcctacggtaggccatcacaggggcgttgggggacgacggagtggctcgggacttgttcgagcacgcgttgagcaacgcgccggagaagcttccattgcagtcctcgccgtcaaaatccgtccgggtgtccacgacactggtcgaggtcctgcgccgcgcgcagtccacgcagaaaaagcgcacgaacgctgctcgatctgctccaggactcacagatctccgtggagtagctccacatccccactcgctagataagatcttccctcgcttgtttcttccgctgctggtccgctgtttgctcactgttctgatgttttttcaggtccacatgccgaaagcaatggcgacgctgaggagatagctgctcgtgaagcctgcccgagcctcctcgtgccagatctggccaaacttgaatcagttgtttactgatttctcccgagcatatgtgtgctgctggcaacttaccacatgggtggcggtgttgtatgtttcttttcttataaggtggtccaaagcaaaatctgagtcgaaatagtcatgattcgacaactatagaaacaacttcatatatatttgttggatgttgccatattagctgtaaaattggccatgattcttggtatattttcatatgacacagtgtttcgtatctgcctccaaactacccaacctaatgcagatgataaatatgtagctattgataaatatatggttctcattacttgtattatttgtcaagtgttcctagaaaactctcagagattattacagttgaagaggccaaagagttctacccactctttgggctaggtgccaatgtggcactcatcttttctggacacacattgaagtatttctcaaatatgaggaagattaggtcctagagtggatggttggccaaattcgttgaaggacatgacgagcatattggttgtaccgggtcttgtcatcactggtgtctattggggagtgaacagatttgttattgatacctcatcaatgtagcggaaaaagaaggtcaaaccaaagctcatcatgggtgagagcttgaaggttctattgtcatcttggtatgtgagggattttgcaacattggtcgttgattatggaataagcattaaccttatcgagagggaaaagaagagcaagttgagctggaggtgttcaacttcactggtgtaggaggagttgccttatcaatgtacaacactgacgaggtgcacttggtgcttgctactattccattaagaaatggccattgtatcttcgcaccaagaacattattttgaagaaatattatggcaagttcaagtatctccagtttcttgttttaccatatccaatccaatttgtgcatgggcctccgacgatgccacggtgatcaaggtagacatcgtcaatagccatgacacgctgctcgccgtcgtccaggtcatcgccgacctcaacctaataatctggaaggcatacttctcctctgatggcagctgattcatggacgtgttcaatgtcaccgaccgtgaagtaacagggttctcgacgcccaatcatcctacatccagaagacgctgtaggtggatgactggtactatctggaggcacgcaacacggtgggcatcgtggcattggaggactacacctccatcgatctcatgggcacagacccgggcctgctattcgaggctatctgcccagttaacaagaagatggcttttgtcggttatgccagagcatgagcttgttcatgttggtccagatacccgcttgaactacaaagttatcgagctacgaacactctcaaaccaagccatattccagatctagtgtcaagttgaaaacaaagcgaatcgctgaatgaaggatagagacggcaccccctgatcattctcggcgcgcctgtgcatgctggctgccgcg

SEQ ID NO: 4957 - DNA, 1882 bp, Zea Mays
tacgtccacgatggagcttgaacccacaacctcaaagttaaaagtcttgcactctaccgactgagctagacatactttgctgttacatatccgagctcggcgccatagatcttggcgccgagctcgataccacgttggcgccacgtcgttcaggttgggccagcgtagcacgcacctcggcgccatagcctatggcgccgagctgtgttacctcggcgccattggctatggcgccgagtaaagggtccaaaaatgacattaaaattttctaaggtccaaacgtgaatttttttctgaggaagggctaaaatataaaaaattcggtgtgtttgtcgctcggtagccagagccggcctgggcctggcctccgctctttctcttccgcattggccaacaaggcaaagagggaacaaaacaaccgcccttgcaagtgggtccattactccattccatcacaatagaacggcagcaacaaggccgccacagagacgcagacgcgatcgccgccggccgtccccgcccagtgcgctctcgcgctacacgtgccatgccgcacgcagcaatgagtagccgccgccgccgccgccgcggcgcttagcaagcgacgatggagatggcgagcgcgcggaggagggcgaagccgccgcaggcggtcggcggaggcggagaccagctcgcgctgtgggccgcctgcgtgctgctctcctcgctctcgctgctcgtcgccgccgccttctccacgggcttcggcggggccgcgaggctcacgctcgaggccggcccggaccgggaccgggaggccgcgggtgcgctcgtgacgagggcaactggcgccggcagcgggaggtactgcgacgaggacgacgacctgatcgacagcatgtccgtggacggggagtgggtgctgctgcgcggcgccgccgagcggctctacgggcccgggcagtgcccgttcgtcgacgaggggttccggtgcagggagaacggcaggccggacggcgactacgccgagtgggcatggcggccgaggcgctgcgcgctgccgagattcgacgcgaggaggctgctggagatgctccggaaccggcggctggtgttcgtgggcgactccatcgggcggaaccagtgggagtccatgctgtgcatgctggcctcggccgtcgccgacgacagggacaagcaggcgagcccgggcggcgccagcatatacgaggagaacgggagccccatcaccaagcgcaagggcttcctctccttccggttccgcgactacaactgcaccgtggagcactaccggtcgccgtacctggtccgccgcggccgcccgccgcgccactcgccgaagcgcgtcgccacggcgctccggctgggctccatggacgccatggcgccccggtggaaggacgcggacgtcctggtgttcaacacgggacactggtggaaccacgagaggctgcagcagttaggatgctacttccaggacggcaagacgttgcggctcaacatgagcgtggaggacgcctacgagagggcgctgaacacgctgcagaaatgggtccaaaaggaagtgaacacaacaaaaacgctggtcgtcctacgaacatactcgccggcacatgtaagggcgtcaaacggtggtggaggtgggtgtgtcagggagacggcgccggagctgaacacgtcgaggatcgcgctgcaccggtggccgggcctgctcaacccgagcccggctttaattgaagcggcgaagaagcggcagctggcgacgatgcacgtcctgaacgtgaccctgatgacggcgcagcggcgggacggccacccgtcggtgtacaacgtccgcctcccgtcgccggcggcggcgcaggagcagcagcaccagagt

SEQ ID NO: 4958 - DNA, 506 bp, Zea Mays
tttttccgttttcgtgcgcctgccctgccccctgagcgcgttcgtgtgtgtgtgtgtttttgtttctcgccgatgcgcatgcgcccgttcggttgggtccttagcttggccttgacgcttctatgtcatggctggagctgctgctctcaatgagggtatcctttcttccgtgtccgagaaaaatgttgctgctcacccatggcatgatttggagataggaccagaggctcctgaagtgttcaattgtgtggttgagattcctagaggcagcaaggttaagtatgagttggacaagatatctggtctgatcaaggtggatcgtgtcctttactcctctgttgtttacccacataactatggtttcattccacgcacactctgtgaggatagcgaccccatggacgtcctcgtactgatgcaggaacaagttgtccctgggtgttttctgcgagctcgtgctattgggctcatgcctatgatcgatcagggtgagaaagatgataaga

SEQ ID NO: 4959 - DNA, 2734 bp, Zea Mays
cacggccgaagccgaacgccccaccagaccacccccacccggccccggcccccgggtccctgtcttccccgtctccgcttccgtccacctcacgtcggcgtcttccatcgaagtggccttttcggcggcgagtgagagggcgaggaataaaactcgcgtcgcgcacgcaccgcaacaataatatccttccacgcgaatattcgccgcttcccacctcccccgccccgcatatccttccgtccgtccgttcgtctcccccctttcccttcccctctatttcaccaccccatcagccgcccgccaccgcgacgatcaccggcgcaatccgttcaccccaccactcatccactccccctccgcgaatctcatttctttactgcggctaggaggaggcggcggcggcgatgaagttcggcaagagcctgagcggacagatcgtggagacgctcccggagtggcgcgacaagttcctgtcctacaaggatctcaagaagcgcctcaagctcatcggcgccgggaacggggctgagcggcagccgaagcgggcccgccgcgacgactccggggaggctgacgcggccgcggccgcggcggcaatgacgccagaggaggcggagttcatgcagctcctggaggctgagctcgacaaattcaactcttttttcgtcgagaaagaggaggagtacatcatccgtcagaaggagctgcaggaccgggtggccagggcggccgggcgggagtccaaggaggagctcatgcgggtgcgcaaggagattgtcgacttccacggcgagatggtgctgctggagaactacagcgccctcaactacacagggtttggctgaattgtgggatgctggcttgctttgaggacaatgctagcttgcacatgggcttatgcacgggatcaagcagggacaattgtactatggaggcctggataaagggttgtgcaagaagccaattagactcgtagtgttcaagcatgcacttagaaccagttgtttgagtcactcttatctttgatcagctgacttgtctagtttattaaattgcatctgaatttaaactcatgaagtttatttggctttcaaattgacacactgtgacattgaaggcacaacttttgaggttcttattttgtggactataaaaaactgatttaatcttgcaagctgtttaatacaaaccttatacttatcactttctttctagttgtgggatagctgtgcttgaatgttgtaccatttgtgttttgtaattacatgactcatggtggatgtgagatggcaataagatatgattatctcagccaagcttgtagtgggtgatttcgtcttgaacgtaattagtgcgtatacccctaagcagggcatggtgagagtgctaagagacttctaggaagacttagatggcatggttaaaactatacctattagcgtgaagcttttcataagagacctcaatgggcatgcatgtgcaacaagtgtaggttttgagacggttcatggaggttttgggtatggtagtggtagtaggaatcgggagggagaggtcttgaactttgcagtagcttttgacaatagctaacactttagaatcccatttagtgacctatacctatagtagcggccaacattttagtcagattaactttcgcctcacaagaagaggttttgagacggttcatggaatttttgggtatggtagtggtagtagcaattgggagggagaggtcttgaactttgcagtagcttttgacagtagtcaacactttagaaagagagaatcccatttagtgacctatacctatagtagcagccaacattctagttagattaactttgtcctcacaagaagaggacaaacaagcatgtttggattgcaaggtgatatttggggagtgagttgcctctcaacataagattgtggtgacggtgtttcgttcagctgcattcccgtaaggataaacaaaccaaaattgagagaataaagtggtggaagctgaaagggggaggcactagaagtcatcaatggccatcaaagatggcattttaaagatgacgcaaacaacatatgagagaagatggcaacctacattcggaaggtggcccttagagttgtgtggagcaaccaaagggagtggagacgaagataaagatacttgtggttgaatatgtaagtccaaatggctattaaaaaaagaaaaaaatggtagacatttatatcatgacgggtgtgtggacaacatagagaagtacaagttagtaaagaagaccacacaacgagctgtaatgtgcaaatggtagggtgtaccagaatctttaccatcgtttgagtacgaaggaaggatggaatgacatacataggattgaccaggatccttgagaggaatacaagggatttcaatcaagttaagtgcattaaggatgaaactgagcaccccttggtgaaggaggatgacatcaggcatagatggtgagagtattttgacaaattgttcaatgagaagaatcgggacacaacctttcagttggataaaaggttgaatgactcttttgatgataccattaggcggtttgtgcataagatccaaaaaattgaggttagagaggcattgaaaaggatgaaagggggctctggtggtatcccaattgagccatggagatgcctcggggacatagctatagtatggctaactaagttgttcaaccatatcttctagtcgaacatg

SEQ ID NO: 4960 - DNA, 3009 bp, Zea Mays
ctcgcgccgcaccagaaacgaaaaacctgcgacacgaaccaaaaccctcctctccctcagtccctctcgagcctcgatccgcctccgccccacgcacccgacatcgctcgctacgcccacttcatcgccgcgggcgcaatgagcgcgggctggaggacgctgttgctgcgcatcggcgatagatgcgccgagtatgggggctccgccgaccacaaggaacacatcgaaacttgttatggtgtactatcccgagaatatgaacactccagagatgcaatatttgagtttctccttcaatgcacagaacaattgcctcacaagattcctttctttggagttttgattggtttgataaacttagaaaatgaagacttcagtaaggctattgtagataccacacaggctaacctagaggatgccttgcacaatgaaaatcgtgataggattaggatattgctgcgatttctcagtggtctgatgtgcagcaaagttgtagttccaagttcaatcatcgagacatttgagactctattatcatctgctgtaacaatattagatgatgagactggcaatccttcgtggcaacctcgtgcggacttctatgtttattgtattttggcttcacttccatgggctggtccagaattgtttgagcaagttccagatgagttcgagagagttttatttggtatacagtcttacataagtatcaggaggcattttgatgatattgctttctctgtctttgagacagatgaaggccactctcctaacaaaaaggattttatggaagatctgtgggagcgcattcaagctctttcccgtaatggatggaaagttaaaagcgttccaaaaccccacttgccatttgaagctcagctggtggccgggaaatcacatcgcctttcccctataagttgccctccacccactccctcgcagtcatcttctgaaatgttaaaaggtcaggagaaacatgaagccgatatgaagtatcctcagagacttcgtagactacatatcttcccaatgaataaagctgagaacatgcagcctgtagatcgttttgttgtggaagaatgcattttggatgtgctacttttcttcaatggatgttagtcggaaagaatgtgcattttatctggtcagcttgcctgtgtcttatcgctatgaatacctgatggcggaaaccatattttcacagctactattgttgccgaatccaccattcaagccaatttactatacactggttatcattgatctttgcaaggcattaccaggtgcattcccttcagttgtggtaggagcagtgcatgctctttttgacagaattagtaacatggatatggagtgccgcaccagacttatactatggttttcacaccacttgtcaaactttcaattcatttggccttggcaggagtggtcttatgtcaaggacctcccaaaatgggctccacaacgggtttttgtccaggaagtactggaaagggaagttcgcttgtcgtactttgaaaaaatcaagcagagtatcgaggatgctgctgagttagaagaactgctacccccaaaagctgggcctaatttcaaattccatagcgatgaaagcaacgaaagcactgatggcctgaagttatccaaggaacttattggcttgattagaggaaagaagtctacatatgatattattttatgggttgaggaacaaataattccaaaaaatggtactgaatttgcacttgatgttgttagccagacgcttcttgacatgggttcaaaaagtttcacccatcttgtcactattttggagagatataataagataatctctaagctatgtccaaatgaggaaatgcagctactgttaatgaatggagtcagtgcttattggaagaacagtacccagatgactgctatagctattgacagaatgatgggttatcgcctgatatccaatttggctatagtcaaatgggttttttctcctgccaatgttgagcaatttcatgtttctgatcgaccatgggagattcttagaaatgctgttagtaaaacatacaatcggatcagtgacctccgcaaagaaattcaatcactcaagaagggtcttcaagttgctaaagaggctagtgcaaaaaacagaaaggagctggaggaggccaaatcagtgcttgagattgtagaggggcaacctgcaccagctgaaagaccaggtaggataaggcgactagaatcacatgtcaaaaatgcagaggatgaggaaagaactcttgaagaatctttagaagcgaagggagttctccttgctcgggctcatgaggaaagcaaggacttgcttaagctactctttaagagctttgttgacgtgctcactgaacgtttgccgcctgtctctgttgatggggaaattcctaatctgcgcagtggagatcaaaatgtaaattttgcagctcaaaattctgaagcagcaacaatggagattgacaatgaaaatggagcagataataatagtgaaccgaatgagcgaaacacaaaaaatgcatataatgttggagagcttgagcagtggtgtctctgtacactgggttatctcaagtcattttcccgccaatatgcaagtgagatttggtcaaacatagcaatgttggatgaggtcttcgttggggatgttcacccacttatccgaaaagctgctttctctggtttgcgcagatttaccaatgaagggtctcatccttgaatttgacaccatacccatattctttatagaactgagtgtattgtacctgtatgatagaggacaacttttctccttgtttaactaatcaaataggcataaacatttttccttggtttcgtatgcctttttttctgttcccttgcttctcggccactaaatgaaaatttttaccaggtaactaagttaatgttcttttctgaagtaacatcagaatatgcatggttcagtgttaatttaacctattgactgagcctgaggggttgata

SEQ ID NO: 4961 - DNA, 3019 bp, Zea Mays
aaaacagtctcttatatgtatctcaactcgcgccgcaccagaaacgaaaaacctgcgacacgaaccaaaaccctcctctccctcagtccctctcgagcctcgatccgcctccgccccacgcacccgacatcgctcgctacgcccacttcatcgccgcgggcgcaatgagcgcgggctggaggacgctgttgctgcgcatcggcgatagatgcgccgagtatgggggctccgccgaccacaaggaacacatcgaaacttgttatggtgtactatcccgagaatatgaacactccagagatgcaatatttgagtttctccttcaatgcacagaacaattgcctcacaagattcctttctttggagttttgattggtttgataaacttagaaaatgaagacttcagtaaggctattgtagataccacacaggctaacctagaggatgccttgcacaatgaaaatcgtgataggattaggatattgctgcgatttctcagtggtctgatgtgcagcaaagttgtagttccaagttcaatcatcgagacatttgagactctattatcatctgctgtaacaatattagatgatgagactggcaatccttcgtggcaacctcgtgcggacttctatgtttattgtattttggcttcacttccatgggctggtccagaattgtttgagcaagttccagatgagttcgagagagttttatttggtatacagtcttacataagtatcaggaggcattttgatgatattgctttctctgtctttgagacagatgaaggccactctcctaacaaaaaggattttatggaagatctgtgggagcgcattcaagctctttcccgtaatggatggaaagttaaaagcgttccaaaaccccacttgccatttgaagctcagctggtggccgggaaatcacatcgcctttcccctataagttgccctccacccactccctcgcagtcatcttctgaaatgttaaaaggtcaggagaaacatgaagccgatatgaagtatcctcagagacttcgtagactacatatcttcccaatgaataaagctgagaacatgcagcctgtagatcgttttgttgtggaagaatgcattttggatgtgctacttttcttcaatggatgtcggaaagaatgtgcattttatctggtcagcttgcctgtgtcttatcgctatgaatacctgatggcggaaaccatattttcacagctactattgttgccgaatccaccattcaagccaatttactatacactggttatcattgatctttgcaaggcattaccaggtgcattcccttcagttgtggtaggagcagtgcatgctctttttgacagaattagtaacatggatatggagtgccgcaccagacttatactatggttttcacaccacttgtcaaactttcaattcatttggccttggcaggagtggtcttatgtcaaggacctcccaaaatgggctccacaacgggtttttgtccaggaagtactggaaagggaagttcgcttgtcgtactttgaaaaaatcaagcagagtatcgaggatgctgctgagttagaagaactgctacccccaaaagctgggcctaatttcaaattccatagcgatgaaagcaacgaaagcactgatggcctgaagttatccaaggaacttattggcttgattagaggaaagaagtctacatatgatattattttatgggttgaggaacaaataattccaaaaaatggtactgaatttgcacttgatgttgttagccagacgcttcttgacatgggttcaaaaagtttcacccatcttgtcactattttggagagatataataagataatctctaagctatgtccaaatgaggaaatgcagctactgttaatgaatggagtcagtgcttattggaagaacagtacccagatgactgctatagctattgacagaatgatgggttatcgcctgatatccaatttggctatagtcaaatgggttttttctcctgccaatgttgagcaatttcatgtttctgatcgaccatgggagattcttagaaatgctgttagtaaaacatacaatcggatcagtgacctccgcaaagaaattcaatcactcaagaagggtcttcaagttgctaaagaggctagtgcaaaaaacagaaaggagctggaggaggccaaatcagtgcttgagattgtagaggggcaacctgcaccagctgaaagaccaggtaggataaggcgactagaatcacatgtcaaaaatgcagaggatgaggaaagaactcttgaagaatctttagaagcgaagggagttctccttgctcgggctcatgaggaaagcaagctactctttaagagctttgttgacgtgctcactgaacgtttgccgcctgtctctgttgatggggaaattcctaatctgcgcagtggagatcaaaatgtaaattttgcagctcaaaattctgaagcagcaacaatggagattgacaatgaaaatggagcagataataatagtgaaccgaatgagcgaaacacaaaaaatgcatataatgttggagagcttgagcagtggtgtctctgtacactgggttatctcaagtcattttcccgccaatatgcaagtgagatttggtcaaacatagcaatgttggatgaggtcttcgttggggatgttcacccacttatccgaaaagctgctttctctggtttgcgcagatttaccaatgaagggtctcatccttgaatttgacaccatacccatattctttatagaactgagtgtattgtacctgtatgatagaggacaacttttctccttgtttaactaatcaaataggcataaacatttttccttggtttcgtatgcctttttttctgttcccttgcttctcggccactaaatgaaaatttttaccaggtaactaagttaatgttcttttctgaagtaacatcagaatatgcatggttcagtgttaatttaacctattgactgagcctgaggggttgata

SEQ ID NO: 4962 - DNA, 2718 bp, Zea Mays
tagccttaggaccttaattaggttagcttaagtgcttaatttgatggagtgagtgagtgagtgagtatatatgcagctgcgggcggtaaaaaaaaaaactgttgcttggatgatgatttgtgtatgactatgtgtatgtccatcggcatcgacggcttgcttgcttgctccaacgccaactacaggggggcgggggtgttgggtagctagctagccagatagtgatagagcgagctgctagtggaaagtagaaagagcgagcgcaccacaatggacagcatggaggacgccgtctccggcactgcagcccagggcgacctcgccgaggttgtggcccgcgcaggtgcaatggccgccgcggcgagtcaccaccaccaccggcggccaccctctcccgcagcagcagatcacggccacatcgtgtctgctgcaagggccaccgccagatcacagatcatgctcgtccctgctgctgcttgctacgacgacgagacacggcctgctgctgcttgcggcgacgcggtgatgttcgacgcgccgtcgtcgtcgatggccgccgccgtcggtccataccaccacctgtcgtcttcgtctgcggcgctggcaccggcgcacggcgggtactggctgccgccgcaacagatctcccaggagcacgcccgcgacggcggcctcgacgagccgcccgtggtgacgaggatctcgccagtgacgactccaccgccgccttctcatcatcatcaaatcatgaacaggttagttgacttacttgactggaaatgaaataaagcagctattatattgctctctctctctatattttttatctgcggctttaatttcttttttgggtcgatcgatagttgttgcgtgcgttgttcttcttgctttctcgatcgatatgcgatacatactcttcaaatcaactagctatctattattatttatccctcccttgcctttttttactgttacttcgtgacaattcatggctgttttaatttgctgtctgatctatttgcattactactcgttgctgcagtttatcctccacagcacgtacgacgaccctttttttcagctgccgtttacttctggatgcgtatttggttagccgtaggctatcagtcaaaacatgctttgcatatatatactggaaaggaatagatgatgtgactcaaatctgattgcgattccactgttctttttccttttcttttgttggcaaaacaaaacggcgcaatagctgcattaacccctactagctttgtctctgcagaggcatatatataatataatatatttctttgggatttggtcattcatcagagtaggaataagctagttgacttcaattcattcctcgtcatttgatgctggttggaatattgcttaatttctttttcttctgcaaaagctgtctagctatcttcttcctagtttcttttcttttgagagacggccggccggccagccggggctccggcgagctatcatgcagtcaccagctatgctaactccggcatccagatcctctccccggccgtgggcgtagcttatgaagaacttcaattatgatttaatctgtcaggttattactttgtgttgatctctaataaaccaagtttgatctgccaaactgatgagtttatcgatctcttttcgtctcttagagcttgtgcatgtggaaatccaatccaattccatatacagcatgactccaagattaattaaacaaatagttgcagaagattttgcgtatatatacacttgatttgcatgaatgcagcagaaagaatgaggtgaagaaggtggtgtgcatcccggcgctaccacctccggcgagcagccgcccaggaggaggagaggtgattccgtctgatctttgggcgtggaggaaatacggccagaagcctatcaagggttcgccttacccaagaggttactacagatgcagcagctcaaagggatgtatggcaaggaagcaagtagagcgcagtcgcagcgaccccaacatgctcgtgatcacctacacggcagaacacaaccacccttggccaatgcaacgcaatgtgctcgctggctactcccggcctcacactgctactcacatgtcgtccaactgcaagaagaagaagaacagctgcagcgttgaaccgacgagttcatggccaacaacaacaacatcatcaccatcatcaaagaacggcaactacgagtgtcagcaaatgacaaacatgacgatggaagaaaatgcagcagcagggtatgttgcctacgccatcgatgacgaggagtgtgccgcgatgcatcagccgatcaattgcggtagcgtgcaaccttcagcagatgaggttttcgcagagctagaggaattggagcctacgactagtcctgtgaatgcaaacatcttctctaggggggtgacttatgagtggcacaagttctaatctatcaagcccaaggtcgtataaggaaaggctagctaccccatatatatacatggttctgatgaaaaataggttacaattaataacgcacagattttacttaattaattgctgtgacgacagatctttatataccttttgtgtgcttatgattaattcaaagataagatatacttaaaaataagaaaaataaaatatatgtgtataatatttcgtcgtacataaaaatttccacaaatctgcatggatcgtatttgttactagcata

SEQ ID NO: 4963 - DNA, 1882 bp, Zea Mays
caaaatcctatttccctctcccacaccacgcgccgcgcctgtctgattctgcccgccagccacgcccgcagatctcgcttcggcgccctgattccgtcgtatgcaaggtcacagccctgccttccatcgtcgcccccatgccatggtccccttctatcctcgctcacttccagccgccaacggaaccccccgcgtacgtttggcagaaactgtagagaccgtcgaagacgggggcagtcctcgccgacgctgaagtgcttgagcgcgcggatctgatcctgctgcgtttcgggggtgacggaccggaggaaggagacgtaatcgtcggcgtggaagcggcagaggtcgcggtcgcgggcagggtgagggcggaacacttgcatctggtcgaggaggccgtagcggccgagcagcgcgtgggtcatgcggatgcggtgcggcttcatcgggtggcaatgctcgtagtagcagttgcccacctccacgtcgtagaagtagcagacgcggcgcttcgacccgtccgcgccagtggtcggtagggagttgccgccaccgcacagcacgacagagggtgtgtcagtcggggcgcgagcaccaactttgcatccattaactgctctgctcagagcatcaggtgcgcttcagcgtctagccatttggcggcttgggctttctgcggttgggaggaacggagtcttaagattagcgctgtcggtgtcgtccttgaggtggacgtcaacggcgaggagctctttttcgttgataagattggcagcttgctgcccacagcctagcggtcgactctctatttttggactcactgttgtctagccgcttgtttcttgtggacaccttaccttagccttggcgatgagtgatgcttggcagcttgccatatcatatcctgttggaatcgaacctgcttctgattcttccttcttgtagtttacctctgcgcgtccctgctaaccgttccacatagtatcacaaaaaaatggcactaccttggcatcgtcttccccaattcgggtgtatggaattcttggagcaaaggaccagcacacggtcacctccaaagaaagacccaggctgcttctacaaggagctgtacaaagtgcttcacgactgcagattttggatgagatgatggataatggttttccactcacaactgagccaaacatcttgaaagagatgatcaccccacctaatattgtgaacaaaatgttgaatgttgttactggcaagagttctacccttggcagcaaacttccagatgcagctgcttcttttgtaccttggcgaagaacaacagtcaaggatgcaagcaatgaagtctatgttaacatagtcgaggaacttgatgcatatgtgaacagagagggggttcttgtgaaatgcgaagcatacggtgaagtccaagtaaactgcagcctcccaggatgaccacatgtaagcaataggtgctgctaccagcaaaaaggaagccagaggccttgctgctggaccaagattagtccaaaggttatctggttttggggaccatcgatctgcagacaatgtggcaagagtggtagaggaggagcttgcacatgcctctatggtttgtattgatttctcaaagaatgccaagtgatgggtcgtgaaccaagcaatactttccaagacttgataaaggagtacgaagttgtactgaagggtccattcaactacacggctcgtgatgaagctggtataccccgagaatgtttggtaaaaaaaatgtattggtgaaagcgaaatgtgcctttgggccatttctaagtattttggtgatttagtgtccaacacaagtgtttaggtgttaatctatgacaagtgatggactaagtgcaaatcaaga

SEQ ID NO: 4964 - DNA, 2331 bp, Zea Mays
caaaatcctatttccctctcccacaccacgcgccgcgcctgtctgattctgcccgccagccacgcccgcagatctcgcttcggcgccctgattccgtcgtatgcaaggtcacagccctgccttccatcgtcgcccccatgccatggtccccttctatcctcgctcacttccagccgccaacggaaccccccgcgtacgtttggcagaaactgtagagaccgtcgaagacgggggcagtcctcgccgacgctgaagtgcttgagcgcgcggatctgatcctgctgcgtttcgggggtgacggaccggaggaaggagacgtaatcgtcggcgtggaagcggcagaggtcgcggtcgcgggcagggtgagggcggaacacttgcatctggtcgaggaggccgtagcggccgagcagcgcgtgggtcatgcggatgcggtgcggcttcatcgggtggcaatgctcgtagtagcagttgcccacctccacgtcgtagaagtagcagacgcggcgcttcgacccgtccgcgccagtggtcggtagggagttgccgccaccgcacagcacgacagagggtgtgtcagtcggggcgcgagcaccaactttgcatccattaactgctctgctcagagcatcaggtgcgcttcagcgtctagccatttggcggcttgggctttctgcggttgggaggaacggagtcttaagattagcgctgtcggtgtcgtccttgaggtggacgtcaacggcgaggagctctttttcgttgataagattggcagcttgctgcccacagcctagcggtcgactctctatttttggactcactgttgtctagccgcttgtttcttgtggacaccttaccttagccttggcgatgagtgatgcttggcagcttgccatatcatatcctgttggaatcgaacctgcttctgattcttccttcttgtagtttacctctgcgcgtccctgctaaccgttccacatagtatcacaaaaaaatggcactaccttggcatcgtcttccccaattcgggtgtatggaattcttggagcaaaggaccagcacacggtcacctccaaagaaagacccaggctgcttctacaaggagctgtacaaagattttggatgagatgatggataatggttttccactcacaactgagccaaacatcttgaaagagatgatcaccccacctaatattgtgaacaaaatgttgaatgttgttactggcaagagttctacccttggcagcaaacttccagatgcagctgcttcttttgtaccttggcgaagaacaacagtcaaggatgcaagcaatgaagtctatgttaacatagtcgaggaacttgatgcatatgtgaacagagagggggttcttgtgaaatgcgaagcatacggtgaagtccaagtaaactgcagcctcccaggatgaccacatgtaagcaataggtgctgctaccagcaaaaaggaagccagaggccttgctgctggaccaagattagtccaaaggttatctggttttggggaccatcgatctgcagacaatgtggcaagagtggtagaggaggagcttgcacatgcctctatggtttgtattgatttctcaaagaatgccaagtgatgggtcgtgaaccaagcaatactttccaagacttgataaaggagtacgaagttgtactgaagggtccattcaactacacggctcgtgatgaagctggtataccccgagaatggttcatgatagattagcttgtattgttgagatggaaaaagagaatgcaagtttgggataagcagttgaagtctcatcctccaaagaacgttgaatcagaaatcttgtgtgagcatatcaagaaagagagggagacagcaaaggctggaaaacgaccatactatctgaagaaacctgaacttcgcgaaaggaagctaatgaacaagtacaacgagctcaaggaggcaggaaagcttgatgcattcatggaaaagcggcggaggaagaatgcctccaaagatcatcggttcatgccgtaccgacgcagtggagatgcataatagtttcctgattctggagacgagcgaaaggatgattttaggacggtgttctcatggtggctgggacactggacagtcagtgtctctgttactttgttgccctagccgtacaatcgtcagctccgtgcacaatctctactacttcttaagaatagagtgcaggcgtccacagtggttttttatgtttctcatttcactctctgcattttcagttacaactacactgcatatgctggcagatttgttcatatattactccagctgacattttcactatcgc

SEQ ID NO: 4965 - DNA, 2616 bp, Zea Mays
ctaaccgtggagtaagcactgcgactgcgagacagtcccacggccatgttcgttgaagcgaagaaagagaggcgcgcagcgcagccatatagctagggagggccgaaaaaggctacgccacaggctcttctggtcagagagagagagagaccgtattgactgacattgcagcaagcaacgagaagggcggctttggcaggccgaggaggccagagaagagcagcagcagagagagagagagagagagagagagacgagttgggtgcagtgcagagaccagggcggctttgggttcaataatatcccatcactcacacgccacggcatcattggccgcgctccctccttcctcctcctgctctgctcgtctcctccgacagcagcagcaccacaccagcgcggagctgcaaagctcctcacggctgctttctcgtggcgcggtgcatgggagcgcggctctgagaggaaaagaagaggagaaaggcgcgcagggaggatgaagttcatgaagctgggctccaagcccgatgctttccagtccgacggcgccgacgtccgatatgtggcctctgaccttgcaacagatgttgtggtgcatgttcgtgaagtaaagttttacttacacaagtttcccctcatttccaagagcagcaggcttcaaaggttagttcttaaggccaccgaggagacgaccgatgaggtccgcatagatgaccttccagggggagcaaaatcgtttgaaatatgtgccaagttctgctacgggatggtggtcaccctcagtccacacaacgttgtagcagcaagatgcgcagcggagtatcttgaaatgaccgaggagatggagaaggggaatctgatatttaaaatcgaggtcttcatgaactctagcatacttcgcagctggaaggattctatcatcgtcctccagagaacgaaggccctgtcgccgtggtctgaggagctgaaggttgtgggcagatgcatcgatgccatcgcttccaagacatctgtggatcctgccaatgtgacctggtcatacagccataataacagcaagaagggaggagcttgtgctgaaatagtcgagtcggcaggaaaaccatcgatagctcccaaagattggtgggttgaggacttgtgtgaattggatgttgacctgtataggagagtcatggttgctatcaaatccaaggggagaatgtcacctgaactgataggagaggcacttaaggcatatgcggttagatggctgccagactcctacgatgcactggttgccgagggtcacatgaggaggaaccaatgtctggtcgagacactaatatggttgttgccttctgataagagctcaggctgttcttgcaggtttctcttgaaactgctgaaggtggctatactagtgggaggcggggagcacgtgaaggaagaactcatcagaaggatcagcttccagttgcacaaagctactgtgaaggatctcttgctacctgctacctcgccgcctaatgatggtacatatgatgttcggttggtgcatgatcttgtgcagagatttgttgcgagaaccgcgctgtctcataatggcggtttcattgagaagtctgatgagaagatgatcgagctcaactttgagcaagaatcaaccttggcggtgggagagcttgttgatggctacctgtctgaagtagcttcagatcaagccccttcactgcctatgtttgttgaactagcgacagccgtgcccgaagcggctaggccagttcatgacaccctttactatgcagttgatgcatatctcaagcaacacccggacataaataaatccgagaagaagaagatctgcagtctggtggatgtgaagaagctcagcacggacgcgtccatgcacgccacgcaaaacgaccgcctgcctctccggttggtggttcaggtcctcttcttccagcagctgagggccggctcgggcaaagaactcgccctggttgacaacggagaacacgcttgcacacggcctacgcaggatcagtgcgaaccctgcgaaaggcggataccgaagcatccagagtcactagataagcaggtgacgagcctgagcgcgagggagagccgccagcaccaccggaccagcgacagcgagcacaggggcggcggcaggaacagcttcaaagaccagctcgggggcctcctgccgcagtcgcggtccaggaggatcttcgacaagctgtggagcagcaaggggcaaggcgagcatggcggcaaaggctcggagacgtctggcagctcccagagcccaccgttgtcagcaaagcctgcagaagtgaagccctcccctcttcccgctgttaggaacaggaggtactctgtttcatagttttttttggctctcctagtttagagctctgggttaggttgctgtacagaaggaagctaatcactgctgcccatcctttttgtaagcagatcaacctgctgttctcaatgtgatcatccatgctgtagcttttactctagtgtaattccaactgggagcagagattcgccagggcctgcgttcttgaaaatgttattttttgaagtgaagttgtttttgtggcaaagataaaagaaataaca

SEQ ID NO: 4966 - DNA, 3760 bp, Zea Mays
atgtgcactcgataagttttcctggtgtccggtccggctacccctgttccctctcgcagtcgcagacttctcttctcgccaaaccctaatcctgctcctgcctttctcgtctccaaccgttggccgagcagtagcggtggcgatggagggcaaggaagaaggtcggatcttcgtgggcggcctgtcgtggcaaacggacgagcgcaagcttgaggacgcctttggccgcttcggcaaggtcgtcgacgcccaggtacccgtgcccccagtccgtctacgttagtgctcatgcccgccccaggtagttttgctagatccatcgatttcgtgttgtccgcggtgcgatattgttgggtatgatggttggaagatcggtgggtgaggtggaaaggcggatctgtagattgtttttgcgttctgtcgaacagagatgtgtgttttgcgtaggaaggaggattgcgatttctgctcacttttatgtctttcgttgttcagcaagaggcgtaacttggtgagagaaaatatttttcttctctttagtttgcagtagcaaagttgaattctttggcatcactgagagcgaaattaaaatgatgaaacggtacttcttgttgcgatgaaccaagaaattagtatcctgtagacctgtacaaacatgcatccttggattccttgcttcttaaagagagtaaggacctaaatagtctagtgtcatttgtctattatggttcatgtttatttttctatgttgatagcttgctctcagaaattcatgaatactcactgttcttgtttttccatctttctttgcaactgggatctgttctctcggccattctttgtttgctgaggctgaatgagcggcagatttccagagttggaatgcaaagcgaataagcgatgcttgttgctttctagagctgaattgctgatgtggttcattacagttagatgcctgatttgagcactttgtctatgaaattggattgaacaaatggagaacagccattggtcctactgttgctggtgttctgctatttcttagttcagtttcatggtctgatgaaagagagggaatgttactgttgatttttttggctagaattggatgaacaacacctccttagtttctgatctgtgggaattctgctcggccagcacgagttgtgcacacctgcagagaactacaacagggactatgctcatgacactgattgatagatgaagctgtgtgactaattggcagatctgcacacgttactgctccagtgggttgaactgattttattggctgataagatgcaacagtaattatcaatttgttataagtgtttggttgtgttgactgccctgggcatgttttcagttgagttcattggcatccttgctgcagatagaatcatgactgcagttgacttcttttgtttttattgatatgacttgcctacatagctcctcgtcctgctacctttgtcagcatttagtgaactggcagcaattttttttcttttctcgccttttgtgttttgttagaactagatagagcttgcaatgatatatggctgcaactctttacgcaagggcttgtttcttaacagctccagcaaaatttgttttttgcacttttttctgtttaaaactcaagcaacttcttttcttaaggactcccttttgaagttctttcttgtgtaatgcatttttagtaccattgctgcttgagccttgaggacagtaaatgattctgccatccggaccaatgctgggtgctggagcagaaaattgatgctagcctcaccagtgtggaccctttcagccagctccatgcgatgcattgcagttttgggaagacaaactgggtaactaggagcccagcttaccagcagctcagacttccactgttgttaccatggaaatgcaagtcgtttggctttaggtttgtgcattggtttaaatgatctggtatgcaaactagagaatatggcagtggacatacctgctacattgtcctgtcaccagaatatgctgacatttttgagaagttagttcatgtcggtaacggtaaaattggttccttgttggaaatagcccagttctccaaaacatggttcccagaggctctatagctttgctccttgtccgtgttaacgagctttgctgtcttgggactagactttttcatgaaggtagttacagctagatgcatctgtgtcaggattatgatttgttcttgaattaccgagatccaggaataacctaatctcagtgcttctcttctgagatcatggtggagagacacactaaccgccacaggggctttggcttcgtgacatttgaagatcggagggcagttgacagcgctattaaagagatgcatggccaagaaatagatggccgtaccatctcagtgaacaaggctgagcctaagatgaatacagatgacacaaggtatgccggtggtggtggacgaggagagtatcgtggtggtagaggtgatggtccaccccctggcaattgctttgagtgtggtcgtcctggtcattgggtccgtgactgccctagtgctgctggcggtcgttctggcaggttcccatccaagttcagtggtggcagtggcgttggcaggggagaccgcttttctggttcagataggtttggtgatcgttacatggatgatcgttatgatggtggtcgctatgggtaccgtgatcaagctgatgcaagggacaggtatgctggtggccgagatcgctatgccaatgaccgttacccatctggtggcgatcactttggtggagacaggtatggaggtggtccggattgttatgtgccaagtggttatggtagggagcgagaaagaagctacgagagagatggagttcgtggtggtggtggcggcggcggcggctatgataggagtggcccaaggggtggtggtgggtatgacagggatggtccacgcggcggtggaggaagtgcacgctatgatggaggaaattacagggagaggcctgggccatatgatcgccctagcaggggaggacgttttgatgatcgctactgatgaactgcctgtagactcaagctccttgtcttggtagtttaatgtttgcagttttgcatggccgaatgcttaatgggctatggaagatgcttaatttatccctcttcggcactttaatgtctgctctttatttcaaccagtactggggcactggtttgccttgataagtttatccagctgacagtttttgcatgagatgagtcatgctctgggctattaccctgcctgttggatatttcagtagctgaggtttgcagtgatcgattgtcattgttgatctgaatatctggtatgcgtggactatgtttaaagtgattgcctgtcatcattggtctatatagttggtgagcatatatatgttcagtgtcggtgcttgtcattgttgttggtctggatatctaggcttgcaaggatatatttgcagggctgagttgcaagggcttaacagaacaatagccaaagtaccttatattttagtagctggagaccatgttaattatgctataattagctggagaccatgtaaatttagcttagtttttgtcggcggtctgacttttggtgggattttatcttgaacaaacaccgtccctgacatttaagagtgtagagccgactaacagtagtcaatctctatttcacatttgtctaggatcgacttcgcacttgagaaaaacgattatattgataagaaaggaa

SEQ ID NO: 4967 - DNA, 2079 bp, Zea Mays
gcccaccccgcttccttccgaggtccgagtagcagagtctggccgccttgtcgcgacgcgacgcgcgatcccatcccttcccatccagcgcggctccaatcctgtcgcggccattaaaagcttccctcccctgcctctctgctccgctcgtctcttctggaaccgtccctcgctcgtcatctttccgccttcgctacgcaattcctgtccacgctgcgggccagttgtgacgaccgcgaagctcgtcagagaaagaagagaggccggcaggcgggcggcgatcggagatggcgccagagaagccccggaaggagcaggaggaggaggaggatgagttgatgctggaggatggaggcatcgaggagagcccgcgccgcagcttcgaggactgcggtgattccgacgaggaggacgatgacaacgatgaggagcgggacggcgacggcgtcggttcgccgcgctccttccagtcccacaagtggccgcagagctacagggaaacaactgatacttacacaatcgctgcatcaccgagctttggttacttgggcccttctacaagcaaatactcactcctcgatcttggtcgtagcggtctgggttctgacctgaagttgcctctattgtcggacaaggctgacggaaagcaagattctgtcaaaaccctgccgaaaacccttggttcaataagagatgagagggtctcatttcaattgcaacacacgggagaactctacattactcaagggtgcaatgtgacgcaaacagtcttcaatgggattaatgtacttgcaggcgttggccttctttccaccccgtttacaattcatgaagctggatggactggccttgcagttctagtatgttttgcgattgtttgctgttatactgggattcttctgaaacattgttttgagagcaaagatggtatctcaagttatccagacatcggagaggctgcatttggaagaattggccgtctgttgatatctattattttatataccgagctatatcgggtggtgtgattgcaactcttctcgtattcctgtccgttggtttagtcggtgctaccgatggtataggcttccattcaactgggaaggtagtaaactggagtggcatgccctttgccattggtatttatggattttgctactctgggcattcagtatttccaaatatctaccagtcaatgtccgatcgctctaagttccctaaggcactgttcatatgttttgcaatttgtacagctatgtatggatcttttgctgtcattggctttctcatgtttggagagaacacattatcccaaatcactttaaaccttccaaagcattcgattgcctcaaaagttgcactatggaccacggtgatcaaccctttcaccaaatatgccttgctgttaaacccactagctcgaagtttagaagagttgcgtcctgaaggttttttgaacgaaacatcatgctctattatactgaggactgcccttgttgcgtcaactgtatgcattgcctttcttctgccgttctttggtcttgtgatggctctcattggatctcttcttagtatacttgtggcggtcataatgccagccctgtgcttcctgaagatcgcacaaaacaaagcaacctgtccacaggtgatcgcgagcgtcggtatcgtaatactgggcgtcgtcagcgccgcgctggggacctactcgtccgtgaaaaagatcgcagaaaactactaggctcttgggacagtttctctccgcagaggctactaccacacggttccacgtacgtccggccggagctggggaatggtcagggtttacgtacacgatctcaaagttttgctagaactaccgaaattccctgtagattattactgttatgattcggaccacaatagtctacttatacaaacaaaaaaaaagaactgcatcatcacgtcacttggaataatgtaatcatgccctcctttttttagccgaggtccctaccatctcgctgtactgtagcaggttgctgtgctggcgactgttccctatacaataaggctctgctttgtgcaattgccaattgaggt

SEQ ID NO: 4968 - DNA, 2435 bp, Zea Mays
ttgccttagattagacagctcgcatgcgctaacaaaccgtgtccttgagacaaggtacgactgctccctgcacctgctcaataagaaccagagtgctcgtcctttcgcgctgcctgcttcagctccctccctggcctctccctctcgttgccataaaagattccaagcttgcccggcccgccgatcctactgccattaaagtcggcaagcggcgtcggcggcagcagcctgaaaccaggggaaaccgaaccaccacggtcaactatctatctatctgcaatctccatccatctcctcccacacccactgaccaaccacagcacagcagcctcaagatgctttacatggtgtagccggcaagaaccttccctcccgggcgcaaaggggctctctctcctttaatttccttcaagaggggatagatagcccctctttcccccacctgcatcttccctccggttgcgcgctgtccctcttgttggttcttggcatcgatcgtcggttttcgcgccgcctgcggaaatggcggcggggctgctgctcaagatggtcggcttctgcttctgggcgctcttctggctcgccggctccgccaccgtgagcacgaccacccccgccctcgccggcggcggcgaggcggtggtcgtggacgcccggtcagccatcgccgtcacggacgacgacttcgtctgcgccacattggactggtggccgccggagaaatgcgactacggcacctgcagctggggcctcgcctccctcctcaacctgaatctctctaacaaaatcctggtgaatgccgtcaaagcgttctctcctctgaagctccggctgggcggctctctgcaagacatgctgatatacggcaccggcgacactcgccagcaggcgccctgcgccccgtttgtgaagaacgcgtcagccatgttcggtttctcgcagggctgcctgccgctgcgtagatgggacgagctcaacgcgttcttccagaaaaccgggccaaggatcgtttttgggctgaatgcgctgaatggccgggtcccgatgcctgatggttctttaggggggccgtggaattacacgaacgcagcttctttcattcgctacaccgtgagcaagggatacgatgtacatggatgggagctcggaaatgagctcagtggcagcggagtcggggctcgaatcgacgcggaccagtacgcagcagacgtgatcgctctgaaacacatcgtcgacagcgcctaccaaggggttgacgaccatctggttcagaaaatccttgacccttcttacctcgacggcgaggcgagcacgttcagcaaccttcaggggatactcaagtccgcaggcacgtccgctgtcgcctgggttggcgaggctggaggcgcgtacaacagtggccaccaccttgtcactgatgcgtttgtgttcagcttctggtatctggatcagcttgggatgtcgtcgaagtacgacacgaagagctactgcagacagaccttggttggaggcaactatggcctgctcaacacaagtacatttgaaccaaaccctgactattacagtgctttgctgtggcaccgcctcatgggcaccaaggtcctctcgacggcattcaacggcacgaacaagatccgtggctacgcacactgcgcgaaaaactcggaagggatcactctgctcctgatcaacctggacggcagcagcacgaaccgcatctacgtgacgagccaaggcgcgcacgcccagagcggaaggaagaaggggagcgaagggctcggcgaagcagcagcagccgcgctcacgagacaggagtaccatctgactcccaaggacgggaacctgcagagccagcaggtgctgctgaacggcaacgccctggcaaccgacgccgacggggagatcccggagctggagcccgtgcaggtggaggggacgcagcccataaccgtgggcccttactccatcgtgtttgctcacgtccccagcttctacgctcctgcgtgcctgtagctagagttttcgtctggattttttttttccagcctttctcggtgtgcatctcgtaggttaggtaagtctgtccggggtgaacggcgaagcttgttcatctctgctcatagtccgtgaagtgtgtaagctgcgaggctggaaggtttgtggtttatgattgtttgggaaaggagtggtcagatatataatgtgtgagcaaaagaaggaaggaagctggaaatgagataataaaagaaagggtttggagtttattttgtttgagagagcagcagaaaaaggtgcaccaccgcagctacaggattggtgggcaagaccatgttgatgagtgtctgtcagttttcaccgacaggcgacacacaagtcccaccgccaccgggattttaggtctgttttccttgccctaaaattcaaaggccaattcc

SEQ ID NO: 4969 - DNA, 1320 bp, Zea Mays
gccggttccgttgcggttaccgccgatcacatgcccaaggccgcgcctttccgaacgccgagggccgcccgttcccgtgcacagccacacacacacccgcccgccaacgactccccatccctatttgaacccacccgcgcactgcattgatcaccaatcgcatcgcagcagcacgagcagcacgccgtgccgctccaaccatctcgcttccgtgcttagcttcccgccgcgccatggcgtcgaccaaggctcccggccccggcgagaagcaccactccatcgacgcgcagctccgtcagctggtcccaggcaaggtctccgaggacgacaagctcatcgagtacgatgcgctgctcgtcgaccgcttcctcaacatcctccaggacctccacgggcccagccttcgcgaatttgagtgctacgaggtctcagccgactacgagggcaaaggagacacgacgaagctgggcgagctcggcgccaagctcacggggctggcccccgccgacgccatcctcgtggcgagctccatcctgcacatgctcaacctcgccaacctggccgaggaggtgcagatcgcgcaccgccgccgcaacagcaagctcaagaaaggtgggttcgccgacgagggctccgccaccaccgagtccgacatcgaggagacgctcaagcgcctcgtgtccgaggtcggcaagtcccccgaggaggtgttcgaggcgctcaagaaccagaccgtcgacctcgtcttcaccgcgcatcctacgcagtccgcccgccgctcgctcctgcaaaaaaatgccaggatccgaaattgtctgacccagctgaatgccaaggacatcactgacgacgacaagcaggagctcgatgaggctctgcagagagagatccaagcagccttcagaaccgatgaaatcaggagggcacaacccaccccgcaggacgaaatgcgctatgggatgagctacatccatgagactgtatggaagggtgtgcctaagttcttgcgccgtgtggatacagccctgaagaatatcggcatcaatgagcgccttccctacaatgtttctctcattcggttctcttcttggatgggtggtgaccgcgatggaaatccaagagttaccccggaggtgacaagagatgtatgcttgctggccagaatgatggctgcaaacttgtacatcgatcagattgaagagctgatgtttgagctctatgtggcgctgcaacgatgagcttcgtgttcgtgccgaagagctccacagttcgtctggttccaaagttaccaagtattacatagtgtatttgctggcgcag

SEQ ID NO: 4970 - DNA, 2246 bp, Zea Mays
ctgtttctgtttctattctcacgtcacgcgcaggctgcgggcaagcaatggcaggtgggccctgtcgcgctggccgatccagcgctgactcagcccccgcaccgcatacatgagagatgagaagccgccacccgccgctgcggctgcggcgcccgcgccaccacgagtgacccatcgtgctcggatcgtacggcctcaaccgcaaaatccagtatttaagcgctgcggaacactcgtcgagaggagaggacagagcagaggaccaccaccggaccgggctggagctggaggcgtggcggcgccggcgcgtccatcaggaggagaaggggcagggatggtgctgggcggcggcatggcggcagcggccgtaggcggggacgacgccgtcgtcatgcagctgggcggcgccgagggcgaggagaccgtcgtcaccgtcaactgccccgaccagacaggcctgggctgcgacctctgccgcaccatcctcgagttcggcctccgcatcacccgcgccgcagacgtgtccacggacggccactggtgcttcgtggtgttctgggtcgtgccccgctcctcgtccatcaaggtccggtgggcgagcctcaagaaccggctcatgtccatgtgcccttcctcctactccatccccttcttctaccgggacgtgagccagccagagccaggccccttgcagttctacctcctcaagctcatgtcgccggaccgcaaaggattgctgcatgatgtgacgcacatactatcggatctggagctcataatccacagggtgaaggtgtcgaccacaccggacggaagagttgtggacctcttctttatcactgatggcatggaactgctgcacagaaaggagaggcaagaggagacctgctcggcgctaactgcaaccctgggcccttccatcagctgcgaggtcgtaccagcagaagggttccagcaggggttctcttccctcccgccggagatcgccgaggaactgttcagggcggagctagctgacactgacagcgaggtgtgctcgagcccgctcagcgcggagctgaggaaggtccggacgacggccactgtcaacttcgacaactccctgagccccgcgcacacgctggttcagatcgtctgcgctgaccagaaggggctcatttacgatatcttgaggacgatgaaggactgcaacatccagatattttatggccggttcagatcagacaagaaagggtcagccagcaaaggttcatcaggttgccgtgaggtggatcttttcgtgaagcaagtagacgggaagaaggtgactgatcctgcgaaacaggacgcgctgcggtcacgcctgaggtccgagacgctccatccgctcagggtcatggtcgtcggccgtggacccgacacggagctcctcgtcgccaacccggtcgaggcctccgggaagggacggccgcgcgtgttctacgacgccactcttgctctgaaggcgcttgggatctgcatcttctctgtaagaactgcttcttttgtttgttccatttcaggcttagtatttcactccattgggtcttcttcttttgctccgtttcaggctgagatcgggaggcaagcggcgtccgagcgccactgggaggtgtacaggttcctcctggatgacagcaaggagttccccttggcaagcagcctcgctaacaggaactgtgtcgtcgatagggcgaggaagacgctgatgggatgctacaactgagacttgggtgggtgtcgatctgtatctgtctgcaagaatccaacgaagcagtgcaagtgcaatgcaaggcttcccccatccacagatgcatttgcatgctatgctgcttcctggagttgtgcacggggatggtttgaaaccagagttgtggacagcacagactggaatgaatgaacatcttgctgccatggatccattgtctacggaaaaaggagcatgcttggtgtggagggatgctgacacagatacatggaggagccggcctgttgtatagcttattttagtggaacaactgctgcctcaccatcttgccttccccttgtcgttgttctcctcatgtaagcgcagtttgtaaggatgcatgtgttggagttggaaagtgatccgatggcggatgctactactgctccctatacagtgagtacagcttggttgttcaaagaagatactgatgcccggacaagcaccacccgctgcattattggtgagcgcgcacaggcac

SEQ ID NO: 4971 - DNA, 2595 bp, Zea Mays
agaatgggtaaataccgcaaaaaccagataagcccggtgcgccgtctccttccttctcggcgctctctcgcccgcgcctccatcactcgctagtcgctccctccgcctccgtccaccatgcccgcctcactccttcctccgaccttcctcccccaccacctgcgccgcctcgctcccgccggttgcactacctcttccgtcacctcctcctcggtctccatcccagcgagccgctacgacttcgagcccctcttggcctacctctcgtccccctccgtatcggcctccctcacctcgccatccccaccggcatccgttccggcgcccgagcaccgcctcgccgcgtcttactcggctgtcccgtcgcacgagtggcatgcgttgctgcgtgacctcgccgctagtgacgcgtccctgccgctggccttcgcgttgctacctttcctccaccgccaccgtctctgcttcccgctcgacctcctcctctcgtctcttctgcactcgctctccgtgtccggccgccttctcccgcactccctccttctctccttcccgccgtcgctctccgacccgccgtccccactgctgctcaactccctcctcgctgcgtccgccgcggcctcgcgccccgccgtggccctccggttgctctcgctgctccgcgagcacgatttcctcccggacctcgcgtcctactcgcatctcctcgcttcgctgctcaacacgcgggacccgcccgacgccgcactgctcgagcgcctcctcggtgacctcagggagtcgcggctcgagcccgatgctccgctcttctcggacctcatctctgctttcgcgcgggcggcgctcccggacgctgcgctggagctcctcgcctccgcgcaggccattgggctcacgccgcggtctaacgcggtcaccgctctcatctccgccctaggcactgcagggcgcgtcgccgaggcggaggcgctgttcctcgagttcttcctcgctggggagatcaagccgcggacgcgtgcttacaacgcgctgctcaaaggttatgtcaggattgcttcgctcaagaacgcagagcaagttcttgacgaaatgtcacaatgcggagttgcgccagatgaggccacttacagcctgcttgtggacgcgtacacaagagctgggaggtgggaaagtgcgaggatactgctgaaggagatggaggccgatggagttaaaccaagctcgtacgtgttcagtcggatccttgcaggattccgtgacaggggggattggcaaaaagcttttgcagtgctccgagagatgcaagctagtggagtaaggccagatcggcatttctacaacgtcatgatcgatacatttgggaagtacaactgccttgggcatgctatggatgcctttaacaaaatgcgagaagaagggattgagccggatgttgtcacatggaatactctcattgatgcacattgtaaaggagggcggcatgaccgtgctgcggagctgtttgaggagatgcgtgaaagcaattgcccaccaggcacaaccacatacaacatcatgataaatttactcggagagcaagaacactgggagggtgtggaagcaatgctatcagagatgaaggagcagggactggtacccaacattatcacatatactactctcgtggatgtgtatggaaggtccggtaggtacaaggaggcaattgattgcattgaagctatgaaagcagatggcctggaggttagcatcttagtgttgaattcgttgattaatgcttttggtgaagatagaagggttgttgaagccttctctgtgctgcagttcatgagggagaatggtttgaggcctgacgttataacatacacgacattgatgaaagctttaatacgtgttgagcagtttgataaggttcctgttatctatgaagaaatgatcacatcaggatgtgcccctgatagaaaagctagagcaatgctgcggtcaggtttgaaatacataaaacacatgagggttgcataggaaactaaacacaattactgatagcatctgatggaatcatataccttctcctgatcttatagaacatttcaacagaaggtgaagcaccacatgctgacagacacgatctgcttttgcacaagatgatagaatcatcaatatagtcacttcgtcttcctaatcacctaggggaaggcgaatatataatacatcttgatcatttgcaatggaaggagattaaatacatgacaccaagaagtcaggatcttggtataggaaacaaatacatagtctgtccagacctcaaaatttgagttggaatcttggaattgacatttccttataactcaattccagtattttgctgagaaaatcaattgtaacatggaatccaattccagccttttcaaattgtatctaggcgtagacatttctagaatttgtctagggcgatacaaaaggaaatgtaatgcatttttattgcctaaaacaaactttggcattaggtcctgtttggatccttgaattgaattgtattctaacaatcataatttagacatagatcaattaagttaatatagttttacatggaacata

SEQ ID NO: 4972 - DNA, 1276 bp, Zea Mays
atgatgaagaagaaaaatgcgacaattgacattgacgatgcaaatgtagtcgaggttgataggagtgctaggaggctgcactggacacatgatgaagaagttggattggtcctgtttgggagagcttcacttcaaaaacttcagctttggttttccagtttcactataaaacagctccaacaaattgttaagcacataatgtctcgatacaatgaccgatatgaccataacaaccgatatgatcgtcatggtcgacatggaagtaacaccaagttgtacgtgggccaaatttctccatatacccggacacaggatcttgaggacattttcagaaaatatgggagattgcgcaatgtggatatgaagagggagtttggcttcgttgagtttactgatcctcgggatgcagatgatgcaagacatgaccttgatggccggatatttgatgggagtcacctcattgttgaatttgctagaggggcccaacgtggtccaggaggtgttcctctagatggcaaaggaccatcttttcctggccgctgttataactgtggaatggatgggcactgggcgtgggaggagctacttgaggtctgcatctcctcaccatgggaagggccgagggagaagctactcaaggtctctatctccttaccttggaaggggccgagggagaagctactcgaggtctccatctcattatcatcgcaggggcagaagctggagttacagtcggtcgcactcgccaaggaacaactctaaggcttatggtgaagaattgccatcaactagatctggttatagccgcggccccaggaggagctccccaccgatggagcgagctgaatgcaatggtggtagccccatgagaggtgaagctcgggggaagtgacagcgacctataaaatcactctgggattgtaaagtgtcaaacatttgttctgaactttttggtgactatgtgctgagactgaacttcgacaccagaagaatgtttagcggtgggttgtaaattctcagtaaagctctcctgaatgttgttggttatatgccgaggcatgtgacatgatgcctgaagagtttagcggattggtgtttgtgtagaatattgcctctgcttacaatcagagtcaactatgaatttaagttgaatttgtagaagtataatgtcgtgttcaacatggtaggaggctctggacgagctgatttatcatcaggccatcacaatcacaagtggtacgccatatgccgtgggggttctatgtccgtggcctag

SEQ ID NO: 4973 - DNA, 2219 bp, Zea Mays
cctacttgtctagtagcaactagcagtaggcactaggcagtagactttagctctgatgatgaatggaggggtaaaaaaacgcgaggcaggcaggccatcgtgttgctagatctcagctgtaccagtgcctcttcctgctatctggtcactggtattttgaccactggtgcccactgcccagacccggtgctcgccttctcccctcccctcaatctccagcctctctttctcgctcgctggccacccgccgcaccctccccatcaggccagcagcgaggaagaatggagtacgagaggattcatcagaaagcccagcctggtgctctttctccaacaaagctgaggatgaagatcctgggagcccacaatcgagttagagtcatcaccagcaactcgtcatcgcggacgtcgcctgcgaaaaccatcgaggcttcacaggcgcagaacaggctactagtttgtgatgttcttgaagaagacagcgcagatagcacaaaacacccgtcggcaactaacaaaaccgaagccgtagaaaaggttcaaaaggatccagcagtggacatcagtcaagtgcagaacgcttccaccagttcggctgctaagccagcgacaggcagctcgagtatgatacagatacacccactgagacccgcggaagaagacagcactaccgaatgcgacagtggtctcgacaacgccagcactagcagcttcgagttccacggagtggagaaggcggcggcgacgcagaatccagcagccgggtacttgtccaggcagacttccatttcctccaagtggaatgacgcagagaaatggatcgtgagccgccagaatgtcagtcagaagaacaacgtcgccaagggcgcgttgcagaaccagacagtaaaccagatgagctccgccgcagccaggggcgccgttgtgcccaaaatctctgctcgtcccgtgcagaaaatgaagagagtgaatccagctttgtctgctccgcgcagcatactggagaggttgtccttcgcttcgtatcagcctaagttggttaggcatgcagatgtctgtccagttagtaacgctggtgctaactcagagcatcacaaggcaactgatactggttcatcgattgaagtgaagccctgcaacgatacgaatgatattccaacagtccagtcgtcggtgtccgtgagagatgtgggcacagagatgactccaatacctagccaggaaccttcaagaactggaactccactagggtcaaggacaccaactcgaagccctaactgttcagtaccgtcaacacctgtaggggggaggtcaatagcatctcctcctggagaagactgcacagacgatggcccatttttccacaggaaatgcggcgtacatgcaaatgaattgtcagatactgagacgaggcttaaaacaaggcaagaaatcgctgcgcttggcatacagctaggaaagatgaacattgctacgtgggccagcaaagaggagctagagctagtctctgcggcaccgagcatcgctgatttggagcgcatcaggaaggaatatgctgctcgtgctgcatcgtatgaggaggcagaaaatactaaacatacagcaagattcaaaaaagaagaggtgaagattgaagcttgggagggtcgtcaaagagcaaaaattgaatatgaaatgagaagaatagagtaatgtcgaaaaacactttgtggcaggaatttgctgagagaatgagaagtgaggccatggaaaagatggccgaaaagctagagatgacgcgccgcatagccgaagagaaacgagcttcggccaacgccaaaatgaaccagcaagcagctatagcggttcagaaggccgagaagattcgccaaacgggacgagtcccaggatcgagtatcctacgctgcggtggctgcttctgtggaccgtagtagatcatacataggattcgacagctagtatgttggtctgggatatatagtggtgggaaacctgaactccaccctctacaagtcagcattccttgattttagcatgaaaaaaggaatgtctctaaggtattcagatgcaaacgtgttcttgtttgtcatgtatgtaaattattccaatgattttaacttgggtcggtgtacaaggtaaccagctgttcgttggttaacgaagaagtcacgaatcgttcaaacattatgtttattattatgcctaaaattctaaccgta

SEQ ID NO: 4974 - DNA, 1065 bp, Zea Mays
ctataaataaccaagtctccatgcctcgtccgcatctacacacgcccttcccaagtcccaaccgaacacacagagcacagcaacagcggccacctgccgctcagtgcgtgccatgaccatgaagctggatgtcccggcgaggcagaagagccaggacgcagagcagaacggcaggacagcggccgcgggcgtcctcggcattgacgagccgtggagccagccgaaactccgtcaccccggcgacgcgcaggccgacgccgacgccctggtgccgccgctcaacttcgccatggtcgacgacggcatcttccgctcgggcctcccggacgccggcagcttccgcttcctgctctccctcaatctgcgctccgtcgtgtacctgtgcccggagccgtacccggaggagaacgcgcggttcctgcagcagaacgggatccagcttcaccagttcggcatcgaagggagcaagagtggtccggcagtgccggatgccatggtggtgcaggaaccattcgtctacatccctgaagagatcatccgagaggcgctcaaagttattcttgacgcaagaaaccagccggtgctcatccactgcaagagaggcaaggcaagcctgttgcgttccacatcgcactggctgcgtcgtcgggtgcctgaggaagctgcagaagtggtgcctgtcttcggtgttcgacgagtacctgcacttcgcggcggcgaaggcgaggagcactgaccagaggttcatggagctgttcgatgcttcgagcttgacgcacctggcggcctcatagtcacagtattgagcgctgaccagagcgagtggctcccgaccggtcccgatcctgcaaccatgctgcatcaagcaagcgattttcccctgctgtttccgaagcaactcggccgagaataatgctgctggaaccatgagtgtgtccgcgagaattgataggcaatggccttaggttttgttgtgtgagtgctgtggttgcttcgtgtgcaactgatttcagattctgaattggtgatggctgtgattggtgatggctgaactctgaactgaag

SEQ ID NO: 4975 - DNA, 2351 bp, Zea Mays
gagcggctgctgcggcgcgccggggtgggcctgccggctgcggcctgtgggcgacggtgccgcgagccacgagcgcgtaccgcggaggtgcctggtggcatagtgtctagtggcggcggcgcgtcgtgattcgtgaaggtctcaggccgggcgttccatttaaaatctcctgaaacactgtttgaattcaacggacactgaagccggagcacggacatggtctagtttctcaaaaacaatttgacacactttcatattttgaatacgggacccctttgaatacacagggcgaaatccttcgtccgcctctattcctttttacccctacctccctccgttcgcgtcgcccggcggccatccctccctccactgatgtccatgccacaatccttcctcctcctcccctcctttttacccccacctcccttagttcgcctcgcctcgcggccgccatcgtcgccatccctgaccgccctcagattccaccgcgtcgacgccaagctttccccgccactcctcgcggcatcccacagtcctcctggcggcttccgcggatactgtgattctggcggcagcgatggaggaagcggaggtgatggcgggcgaggaatggattctcctggccctggggacgggtggtggtgggagcggtggctccaggccctccacccggagttcttcctcctgttcctgctcctccagtccggcgccgcatccgcgctcgctgaggccctcagcacttccggtgatgacgcgggggacgtatgggaggtgaggggcggcaagcgcactcgcctcatgccggacccaacctggacctcctatctcattgctggggacgacggaacaaagcgggaggacggggatgaaaagtgtcagcagcgactaccttaactactcgctctggcgcggcgtacagggtgtggcgagccagatcagcggggtgctttccacacaggctctgctctatgcggttgggttagggaaaggagcgatacccactgctgctgcggtgaattgggtgctgaaagatggcctcgggtaccttagcaagatcatgttgtccaaattcggacgccattttgatgttaaccccaaagggtggcgactatttgctgattttctggagaatatggcttatgggctggagattctgactccagtgttccctcacctgtttgttccaattggggcggctgctggtgctggccgctcagcagcttctttgatacagtctgccaccagaagttgcttttacgctggatttgcagtacaaagaaactttgctgaggttattgcaaagggtgaagcgcaaggaatgttcacatgtattgcaacctcaagtcatatcaatcgattcagctgagaacactgaatccttaccgcgcaagcttggtgtttagtgaatatttgttaagtggacaagttccatcggtcaaagaagttaatgatgaagaacctcttttcttcaatttgtcacttggtgcttcacgtcaaagtaagattttgtcagcggaagcaaaagatgctgcagatagaatatgccggcggttacaaatgggttctaagcttagtgagataattgagagtaaagaagatgcttgtgcattgtttgatctttacaaaaatgagcaatatctgcttatggattacaaaggaaaattttgtattgtacttaaagagggatcttctcccgaagacatgctcaaatctttgttccatgttaactatctatattggttggaaaggtatatgggtttcaaaccaagtaatgttgcttcagaatgtagacctggtggaaggcttgaagtatccctggattatgcgcagagggaattcagccatgtcaaacatgatggttctgatggtggctgggttatggatggtctgattgcaaggcccttgcccgttagaatacgaataggagatggtacttcttaggtctttgctctattaactattctcagagctacatctacatccgttgtacagttttgcttattaagttgctgatgtggttcgacaccatattcgaaaggctctcgcctgcagtttttaccctgatattaggatggaagtggttacatctctggtatattttttatcttttgacttttgaagcctgtgatagtgcagtagtgctcacaagattaagggcactcgggctgttatagagattcgagacagcagagcagatgaaggatttctaggtttgtcaatgctcagtatgcgcaccttgtgtgctcgagatcaattttactggcaatacttgtctggttagcatcgtttcgataaaattagcattacataatgttaatgcaacatgtgcgagaatgtaaaacctgtaattt

SEQ ID NO: 4976 - DNA, 2453 bp, Zea Mays
gagcggctgctgcggcgcgccggggtgggcctgccggctgcggcctgtgggcgacggtgccgcgagccacgagcgcgtaccgcggaggtgcctggtggcatagtgtctagtggcggcggcgcgtcgtgattcgtgaaggtctcaggccgggcgttccatttaaaatctcctgaaacactgtttgaattcaacggacactgaagccggagcacggacatggtctagtttctcaaaaacaatttgacacactttcatattttgaatacgggacccctttgaatacacagggcgaaatccttcgtccgcctctattcctttttacccctacctccctccgttcgcgtcgcccggcggccatccctccctccactgatgtccatgccacaatccttcctcctcctcccctcctttttacccccacctcccttagttcgcctcgcctcgcggccgccatcgtcgccatccctgaccgccctcagattccaccgcgtcgacgccaagctttccccgccactcctcgcggcatcccacagtcctcctggcggcttccgcggatactgtgattctggcggcagcgatggaggaagcggaggtgatggcgggcgaggaatggattctcctggccctggggacgggtggtggtgggagcggtggctccaggccctccacccggagttcttcctcctgttcctgctcctccagtccggcgccgcatccgcgctcgctgaggccctcagcacttccggtgatgacgcgggggacgtatgggaggtgaggggcggcaagcgcactcgcctcatgccggacccaacctggacctcctatctcattgctggggacgacggaacaaagcgggaggacggggatgaaaaggttggaagcatctctaaggacctggccgccctacggaggcagctggggcggtcgtggcggcggtacgccgaagttgctgttcatctgttactccctgacggataccctcatagtgtcagcagcgactaccttaactactcgctctggcgcggcgtacagggtgtggcgagccagatcagcggggtgctttccacacaggctctgctctatgcggttgggttagggaaaggagcgatacccactgctgctgcggtgaattgggtgctgaaagatggcctcgggtaccttagcaagatcatgttgtccaaattcggacgccattttgatgttaaccccaaagggtggcgactatttgctgattttctggagaatatggcttatgggctggagattctgactccagtgttccctcacctgtttgttccaattggggcggctgctggtgctggccgctcagcagcttctttgatacagaagttgcttttacgctggatttgcagtacaaagaaactttgctgaggttattgcaaagggtgaagcgcaaggaatgttcacatgtattgcaacctcaagtcatatcaatcgattcagctgagaacactgaatccttaccgcgcaagcttggtgtttagtgaatatttgttaagtggacaagttccatcggtcaaagaagttaatgatgaagaacctcttttcttcaatttgtcacttggtgcttcacgtcaaagtaagattttgtcagcggaagcaaaagatgctgcagatagaatatgccggcggttacaaatgggttctaagcttagtgagataattgagagtaaagaagatgcttgtgcattgtttgatctttacaaaaatgagcaatatctgcttatggattacaaaggaaaattttgtattgtacttaaagagggatcttctcccgaagacatgctcaaatctttgttccatgttaactatctatattggttggaaaggtatatgggtttcaaaccaagtaatgttgcttcagaatgtagacctggtggaaggcttgaagtatccctggattatgcgcagagggaattcagccatgtcaaacatgatggttctgatggtggctgggttatggatggtctgattgcaaggcccttgcccgttagaatacgaataggagatggtacttcttaggtctttgctctattaactattctcagagctacatctacatccgttgtacagttttgcttattaagttgctgatgtggttcgacaccatattcgaaaggctctcgcctgcagtttttaccctgatattaggatggaagtggttacatctctggtatattttttatcttttgacttttgaagcctgtgatagtgcagtagtgctcacaagattaagggcactcgggctgttatagagattcgagacagcagagcagatgaaggatttctaggtttgtcaatgctcagtatgcgcaccttgtgtgctcgagatcaattttactggcaatacttgtctggttagcatcgtttcgataaaattagcattacataatgttaatgcaacatgtgcgagaatgtaaaacctgtaattt

SEQ ID NO: 4977 - DNA, 3963 bp, Zea Mays
cttgtgcgaagttctgtcgtgcaccattataccggtcgttgtcactgttgtttcatttggtgtatattctctactgggaggtgatttgacaccagcaaaggcgtttacttctctttcattatttgcagtcttaaggtttccacttttcatgctcccgaatctgataactcaggtggttaattgtaaggtgtcattgaagcgtctggaagatctcctgttggctgaagagagattacttctgccaaatccacctattgatcctgatcttccagccatttctatcaagaatgggtatttttcatgggaatcagaggctcagagaccaactttatcaaatgtcaatctggatgtacctgttggaagtttagttgcaatagtaggaagcactggtgagggtaaaacttctctcatatctgcaatgcttggagaaataccaccagtatctggatcaggtacctcagtggtcattcgtggatcggtggcttacgttcctcaagtttcctggatcttcaatgctactgtacgtgacaatattttgtttgggtctccctttcaacccccacgatacgagaaagcaattgatgccacttcattgcggcatgaccttgacctactcccaggaggcgatctgacagagattggtgaaagaggagttaatattagtggagggcagaagcaaagagtttcaatggcaagagctgtgtattctgattcagatgtgtacatatttgatgatccactcagtgcattagatgcccatgttggccggcaggtatttgataaatgtatcaaaggcgaactgcagcataaaacccgggttcttgttaccaatcagctgcattttctgccatatgtcgataaaatactgctaattcatgatggtgtaattaaagaggagggtacttttgatgaacttagcaacagtggggagctcttcaagaagctcatggaaaatgctggaaaaatggaggaacaggtggaagaggatgaaagtaaaccaaaggatgttgcaaaacaaactgtgaacggtgatgttacaatagctgatgaaggttcacagaagagccaggatagttctagtaaaacaaaaccaggaaaatctgtccttattaagcaagaggaaagggaaactggggttgtcagtgcgagggtcctttcacgttacaaaaatgcactgggagggatatgggtggtgtccatactcttcttttgctatgcactgactgaagttcttcgcatttcaagtagcacatggttgagcatttggactgatgagggttctctgaaaattcatggctctggttattataatttgatctatggaattctttcctttgggcaggttctagtcacactctcaaattcatactggttgattatatcaagtcttcgggcagccaaaaggcttcatgatgccatgctccgatcaatattgagagctcccatggtattttttcatacaaacccacttggacggatcatcaacagattttcgaaggatatgggtgacattgaccgaaatgtcgctgtatttgtcaatatgtttatggcacaaatatctcagttgctctcaactttcgttctcatcggctttgtcagcaccatgtctctttgggctatcatgccactcctgattttgttttatgcagcttacctctattaccaggcaacatctcgcgaggtgaagcgtctggattccattaccaggtctcctgtgtatgctcagttttcagaggctttgaatggtctgtccacaatccgtgcctataaagcctatgatagaatggcaaatatcaatgggagatcaatggacaacaacattaggttcacacttgtgaacatgggtgcaaataggtggctagctattcgtctggagacattgggtggcatcatgatatggtttacagcaacatttgctgttatgcaaaatcaacgagcagagaatcagaaggcctttgcttctacaatgggtcttcttcttacttacactctcaatattaccaatttactcacagctgttcttcgtcttgctagtcttgctgaaaatagtttaaatgctgttgaacgggtcggaacatacattgagttaccttcggaagctcctcctgtcattgaggatcataggccaccccctggttggccatcatcaggtgtcatcaagtttgaagacgttgtgcttcgatatcgaccagaacttcctcctgttcttcatggcatatcttttgttattaatggaagtgagaaggtaggaatagttggcagaacaggtgctggcaaatctagcatgcttaatgctttgttccgtatcgtggagcttgaacgagggagaatattaattgatgattgtgacacttctaagtttggaatttgggacttgcgcaaagttctaggaataataccacaggcaccagttctattctcaggttctgttcggtttaatctggatccctttaatgagcacaatgatgcggacctctgggaggctctggaaagggctcatctaaaagatgttataaggaggaattctttaggattggatgctgaggtttctgaagctggtgaaaatttcagtgttggacaacgacagctgttgagcttagctcgtgcgctgctgagaagagcaaagatacttgtccttgatgaggcaacagcagcagttgacgtgcggactgatgctcttattcagaaaacaatccgagaagaattcaagagttgcacaatgctcataattgcccaccgtttgaacacggtcattgactgtgacaggttgcttattctaagttctgggcaggttctggaattcgactctcctgagaatcttctaagcaacgaggggagtgctttctccaagatggtgcaaagtacaggacctagcaacgcagaatacctcaagagtcttgtatttgcaagtggagaagagaggtcccggagggaagaaatcaagctgcaagatatccaaaggagatgggttgcatctaaccgatgggctgaagctgcccagtttgcgcttgctagaagcctcacatcatcacatagtgacctccttgcattagaagctgccgagggaaataatattctgaggagaacaaaggatgctgtaatcactctgcaaagcgtactggaagggaagcacaatactgaaatcgatgaatctctaactcagtatcaggtcccagctgatcgatggtggtcttcactttacaaagtgatcgaaggcctcgccacaatgagcagattgggccgcaaccgtctgcagcaaccttcttataattttgagaacaacaattctattgactgggaccaaatgtagatgtagaattctggatcacaacagcattgtggagtaggctggaggtgtagttatttctggcggatttgattcctgcggtgtgtaaacgctgcagcaacacgtaacttgcgaataaggaacgagttttgccacagcaggacgatccttgtaccgtcgtccgcaagggttgtaatttctcagggaccgttacgacacgattgtatgtcaggttttgacagtttgagccaatgcaattcttctaatgaaaaagacaagtgcatgtgaatggttagcatctgcctatcgcctatcgggtatcatgtggagtcgtctggtataccgtcctacacggctacacctgagaacgaagcgaccttacccccaactatcaccttgtagcgatccgaagttgttcatcttcgagtttcagttctctaactccatcgtagctaagcgtttcagcaatgggtcaagagagagatttaactatttgtcaccgttaggaaggccacatatttgtttgcttgttttacgtggcaactgtacgattttttatcggaaacgctaactggtctattttattgatgtaccatgttaaattagcatgtcacggtggatcctagtcttttttccggagagacacctggaaagtcatttttaccttcgcattttca

SEQ ID NO: 4978 - DNA, 5637 bp, Zea Mays
ccaccccaaaagcccaaactccggtgccatcagtgtattctctaatcacctcctctcctccctccgctccttcgtcctccccgcgaagggaggggtgtgtcctgtgcccgccaccgcgtgggatgctcacgcttcgtctccgccaccgcctctccggttgatccgccgctgaggagaacatcagaactgattgaagaacagggttggtaagtggagggagcgagatggggttcgacccactggagtggtactgccagccggtcaaggatggtgtgtggtcgcatgtggttgagaatgcgttcggcgcctacactccatgtggcactgacacccttgtagtctgcatctcatacctcgcactctttggagtttgcttctatcgtatatggaggacgacgagggactacacagtgcagcggtacaagttacgttcaccatactacaactacctgcttggactgctcgtggtgtactgcatagcagagccgctttatcggatcatcactggtacctccatcatgaacttggatgggcagcctggccttgctccatttgagattgtctcattgatcattgagtctgttgcttggtgctgtatgcttgtaatgattctgcttgaaacaagaatttacatcaatgagttcagatggtacatccgatttgtggttatttacatgatggttggcgaagctgctatgttcaatcttgtgctctctgtgaggcagtactacagttcaagttcaatcttttacctatactgcagtgagattgtatgccagttcttgtttggaattctcatggtggtttatctgcctagcttggatccatatccgggttataccccgatcaggaatgaagtgttggttgataatactgattatgaacctcttcccggcggtgagcagatttgccctgagagacatgccaacatatttgccagaatattcttttcatggatgactcctttaatgcaacaaggatttagaaggcccattacagataaggatatctggaaattggatagctgggatgagactgaaactttgtatagccagttccagaaacgctggaatgatgagcttcaaaaaccaaacccttggctgttacgagctcttcatagtagtctttggggaaggttctggctgggtggatttttcaagattggcaatgatgcttctcaatttgttggtccacttgtattgaacctgttgttagagtctatgcaaaaaggtgatccatcttggagcgggtacatctatgctttctcaatctttgcaggagtgtcacttggggttcttgctgaggcacagtactttcagaacgtcatgcgtgtgggtttcaggttgaggtccacattgattgcagctgttttccgcaaatctttgcgactaactaatgatagtcgtagaaagtttgcttctgggaggattaccaatttgatttcaactgatgcggagtcccttcagcaagtgtgccagcagcttcacagcctatggtctgctcctttccgcattgttatttccatggtccttctatatgcacagcttggtcctgcagcattagtcggtgcactcatgctggttcttttgtttccaattcagactgtaatcatcagcaaaatgcaaaaacttactaaagaggggttgcaaaggaccgacaagcgaatcagtctcatgaatgaagtattagctgctatggatacagtcaagtgctatgcttgggagcaaagtttccagtcaaaagtgcaggacatccgtgatgatgaactttcttggttccgcagggctcagttgcttgctgcgtcttaaggtttccacttttcatgctcccgaatctgataactcaggtggttaattgtaaggtgtcattgaagcgtctggaagatctcctgttggctgaagagagattacttctgccaaatccacctattgatcctgatcttccagccatttctatcaagaatgggtatttttcatgggaatcagaggctcagagaccaactttatcaaatgtcaatctggatgtacctgttggaagtttagttgcaatagtaggaagcactggtgagggtaaaacttctctcatatctgcaatgcttggagaaataccaccagtatctggatcaggtacctcagtggtcattcgtggatcggtggcttacgttcctcaagtttcctggatcttcaatgctactgtacgtgacaatattttgtttgggtctccctttcaacccccacgatacgagaaagcaattgatgccacttcattgcggcatgaccttgacctactcccaggaggcgatctgacagagattggtgaaagaggagttaatattagtggagggcagaagcaaagagtttcaatggcaagagctgtgtattctgattcagatgtgtacatatttgatgatccactcagtgcattagatgcccatgttggccggcaggtatttgataaatgtatcaaaggcgaactgcagcataaaacccgggttcttgttaccaatcagctgcattttctgccatatgtcgataaaatactgctaattcatgatggtgtaattaaagaggagggtacttttgatgaacttagcaacagtggggagctcttcaagaagctcatggaaaatgctggaaaaatggaggaacaggtggaagaggatgaaagtaaaccaaaggatgttgcaaaacaaactgtgaacggtgatgttacaatagctgatgaaggttcacagaagagccaggatagttctagtaaaacaaaaccaggaaaatctgtccttattaagcaagaggaaagggaaactggggttgtcagtgcgagggtcctttcacgttacaaaaatgcactgggagggatatgggtggtgtccatactcttcttttgctatgcactgactgaagttcttcgcatttcaagtagcacatggttgagcatttggactgatgagggttctctgaaaattcatggctctggttattataatttgatctatggaattctttcctttgggcaggttctagtcacactctcaaattcatactggttgattatatcaagtcttcgggcagccaaaaggcttcatgatgccatgctccgatcaatattgagagctcccatggtattttttcatacaaacccacttggacggatcatcaacagattttcgaaggatatgggtgacattgaccgaaatgtcgctgtatttgtcaatatgtttatggcacaaatatctcagttgctctcaactttcgttctcatcggctttgtcagcaccatgtctctttgggctatcatgccactcctgattttgttttatgcagcttacctctattaccaggcaacatctcgcgaggtgaagcgtctggattccattaccaggtctcctgtgtatgctcagttttcagaggctttgaatggtctgtccacaatccgtgcctataaagcctatgatagaatggcaaatatcaatgggagatcaatggacaacaacattaggttcacacttgtgaacatgggtgcaaataggtggctagctattcgtctggagacattgggtggcatcatgatatggtttacagcaacatttgctgttatgcaaaatcaacgagcagagaatcagaaggcctttgcttctacaatgggtcttcttcttacttacactctcaatattaccaatttactcacagctgttcttcgtcttgctagtcttgctgaaaatagtttaaatgctgttgaacgggtcggaacatacattgagttaccttcggaagctcctcctgtcattgaggatcataggccaccccctggttggccatcatcaggtgtcatcaagtttgaagacgttgtgcttcgatatcgaccagaacttcctcctgttcttcatggcatatcttttgttattaatggaagtgagaaggtaggaatagttggcagaacaggtgctggcaaatctagcatgcttaatgctttgttccgtatcgtggagcttgaacgagggagaatattaattgatgattgtgacacttctaagtttggaatttgggacttgcgcaaagttctaggaataataccacaggcaccagttctattctcaggttctgttcggtttaatctggatccctttaatgagcacaatgatgcggacctctgggaggctctggaaagggctcatctaaaagatgttataaggaggaattctttaggattggatgctgaggtttctgaagctggtgaaaatttcagtgttggacaacgacagctgttgagcttagctcgtgcgctgctgagaagagcaaagatacttgtccttgatgaggcaacagcagcagttgacgtgcggactgatgctcttattcagaaaacaatccgagaagaattcaagagttgcacaatgctcataattgcccaccgtttgaacacggtcattgactgtgacaggttgcttattctaagttctgggcaggttctggaattcgactctcctgagaatcttctaagcaacgaggggagtgctttctccaagatggtgcaaagtacaggacctagcaacgcagaatacctcaagagtcttgtatttgcaagtggagaagagaggtcccggagggaagaaatcaagctgcaagatatccaaaggagatgggttgcatctaaccgatgggctgaagctgcccagtttgcgcttgctagaagcctcacatcatcacatagtgacctccttgcattagaagctgccgagggaaataatattctgaggagaacaaaggatgctgtaatcactctgcaaagcgtactggaagggaagcacaatactgaaatcgatgaatctctaactcagtatcaggtcccagctgatcgatggtggtcttcactttacaaagtgatcgaaggcctcgccacaatgagcagattgggccgcaaccgtctgcagcaaccttcttataattttgagaacaacaattctattgactgggaccaaatgtagatgtagaattctggatcacaacagcattgtggagtaggctggaggtgtagttatttctggcggatttgattcctgcggtgtgtaaacgctgcagcaacacgtaacttgcgaataaggaacgagttttgccacagcaggacgatccttgtaccgtcgtccgcaagggttgtaatttctcagggaccgttacgacacgattgtatgtcaggttttgacagtttgagccaatgcaattcttctaatgaaaaagacaagtgcatgtgaatggttagcatctgcctatcgcctatcgggtatcatgtggagtcgtctggtataccgtcctacacggctacacctgagaacgaagcgaccttacccccaactatcaccttgtagcgatccgaagttgttcatcttcgagtttcagttctctaactccatcgtagctaagcgtttcagcaatgggtcaagagagagatttaactatttgtcaccgttaggaaggccacatatttgtttgcttgttttacgtggcaactgtacgattttttatcggaaacgctaactggtctattttattgatgtaccatgttaaattagcatgtcacggtggatcctagtcttttttccggagagacacctggaaagtcatttttaccttcgcattttca

SEQ ID NO: 4979 - DNA, 5655 bp, Zea Mays
cgtgcctggcgtgtcttagtggactagtggagtgggcatgtggcgccgcttccgccgccgccgctgcagcactactcgttcgtcagaatagtatagggtgcagttgcgtggagatccacccgctcgtggattggcttctcctgcgggttgcaactggagaacatcagaactgattgaagaacagggttggtaagtggagggagcgagatggggttcgacccactggagtggtactgccagccggtcaaggatggtgtgtggtcgcatgtggttgagaatgcgttcggcgcctacactccatgtggcactgacacccttgtagtctgcatctcatacctcgcactctttggagtttgcttctatcgtatatggaggacgacgagggactacacagtgcagcggtacaagttacgttcaccatactacaactacctgcttggactgctcgtggtgtactgcatagcagagccgctttatcggatcatcactggtacctccatcatgaacttggatgggcagcctggccttgctccatttgagatggtacatccgatttgtggttatttacatgatggttggcgaagctgctatgttcaatcttgtgctctctgtgaggcagtactacagttcaagttcaatcttttacctatactgcagtgagattgtatgccagttcttgtttggaattctcatggtggtttatctgcctagcttggatccatatccgggttataccccgatcaggaatgaagtgttggttgataatactgattatgaacctcttcccggcggtgagcagatttgccctgagagacatgccaacatatttgccagaatattcttttcatggatgactcctttaatgcaacaaggatttagaaggcccattacagataaggatatctggaaattggatagctgggatgagactgaaactttgtatagccagttccagaaacgctggaatgatgagcttcaaaaaccaaacccttggctgttacgagctcttcatagtagtctttggggaaggttctggctgggtggatttttcaagattggcaatgatgcttctcaatttgttggtccacttgtattgaacctgttgttagagtctatgcaaaaaggtgatccatcttggagcgggtacatctatgctttctcaatctttgcaggagtgtcacttggggttcttgctgaggcacagtactttcagaacgtcatgcgtgtgggtttcaggttgaggtccacattgattgcagctgttttccgcaaatctttgcgactaactaatgatagtcgtagaaagtttgcttctgggaggattaccaatttgatttcaactgatgcggagtcccttcagcaagtgtgccagcagcttcacagcctatggtctgctcctttccgcattgttatttccatggtccttctatatgcacagcttggtcctgcagcattagtcggtgcactcatgctggttcttttgtttccaattcagactgtaatcatcagcaaaatgcaaaaacttactaaagaggggttgcaaaggaccgacaagcgaatcagtctcatgaatgaagtattagctgctatggatacagtcaagtgctatgcttgggagcaaagtttccagtcaaaagtgcaggacatccgtgatgatgaactttcttggttccgcagggctcagttgcttgctgcgctgaatagctttatcctgaacagtataccggtcgttgtcactgttgtttcatttggtgtatattctctactgggaggtgatttgacaccagcaaaggcgtttacttctctttcattatttgcagtcttaaggtttccacttttcatgctcccgaatctgataactcaggtggttaattgtaaggtgtcattgaagcgtctggaagatctcctgttggctgaagagagattacttctgccaaatccacctattgatcctgatcttccagccatttctatcaagaatgggtatttttcatgggaatcagaggctcagagaccaactttatcaaatgtcaatctggatgtacctgttggaagtttagttgcaatagtaggaagcactggtgagggtaaaacttctctcatatctgcaatgcttggagaaataccaccagtatctggatcaggtacctcagtggtcattcgtggatcggtggcttacgttcctcaagtttcctggatcttcaatgctactgtacgtgacaatattttgtttgggtctccctttcaacccccacgatacgagaaagcaattgatgccacttcattgcggcatgaccttgacctactcccaggaggcgatctgacagagattggtgaaagaggagttaatattagtggagggcagaagcaaagagtttcaatggcaagagctgtgtattctgattcagatgtgtacatatttgatgatccactcagtgcattagatgcccatgttggccggcaggtatttgataaatgtatcaaaggcgaactgcagcataaaacccgggttcttgttaccaatcagctgcattttctgccatatgtcgataaaatactgctaattcatgatggtgtaattaaagaggagggtacttttgatgaacttagcaacagtggggagctcttcaagaagctcatggaaaatgctggaaaaatggaggaacaggtggaagaggatgaaagtaaaccaaaggatgttgcaaaacaaactgtgaacggtgatgttacaatagctgatgaaggttcacagaagagccaggatagttctagtaaaacaaaaccaggaaaatctgtccttattaagcaagaggaaagggaaactggggttgtcagtgcgagggtcctttcacgttacaaaaatgcactgggagggatatgggtggtgtccatactcttcttttgctatgcactgactgaagttcttcgcatttcaagtagcacatggttgagcatttggactgatgagggttctctgaaaattcatggctctggttattataatttgatctatggaattctttcctttgggcaggttctagtcacactctcaaattcatactggttgattatatcaagtcttcgggcagccaaaaggcttcatgatgccatgctccgatcaatattgagagctcccatggtattttttcatacaaacccacttggacggatcatcaacagattttcgaaggatatgggtgacattgaccgaaatgtcgctgtatttgtcaatatgtttatggcacaaatatctcagttgctctcaactttcgttctcatcggctttgtcagcaccatgtctctttgggctatcatgccactcctgattttgttttatgcagcttacctctattaccaggcaacatctcgcgaggtgaagcgtctggattccattaccaggtctcctgtgtatgctcagttttcagaggctttgaatggtctgtccacaatccgtgcctataaagcctatgatagaatggcaaatatcaatgggagatcaatggacaacaacattaggttcacacttgtgaacatgggtgcaaataggtggctagctattcgtctggagacattgggtggcatcatgatatggtttacagcaacatttgctgttatgcaaaatcaacgagcagagaatcagaaggcctttgcttctacaatgggtcttcttcttacttacactctcaatattaccaatttactcacagctgttcttcgtcttgctagtcttgctgaaaatagtttaaatgctgttgaacgggtcggaacatacattgagttaccttcggaagctcctcctgtcattgaggatcataggccaccccctggttggccatcatcaggtgtcatcaagtttgaagacgttgtgcttcgatatcgaccagaacttcctcctgttcttcatggcatatcttttgttattaatggaagtgagaaggtaggaatagttggcagaacaggtgctggcaaatctagcatgcttaatgctttgttccgtatcgtggagcttgaacgagggagaatattaattgatgattgtgacacttctaagtttggaatttgggacttgcgcaaagttctaggaataataccacaggcaccagttctattctcaggttctgttcggtttaatctggatccctttaatgagcacaatgatgcggacctctgggaggctctggaaagggctcatctaaaagatgttataaggaggaattctttaggattggatgctgaggtttctgaagctggtgaaaatttcagtgttggacaacgacagctgttgagcttagctcgtgcgctgctgagaagagcaaagatacttgtccttgatgaggcaacagcagcagttgacgtgcggactgatgctcttattcagaaaacaatccgagaagaattcaagagttgcacaatgctcataattgcccaccgtttgaacacggtcattgactgtgacaggttgcttattctaagttctgggcaggttctggaattcgactctcctgagaatcttctaagcaacgaggggagtgctttctccaagatggtgcaaagtacaggacctagcaacgcagaatacctcaagagtcttgtatttgcaagtggagaagagaggtcccggagggaagaaatcaagctgcaagatatccaaaggagatgggttgcatctaaccgatgggctgaagctgcccagtttgcgcttgctagaagcctcacatcatcacatagtgacctccttgcattagaagctgccgagggaaataatattctgaggagaacaaaggatgctgtaatcactctgcaaagcgtactggaagggaagcacaatactgaaatcgatgaatctctaactcagtatcaggtcccagctgatcgatggtggtcttcactttacaaagtgatcgaaggcctcgccacaatgagcagattgggccgcaaccgtctgcagcaaccttcttataattttgagaacaacaattctattgactgggaccaaatgtagatgtagaattctggatcacaacagcattgtggagtaggctggaggtgtagttatttctggcggatttgattcctgcggtgtgtaaacgctgcagcaacacgtaacttgcgaataaggaacgagttttgccacagcaggacgatccttgtaccgtcgtccgcaagggttgtaatttctcagggaccgttacgacacgattgtatgtcaggttttgacagtttgagccaatgcaattcttctaatgaaaaagacaagtgcatgtgaatggttagcatctgcctatcgcctatcgggtatcatgtggagtcgtctggtataccgtcctacacggctacacctgagaacgaagcgaccttacccccaactatcaccttgtagcgatccgaagttgttcatcttcgagtttcagttctctaactccatcgtagctaagcgtttcagcaatgggtcaagagagagatttaactatttgtcaccgttaggaaggccacatatttgtttgcttgttttacgtggcaactgtacgattttttatcggaaacgctaactggtctattttattgatgtaccatgttaaattagcatgtcacggtggatcctagtcttttttccggagagacacctggaaagtcatttttaccttcgcattttca

SEQ ID NO: 4980 - DNA, 5739 bp, Zea Mays
gtcgtgcctggcgtgtcttagtggactagtggagtgggcatgtggcgccgcttccgccgccgccgctgcagcactactcgttcgtcagaatagtatagggtgcagttgcgtggagatccacccgctcgtggattggcttctcctgcgggttgcaactggagaacatcagaactgattgaagaacagggttggtaagtggagggagcgagatggggttcgacccactggagtggtactgccagccggtcaaggatggtgtgtggtcgcatgtggttgagaatgcgttcggcgcctacactccatgtggcactgacacccttgtagtctgcatctcatacctcgcactctttggagtttgcttctatcgtatatggaggacgacgagggactacacagtgcagcggtacaagttacgttcaccatactacaactacctgcttggactgctcgtggtgtactgcatagcagagccgctttatcggatcatcactggtacctccatcatgaacttggatgggcagcctggccttgctccatttgagattgtctcattgatcattgagtctgttgcttggtgctgtatgcttgtaatgattctgcttgaaacaagaatttacatcaatgagttcagatggtacatccgatttgtggttatttacatgatggttggcgaagctgctatgttcaatcttgtgctctctgtgaggcagtactacagttcaagttcaatcttttacctatactgcagtgagattgtatgccagttcttgtttggaattctcatggtggtttatctgcctagcttggatccatatccgggttataccccgatcaggaatgaagtgttggttgataatactgattatgaacctcttcccggcggtgagcagatttgccctgagagacatgccaacatatttgccagaatattcttttcatggatgactcctttaatgcaacaaggatttagaaggcccattacagataaggatatctggaaattggatagctgggatgagactgaaactttgtatagccagttccagaaacgctggaatgatgagcttcaaaaaccaaacccttggctgttacgagctcttcatagtagtctttggggaaggttctggctgggtggatttttcaagattggcaatgatgcttctcaatttgttggtccacttgtattgaacctgttgttagagtctatgcaaaaaggtgatccatcttggagcgggtacatctatgctttctcaatctttgcaggagtgtcacttggggttcttgctgaggcacagtactttcagaacgtcatgcgtgtgggtttcaggttgaggtccacattgattgcagctgttttccgcaaatctttgcgactaactaatgatagtcgtagaaagtttgcttctgggaggattaccaatttgatttcaactgatgcggagtcccttcagcaagtgtgccagcagcttcacagcctatggtctgctcctttccgcattgttatttccatggtccttctatatgcacagcttggtcctgcagcattagtcggtgcactcatgctggttcttttgtttccaattcagactgtaatcatcagcaaaatgcaaaaacttactaaagaggggttgcaaaggaccgacaagcgaatcagtctcatgaatgaagtattagctgctatggatacagtcaagtgctatgcttgggagcaaagtttccagtcaaaagtgcaggacatccgtgatgatgaactttcttggttccgcagggctcagttgcttgctgcgctgaatagctttatcctgaacagtataccggtcgttgtcactgttgtttcatttggtgtatattctctactgggaggtgatttgacaccagcaaaggcgtttacttctctttcattatttgcagtcttaaggtttccacttttcatgctcccgaatctgataactcaggtggttaattgtaaggtgtcattgaagcgtctggaagatctcctgttggctgaagagagattacttctgccaaatccacctattgatcctgatcttccagccatttctatcaagaatgggtatttttcatgggaatcagaggctcagagaccaactttatcaaatgtcaatctggatgtacctgttggaagtttagttgcaatagtaggaagcactggtgagggtaaaacttctctcatatctgcaatgcttggagaaataccaccagtatctggatcaggtacctcagtggtcattcgtggatcggtggcttacgttcctcaagtttcctggatcttcaatgctactgtacgtgacaatattttgtttgggtctccctttcaacccccacgatacgagaaagcaattgatgccacttcattgcggcatgaccttgacctactcccaggaggcgatctgacagagattggtgaaagaggagttaatattagtggagggcagaagcaaagagtttcaatggcaagagctgtgtattctgattcagatgtgtacatatttgatgatccactcagtgcattagatgcccatgttggccggcaggtatttgataaatgtatcaaaggcgaactgcagcataaaacccgggttcttgttaccaatcagctgcattttctgccatatgtcgataaaatactgctaattcatgatggtgtaattaaagaggagggtacttttgatgaacttagcaacagtggggagctcttcaagaagctcatggaaaatgctggaaaaatggaggaacaggtggaagaggatgaaagtaaaccaaaggatgttgcaaaacaaactgtgaacggtgatgttacaatagctgatgaaggttcacagaagagccaggatagttctagtaaaacaaaaccaggaaaatctgtccttattaagcaagaggaaagggaaactggggttgtcagtgcgagggtcctttcacgttacaaaaatgcactgggagggatatgggtggtgtccatactcttcttttgctatgcactgactgaagttcttcgcatttcaagtagcacatggttgagcatttggactgatgagggttctctgaaaattcatggctctggttattataatttgatctatggaattctttcctttgggcagtcacactctcaaattcatactggttgattatatcaagtcttcgggcagccaaaaggcttcatgatgccatgctccgatcaatattgagagctcccatggtattttttcatacaaacccacttggacggatcatcaacagattttcgaaggatatgggtgacattgaccgaaatgtcgctgtatttgtcaatatgtttatggcacaaatatctcagttgctctcaactttcgttctcatcggctttgtcagcaccatgtctctttgggctatcatgccactcctgattttgttttatgcagcttacctctattaccaggcaacatctcgcgaggtgaagcgtctggattccattaccaggtctcctgtgtatgctcagttttcagaggctttgaatggtctgtccacaatccgtgcctataaagcctatgatagaatggcaaatatcaatgggagatcaatggacaacaacattaggttcacacttgtgaacatgggtgcaaataggtggctagctattcgtctggagacattgggtggcatcatgatatggtttacagcaacatttgctgttatgcaaaatcaacgagcagagaatcagaaggcctttgcttctacaatgggtcttcttcttacttacactctcaatattaccaatttactcacagctgttcttcgtcttgctagtcttgctgaaaatagtttaaatgctgttgaacgggtcggaacatacattgagttaccttcggaagctcctcctgtcattgaggatcataggccaccccctggttggccatcatcaggtgtcatcaagtttgaagacgttgtgcttcgatatcgaccagaacttcctcctgttcttcatggcatatcttttgttattaatggaagtgagaaggtaggaatagttggcagaacaggtgctggcaaatctagcatgcttaatgctttgttccgtatcgtggagcttgaacgagggagaatattaattgatgattgtgacacttctaagtttggaatttgggacttgcgcaaagttctaggaataataccacaggcaccagttctattctcaggttctgttcggtttaatctggatccctttaatgagcacaatgatgcggacctctgggaggctctggaaagggctcatctaaaagatgttataaggaggaattctttaggattggatgctgaggtttctgaagctggtgaaaatttcagtgttggacaacgacagctgttgagcttagctcgtgcgctgctgagaagagcaaagatacttgtccttgatgaggcaacagcagcagttgacgtgcggactgatgctcttattcagaaaacaatccgagaagaattcaagagttgcacaatgctcataattgcccaccgtttgaacacggtcattgactgtgacaggttgcttattctaagttctgggcaggttctggaattcgactctcctgagaatcttctaagcaacgaggggagtgctttctccaagatggtgcaaagtacaggacctagcaacgcagaatacctcaagagtcttgtatttgcaagtggagaagagaggtcccggagggaagaaatcaagctgcaagatatccaaaggagatgggttgcatctaaccgatgggctgaagctgcccagtttgcgcttgctagaagcctcacatcatcacatagtgacctccttgcattagaagctgccgagggaaataatattctgaggagaacaaaggatgctgtaatcactctgcaaagcgtactggaagggaagcacaatactgaaatcgatgaatctctaactcagtatcaggtcccagctgatcgatggtggtcttcactttacaaagtgatcgaaggcctcgccacaatgagcagattgggccgcaaccgtctgcagcaaccttcttataattttgagaacaacaattctattgactgggaccaaatgtagatgtagaattctggatcacaacagcattgtggagtaggctggaggtgtagttatttctggcggatttgattcctgcggtgtgtaaacgctgcagcaacacgtaacttgcgaataaggaacgagttttgccacagcaggacgatccttgtaccgtcgtccgcaagggttgtaatttctcagggaccgttacgacacgattgtatgtcaggttttgacagtttgagccaatgcaattcttctaatgaaaaagacaagtgcatgtgaatggttagcatctgcctatcgcctatcgggtatcatgtggagtcgtctggtataccgtcctacacggctacacctgagaacgaagcgaccttacccccaactatcaccttgtagcgatccgaagttgttcatcttcgagtttcagttctctaactccatcgtagctaagcgtttcagcaatgggtcaagagagagatttaactatttgtcaccgttaggaaggccacatatttgtttgcttgttttacgtggcaactgtacgattttttatcggaaacgctaactggtctattttattgatgtaccatgttaaattagcatgtcacggtggatcctagtcttttttccggagagacacctggaaagtcatttttaccttcgcattttca

SEQ ID NO: 4981 - DNA, 1486 bp, Zea Mays
gtactttggccaaaagaagtcaaattggcttgagccgaggttcagccgttcaggtcgccgacgccgcgcacgtcccatccgatggctgccgcagtccacctccggcctctccactcgttcgccttccctctccccgcagtgaaggccgcgcccagctggctcccgctccaggcgaaacccggcgcgcggaggacgggcagccgcgttgctctgctcgtcccctccgcgtctgcccccgcgccagcgtctccatctccctcgggcaaggatggcaccactgcgtcggctgcgacaaagtgggtggagtggatcccgcgcgctgcggcaggcgctgggtcggcagtgggccccgagcaggtgctcaggctcatctctggcgccgcggccacgcccatctgccagttcgttgacagcccgcgaacctttctccattccgtcgacccgcgcgtcaagctggtgtggctcttgtcccttgttgtcctaccagccaggattcatattcatcatgctgggatttggtgctgatggtgcaccttcattagtccagatgagaacgcctccaccttctgttctaggcataccgaacattccttgctccacaagtgggtattcttacacaatcttgaaactgggaccactgcaatttacaaggaaaggcctatcattagcaagtacttcagcaagcctctcctttgcaatattccaaagtgcaagtctctgcttgacaacaaccactcctgagcagcttgcttctgctttgtggtggtttatgagtccactgaagcatatcggtgtgccagtgcctgagataatacttacattactactctcattgaggtttatcaatttagtatttgatgaggttcgcaactcagctctagcgattgtagcacgccggataaattggaaaaagctgacagctatggaaactatagatattttcttcagctatgtccaacggatatttaaaaatatatttgatcatgcggagcaaatatccaaggcaatggtagctcgaggatttcgtggtaatccaatcaatcacaagatctactttctcacagaatcatcatttggaattgcggatttcttttcgttgctttgcctattggttgtagtgagcttggcttccttttctgaccaattagtttgatggtaacaaaaaggcagaacatgtcttggatatttttgcgaggcagataatcacggaaaaagctaaaagcacacgtgaactgtttgatgatgtttgttgagttgaccctagttagaaaaaaaacgtgagcgaatatcattgaaaggaaattgtgtccgcaatgtatccttgttgaaatggaattgtgttcccaattgtaagtagtattaggtctatcataagtcaaacttttctagctttaatcgaattaacagaaaactgtagaaaatatgtacagcatcaaataagattcattgtatcacgcacctgcatgaaacatattttaatgatgta

SEQ ID NO: 4982 - DNA, 1595 bp, Zea Mays
gtactttggccaaaagaagtcaaattggcttgagccgaggttcagccgttcaggtcgccgacgccgcgcacgtcccatccgatggctgccgcagtccacctccggcctctccactcgttcgccttccctctccccgcagtgaaggccgcgcccagctggctcccgctccaggcgaaacccggcgcgcggaggacgggcagccgcgttgctctgctcgtcccctccgcgtctgcccccgcgccagcgtctccatctccctcgggcaaggatggcaccactgcgtcggctgcgacaaagtgggtggagtggatcccgcgcgctgcggcaggcgctgggtcggcagtgggccccgagcaggtgctcaggctcatctctggcgccgcggccacgcccatctgccagttcgttgacagcccgcgaacctttctccattccgtcgacccgcgcgtcaagctggtgtggctcttgtcccttgttgtcctaccagccaggtcaaatatttatatgcggtttggtttggtagtattcctggcccttatttcaatgtgggttttaccaaatcatgtttggaaggatcaacttggaagggttactcttctttcaggattcatattcatcatgctgggatttggtgctgatggtgcaccttcattagtccagatgagaacgcctccaccttctgttctaggcataccgaacattccttgctccacaagtgggtattcttacacaatcttgaaactgggaccactgcaatttacaaggaaaggcctatcattagcaagtacttcagcaagcctctcctttgcaatattccaaagtgcaagtctctgcttgacaacaaccactcctgagcagcttgcttctgctttgtggtggtttatgagtccactgaagcatatcggtgtgccagtgcctgagataatacttacattactactctcattgaggtttatcaatttagtatttgatgaggttcgcaactcagctctagcgattgtagcacgccggataaattggaaaaagctgacagctatggaaactatagatattttcttcagctatgtccaacggatatttaaaaatatatttgatcatgcggagcaaatatccaaggcaatggtagctcgaggatttcgtggtaatccaatcaatcacaagatctactttctcacagaatcatcatttggaattgcggatttcttttcgttgctttgcctattggttgtagtgagcttggcttccttttctgaccaattagtttgatggtaacaaaaagaacatgtcttggatatttttgcgaggcagataatcacggaaaaagctaaaagcacacgtgaactgtttgatgatgtttgttgagttgaccctagttagaaaaaaaacgtgagcgaatatcattgaaaggaaattgtgtccgcaatgtatccttgttgaaatggaattgtgttcccaattgtaagtagtattaggtctatcataagtcaaacttttctagctttaatcgaattaacagaaaactgtagaaaatatgtacagcatcaaataagattcattgtatcacgcacctgcatgaaacatattttaatgatgta

SEQ ID NO: 4983 - DNA, 1446 bp, Zea Mays
agatcgcatccaacgcctgtgacccacacacccacggattccgcctcgtccacctcagcgatccgcagcaacagcccccaaacccatcccaccctccatccccgatccgacgtttcgaacgcacccaatcctccgaaaatcgtcccctcccgcccaaacccgaagcaaaattcccccatctgcccgcgcgcggccctcccaaatcctctcccctataaaacccaccccgaacccaccgctccaaggcaccagagtcaccgcggcgagttcaaatcccacaatcttcttgtagcacaccactgtcttcgtccaactcggcggcgatgtctgggcgcggcaagggcggcaaggggctgggcaagggcggcccggcaatccggaggctggcgaggaggggcggcgtgaagcgtatctccgggcttatctacgaggaaacccgcggcgtgctcaagatcttcctcgagaataccgtcaccgccatggatgttgtgtacgccctcaagcgccagggccgcactctgtacgggttcggtggttgagcgcatctcttccctcgtctgcagcggctgccggtggcgtttcctcagttccctctgccttgcttggcttgatgtagagagttatcagattaaaatatctctgatgtgcttcgttattgggtggaatcatgtgtcccagcagtgctgggaaatcaagatcaagatgtatctttctttgcagtaatgaaatgttaaaatcgagatcaagatgtatctttctttgcagtaaagaaactttgctattgcgcccactgttaggctaatcacaatggaggtttcatgaggtgtttcatgtattaattagcctgctatattagctattttgatgatgtgtcatatcatttaagaagaaagttttatggagtttgatggcgatgaaaccatgttaactcctttctaaggtcttggaaactgtgtgaaacctctactgagagtgttttgttttattttcgtataattgagtaaattctattggttatttatatgcaatatttaagaagtatgatgacatatgaaatagtgagatgaaactctctattgagagagtgtgtttcatccatccataaagctgatgtgacatttttggaaatatggacatgaaattctcattgtgattagccttatggggttatcatgtggtgttcgtgactgaaatgtgaatgcttaatcgggatattagaatccttgaacctggatttgaatgaatatgacttacaattttccattttggatcgtaaattggttttaatctagtgttatcactatttttactgtattctgctgttgattcaggtcctagtggcaattaactaaatccatatcttagccttttgtgatggtttctcagttcttgaacggttgatgagattcgattttcggaagtctgaagcagcttatccatttttgt

SEQ ID NO: 4984 - DNA, 2413 bp, Zea Mays
ttttttttggccccttgagaaattgcccaaatgttgctgatgaatgttgacacagaggttctagttaaggattctgttggcgtgactggaaaggagatgatgaataatgatattcttctaactgaaaagaatacaagcatggacccaagtgcattagtacagttggatgatggtggaactagtagcaatgttccttcgagtagtcaaaatataactcttgctttggaccatgagctacaacatttgagtttggagagcaaactgaagaacagtaaaacgaatgttaagaaaacagcttctgtttctcactacaagccagaaccttggatgctccagagtgaaaatcaagaaatccgtaatcagctaagtcttgccattgttggtcatgttgattctgggaaatcaactttatgtggtcgattgcgacatgctctgggattgatttcaaaaaagcaaatgcataaatatgagaaagaagctaaagaaaagggaaaagggtcatttgcatatgcctgggctatggatgagagcagtgatgagagggagcgtggcattacgatgactgtggctgtagcatactttaatagcgagaaataccgtgtggttctgcttgactcccctggtcacaaggattttgtgcctaatatgatatctggtgctacacaagctgatgccgccatcctagttgttgatgcatctatagggtcatttgaagcaggcatgggtgtcaatgggattggtcagacgaaggagcactcgcagcttgttaggagctttggtgttgagaacttgatagttgctgttaataagatggatggggtggaatattcgaaggagcggtttcagtccgttaaatcgcaactcggcgtctttcttcggtcgtgtgggtacaaggactcttcagtcacctgggttcctttgagcgcaatggccaacgaaaatttagtcacagcttgttcagacactcgacttttatcttggtacaatggaggctgtctgctgcaagccatcgactcgttacctcctccccgtcgcgacgtgtcaagtccactgcgccttccgatatgtgatgtcattgcatctcacacgctgggccaggtggctgtctgtggtaaagtcgagtctggagggatccgaactggctgtaaggtccttgtcatgccttctggagacatagctacggtgaaaaccatggagcgggattcctctacctgcagcttggctagagccggggacaacgtcgccgttggtttgcacggggtggaccctggccacatcgcggcaggcggagttctctgccatccagatttcccggtgcgcgtggcgtgtcacctggagctgaaaattctggttctggaaatcaccgtgccaatactggttggccttgagtttgagctgcacatacggcacgccaagtcgtccgcgaggctggtgagaatactgtcgtccctggaccagaagaccggcagggccctgaagaaagcgccgcgtctgctcaccgcgaggcaggcggccctggtcgaggtgaggctggacagagaagcgtgcgtggaggaattctcgacgctgaaggcgctcgcgcgggtgttcctgcggtcgcagggtagcacggttgcggtgggcgtggtgactcgagtcctggaccgggctttggacatgggctagctgcattggcacgggcgcggataatttatgaacgtcacgcgcgcggggggaggcaggtaggtcggtctcctggattaatggcacccgggaccgggagggagagagagagggcctttcggcgcccaacgaacgattcaaaggcggccgacacgagtttcgtccacgcacccccacggttcaaagggaggatccgcccgggacggacgggtcaaaggcccgcgactgcaatgaattcaatgaatctggggctgtaagccggccgttggcttgttgcaatctgtccctatttttcttccatccaatccaagggcgcaccgacaggcacactgcgtagttagtgccccttgtgctgaccgtccgaccgcggctgaggaggggggtgtgcggtggcatgtgttgaatgagctgtggtttctgccgtattagtctagtatctatatagcgactcgtttgccggattacccactaagccatgtgtgttgtttgctggaacggccgcgcagctagcatgaacaatcatcggctgccagccatgtggcgcctgcctgcccgcctccattatgcatgcagctagctgctcggcccctgcaacggagaaatttgcaactttggcactcccgtccgccgccgccgcaaacgatttataatcatacagacataaattatgtcttctgtttctgtttgaaatagagatgagataaagagatctactgaagatggccttagactgtttcgcagcggcaggttc

SEQ ID NO: 4985 - DNA, 2920 bp, Zea Mays
actcactcgtcgtttactctcctctcgtcggcttctttgcttcgggtggacggcagggcgagcggcgacgccctcttcgtcggggaccttcgccggcgacgagaatccaacctgataatccggaagatacatgtgccagatgtgtcgatcacagggatagtaaagctctcgaactgggtgtaaagagatgtttgttcccgtgttagataacatgtctgattttgaggagccctttaaaatttctgggatgtggcaatgctccatttgcacgcatgaaaatactacatatagttcatcttgtgagctatgtggtgtgcttcatgatctctcactgtatttcaatgatatcagtgaagacgaagatggagacacaagtattctggagtatccatccttgcaagatctctttttacaccacctagtgcaaagtcaaaggctattgttttctctcatgatttcaaagacagaagaaatacaacagggaataagcaagctacaatggatgctctacataagacattcatgactcgcaaaaagcgccacattaacatagttgacacagaggttctagttaaggattctgttggcgtgactggaaaggagatgatgaataatgatattcttctaactgaaaagaatacaagcatggacccaagtgcattagtacagttggatgatggtggaactagtagcaatgttccttcgagtagtcaaaatataactcttgctttggaccatgagctacaacatttgagtttggagagcaaactgaagaacagtaaaacgaatgttaagaaaacagcttctgtttctcactacaagccagaaccttggatgctccagagtgaaaatcaagaaatccgtaatcagctaagtcttgccattgttggtcatgttgattctgggaaatcaactttatgtggtcgattgcgacatgctctgggattgatttcaaaaaagcaaatgcataaatatgagaaagaagctaaagaaaagggaaaagggtcatttgcatatgcctgggctatggatgagagcagtgatgagagggagcgtggcattacgatgactgtggctgtagcatactttaatagcgagaaataccgtgtggttctgcttgactcccctggtcacaaggattttgtgcctaatatgatatctggtgctacacaagctgatgccgccatcctagttgttgatgcatctatagggtcatttgaagcaggcatgggtgtcaatgggattggtcagacgaaggagcactcgcagcttgttaggagctttggtgttgagaacttgatagttgctgttaataagatggatggggtggaatattcgaaggagcggtttcagtccgttaaatcgcaactcggcgtctttcttcggtcgtgtgggtacaaggactcttcagtcacctgggttcctttgagcgcaatggccaacgaaaatttagtcacagcttgttcagacactcgacttttatcttggtacaatggaggctgtctgctgcaagccatcgactcgttacctcctccccgtcgcgacgtgtcaagtccactgcgccttccgatatgtgatgtcattgcatctcacacgctgggccaggtggctgtctgtggtaaagtcgagtctggagggatccgaactggctgtaaggtccttgtcatgccttctggagacatagctacggtgaaaaccatggagcgggattcctctacctgcagcttggctagagccggggacaacgtcgccgttggtttgcacggggtggaccctggccacatcgcggcaggcggagttctctgccatccagatttcccggtgcgcgtggcgtgtcacctggagctgaaaattctggttctggaaatcaccgtgccaatactggttggccttgagtttgagctgcacatacggcacgccaagtcgtccgcgaggctggtgagaatactgtcgtccctggaccagaagaccggcagggccctgaagaaagcgccgcgtctgctcaccgcgaggcaggcggccctggtcgaggtgaggctggacagagaagcgtgcgtggaggaattctcgacgctgaaggcgctcgcgcgggtgttcctgcggtcgcagggtagcacggttgcggtgggcgtggtgactcgagtcctggaccgggctttggacatgggctagctgcattggcacgggcgcggataatttatgaacgtcacgcgcgcggggggaggcaggtaggtcggtctcctggattaatggcacccgggaccgggagggagagagagagggcctttcggcgcccaacgaacgattcaaaggcggccgacacgagtttcgtccacgcacccccacggttcaaagggaggatccgcccgggacggacgggtcaaaggcccgcgactgcaatgaattcaatgaatctggggctgtaagccggccgttggcttgttgcaatctgtccctatttttcttccatccaatccaagggcgcaccgacaggcacactgcgtagttagtgccccttgtgctgaccgtccgaccgcggctgaggaggggggtgtgcggtggcatgtgttgaatgagctgtggtttctgccgtattagtctagtatctatatagcgactcgtttgccggattacccactaagccatgtgtgttgtttgctggaacggccgcgcagctagcatgaacaatcatcggctgccagccatgtggcgcctgcctgcccgcctccattatgcatgcagctagctgctcggcccctgcaacggagaaatttgcaactttggcactcccgtccgccgccgccgcaaacgatttataatcatacagacataaattatgtcttctgtttctgtttgaaatagagatgagataaagagatctactgaagatggccttagactgtttcgcagcggcaggttc

SEQ ID NO: 4986 - DNA, 851 bp, Zea Mays
cgagcattgggacacacctaaccagcatcagaacgtccatcccaggtgaactacgtgagcgtggacccggccgggggggtcctactgcgtgtacagctccgacgcgtccacggcgtacggcgtgagcgcgctgctgctgctgctcgccgcgcaggccgtggccatggtcgccacccgctgcttctgctgcggccgcgcgctctcgccgggccgctggcgggcgtggtccggcatctgcttcatcgtctgctgggtgacgttcgtgatcgcggagctgtgcctgctggccgggtcggtccggaacgcgtatcacaccaagtacttccccaagggcgacggcccgccgccgtgcgccatgctgcgcaagggcgtcttcgccgccggcgccgccttcaccttcctcgccgcgctcttcgccgagctgcactacctcttctacgccagggcgcgcgacgccgccgccgccgtggccccgcccatcgtcggcggcatcggcatgacccgcatgtgatgagtggaagatattgtcctgcgtgtgatagtactgtactactgactgctgtcactacagcgtgctggaactgttgggtttgtaattctgtcaggaacacgtacgcaacatagctgcattgttagccatcgcccatcggcattcagcagcagactgtactagttttttttcccctcttcctgtgcgtgcattcaccacaaatcagcagaggtggatctgtcccagtccggcgcttgacgagaagcacaacacacaacggtgatcgaaagccagaaaatgttcagaatggtgacaacattatttcatcagatgcatgacttgtcatggtcgccagtcgcat

SEQ ID NO: 4987 - DNA, 2954 bp, Zea Mays
cactttcaccagctctcactcttatccacccgcgcgcccaccgccgcgcgcagcaccgcgccgcccacccgcggccaccccagcgccccaaatgccgctccaaccctagcctctcgccatgcctttcgatctcgggcggccatgggaaactgatgccgctcgccggtcgccgtcgcgcgggaggacgtcagctcctcgcacttccccgcatccacctcgtcatggagctctgcgagggcggcgagttcttcgaccgcatcgtcgcgcgggggcactacaccgagcgcgccgccaccaatgtcactcgcaccatcgtcgaggtcgtccatttctgccatcggcacgacgtcatccaccgtgacctcaagccggagaacttccttttcgccaataagaaggagaactcgccgccgcgcagcgcccctctcgatatgccgccctgcttcctcctctcctcttgatccatctgccatcccatccccgctctgccagttgcccctcgcttcctcttcggctcttcatccccctcgatccgtcgcccgtgcttcctcctcactatgtcccgtcccctctccatcttgtcgccctgcctccccgcgtctgcgtctgcgcctgccttcggcgtccagagccatatccgcgttggcctccacctacgcacccgcctctagccataagagctcctcccgtgtctgcctttagagatctgctacctccacatcggtgtctagggctcctccattgcctagatctactagagaggcagatgaaagtatttccgtctcatcaactgtgctgaagaggaggaaaacacctcacttgttgaagggagcagtggagacccggaggaagatcatttggagtctgcagctactaatcttcagcctggcagtgacacttgcattgcaagggaagagttgccagatcagaaggatctggtgaaactgcaagctgttatccgtggacatctagaggcggcccatgcctcacggccaaagcagatcagttaggaggataaaagaagacactaccttggcacatgcctgttgtcacaatggacaaaagaagattagtgttgtgtgagatttttttcattcctttgatctattgcatgctatttgtaccctaatcgacaaaatagatgagactcaattcaggagcaaatcaccagtcctgttcacagtccaattcactatggctaaaatatcaaacttatgctccttgaggtttgttttttccttatcttcctttaatatctgatgactgatggactggtgagttcatgatctgcttcatgcttttccttttatatatggtcactacctcactggttagttcatggtgctttttgtctacttctttgcccaaaaaaaatcccggggcgaatttcagcatgcttttcctgcttccgctgtgcaaattcacaggatgcgtgggaaatgtgttcttgtttcgtcgggtggtgttcttgccattcgttttagctcaacacaaaacaaatgcttcttgttcttcaggtcgccctgtgtttctttctcgccagtttgggccatggattctggtgtgcatttgttcaatatatcttagtatcttatttaacaatcagtacttctctgatgctcaagagatcaatttactcaaagtagcaaactgtatcatagttgtatactttatcaaacgaggaacctgatgcttgtagtataagcctcattttgttccaaacaagacaggcttcggatacaatcacctggaaatcaatcagtaaacttttgctattcagttttttaaataaaaaatttaggccttacgactttcctcgcaatgtgttcacatgtagattaccttattgcattgcctacttttgtccgttgtgtaaaccaatcttttatcatttatcaaatgattttgctcttaacattaacaaattatcgtttggtcatatgcaactaatgacatcacattaccaagattctggggacccatcgctaccttgtgtcaacagtagactgaccagatcagggaaacgctcggcggcgaagctaaagcagagcttgcgctacacgcgctgcgagcagtttctgtctaaagggcaaggtctgatctcatttgcggctctggataaactcgaagctgacctatccaagttcgacgacgggcccttcttcctaggccaattcagcttggcggatgtagcgtacattacgattctggaaagggttcagatatactattcccatcttaggaactacgacatcgccgaaggcaggcccaacctccaggaattcatcgaggagatgaacaagattgaagcgtatgcgcagaccaagaacgatcctctgttcttgcttgatcttgccaagaaccatcttaagattgcctgaagatgtgacaaagcagcattagtccgttgatcggtggaagaccactcgtcagtgttgagttgaatgtttgatcaataaaatacggcatgttgttgctgactttggacttgcaaagttcactactgataataacacccatgtttcaacaagagtaatgggtacttttgggtatttggcacctgagtatgcagcatctggcaagctcacagaaaaatccgatgtattttctttcggagtcatgcttcttgagcttattactgggcggcgaccaattgacacaacccaattggcactgcttgttataagcacatatgtacttccatttgcatgttgtataatactaataccaattgcaaaattatagttattttttctacccttgttagttaataagcatatttgtggtcaataggttgtattcttattcttgtaaccgtgttaattaatgttatggacttgtagtcttgtattaccttgtgaatatatctgtccctgcctgccatgtgaacgtgcttagcctggaatttgtgatatgtacatatatccatgtgtttgaaatctgtattgtatgtg

SEQ ID NO: 4988 - DNA, 3375 bp, Zea Mays
cactttcaccagctctcactcttatccacccgcgcgcccaccgccgcgcgcagcaccgcgccgcccacccgcggccaccccagcgccccaaatgccgctccaaccctagcctctcgccatgcctttcgatctcgggcggccatgggaaactgatgccgctcgccggtcgccgtcgcgcgggaggacgtcagctcctcgcacttccccgcatccacctcgtcatggagctctgcgagggcggcgagttcttcgaccgcatcgtcgcgcgggggcactacaccgagcgcgccgccaccaatgtcactcgcaccatcgtcgaggtcgtccatttctgccatcggcacgacgtcatccaccgtgacctcaagccggagaacttccttttcgccaataagaaggagaactcgccgccgcgcagcgcccctctcgatatgccgccctgcttcctcctctcctcttgatccatctgccatcccatccccgctctgccagttgcccctcgcttcctcttcggctcttcatccccctcgatccgtcgcccgtgcttcctcctcactatgtcccgtcccctctccatcttgtcgccctgcctccccgcgtctgcgtctgcgcctgccttcggcgtccagagccatatccgcgttggcctccacctacgcacccgcctctagccataagagctcctcccgtgtctgcctttagagatctgctacctccacatcggtgtctagggctcctccattgcctagatctactagagaggcagatgaaagtatttccgtctcatcaactgtgctgaagaggaggaaaacacctcacttgttgaagggagcagtggagacccggaggaagatcatttggagtctgcagctactaatcttcagcctggcagtgacacttgcattgcaagggaagagttgccagatcagaaggatctggtgaaactgcaagctgttatccgtggacatctagaggcggcccatgcctcacggccaaagcagatcagttaggaggataaaagaagacactaccttggcacatgcctgttgtcacaatggacaaaagaagattagtgttgtgtgagatttttttcattcctttgatctattgcatgctatttgtaccctaatcgacaaaatagatgagactcaattcaggagcaaatcaccagtcctgttcacagtccaattcactatggctaaaatatcaaacttatgctccttgaggtttgttttttccttatcttcctttaatatctgatgactgatggactggtgagttcatgatctgcttcatgcttttccttttatatatggtcactacctcactggttagttcatggtgctttttgtctacttctttgcccaaaaaaaatcccggggcgaatttcagcatgcttttcctgcttccgctgtgcaaattcacaggatgcgtgggaaatgtgttcttgtttcgtcgggtggtgttcttgccattcgttttagctcaacacaaaacaaatgcttcttgttcttcaggtcgccctgtgtttctttctcgccagtttgggccatggattctggtgtgcatttgttcaatatatcttagtatcttatttaacaatcagtacttctctgatgctcaagagatcaatttactcaaagtagcaaactgtatcatagttgtatactttatcaaacgaggaacctgatgcttgtagtataagcctcattttgttccaaacaagacaggcttcggatacaatcacctggaaatcaatcagtaaacttttgctattcagttttttaaataaaaaatttaggccttacgactttcctcgcaatgtgttcacatgtagattaccttattgcattgcctacttttgtccgttgtgtaaaccaatcttttatcatttatcaaatgattttgctcttaacattaacaaattatcgtttggtcatatgcaactaatgacatcacattaccaagattctggggacccatcgctaccttgtgtcaacagtagactgaccagatcagggaaacgctcggcggcgaagctaaagcagagcttgcgctacacgcgctgcgagcagtttctgtctaaagggcaaggtctgatctcatatttgagctccccgtggcactgctcgcccggccagccaccatcccggtcttgcgctcggcggcgtgcatgggaagagacgacgataacatggacactgttttctaaatggatcagtatttttggtatatacacatgcttttactagtagaggagtatttattttcatttgtagcagccaaggaacttgtgcattccttatgaatcatgagaagaccatgaagatgcacacaaatttgcttgacttctgaccagtaataattagcgaaagaaagaaaatccagaaccatgaatcagcttgatagcagtaacaaatttgcttgacttctgacgagtaagaaattggcagcaagttcagcaggggccagactaataaatcagcttgatagcatccttgcagcggtgccttggactttggcggttagaagagttgcggctctggataaactcgaagctgacctatccaagttcgacgacgggcccttcttcctaggccaattcagcttggcggatgtagcgtacattacgattctggaaagggttcagatatactattcccatcttaggaactacgacatcgccgaaggcaggcccaacctccaggaattcatcgaggagatgaacaagattgaagcgtatgcgcagaccaagaacgatcctctgttcttgcttgatcttgccaagaaccatcttaagattgcctgaagatgtgacaaagcagcattagtccgttgatcggtggaagaccactcgtcagtgttgagttgaatgtttgatcaataaaatacggttgctgactttggacttgcaaagttcactactgataataacacccatgtttcaacaagagtaatgggtacttttgggtatttggcacctgagtatgcagcatctggcaagctcacagaaaaatccgatgtattttctttcggagtcatgcttcttgagcttattactgggcggcgaccaattgacacaacccaattggcactgcttgttataagcacatatgtacttccatttgcatgttgtataatactaataccaattgcaaaattatagttattttttctacccttgttagttaataagcatatttgtggtcaataggttgtattcttattcttgtaaccgtgttaattaatgttatggacttgtagtcttgtattaccttgtgaatatatctgtccctgcctgccatgtgaacgtgcttagcctggaatttgtgatatgtacatatatccatgtgtttgaaatctgtattgtatgtg

SEQ ID NO: 4989 - DNA, 3550 bp, Zea Mays
ccgcgagtcactttcaccagctctcactcttatccacccgcgcgcccaccgccgcgcgcagcaccgcgccgcccacccgcggccaccccagcgccccaaatgccgctccaaccctagcctctcgccatgcctttcgatctcgggcggccatgggaaactgatgccgctcgccggtcgccgtcgcgcgggaggacgtcagctcctcgcacttccccgcatccacctcgtcatggagctctgcgagggcggcgagttcttcgaccgcatcgtcgcgcgggggcactacaccgagcgcgccgccaccaatgtcactcgcaccatcgtcgaggtcgtccatttctgccatcggcacgacgtcatccaccgtgacctcaagccggagaacttccttttcgccaataagaaggagaactcgccgccgcgcagcgcccctctcgatatgccgccctgcttcctcctctcctcttgatccatctgccatcccatccccgctctgccagttgcccctcgcttcctcttcggctcttcatccccctcgatccgtcgcccgtgcttcctcctcactatgtcccgtcccctctccatcttgtcgccctgcctccccgcgtctgcgtctgcgcctgccttcggcgtccagagccatatccgcgttggcctccacctacgcacccgcctctagccataagagctcctcccgtgtctgcctttagagatctgctacctccacatcggtgtctagggctcctccattgcctagatctactagagaggcagatgaaagtatttccgtctcatcaactgtgctgaagaggaggaaaacacctcacttgttgaagggagcagtggagacccggaggaagatcatttggagtctgcagctactaatcttcagcctggcagtgacacttgcattgcaagggaagagttgccagatcagaaggatctggtgaaactgcaagctgttatccgtggacatctagaggcggcccatgcctcacggccaaagcagatcagttaggaggataaaagaagacactaccttggcacatgcctgttgtcacaatggacaaaagaagattagtgttgtgtgagatttttttcattcctttgatctattgcatgctatttgtaccctaatcgacaaaatagatgagactcaattcaggagcaaatcaccagtcctgttcacagtccaattcactatggctaaaatatcaaacttatgctccttgaggtttgttttttccttatcttcctttaatatctgatgactgatggactggtgagttcatgatctgcttcatgcttttccttttatatatggtcactacctcactggttagttcatggtgctttttgtctacttctttgcccaaaaaaaatcccggggcgaatttcagcatgcttttcctgcttccgctgtgcaaattcacaggatgcgtgggaaatgtgttcttgtttcgtcgggtggtgttcttgccattcgttttagctcaacacaaaacaaatgcttcttgttcttcaggtcgccctgtgtttctttctcgccagtttgggccatggattctggtgtgcatttgttcaatatatcttagtatcttatttaacaatcagtacttctctgatgctcaagagatcaatttactcaaagtagcaaactgtatcatagttgtatactttatcaaacgaggaacctgatgcttgtagtataagcctcattttgttccaaacaagacaggcttcggatacaatcacctggaaatcaatcagtaaacttttgctattcagttttttaaataaaaaatttaggccttacgactttcctcgcaatgtgttcacatgtagattaccttattgcattgcctacttttgtccgttgtgtaaaccaatcttttatcatttatcaaatgattttgctcttaacattaacaaattatcgtttggtcatatgcaactaatgacatcacattaccaagattctggggacccatcgctaccttgtgtcaacagtagactgaccagatcagttttgttatgaaatcatggaactggcaacatgatagaatttttcaaggaaaaaaagggaaacgctcggcggcgaagctaaagcagagcttgcgctacacgcgctgcgagcagtttctgtctaaagggcaaggtctgatctcatatttgagctccccgtggcactgctcgcccggccagccaccatcccggtcttgcgctcggcggcgtgcatggtgtgctcgtccctgacagtggctagcttctgttttcttaattgatggctagcttctgttttcttaattgatgatttgttttttccttttctgatcgtcaatagggaagagacgacgataacatggacactgttttctaaatggatcagtatttttggtatatacacatgcttttactagtagaggagtatttattttcatttgtagcagccaaggaacttgtgcattccttatgaatcatgagaagaccatgaagatgcacacaaatttgcttgacttctgaccagtaataattagcgaaagaaagaaaatccagaaccatgaatcagcttgatagcagtaacaaatttgcttgacttctgacgagtaagaaattggcagcaagttcagcaggggccagactaataaatcagcttgatagcatccttgcagcggtgccttggactttggcggttagaagagttgcggctctggataaactcgaagctgacctatccaagttcgacgacgggcccttcttcctaggccaattcagcttggcggatgtagcgtacattacgattctggaaagggttcagatatactattcccatcttaggaactacgacatcgccgaaggcaggcccaacctccaggaattcatcgaggagatgaacaagattgaagcgtatgcgcagaccaagaacgatcctctgttcttgcttgatcttgccaagaaccatcttaagattgcctgaagatgtgacaaagcagcattagtccgttgatcggtggaagaccactcgtcagtgttgagttgaatgtttgatcaataaaatacggcatgttgttgctgactttggacttgcaaagttcactactgataataacacccatgtttcaacaagagtaatgggtacttttgggtatttggcacctgagtatgcagcatctggcaagctcacagaaaaatccgatgtattttctttcggagtcatgcttcttgagcttattactgggcggcgaccaattgacacaacccaattggcactgcttgttataagcacatatgtacttccatttgcatgttgtataatactaataccaattgcaaaattatagttattttttctacccttgttagttaataagcatatttgtggtcaataggttgtattcttattcttgtaaccgtgttaattaatgttatggacttgtagtcttgtattaccttgtgaatatatctgtccctgcctgccatgtgaacgtgcttagcctggaatttgtgatatgtacatatatccatgtgtttgaaatctgtattgtatgtg

SEQ ID NO: 4990 - DNA, 3899 bp, Zea Mays
cactttcaccagctctcactcttatccacccgcgcgcccaccgccgcgcgcagcaccgcgccgcccacccgcggccaccccagcgccccaaatgccgctccaaccctagcctctcgccatgcctttcgatctcgggcggccatgggaaactgatgccgctcgccggtcgccgtcgcgcgggaggacgtcagctcctcgcacttccccgcatccacctcgtcatggagctctgcgagggcggcgagttcttcgaccgcatcgtcgcgcgggggcactacaccgagcgcgccgccaccaatgtcactcgcaccatcgtcgaggtcgtccatttctgccatcggcacgacgtcatccaccgtgacctcaagccggagaacttccttttcgccaataagaaggagaactcgccgccgcgcagcgcccctctcgatatgccgccctgcttcctcctctcctcttgatccatctgccatcccatccccgctctgccagttgcccctcgcttcctcttcggctcttcatccccctcgatccgtcgcccgtgcttcctcctcactatgtcccgtcccctctccatcttgtcgccctgcctccccgcgtctgcgtctgcgcctgccttcggcgtccagagccatatccgcgttggcctccacctacgcacccgcctctagccataagagctcctcccgtgtctgcctttagagatctgctacctccacatcggtgtctagggctcctccattgcctagatctactagagaggcagatgaaagtatttccgtctcatcaactgtgctgaagaggaggaaaacacctcacttgttgaagggagcagtggagacccggaggaagatcatttggagtctgcagctactaatcttcagcctggcagtgacacttgcattgcaagggaagagttgccagatcagaaggatctggtgaaactgcaagctgttatccgtggacatctagaggcggcccatgcctcacggccaaagcagatcagttaggaggataaaagaagacactaccttggcacatgcctgttgtcacaatggacaaaagaagattagtgttgtgtgagatttttttcattcctttgatctattgcatgctatttgtaccctaatcgacaaaatagatgagactcaattcaggagcaaatcaccagtcctgttcacagtccaattcactatggctaaaatatcaaacttatgctccttgaggtttgttttttccttatcttcctttaatatctgatgactgatggactggtgagttcatgatctgcttcatgcttttccttttatatatggtcactacctcactggttagttcatggtgctttttgtctacttctttgcccaaaaaaaatcccggggcgaatttcagcatgcttttcctgcttccgctgtgcaaattcacaggatgcgtgggaaatgtgttcttgtttcgtcgggtggtgttcttgccattcgttttagctcaacacaaaacaaatgcttcttgttcttcaggtcgccctgtgtttctttctcgccagtttgggccatggattctggtgtgcatttgttcaatatatcttagtatcttatttaacaatcagtacttctctgatgctcaagagatcaatttactcaaagtagcaaactgtatcatagttgtatactttatcaaacgaggaacctgatgcttgtagtataagcctcattttgttccaaacaagacaggcttcggatacaatcacctggaaatcaatcagtaaacttttgctattcagttttttaaataaaaaatttaggccttacgactttcctcgcaatgtgttcacatgtagattaccttattgcattgcctacttttgtccgttgtgtaaaccaatcttttatcatttatcaaatgattttgctcttaacattaacaaattatcgtttggtcatatgcaactaatgacatcacattaccaagattctggggacccatcgctaccttgtgtcaacagtagactgaccagatcaggtaccattttgaaacctgtgtacaatttcatttctcaataactggccgaacataaatagccaaggcatgggtttatgccaatactcataggttaaatgacactttggtcatatgcatagttgccaccctcaaatgcctatctcatgatagaagtaaatggtggtctaaatcaacaacgactttctataagtaccatgactattattcttgaacaaatgtgtgctcatggttctgagtagatattaccattgccattgttttatatggaagtccagtgccttgtcaatctttggtccacgagtaagtgttttggatattcatgttagtgtacactgtaatcaacagagctggttttctttaacagttttgttatgaaatcatggaactggcaacatgatagaatttttcaaggaaaaaaagggaaacgctcggcggcgaagctaaagcagagcttgcgctacacgcgctgcgagcagtttctgtctaaagggcaaggtctgatctcatatttgagctccccgtggcactgctcgcccggccagccaccatcccggtcttgcgctcggcggcgtgcatggtgtgctcgtccctgacagtggctagcttctgttttcttaattgatggctagcttctgttttcttaattgatgatttgttttttccttttctgatcgtcaatagggaagagacgacgataacatggacactgttttctaaatggatcagtatttttggtatatacacatgcttttactagtagaggagtatttattttcatttgtagcagccaaggaacttgtgcattccttatgaatcatgagaagaccatgaagatgcacacaaatttgcttgacttctgaccagtaataattagcgaaagaaagaaaatccagaaccatgaatcagcttgatagcagtaacaaatttgcttgacttctgacgagtaagaaattggcagcaagttcagcaggggccagactaataaatcagcttgatagcatccttgcagcggtgccttggactttggcggttagaagagttgcggctctggataaactcgaagctgacctatccaagttcgacgacgggcccttcttcctaggccaattcagcttggcggatgtagcgtacattacgattctggaaagggttcagatatactattcccatcttaggaactacgacatcgccgaaggcaggcccaacctccaggaattcatcgaggagatgaacaagattgaagcgtatgcgcagaccaagaacgatcctctgttcttgcttgatcttgccaagaaccatcttaagattgcctgaagatgtgacaaagcagcattagtccgttgatcggtggaagaccactcgtcagtgttgagttgaatgtttgatcaataaaatacggttgctgactttggacttgcaaagttcactactgataataacacccatgtttcaacaagagtaatgggtacttttgggtatttggcacctgagtatgcagcatctggcaagctcacagaaaaatccgatgtattttctttcggagtcatgcttcttgagcttattactgggcggcgaccaattgacacaacccaattggcactgcttgttataagcacatatgtacttccatttgcatgttgtataatactaataccaattgcaaaattatagttattttttctacccttgttagttaataagcatatttgtggtcaataggttgtattcttattcttgtaaccgtgttaattaatgttatggacttgtagtcttgtattaccttgtgaatatatctgtccctgcctgccatgtgaacgtgcttagcctggaatttgtgatatgtacatatatccatgtgtttgaaatctgtattgtatgtg

SEQ ID NO: 4991 - DNA, 3906 bp, Zea Mays
cactttcaccagctctcactcttatccacccgcgcgcccaccgccgcgcgcagcaccgcgccgcccacccgcggccaccccagcgccccaaatgccgctccaaccctagcctctcgccatgcctttcgatctcgggcggccatgggaaactgatgccgctcgccggtcgccgtcgcgcgggaggacgtcagctcctcgcacttccccgcatccacctcgtcatggagctctgcgagggcggcgagttcttcgaccgcatcgtcgcgcgggggcactacaccgagcgcgccgccaccaatgtcactcgcaccatcgtcgaggtcgtccatttctgccatcggcacgacgtcatccaccgtgacctcaagccggagaacttccttttcgccaataagaaggagaactcgccgccgcgcagcgcccctctcgatatgccgccctgcttcctcctctcctcttgatccatctgccatcccatccccgctctgccagttgcccctcgcttcctcttcggctcttcatccccctcgatccgtcgcccgtgcttcctcctcactatgtcccgtcccctctccatcttgtcgccctgcctccccgcgtctgcgtctgcgcctgccttcggcgtccagagccatatccgcgttggcctccacctacgcacccgcctctagccataagagctcctcccgtgtctgcctttagagatctgctacctccacatcggtgtctagggctcctccattgcctagatctactagagaggcagatgaaagtatttccgtctcatcaactgtgctgaagaggaggaaaacacctcacttgttgaagggagcagtggagacccggaggaagatcatttggagtctgcagctactaatcttcagcctggcagtgacacttgcattgcaagggaagagttgccagatcagaaggatctggtgaaactgcaagctgttatccgtggacatctagaggcggcccatgcctcacggccaaagcagatcagttaggaggataaaagaagacactaccttggcacatgcctgttgtcacaatggacaaaagaagattagtgttgtgtgagatttttttcattcctttgatctattgcatgctatttgtaccctaatcgacaaaatagatgagactcaattcaggagcaaatcaccagtcctgttcacagtccaattcactatggctaaaatatcaaacttatgctccttgaggtttgttttttccttatcttcctttaatatctgatgactgatggactggtgagttcatgatctgcttcatgcttttccttttatatatggtcactacctcactggttagttcatggtgctttttgtctacttctttgcccaaaaaaaatcccggggcgaatttcagcatgcttttcctgcttccgctgtgcaaattcacaggatgcgtgggaaatgtgttcttgtttcgtcgggtggtgttcttgccattcgttttagctcaacacaaaacaaatgcttcttgttcttcaggtcgccctgtgtttctttctcgccagtttgggccatggattctggtgtgcatttgttcaatatatcttagtatcttatttaacaatcagtacttctctgatgctcaagagatcaatttactcaaagtagcaaactgtatcatagttgtatactttatcaaacgaggaacctgatgcttgtagtataagcctcattttgttccaaacaagacaggcttcggatacaatcacctggaaatcaatcagtaaacttttgctattcagttttttaaataaaaaatttaggccttacgactttcctcgcaatgtgttcacatgtagattaccttattgcattgcctacttttgtccgttgtgtaaaccaatcttttatcatttatcaaatgattttgctcttaacattaacaaattatcgtttggtcatatgcaactaatgacatcacattaccaagattctggggacccatcgctaccttgtgtcaacagtagactgaccagatcaggtaccattttgaaacctgtgtacaatttcatttctcaataactggccgaacataaatagccaaggcatgggtttatgccaatactcataggttaaatgacactttggtcatatgcatagttgccaccctcaaatgcctatctcatgatagaagtaaatggtggtctaaatcaacaacgactttctataagtaccatgactattattcttgaacaaatgtgtgctcatggttctgagtagatattaccattgccattgttttatatggaagtccagtgccttgtcaatctttggtccacgagtaagtgttttggatattcatgttagtgtacactgtaatcaacagagctggttttctttaacagttttgttatgaaatcatggaactggcaacatgatagaatttttcaaggaaaaaaagggaaacgctcggcggcgaagctaaagcagagcttgcgctacacgcgctgcgagcagtttctgtctaaagggcaaggtctgatctcagatttgagctccccgtggcactgctcgcccggccagccaccatcccggtcttgcgctcggcggcgtgcatggtgtgctcgtccctgacagtggctagcttctgttttcttaattgatggctagcttctgttttcttaattgatgatttgttttttccttttctgatcgtcaatagggaagagacgacgataacatggacactgttttctaaatggatcagtatttttggtatatacacatgcttttactagtagaggagtatttattttcatttgtagcagccaaggaacttgtgcattccttatgaatcatgagaagaccatgaagatgcacacaaatttgcttgacttctgaccagtaataattagcgaaagaaagaaaatccagaaccatgaatcagcttgatagcagtaacaaatttgcttgacttctgacgagtaagaaattggcagcaagttcagcaggggccagactaataaatcagcttgatagcatccttgcagcggtgccttggactttggcggttagaagagttgcggctctggataaactcgaagctgacctatccaagttcgacgacgggcccttcttcctaggccaattcagcttggcggatgtagcgtacattacgattctggaaagggttcagatatactattcccatcttaggaactacgacatcgccgaaggcaggcccaacctccaggaattcatcgaggagatgaacaagattgaagcgtatgcgcagaccaagaacgatcctctgttcttgcttgatcttgccaagaaccatcttaagattgcctgaagatgtgacaaagcagcattagtccgttgatcggtggaagaccactcgtcagtgttgagttgaatgtttgatcaataaaatacggcatgttgttgctgactttggacttgcaaagttcactactgataataacacccatgtttcaacaagagtaatgggtacttttgggtatttggcacctgagtatgcagcatctggcaagctcacagaaaaatccgatgtattttctttcggagtcatgcttcttgagcttattactgggcggcgaccaattgacacaacccaattggcactgcttgttataagcacatatgtacttccatttgcatgttgtataatactaataccaattgcaaaattatagttattttttctacccttgttagttaataagcatatttgtggtcaataggttgtattcttattcttgtaaccgtgttaattaatgttatggacttgtagtcttgtattaccttgtgaatatatctgtccctgcctgccatgtgaacgtgcttagcctggaatttgtgatatgtacatatatccatgtgtttgaaatctgtattgtatgtg

SEQ ID NO: 4992 - DNA, 1107 bp, Zea Mays
accgcactccgcacggacacgtgctggcaaagcatgcgtacgtgtcctctccagttcttccccaggaggccaaggacccagtagaacgccgatctgttgtatacggagttacggactggcgccgccgcttagtcaccacccaccaaacttcacggcttcggctatcttcaagagacaagagtggagggcgaagagcagagctgggggggagatgaacagcggcgtggacacgcaggcgcgggcgctcgcggacgaggtgcgcggtagtttagagacgaagaactggatgctggacctcggtcacccgctcctgaaccgcgtcgccgagagcttcgccaaggccgcggggatcggcgcagtgcaggcggtcgccagggaatcgtacttcatggcgactgaaggcgagggaggatctgtgtccggcgcgaccggcgcaaggaaacgctcgttcccggagctcaatgggacgaacagtagcagcatcaagtcggcagaggccatggtgaaaagcgtgagcaaagagtcgttacagtggggtaacactttccatacagcatgaggctcgcggctggggtgcactccggcctcacctacggcctcgcgggggtgcgcgggacgcacgactggaggaacagcgccgtggctggcgccatcacgggcgccgcggtcgcgctcacgtcggagcacgcgtcgcacgagcaggtcgtgcagtgcgccatcaccggcgccgcgctctccacggccgccaacgtgctctccggcatattctgagccgccggccgtgccgtgccgctcgatttccgaggattggctgatagttctgtcacccaatcgttcgggtaccgtcgctcttacgcttcagtacgataacttgggagcgttgcattcatgcattcacttgcattgtcattacaacttatgccctactttactgttagccgtataacggttttactataatttacacgctgcttagtcatatctcctggtgggccgcgtaatcaccggggcattctattgactttcaacatgatgatggggaaattatctgtgacatacccctataaacttttaacatgatgggcaaattatctgtgacatactgac

SEQ ID NO: 4993 - DNA, 2839 bp, Zea Mays
tgagcatgatgctccctgtcccccttttctatacatttccttatagctcatggctttgcagtccgcgccgccatcatcagacctccgttccatctgtgactgtgatccatggccgtggctaggctagccgtagcatttttgccagcgagagccttttgaattgagctatagctgcggcccatgggcgtgggcatcagatttgggactggctttctgcacgcactcccacaccacacacacaccggccactgtctaaaaggcactagtgctacaaataagctgcactgtcctctgccctgacgcccacgtaaacatatttggcgtgcatcccttcgcagtgtttgcttgctgtgctgacttcattggagagagagacagtgaagagtagaggagagagagagagagagagagagagagagagagagagagagagagagagagagagagaaaatgggcgtggcgacggtgacagagctgaagcagagcatctccgggaagaggacattccggccgagcctcatcagccgccacgccaatgagtggcctccgaccgacgtctccagcgacctcaccgtcgaggtcggcacctccagcttcgcactccacaagctgttcgcgcagttcccgctggtctcccggagcggcaagatccggcgcctcgtcgcggaggccaaggacgccaagctggcgcggctcagcctgcacggcaccccggggggcgcgccggcgttcgagctcgccgccaagttctgctacggcgtccacgtggacgtcacggtcgccaacgtcgccatgctgcgctgcgccgcgcactacctgcagatcaccgacgacttctccgacaagagcctggagctccgcgccgaggccttcctccgcgacgcggtgctccccagcatcgccagctccgtcgccgtgctccgcagctgcgaggcgctgctcccggccgccgaggacgtcggcctcgtgccccgcctcatcgccgccgtcgccaccaacgtgtgcaaggagcagctcacctcggggctgtccaagctggaccagtgcgcgcagctcaagcccgcggcggcgttcgccgacctcgacccgccggccgactggtggggcaagtccgtggccgcgctcggcctcgacttcttccagcggctgctctccgcggtcaaggccaaggggctcaagcaggagacggtcaccaggatcctcatcaactacgcgcagaacgcgctgcacgggctcatggccagggacgtgcacagatgcggcggcgcggacgccgacgccgtcaagaagcagcgcgccgtcgtggaggccatcgtgggccttctcccggcgcagtccaggaagagccccgtgcccatggccttcctctcggggctcctcaagacgtcgatggcggtgtccgcgtccagcatctgcagggccgacctggagaagcggatcggcatgcagatggaccaggccatcctggaggacatcctcatcgccgcgggcgccgccgtgggcgcgccggccggtcagcagcacgcgctgtacgacacggacgtggtggcgcgcatcttctcggtgttcctcaacctcgacgacgaccataacgaggaggacgacgggttcgactacgacagcccgcgctcgccgaagcagagcctcctggtgaaggccgccaagctgctggacagctacctcgcggaggtggcgctcgactctaacatcctcccgtccaagttcatctccctcgccgagctgctcccggaccacgctcgcgtcgtcaccgatggcctctaccgcgccgtcgacatcttcctcaaggtgcaccccaacatcaaggaggcggagcggtaccggctgtgcaaggcgatcgactgccagcggctgacgccggacgcgtgcagccacgcggcgcagaacgagcggctcccggtgcagatggcggtgcaggtgctctacttcgagcagctgcggctgcggagcgcgatccaggccgggggtggcagcagcatgggcgggcacgacggggcggtcttcttcgggtgcgccgcggccgccgcgtcggtgcagggcagcgtgaacatgcgctccggcagcggcgtgggcagcggcgccatgtcgccgcgggacaactacgcgtcggtgcggcgggagaaccgggagctgaagctggaggtggcgcggatgcggatgcggctcacggacctggagaaggaccacgtgagcatgaagcgggagctggtgcgcgtcggccccgccaaccgcctgctccggggcttggcgcgcagcctcggcaggctcttccgcatgcgccccgccgccgagccggggctgcagcagctcggggccaaggctaccgccgacgccaaggtgctcttccagcgccgccgccgccactccatctcatgatctcggttcctcgaatcggagaggcgaccggcgggcacgctgccgatcgagcgtgctcgcgaggatgagtggccacgctactgtacgtgcgtacagcaaagtttcgcgtgtgcaattgtgcatagcatacaagaaaggaagacatggtttgagtgagtgcacactgcaggtttatttcttcccggatttcgtgcggtgcgggcatcgcgtggtcttctgctcatgaaagtcatggcgttcgacacagcatgcgatgcgattcatgtatatggatggatggactatggaaaggtttcgaggggtgtatgtatctttgggaccagtggacacatggttcctcctgttttctctgtagtttccggccaaattccgttcagccgagcgatttctatttcttgtttaggcgaaattgttcagcaaagtaagaaggttattttaattccac

SEQ ID NO: 4994 - DNA, 1861 bp, Zea Mays
caccggagacctcagcccatcctttccttcccttgatcccctcgcctttcttcttgtatataaaccacccaaactgcacctgtccgcgcaagagcaagtgacgactagaccgactaatccgactccctagctcccacactaccaccatcccaccatctttaaaaagcccccaccactacatcctgcgctgcaaacgcctcgcctctcctcgcctctgttcagctcacggtggaagaggaggcgacaggccgacagcacacgagagggagctagcactagcagaagcgcgcgaaggagctcaagcagccacacgccgaccagcaccaccgcgcgatggcgtgcatcaacatgtacaacccagacggcgcggcggggttcggcggcggcccgcagcagccggccgcgctgggcccgcgcatctccttctccagcgacttcgccgtggagccgacgccggtgcagaaccgggcgacgagcctgcggtgccaggaggaggacctcaacttcgagttctccgtgggcagccaccccatgatggccgccgaccagctcttctccaagggcaggatccttcccctcaaggacaacggcggcggcagtgtctgcttcgctgccgcgcggccgcccaccacgctgcgcgacgagctccgtggcggcggcgacgacgacgacgagagggcggccttctccgccgccggcaccaaggggtccaactccaaccggtggaaggagatgctcggcctgcggaaggcgctctgcgtcggcgtcggcggcggcggcaacggcagtccggccaagaaggctagcagcagcgacaagcagggcgtcgttgccgccgctgcccccggccccgacgaccacatggccgcgtccaatcaggagcagctatcatgatgaggcgaccgtaccgacgggagactgggactgggagagagagacgacgagacagccatgggatgggagcactccacatgcgtgaacaagctttaaaattttgtcatccctccttccgatcatccttcctgatgctgttgatcgatcaaccacttgaatcatgcttgtcatcatcggtccatgcctccatggtctagtaggttctgtaaattgttgtgagtttgcttgtgtgctagctagctaggtggcccggcccggccgttgaaaagtgccaaaaaaaaaatacatgtgtattttccctgcatgcatactcgatctaagtgctctgatgatcttctctctagcaagctgtccagtccactcactagcagcagatccatggccagtcgtctttgcttcttttctttgtttcgttcgcctgttagttcttggctttctcctccgctcctccaccctgtacaaagtggctgctgcgtacgtactcgtagatgggaaattcatggtgcaatgattagatttgccaggtggccagatctgtcatctgtgaggtgaggaggctctcgtttaccagcgatggagcctctctgaccgcccctgtggtgggatcaacagtgctcttgtttgtctcattgctccgctggatgactataaattttataatttcataatagagagagagacaacagtcatcagagcgagcatgtgtgaggcgacagcgagagccaatggaggaaggaaggcatggctccccgcgtcccccaaccgttatagatgcgcaagtaggccgtgctaagtaggtcggtattaagggcctgtttggcatggctccagagcaaaactccaaggaggagctggccagagcatgtcaaacaccctaactccagagttgtaaactctatggagtttttggagctgcagtacaattttttggagtacctcttttgctgctctgaaaactccaaaaaag

SEQ ID NO: 4995 - DNA, 840 bp, Zea Mays
aaagggcgactcgccgactccgaagcccaaaccctcaacctacagcagcgcgccagcgccgctccgcccgcccatgggctcctcatcccactctctcgccgtctcacggcgcggccgcagcgcgcggcagtcccccttctttcgagacctcgccaccccgatcccgtcccatcgtggcgtgtcccgctttgcctcgggggcttccccctcctccacgccaccacccccgccgcccatcttcaccctcgatgaccgctatgcctccgcagacttctccccggaccccaccgcctccgaccttctccccgtcgcgtcgtctccctccccccgcaccgctgccagccgctcgccgccatgggacctgtcccggggcaaggtggcgctctcggcaccaggatcccccatggctggggtcgtcgagccgacccggaaagagatgctcgctttgccggcccctgcgagccctggcaccccacctcctgccgcgacagcggaggcgcagtcaccggtgtcccccgcgcaggcacctaggacggagccggtggcgaacgcaggggaggtcgaacgggaggagtgggtcactgtatttggattctctattggtgataccaaccttattcttcgggaattcgagaaatgtggagtaatattgagacatcactctggtccaagagatggaaattggatccacatattgtaccagcctattgatgcagtgcactggcagcagctggacgagagtttcgctccaagcaacccaggtggatttatggtttcctttgccttcgaagtcacttggcttgaagagcacaggcgcatctaaccagtttaggaggcttt

SEQ ID NO: 4996 - DNA, 2790 bp, Zea Mays
atggcggcacatcagcatggtacggccggccggggtggtggtggtggtagcatggagatcttcccctacagctacagcagcggccgcgacctggagctggtggacctgccggcggaaccggtggacgtgaagcgccaggactcgctctaccgcgacgccaccatgccggcgcaccacggccacaacggacaggagagctgggtccggacgctacggctggcgttccagtgcgtgggcatcctgtacgccgacctcggcacctcgccgctctacgtgtacgccaacaccttcaagtacggcgtccaccacgaggacgacgtcctcggcgtcctgtccatcatcatctacagcttcgtcctcttcaccatgatcaagatcgtcttcatcgccctctacgccaacgacgacggcgacggtggcacgttcgcgctctactcgctcatctcgcgctacgccaaggtgtgcctcatcccgaaccagcaggcggaagacgagctcgtgtcgaggtacaagcatcgcagcaagccgtcggcgacgcttcggagagcccagtggatgaaggacctgctggagaccagcaagactgcaaaggtctcgctcttcttcctcaccatcctcgccacggcgctcgccatcagcgactgcatgctaacccctccgatatcagtactcgcagctgtcaacggactcaagctgagagcaccgcatctgactacagatgagactgtgtggatcacagtgggcattctggtggttttcttcgcggtccagcgcttgggcaccgacaagatcggctacacgttcgcgccggtggtcttcgtgtggctcctcctcatctccggcatcgggctctacaacacggtcaagtacgacgtcagcacgctgaaggctttcaacgccaagtacatcgtcgactacttccgaaggaacaagaagaaagggtgggtttcgctgggtgaaatcctcctctgcttcacaggcactgaagctctcttcgctgacctgggatacttcagcatcagatctatacagctaagcttcaccttcggcttgttaccttcagtgatgctgacgtacattgggcaagcggcatacatgaggaaacacatagacacgcttgacatatccaacgttttcttccaatccattccaagatctttgttttggccaactttcgtcctggctctcatcacgtcggtcatcggaagccaagccatggtctcgtgtgccttcgcaaccatgtctcatctacaggcgctcaactgtttcccgagggttaagattctgcacacgtcaaggcgttactcaggccagctctacagccccgaagtgaacgtcttcctctgcattgccgcctgcgtcgtcaccgtaagcttcaggacgacaggtttcatagccaaagcacacgtgatgctgctggtgtggaaggtgaacatctggtggatcgccgtgttcttcgccgtgttcatgtcgacggagtgcgtgtacacggccgcggtcctgtacaagttcacccacgggccgtacgtgccgctggccatgtcggccgtcctcatgttcgtcatggccgtgtggcactacgtgcacgtcaagcggtacaggcacgagctggagcgcaccgtgtcgcgggacgcggccagggacctgctggagcgcggggacctcaagagggtcccggggctgggcctcttctacaccgagctggtgcaggggatcccgcccatcttccctcacctcgtcggcaagatccccaccatccactccgtcgtcgtcttcatcaccgtgaagagcctgccggtgccccacgtccacgtcacggaccgcttcctcttccgccaggtcgagcccaaggagttcatggtgttccgttgcgtggcgaggtacgggtaccgcgacgcgctcgagacggccgctgatttcgtcagcgtcctcgtcgagtacctccagtactacgtcagggacctcaacctctacggggttgtcggtgatgagccgttcaagatcgtcttccacagtgctcgggtggacagcttttcttgggagaagcactcgtcgggacatgctgtctatgccgaggagatgctcacaccagcccagtccttctccgagctcacaatgcatccggtctccatgagcagtagactggcacatttccagacagggaaaatgaacctggaggagatgttgaagatcgaggaagatcaaaagatcatccaacgcgaggtggacaacggtgttgtttacataattggggagagtgaagtagtagccaagcctcattccaacttgttcaagaagattattgtcaactacgtctacagcttcctaaggaagaactcaaggaatggagagaagatgctatcaattccaagaggccaactgcttaaggttggaataacatatgagatctaaggtcgcacatagactatatatatatttgactagaacgatgtcttttccttccatgtggatatgtgattgtaattaatcttcgcaacgtgcatatatgaaaatcaatatatatttcaatgctggaaggattaagatcattaagagagggatgaattaggctagtacgtctaaaattgcttgcaattattaagttctactatttagtccatccccccctcccagatgctgagatgttttaggcctagtttgggtattctacaaatgtgggggggttgagattgagacagacataaaatgtctaagtaaaggaaaacgaggaaaggaagaaataaaacaaaaaaggaagtcttctagccgctgggcttggcgaggggcaca

SEQ ID NO: 4997 - DNA, 3126 bp, Zea Mays
cagtactaacagcaattatgtaggtaggtaggtaacaagcagaggtgaaagtcttttcgattttctagagcttctaacaaaaagctgggcagcagttcccaagcctagataggttgttggttggacgtacggttataaaaggaacctcgtagtgacatccgcagctggccgggaagcaacaagcagccaaacgctgtacgcgcactgctgctgcagtgctgcacagagtacgtaattctgcgggagtgaggagcaggggaggctcttgtttcgcgcagcagaggatcggaagcgaagacgacgccggcggcgcgcggccagggagatggcggcacatcagcatggtacggccggccggggtggtggtggtggtagcatggagatcttcccctacagctacagcagcggccgcgacctggagctggtggacctgccggcggaaccggtggacgtgaagcgccaggactcgctctaccgcgacgccaccatgccggcgcaccacggccacaacggacaggagagctgggtccggacgctacggctggcgttccagtgcgtgggcatcctgtacgccgacctcggcacctcgccgctctacgtgtacgccaacaccttcaagtacggcgtccaccacgaggacgacgtcctcggcgtcctgtccatcatcatctacagcttcgtcctcttcaccatgatcaagatcgtcttcatcgccctctacgccaacgacgacggcgacggtggcacgttcgcgctctactcgctcatctcgcgctacgccaaggtgtgcctcatcccgaaccagcaggcggaagacgagctcgtgtcgaggtacaagcatcgcagcaagccgtcggcgacgcttcggagagcccagtggatgaaggacctgctggagaccagcaagactgcaaaggtctcgctcttcttcctcaccatcctcgccacggcgctcgccatcagcgactgcatgctaacccctccgatatcagtactcgcagctgtcaacggactcaagctgagagcaccgcatctgactacagatgagactgtgtggatcacagtgggcattctggtggttttcttcgcggtccagcgcttgggcaccgacaagatcggctacacgttcgcgccggtggtcttcgtgtggctcctcctcatctccggcatcgggctctacaacacggtcaagtacgacgtcagcacgctgaaggctttcaacgccaagtacatcgtcgactacttccgaaggaacaagaagaaagggtgggtttcgctgggtgaaatcctcctctgcttcacaggcactgaagctctcttcgctgacctgggatacttcagcatcagatctatacagctaagcttcaccttcggcttgttaccttcagtgatgctgacgtacattgggcaagcggcatacatgaggaaacacatagacacgcttgacatatccaacgttttcttccaatccattccaagatctttgttttggccaactttcgtcctggctctcatcacgtcggtcatcggaagccaagccatggtctcgtgtgccttcgcaaccatgtctcatctacaggcgctcaactgtttcccgagggttaagattctgcacacgtcaaggcgttactcaggccagctctacagccccgaagtgaacgtcttcctctgcattgccgcctgcgtcgtcaccagatctgcgtggtcctcgtgatggtgatcacgacgctcctgatgacaatagtgatgctgctggtgtggaaggtgaacatctggtggatcgccgtgttcttcgccgtgttcatgtcgacggagtgcgtgtacacggccgcggtcctgtacaagttcacccacgggccgtacgtgccgctggccatgtcggccgtcctcatgttcgtcatggccgtgtggcactacgtgcacgtcaagcggtacaggcacgagctggagcgcaccgtgtcgcgggacgcggccagggacctgctggagcgcggggacctcaagagggtcccggggctgggcctcttctacaccgagctggtgcaggggatcccgcccatcttccctcacctcgtcggcaagatccccaccatccactccgtcgtcgtcttcatcaccgtgaagagcctgccggtgccccacgtccacgtcacggaccgcttcctcttccgccaggtcgagcccaaggagttcatggtgttccgttgcgtggcgaggtacgggtaccgcgacgcgctcgagacggccgctgatttcgtcagcgtcctcgtcgagtacctccagtactacgtcagggacctcaacctctacggggttgtcggtgatgagccgttcaagatcgtcttccacagtgctcgggtggacagcttttcttgggagaagcactcgtcgggacatgctgtctatgccgaggagatgctcacaccagcccagtccttctccgagctcacaatgcatccggtctccatgagcagtagactggcacatttccagacagggaaaatgaacctggaggagatgttgaagatcgaggaagatcaaaagatcatccaacgcgaggtggacaacggtgttgtttacataattggggagagtgaagtagtagccaagcctcattccaacttgttcaagaagattattgtcaactacgtctacagcttcctaaggaagaactcaaggaatggagagaagatgctatcaattccaagaggccaactgcttaaggttggaataacatatgagatctaaggtcgcacatagactatatatatatttgactagaacgatgtcttttccttccatgtggatatgtgattgtaattaatcttcgcaacgtgcatatatgaaaatcaatatatatttcaatgctggaaggattaagatcattaagagagggatgaattaggctagtacgtctaaaattgcttgcaattattaagttctactatttagtccatccccccctcccagatgctgagatgttttaggcctagtttgggtattctacaaatgtgggggggttgagattgagacagacataaaatgtctaagtaaaggaaaacgaggaaaggaagaaataaaacaaaaaaggaagtcttctagccgctgggcttggcgaggggcaca

SEQ ID NO: 4998 - DNA, 3166 bp, Zea Mays
cagtactaacagcaattatgtaggtaggtaggtaacaagcagaggtgaaagtcttttcgattttctagagcttctaacaaaaagctgggcagcagttcccaagcctagataggttgttggttggacgtacggttataaaaggaacctcgtagtgacatccgcagctggccgggaagcaacaagcagccaaacgctgtacgcgcactgctgctgcagtgctgcacagagtacgtaattctgcgggagtgaggagcaggggaggctcttgtttcgcgcagcagaggatcggaagcgaagacgacgccggcggcgcgcggccagggagatggcggcacatcagcatggtacggccggccggggtggtggtggtggtagcatggagatcttcccctacagctacagcagcggccgcgacctggagctggtggacctgccggcggaaccggtggacgtgaagcgccaggactcgctctaccgcgacgccaccatgccggcgcaccacggccacaacggacaggagagctgggtccggacgctacggctggcgttccagtgcgtgggcatcctgtacgccgacctcggcacctcgccgctctacgtgtacgccaacaccttcaagtacggcgtccaccacgaggacgacgtcctcggcgtcctgtccatcatcatctacagcttcgtcctcttcaccatgatcaagatcgtcttcatcgccctctacgccaacgacgacggcgacggtggcacgttcgcgctctactcgctcatctcgcgctacgccaaggtgtgcctcatcccgaaccagcaggcggaagacgagctcgtgtcgaggtacaagcatcgcagcaagccgtcggcgacgcttcggagagcccagtggatgaaggacctgctggagaccagcaagactgcaaaggtctcgctcttcttcctcaccatcctcgccacggcgctcgccatcagcgactgcatgctaacccctccgatatcagtactcgcagctgtcaacggactcaagctgagagcaccgcatctgactacagatgagactgtgtggatcacagtgggcattctggtggttttcttcgcggtccagcgcttgggcaccgacaagatcggctacacgttcgcgccggtggtcttcgtgtggctcctcctcatctccggcatcgggctctacaacacggtcaagtacgacgtcagcacgctgaaggctttcaacgccaagtacatcgtcgactacttccgaaggaacaagaagaaagggtgggtttcgctgggtgaaatcctcctctgcttcacaggcactgaagctctcttcgctgacctgggatacttcagcatcagatctatacagctaagcttcaccttcggcttgttaccttcagtgatgctgacgtacattgggcaagcggcatacatgaggaaacacatagacacgcttgacatatccaacgttttcttccaatccattccaagatctttgttttggccaactttcgtcctggctctcatcacgtcggtcatcggaagccaagccatggtctcgtgtgccttcgcaaccatgtctcatctacaggcgctcaactgtttcccgagggttaagattctgcacacgtcaaggcgttactcaggccagctctacagccccgaagtgaacgtcttcctctgcattgccgcctgcgtcgtcaccgtaagcttcaggacgacaggtttcatagccaaagcacacgagatctgcgtggtcctcgtgatggtgatcacgacgctcctgatgacaatagtgatgctgctggtgtggaaggtgaacatctggtggatcgccgtgttcttcgccgtgttcatgtcgacggagtgcgtgtacacggccgcggtcctgtacaagttcacccacgggccgtacgtgccgctggccatgtcggccgtcctcatgttcgtcatggccgtgtggcactacgtgcacgtcaagcggtacaggcacgagctggagcgcaccgtgtcgcgggacgcggccagggacctgctggagcgcggggacctcaagagggtcccggggctgggcctcttctacaccgagctggtgcaggggatcccgcccatcttccctcacctcgtcggcaagatccccaccatccactccgtcgtcgtcttcatcaccgtgaagagcctgccggtgccccacgtccacgtcacggaccgcttcctcttccgccaggtcgagcccaaggagttcatggtgttccgttgcgtggcgaggtacgggtaccgcgacgcgctcgagacggccgctgatttcgtcagcgtcctcgtcgagtacctccagtactacgtcagggacctcaacctctacggggttgtcggtgatgagccgttcaagatcgtcttccacagtgctcgggtggacagcttttcttgggagaagcactcgtcgggacatgctgtctatgccgaggagatgctcacaccagcccagtccttctccgagctcacaatgcatccggtctccatgagcagtagactggcacatttccagacagggaaaatgaacctggaggagatgttgaagatcgaggaagatcaaaagatcatccaacgcgaggtggacaacggtgttgtttacataattggggagagtgaagtagtagccaagcctcattccaacttgttcaagaagattattgtcaactacgtctacagcttcctaaggaagaactcaaggaatggagagaagatgctatcaattccaagaggccaactgcttaaggttggaataacatatgagatctaaggtcgcacatagactatatatatatttgactagaacgatgtcttttccttccatgtggatatgtgattgtaattaatcttcgcaacgtgcatatatgaaaatcaatatatatttcaatgctggaaggattaagatcattaagagagggatgaattaggctagtacgtctaaaattgcttgcaattattaagttctactatttagtccatccccccctcccagatgctgagatgttttaggcctagtttgggtattctacaaatgtgggggggttgagattgagacagacataaaatgtctaagtaaaggaaaacgaggaaaggaagaaataaaacaaaaaaggaagtcttctagccgctgggcttggcgaggggcaca

SEQ ID NO: 4999 - DNA, 5338 bp, Zea Mays
tctcctccgaggaagacacataccacaccaccgatgtccgatgcgacgagggagcacataataaaaaaacaataagacaataaaattaaataaaattataaacagagaaaaggacaacgtgaaataccctaggccgtgatcttggcggctgcggcgcgtcggcgatcggcgggggtcgccccgcggccgacgacgtcatgctggggcggcgcggggagatggggtacgaggaaggggagctcgagctggaggagggcgaggcggcctccggcggcggccgtgagctggttattcccgacgcgctcacctgcatcgatgaaagaatccaaaatgtgttgggtcatttacgcaagaaatttgaaggtgaaataactcatatgaatttgggttcgatgtatggatgccatggttcgttcttgccaacatacccacgttcccctttgggctttcctcaatataggaacactgcagatccaaaaaaccatggcagtgcctcgagatccctgcatgtattaacagagaatgcgcaaaagaaccattttgttaagacggaattagacagcagcaggaaaaatgaatactgtcgaatatccaatgagagtgatggcaatcaacagatgttaaacagagcagtcattgggtctgagcagaaagcacgaaaaatacgtatcaagttgaacagcaataaaagtttgccaagaaatactgctgctatatatagtggcctgggcctagatatttccccttcatcatctgcagaagacaacctagatgagactgctggggctctggtgcctgaagttttgcctgatgaatctccacgtgccatacttgagataatgaccagccattatattcctggaggacacttgctctcacccctcaaggaaaatgttctagaattgaaacaaaagcctaaagtgatggtaaaacaagaagcacctgaatttcaagtcaaagtagaattgcatggagactggggctgtacaacctctgctactctggataacaaagataagtgtaccaaggaaatcaagtctgatgaaaagaaagacaagatccccattttcaggagttcaaaaatcagagttaacaaaccatctgctgtgaataagggaactaagcctttacaggatgttttagatgataccggttcaaacttgttgcctacaattgtaaatacagaacatacagttgaggagccagcgaaatttacaggtgcaatttcagataaaatgaagggatcgaaggatggtgcatcaaaaggacacattagtggcaagaacaaaaacattaaggaggaaccttcgcttgatcatggattttctcgtaaaaacagatgtgattctgatgagtacaatggtaaacctcatgccagttcatgtcagttgcaaaacattcccaacaaaacttcgccactggagagggacaaagggaaagtattgcatatggaagatgaaccatctcagtacaaaagcaaggaaaatggagacctgtttagtgcagattccatggctgtcatggtaggaaatgttgatagaaattctttagggatgatgaaagggaagaagaaagtttcttctttgcaagccaccctgtctgggaagttcaagttcaaggcaaaaaaacaattgaatgacaacattgatagaaaaaaatatggtgaagacgagcattatgctttagaccatagaattggtttggataattcatatcaaatagataagagtgtgaggcttgagaaaaagaccatctcatctggggagattgataacaagtcagatgttggaaatgatggtggtgtcaatatctctgccatgtttgatgagaaatcagatgttttgccattagcatctgcatccctgcctgctccagaacccattttaataaatgaacaatgggtgtgctgcgacaagtgtgagaattggcgccttttaccctatgggatgaatccagatatacttcccaaaaaatggcggtgtagcatgcagagttggctgcctggaatgaatagctgcaaaataactgaagacgagaccacaaaagcccttcgggcactttatatggttcctgcacctgaaaataacattaaggatggtggtcatgataatgctatgtcaggcaaaggtacagctattgctccaacttttcagggaaatacacagtccatcagttcactggggaagctaaaaggttcccttgatggagccaatgtggcaaatactttggagtcagctggtatgtcaaagccctcaaagaatctgcatgctccttcaagtagaaacttctctaaactgaaggaaaaaaggaagctggtggaatcatcagataaaggagaaattgttggaaaagaccaatcacgtcgaatgagaagcagtgtaggggttgatcatgataacctgcgagcatcaaagaaaatgaagaaagaatccaatggccctgtgatgaagcatcaaccctctgagtttgaaataagcaaaagtagtcctgccagtgagactctgaaaaacattcagaagcgcagttgcatttctcctggcatgggaaagtatggtttatcttcatcaggtaaacattctcatggtgaggataaagatttctcagctgtggtcattaaaacatcagatacagagaactctggccctcgagactcatccattaagaagagaaaactgaaacaaaggcagtcaagccagcattttcgggatccacactgtagcaacaatgacacaaatggtattacaaaacaaaatattactgaaattaatgctgtgaagaaaaaatccaggtcagaattgaatttgttaaagacagataggatagctactgattctagaggcacagttggtggagttgatgataggatatctactgataaggagtgtttaagtgagcaacttcaagaaaatacccatttccagcatccgtcactcgtagaaggcaccacaaagagggaaatccgtcatgcacaaacacctatagctgcgacttcgagttcatccaagatgtctaactccaacaagtatatagctcattttcaggaaacgagggcctctcctgtagagtcagtttcttcctcacccttgagatcttctgataagaatcctttgggtcgacatagaagctcttcatggacaattacagaaaatgtgcattctcaagagtcagggaagataaattcttcatgctcgaacagaaactatgatcttgggtctgattgtgataaagctaaggctcgtatttctggttgctttaacggagatgtgagtcatcatgttcagaaggatagggactttctgaaagataaacaagatgtgatgaacgcatgtcttataaacaaaggttctggatttggtgctagaaatttccagctgagtcctgaacataaagtcaatccagatgtcctttcatcacatgacaacgatggtcacaagcaaccaacagttcgtcagaatgggaaaacacagccccatttcggttcaaaccaaggtgaccatgcaaatttgacttatgggcatattaagcctggtaaagggaatataccaaataaggaccagaaaacaaatccatctgcagtcaaagcaagcaagcagcagccatccttaaacaatgcatcaaatggtgatgcctcttacaaggcaaggcaaatagaaaaggctgttattgaaaatttggacacgaggaagcacatcactctcaatggtgatgcttcaaatctaacaagtgcatctgttctactgaaggaagctcgagatttgaagcacttgtctaaacgtcttaaggaaaaaggggatgactttgagagtacaagcatgtgctttgaggcgggtctgaaatttctccatgttgcttctctgtgggagaccccaaacattgatagctccaatcaaggggtttctatacaagctatgaaactgtattccgaaacaggaatcctctttggattctgcgctcacgaatttgagcgactcaagaaaatggcgaatgctgctctggcatataaatgtgtggaagtggcatatatgaaggctgctttctttagaagtcctggtgtaattaaagatagacatgcattgcatgcagcatctttgatggttgctccagctgagtctccatcatcttccgcttcagacatcgataatttaaataaccagagcacagttgctaaggctgtttctgcaagaggtgtatactctcctcagattgctagcaattccatatctcggaacaatcatcatttgatgggattgctttcttatgcagaggacacaaataattcatttgagggaaccagaaaatcacaaacttcattttcagcttatctttctggcattgggaagaatcaggtggatgaagttgctcttgtaaggaaagtacttgatttcagttttcataatgtcaagggattgctgcaactgattcgtcattcgttggagtctatcaaccatgaaagtggtaaatgatctaccaagtataggtatcttggaaaagagattaatgatgggaaggttgctttggcaactgtgctatacattggtacctcctccaatctggatgtagaagtaaacaagtttagagagtaatcagttgtgaatggaaagggttcacattgccttctcttggttgcatggaagtattatatgtgggtgatacaaatttcaccagcggcaaactgctaaaacgggtttctttaccaagtcatattgctacttttgttgcccggaatatttcttgtagatgatgactttgactagtgccgaactggcaaagggggttcttaccaagaattagcctgcaaatgttaattgctaagtccaacattcttggtttcagtgtctagtgaatgatcaaatccaagtcctcaatgggaatctaatatacatctaccatagtgttcgagggcagagtctcagttttctttccagggcgccagtgtaagcttaggtcagcacttttgtcctaaagtctccccaccttctattggccttgcggagaaggttctgacagttttggaggtgcttcaggatttagcagtctaatattttacaaatttgcggaggttcagtgaggattgtctgactccaatgatagcgatgtaaaagcccttgctgctgtgctgacgaaagaggattcctttccaatgttacacgatgagtccggttgatttgtgtaacatgttctcgtctccgtccagactgaaaaggcagtggctcgttgagctgtacggcatgaagccttctttccgattttaatactagttctgggtgtactgctccaaagagtagcatctctttgcagtaaaaatggtttgttctgttcaagtatgtgagagaacaag

SEQ ID NO: 5000 - DNA, 5412 bp, Zea Mays
tctcctccgaggaagacacataccacaccaccgatgtccgatgcgacgagggagcacataataaaaaaacaataagacaataaaattaaataaaattataaacagagaaaaggacaacgtgaaataccctaggccgtgatcttggcggctgcggcgcgtcggcgatcggcgggggtcgccccgcggccgacgacgtcatgctggggcggcgcggggagatggggtacgaggaaggggagctcgagctggaggagggcgaggcggcctccggcggcggccgtgagctggttattcccgacgcgctcacctgcatcgatgaaagaatccaaaatgtgttgggtcatttacgcaagaaatttgaaggtgaaataactcatatgaatttgggttcgatgtatggatgccatggttcgttcttgccaacatacccacgttcccctttgggctttcctcaatataggaacactgcagatccaaaaaaccatggcagtgcctcgagatccctgcatgtattaacagagaatgcgcaaaagaaccattttgttaagacggaattagacagcagcaggaaaaatgaatactgtcgaatatccaatgagagtgatggcaatcaacagatgttaaacagagcagtcattgggtctgagcagaaagcacgaaaaatacgtatcaagttgaacagcaataaaagtttgccaagaaatactgctgctatatatagtggcctgggcctagatatttccccttcatcatctgcagaagacaacctagatgagactgctggggctctggtgcctgaagttttgcctgatgaatctccacgtgccatacttgagataatgaccagccattatattcctggaggacacttgctctcacccctcaaggaaaatgttctagaattgaaacaaaagcctaaagtgatggtaaaacaagaagcacctgaatttcaagtcaaagtagaattgcatggagactggggctgtacaacctctgctactctggataacaaagataagtgtaccaaggaaatcaagtctgatgaaaagaaagacaagatccccattttcaggagttcaaaaatcagagttaacaaaccatctgctgtgaataagggaactaagcctttacaggatgttttagatgataccggttcaaacttgttgcctacaattgtaaatacagaacatacagttgaggagccagcgaaatttacaggtgcaatttcagataaaatgaagggatcgaaggatggtgcatcaaaaggacacattagtggcaagaacaaaaacattaaggaggaaccttcgcttgatcatggattttctcgtaaaaacagatgtgattctgatgagtacaatggtaaacctcatgccagttcatgtcagttgcaaaacattcccaacaaaacttcgccactggagagggacaaagggaaagtattgcatatggaagatgaaccatctcagtacaaaagcaaggaaaatggagacctgtttagtgcagattccatggctgtcatggtaggaaatgttgatagaaattctttagggatgatgaaagggaagaagaaagtttcttctttgcaagccaccctgtctgggaagttcaagttcaaggcaaaaaaacaattgaatgacaacattgatagaaaaaaatatggtgaagacgagcattatgctttagaccatagaattggtttggataattcatatcaaatagataagagtgtgaggcttgagaaaaagaccatctcatctggggagattgataacaagtcagatgttggaaatgatggtggtgtcaatatctctgccatgtttgatgagaaatcagatgttttgccattagcatctgcatccctgcctgctccagaacccattttaataaatgaacaatgggtgtgctgcgacaagtgtgagaattggcgccttttaccctatgggatgaatccagatatacttcccaaaaaatggcggtgtagcatgcagagttggctgcctggaatgaatagctgcaaaataactgaagacgagaccacaaaagcccttcgggcactttatatggttcctgcacctgaaaataacattaaggatggtggtcatgataatgctatgtcaggcaaaggtacagctattgctccaacttttcagggaaatacacagtccatcagttcactggggaagctaaaaggttcccttgatggagccaatgtggcaaatactttggagtcagctggtatgtcaaagccctcaaagaatctgcatgctccttcaagtagaaacttctctaaactgaaggaaaaaaggaagctggtggaatcatcagataaaggagaaattgttggaaaagaccaatcacgtcgaatgagaagcagtgtaggggttgatcatgataacctgcgagcatcaaagaaaatgaagaaagaatccaatggccctgtgatgaagcatcaaccctctgagtttgaaataagcaaaagtagtcctgccagtgagactctgaaaaacattcagaagcgcagttgcatttctcctggcatgggaaagtatggtttatcttcatcaggtaaacattctcatggtgaggataaagatttctcagctgtggtcattaaaacatcagatacagagaactctggccctcgagactcatccattaagaagagaaaactgaaacaaaggcagtcaagccagcattttcgggatccacactgtagcaacaatgacacaaatggtattacaaaacaaaatattactgaaattaatgctgtgaagaaaaaatccaggtcagaattgaatttgttaaagacagataggatagctactgattctagaggcacagttggtggagttgatgataggatatctactgataaggagtgtttaagtgagcaacttcaagaaaatacccatttccagcatccgtcactcgtagaaggcaccacaaagagggaaatccgtcatgcacaaacacctatagctgcgacttcgagttcatccaagatgtctaactccaacaagtatatagctcattttcaggaaacgagggcctctcctgtagagtcagtttcttcctcacccttgagatcttctgataagaatcctttgggtcgacatagaagctcttcatggacaattacagaaaatgtgcattctcaagagtcagggaagataaattcttcatgctcgaacagaaactatgatcttgggtctgattgtgataaagctaaggctcgtatttctggttgctttaacggagatgtgagtcatcatgttcagaaggatagggactttctgaaagataaacaagatgtgatgaacgcatgtcttataaacaaaggttctggatttggtgctagaaatttccagctgagtcctgaacataaagtcaatccagatgtcctttcatcacatgacaacgatggtcacaagcaaccaacagttcgtcagaatgggaaaacacagccccatttcggttcaaaccaaggtgaccatgcaaatttgacttatgggcatattaagcctggtaaagggaatataccaaataaggaccagaaaacaaatccatctgcagtcaaagcaagcaagcagcagccatccttaaacaatgcatcaaatggtgatgcctcttacaaggcaaggcaaatagaaaaggctgttattgaaaatttggacacgaggaagcacatcactctcaatggtgatgcttcaaatctaacaagtgcatctgttctactgaaggaagctcgagatttgaagcacttgtctaaacgtcttaaggaaaaaggggatgactttgagagtacaagcatgtgctttgaggcgggtctgaaatttctccatgttgcttctctgtgggagaccccaaacattgatagctccaatcaaggggtttctatacaagctatgaaactgtattccgaaacaggaatcctctttggattctgcgctcacgaatttgagcgactcaagaaaatggcgaatgctgctctggcatataaatgtgtggaagtggcatatatgaaggctgctttctttagaagtcctggtgtaattaaagatagacatgcattgcatgcagcatctttgatggttgctccagctgagtctccatcatcttccgcttcagacatcgataatttaaataaccagagcacagttgctaaggctgtttctgcaagaggtgtatactctcctcagattgctagcaattccatatctcggaacaatcatcatttgatgggattgctttcttatgcagaggacacaaataattcatttgagggaaccagaaaatcacaaacttcattttcagcttatctttctggcattgggaagaatcaggtggatgaagttgctcttgtaaggaaagtacttgatttcagttttcataatgtcaagggattgctgcaactgattcgtcattcgttggagtctatcaaccatgaaagtggtaaatgatctaccaagtataggtatcttggaaaagagattaatgatgggaaggttgctttggcaactgtgctatacattggtacctcctccaatctggatgtagaagtaaacaagtttagagagtaatcagttgtgaatggaaagggttcacattgccttctcttggttgcatggaagtattatatgtgggtgatacaaatttcaccagcggcaaactgctaaaacgggtttctttaccaagtcatattgctacttttgttgcccggaatatttcttgtagatgatgactttgactagtgccgaactggcaaagggggttcttaccaagaattagcctgcaaatgttaattgctaagtccaacattcttggtttcagtgtctagtgaatgatcaaatccaagtcctcaatgggaatctaatatacatctaccatagtgttcgagggcagagtctcagttttctttccagggcgccagtgtaagcttaggtcagcacttttgtcctaaagtctccccaccttctattggccttgcggagaaggttctgacagttttggaggtgcttcaggatttagcagtctaatattttacaaatttgcggaggttcagtgaggattgtctgactccaatgatagatgatgacactatctgctgcctatctgagtgttgtttgggttcctgactgagcattaccattgtaacgagaaagcgatgtaaaagcccttgctgctgtgctgacgaaagaggattcctttccaatgttacacgatgagtccggttgatttgtgtaacatgttctcgtctccgtccagactgaaaaggcagtggctcgttgagctgtacggcatgaagccttctttccgattttaatactagttctgggtgtactgctccaaagagtagcatctctttgcagtaaaaatggtttgttctgttcaagtatgtgagagaacaag

SEQ ID NO: 5001 - DNA, 4556 bp, Zea Mays
gtaccagcagaaggttactgttccatgtacggcatttgtgcacaacgaagtgacgggaaggtcttaaactgtgcaaatgcaaccaaagctgttaagccagacacattgttttcttcaaggatccaaagtttgtgcccaacaatcactggcgatgtctgttgtactgtagatcagtttgacacattacaccaacaagtccaacagattaatagcactatgactgttgatggcatagattactatgtaactactaactacggtgaagagctatataactcatgcaaggatgttaagtttggcactctgaacacccgtgcaatggattttatcggtgctggtgctaaaacttacaaagattggttggcatttattgggcgacaagcaaaccttaatgagccagggtcaccttatttgataacatttggatcggattttagtgattcatctggtgtgaagcctctaaattctacaatttattcttgcggcgacccttctttgggttgttcatgtggtgattgcccttcttcttctgtttgcgcgggatccttgctgcctcagctgaatacagaaaccgcctgttcagttaaaatgggatctttaaaggccaaatgcttggacttctcactagtggttatttaccttgcactattatgcgcttttctgctatggggtttgttatacagaacacgaggaagaactgcttcccccttgcaagcaaagccattgaggaattcagataataagtcgaacatgaacaaaaatggcaagagccctcatgactcggttcaggtgcctgaagctgcatcctctactgccaaaccatccaatccttctatcgttcaaacttacatgtcaattttctttaggaagcatggaatttttgttgctagacaccctctccgtgtgttatgtgtgtcattgcttgtccctgtcctcttatgcattggtctctttcgcctcaaggttgaaacccgaccagaaaagctttgggttagccctggaagtgaagctgctaatgagaagaattattttgacagccatcttgcaccattttataggattgagcagcttgtgttggccacttctgcatctggtgggtccgaagctccttcaatagtaaatgacaacaatatgaaattactatttgagattcagaaaaaggttgatgatctacgtgcaaattattctgggtctaaagtagccctcgctgacatttgcttaaagccactcagtacagactgtgctactcaaagtgtcttgcagtatttccagctggatcctaaaaagtttgatgattctggaatagaccatgctaaattctgttttcagcattacacttctgaagagacatgtttgagcacttttcagtcacctgttgatccaagtacaattttaggtggttttccaggaagcaattttaccgaggcttcggcatttgtaataacttatcctgtgaacaacaaggttcaaacaacaggaaaagagaacgggaaggccatggcttgggaaagggcttttattaatcttgttaaggaagaaatacgtccaatggtattagcacagaatctaacgttgtccttttcgtccgagagctctatccaagatgaattaaacagagaaagtacagctgatgcaattacaataatgattagctatattgtgatgtttgcatatatatcattcacacttggagaccgtccttctcgttggctgttactatttgtttcatcaaaggtcctgcttggtttgtctggtgttgttctggtgatgctttcagttttaggatcaatgggattctttagtgctattggagtgaagtccacccttattattatggaagtgattccttttcttgtgcttgctgtcggtgtcgataacatgtgtatccttgtgcatgctgtcaaacgccaaccagatcagtcaaatttggaagagcggataagtgatgcactggtggaagttgggccatctattacattagccagttttgctgaagtactagcttttgctgtgagtgcaatcaatccaatgcctgcaaccagagtgttttccatgtttgctgcactggcggtcttcatggatttccttctgcaagtgacagcctttgtagcccttattgtatttgacattaggagggcacaggatggcagaattgattgtgttccttgtgcgagaatcacaccaagtacaggtgctggtgatggtggcgatgggcagaggcttcacttgcttgctagatatatgagggacgttcatggacgaattctcaggaaccgagcggtgaagttcgttgtaatcactgtatttgtaggattgacatttgcaagcatagcattatctactagactgcaaccaggattggagcagcaaattgttctgccacgaaattcctatttacagtacatgaaagtaggtccaccattatactttgttgtgaaggacttcaattacagctctgcgtcggtggatacaaatcaaatatgttcaatcagccagtgtaattcaaattctcttttgaatgagatatcacgacaatcattatcccctgagactagttacattgctaaacctgctgcttcatggcttgatgacttcctaatttggatgtcccctgaagcatttggatgctgtagaaaatttgtgaatggaagttactgccctccagacgatcagcctccatgctgccaactcgatcaggtttcaggctcttgcatgacaagcaaaacctgcagtaactgtacaacgtgcttcctacactcagacttggataatgggcgtccatccacaacccaattcagagataaacttccatggtttcttgacgcacttccatcgagtgattgttctaaagggggaaaaggagcttattcaacaagtttagacctcagtggttatgaaagtggcattatacaagcttcggcattccgaacataccatactccccttaacaagcagagtgactatgttaactcaatgagagctgcccgggacttcagttctaaaatgtccagagatttgcagatgaaaattttcccatattccgtgttctatatattttttgagcaatacctgagcgtgtggaagacagctatcatgaacatatgtgtttgccttggtaccatttttgttgtttgcttcatagttaccagcagtttatgggcttcagcaataattttaactgtgctagcaatgatagtcttggatatgatgggggtgatggccatccttggtattcagctcaatgcaatttctgttgtaaaccttgttatgtcgataggaattgctgtcgagttctgtgttcatatcacgcatgcctttatgattggcactggggacaaagaaactcgtgcaaggcaggctctatccacgatgggtgcgtctgtattcagtggaatcaccttgaccaaacttgtgggagttattgtcctacgttttgcgaaatctgaagttttcgtggtttattacttccaaatgtatttggcacttgtcatcattggattcctgcatgggcttatcttcctaccggtccttttgagtttatgtggccctcctacaaaatgggcgaagccaaaagaacaaagtcagccaccttcagcttcaagtgagcggacttgacaggattttatttgagttggacggttacatactaaaaaatcgaaataggctagtttggtcggtgtgcgtccatgtgctgtcccagtggagcagcagcagtgaggcgtacagcatttgctgaaggtgaaagcagtcttacagatctgtagaaaatgttgtgcatatccatgttagcagccgaactaggttatttggtgttacagtgctacacatggcggggaaggaaactaagaggcgaattggggctcggtgttaactagttgactgcagtccgctggttgtttaatttgtgtcacccaagccgagagtcgagactcgaatagttttgtactgctgttgttttggtatttgctgtgggcattgagcttgtgtctaagttccatatgcttgcgaggcttgtttttatgagaacatatctggtgtatatgggagtttggtgtacatattaaatcaatgtcatttattagatctaacatctctagttacttgttatattttataaataacatctttcaccactacatttaccacttgagatgatgttctttgcaaaatatgaccttccactactaaaaccagagaatttggttggctttgttaatttttatcggctttaggacaacaaatgcaaattaactagttttattgacggctgcttagccgataaaaattaagcctaactttcattggccatgacaatagatgatggtagttcatcggctttttactaactttcatcggttactgatattggatgatagaagccaatgaaatatatcactggcctgcacccacccttaatggagggatatctaccaatggtaaaagcatccttagcagatttaacattatctacttcatttttgcaagttttaagttaggcatttaaatgagcaatttcatcatttaattttgcaatggtagaagcatgattactacaa

SEQ ID NO: 5002 - DNA, 4604 bp, Zea Mays
tcaaggatccaaagtttgtgcccaacaatcactggcgatgtctgttgtactgtagatcagtttgacacattacaccaacaagtccaacaggccgttccgtttcttgttggatgcccagcatgcttgaggaatttcttgaatctcttctgtgagatgtcttgttctccaaaccaaagcctcttcattaatgtgacttcagtaaagcagattaatagcactatgactgttgatggcatagattactatgtaactactaactacggtgaagagctatataactcatgcaaggatgttaagtttggcactctgaacacccgtgcaatggattttatcggtgctggtgctaaaacttacaaagattggttggcatttattgggcgacaagcaaaccttaatgagccagggtcaccttatttgataacatttggatcggattttagtgattcatctggtgtgaagcctctaaattctacaatttattcttgcggcgacccttctttgggttgttcatgtggtgattgcccttcttcttctgtttgcgcgggatccttgctgcctcagctgaatacagaaaccgcctgttcagttaaaatgggatctttaaaggccaaatgcttggacttctcactagtggttatttaccttgcactattatgcgcttttctgctatggggtttgttatacagaacacgaggaagaactgcttcccccttgcaagcaaagccattgaggaattcagataataagtcgaacatgaacaaaaatggcaagagccctcatgactcggttcaggtgcctgaagctgcatcctctactgccaaaccatccaatccttctatcgttcaaacttacatgtcaattttctttaggaagcatggaatttttgttgctagacaccctctccgtgtgttatgtgtgtcattgcttgtccctgtcctcttatgcattggtctctttcgcctcaaggttgaaacccgaccagaaaagctttgggttagccctggaagtgaagctgctaatgagaagaattattttgacagccatcttgcaccattttataggattgagcagcttgtgttggccacttctgcatctggtgggtccgaagctccttcaatagtaaatgacaacaatatgaaattactatttgagattcagaaaaaggttgatgatctacgtgcaaattattctgggtctaaagtagccctcgctgacatttgcttaaagccactcagtacagactgtgctactcaaagtgtcttgcagtatttccagctggatcctaaaaagtttgatgattctggaatagaccatgctaaattctgttttcagcattacacttctgaagagacatgtttgagcacttttcagtcacctgttgatccaagtacaattttaggtggttttccaggaagcaattttaccgaggcttcggcatttgtaataacttatcctgtgaacaacaaggttcaaacaacaggaaaagagaacgggaaggccatggcttgggaaagggcttttattaatcttgttaaggaagaaatacgtccaatggtattagcacagaatctaacgttgtccttttcgtccgagagctctatccaagatgaattaaacagagaaagtacagctgatgcaattacaataatgattagctatattgtgatgtttgcatatatatcattcacacttggagaccgtccttctcgttggctgttactatttgtttcatcaaaggtcctgcttggtttgtctggtgttgttctggtgatgctttcagttttaggatcaatgggattctttagtgctattggagtgaagtccacccttattattatggaagtgattccttttcttgtgcttgctgtcggtgtcgataacatgtgtatccttgtgcatgctgtcaaacgccaaccagatcagtcaaatttggaagagcggataagtgatgcactggtggaagttgggccatctattacattagccagttttgctgaagtactagcttttgctgtgagtgcaatcaatccaatgcctgcaaccagagtgttttccatgtttgctgcactggcggtcttcatggatttccttctgcaagtgacagcctttgtagcccttattgtatttgacattaggagggcacaggatggcagaattgattgtgttccttgtgcgagaatcacaccaagtacaggtgctggtgatggtggcgatgggcagaggcttcacttgcttgctagatatatgagggacgttcatggacgaattctcaggaaccgagcggtgaagttcgttgtaatcactgtatttgtaggattgacatttgcaagcatatgtttcctctgttctaattaggcattatctactagactgcaaccaggattggagcagcaaattgttctgccacgaaattcctatttacaggattattttgatgaccttgcaaagtacatgaaagtaggtccaccattatactttgttgtgaaggacttcaattacagctctgcgtcggtggatacaaatcaaatatgttcaatcagccagtgtaattcaaattctcttttgaatgagatatcacgacaatcattatcccctgagactagttacattgctaaacctgctgcttcatggcttgatgacttcctaatttggatgtcccctgaagcatttggatgctgtagaaaatttgtgaatggaagttactgccctccagacgatcagcctccatgctgccaactcgatcaggtttcaggctcttgcatgacaagcaaaacctgcagtaactgtacaacgtgcttcctacactcagacttggataatgggcgtccatccacaacccaattcagagataaacttccatggtttcttgacgcacttccatcgagtgattgttctaaagggggaaaaggagcttattcaacaagtttagacctcagtggttatgaaagtggcattatacaagcttcggcattccgaacataccatactccccttaacaagcagagtgactatgttaactcaatgagagctgcccgggacttcagttctaaaatgtccagagatttgcagatgaaaattttcccatattccgtgttctatatattttttgagcaatacctgagcgtgtggaagacagctatcatgaacatatgtgtttgccttggtaccatttttgttgtttgcttcatagttaccagcagtttatgggcttcagcaataattttaactgtgctagcaatgatagtcttggatatgatgggggtgatggccatccttggtattcagctcaatgcaatttctgttgtaaaccttgttatgtcgataggaattgctgtcgagttctgtgttcatatcacgcatgcctttatgattggcactggggacaaagaaactcgtgcaaggcaggctctatccacgatgggtgcgtctgtattcagtggaatcaccttgaccaaacttgtgggagttattgtcctacgttttgcgaaatctgaagttttcgtggtttattacttccaaatgtatttggcacttgtcatcattggattcctgcatgggcttatcttcctaccggtccttttgagtttatgtggccctcctacaaaatgggcgaagccaaaagaacaaagtcagccaccttcagcttcaagtgagcggacttgacaggattttatttgagttggacggttacatactaaaaaatcgaaataggctagtttggtcggtgtgcgtccatgtgctgtcccagtggagcagcagcagtgaggcgtacagcatttgctgaaggtgaaagcagtcttacagatctgtagaaaatgttgtgcatatccatgttagcagccgaactaggttatttggtgttacagtgctacacatggcggggaaggaaactaagaggcgaattggggctcggtgttaactagttgactgcagtccgctggttgtttaatttgtgtcacccaagccgagagtcgagactcgaatagttttgtactgctgttgttttggtatttgctgtgggcattgagcttgtgtctaagttccatatgcttgcgaggcttgtttttatgagaacatatctggtgtatatgggagtttggtgtacatattaaatcaatgtcatttattagatctaacatctctagttacttgttatattttataaataacatctttcaccactacatttaccacttgagatgatgttctttgcaaaatatgaccttccactactaaaaccagagaatttggttggctttgttaatttttatcggctttaggacaacaaatgcaaattaactagttttattgacggctgcttagccgataaaaattaagcctaactttcattggccatgacaatagatgatggtagttcatcggctttttactaactttcatcggttactgatattggatgatagaagccaatgaaatatatcactggcctgcacccacccttaatggagggatatctaccaatggtaaaagcatccttagcagatttaacattatctacttcatttttgcaagttttaagttaggcatttaaatgagcaatttcatcatttaattttgcaatggtagaagcatgattactacaa

SEQ ID NO: 5003 - DNA, 1277 bp, Zea Mays
ctcactgagcactttcatgctttgtaaaactactattctacttcatatttttgtttttactttagggattctgataagctcatttttgagcgcctacagaaagaatttgaggctgcacgggctgctcaaaccgaagagatatcaataaatgatgatgagtggaatgatggtttactggcaaccatccgtgagaagaccaggttcatatggaggctgataggaaggccatgtccaaccaagtaaatgttccagcagatctttcatttcaatcaaggactacatataggattagaaataaggttatatattgcttggatggagctaggattggcatacagtatgagacattctttgctggagagccttgtgaaatttttcattgtgttttggaaagcaagtcattcctggaaaagatgattatgattgaacacaccttacctttctttctgcctaaattcattgatcatcttgaagaaattttacaggcttatattgacaggagagagcaggttcgtcttatcaaggagctctacgggaaccaaattggcgagctgttccatagtcttccttataatatgatagagtttgtattggaggattttgagtgcaaggttacaatcagtatccgatattcggatctactgcagaccctgccgagtcaggcaagggtcttggcttggccacttcgctcggccaagaaaatatctacaagaagcagcagtgcatcagctgcgcaaccagtaccctttcacctttcatatgccgaggaagcactcaaaaccttgtgtctaccagaagcatacgcagacattgtgctggagctaccccatgctttgaagaggattttatcctctcgggacagtgactaaatcgtgacctcaagatgtccagttttgttgtgcataagattcacatctcaatcgtggggcatgtttttgaagatattgttcagaatcttgtggtagtatagcctgcagttgtggactgcaattcctgtgaaagcaaggcagacatttgcgtgggccgctcgaaatattccggctacagttcctgttaaaagaatcaaaatcctaggaaggccttatggtcgaggcataatcttgccaactgctgtccttgtccttgatgtgtgctccttttttttctccactctggctatgtttgtttccttttagaattatactagcgcgttacgcgcgcctgcacgcgcgtgttgacaaacctattttatttcaaatatcaagtatctaagaagacatgctaaaatttcaacaata

SEQ ID NO: 5004 - DNA, 1631 bp, Zea Mays
acaatagatcacctacctttctcacccttcatccaacggcgccagcacgcacgagcagtgcgccgccatccgttgcgccgtcgtacgcagccagctggagcgccgcttcccgccagccagccggagcgccgccgcccgcgagagtcccgcccccggcgtgtatcagaaccccccccccctccccggcgccgcgcagcagagctccgtggcccccgccctcgccgagcagcagagggccgcctccagccagctcgccggctatggctgccgctggagatccaccacctcctatttatgctgagggtgctgcaaggacaagaggagaaatatctccacatttccagacatatgcaagggacgacgatgcaaaacttgagaccacacgtgcaaggctgtcaaatatcctcaaaaggcatgaagatctgaaagagcgcctttcacgggattctgataagctcatttttgagcgcctacagaaagaatttgaggctgcacgggctgctcaaaccgaagagatatcaataaatgatgatgagtggaatgatggtttactggcaaccatccgtgagaaggttcatatggaggctgataggaaggccatgtccaaccaagttatatattgcttggatggagctaggattggcatacagtatgagacattctttgctggagagccttgtgaaatttttcattgtgttttggaaagcaagtcattcctggaaaagatgattatgattgaacacaccttacctttctttctgcctgtacgtgaattagaaagtgatctgttgtcatctaattcaattaaattcattgatcatcttgaagaaattttacaggcttatattgacaggagagagcaggttcgtcttatcaaggagctctacgggaaccaaattggcgagctgttccatagtcttccttataatatgatagagtttgtattggaggattttgagtgcaaggttacaatcagtatccgatattcggatctactgcagaccctgccgagtcaggcaagggtcttggcttggccacttcgctcggccaagaaaatatctacaagaagcagcagtgcatcagctgcgcaaccagtaccctttcacctttcatatgccgaggaagcactcaaaaccttgtgtctaccagaagcatacgcagacattgtgctggagctaccccatgctttgaagaggattttatcctctcgggacagtgactaaatcgtgacctcaagatgtccagttttgttgtgcataagattcacatctcaatcgtggggcatgtttttgaagatattgttcagaatcttgtggtagtatagcctgcagttgtggactgcaattcctgtgaaagcaaggcagacatttgcgtgggccgctcgaaatattccggctacagttcctgttaaaagaatcaaaatcctaggaaggccttatggtcgaggcataatcttgccaactgctgtccttgtccttgatgtgtgctccttttttttctccactctggctatgtttgtttccttttagaattatactagcgcgttacgcgcgcctgcacgcgcgtgttgacaaacctattttatttcaaatatcaagtatctaagaagacatgctaaaatttcaacaata

SEQ ID NO: 5005 - DNA, 2474 bp, Zea Mays
tcaatggttgaaagctaagagcaactccaacaagctagagggcaagggaagtttactttatttcttgaaagctaaaggctgggcaagctcattgagtgctggtgttggtagtggaggatcacaacgatcctcgtatgcttatatctttgaaatgtctatatgccttactgattctggactgaaaaatgtatttgaggtcattggtgctgtataccaatatataaagttgcttaagcagtctgagccacaagaatggatattcaaggaacttcaggacattggatacatggagttcaggttcgcagaagagcaacctccagatgattatgtagttgatcttgcagaaaatatgctattttattctgaaaaacacattgtttgtggagagtatatttttgaggactgggattcagaattagtgaagcatgctttgagcttcttcaatccagataacatgagagttgatgtactcagtaaatcatttgataagcagtcccaagctattcaatgtgaaccatggtttggttcacattacattgaggaggacatcccatcatctttgatagaaagttggaaaaatcctgttcaagtagatgataatttgcatttgcctagaaagaatgaatttataccaggggacttcactctgcgaaatgccaactctcctggatcctcgagcgacgataaccctcgttgcatagtggatgagccattcataaaactctggtacaagatggacatgacatttaatgtccctcgtgccaacacttattttttgatttatgtcaaggatggctatagtagccttgaaaactctgtcctgatagatctctttgcaaaccttctcaaagatgaacttaatgaggtcctttatcaggcttatgtggctaaattggagacttcaacatctgttgttgctagcaaacttgagataaagctttatggttacaatgataagcttcccattcttctgtccaacatcttgtctactgttcgatccttttctccaaaaacagatagattcgaggtcatcaaagaagatttggaaagagcttacaagaacactaacatgaagcctatgagccattctacctacttaaggctacaagtcttgcgtgaaatattctgggacgttgataaaaaactagaactacttatgaaactgacatttactgatctagtagcatttgtaccgaaaatcctttcccagctgcacattgagggactttgtcatggcaacttgtcagaagacgagacaattaatatatcaaaaatatttctcaatactctctctgctcagacactgccagaggaagcaaggcatgaggaaagagttatttgcattcctaatggtgcaaatttggttagaagtgtccgcgtgaaaaatgatcttgaagaaaattctgtggttgaggtttatttcccaattgaacaagacgttggaaaggaggcaacaaggctcagagctattacagatctttttagcaacattattgaagaaccatgctttgatcagctaagaaccaaggagcaacttggttatactgtggactctagcccaaggatgacttaccggatgctggcctattgttttcgagttatgtcctccaaatacagtcctatttatctgcaaagtcggattgataacttcattgatggtctatctgctctgctggacgagctcaatgaagagacttttgagcaccatagaagtggtttaatagctgataaactggaaaaggaaccttcacttagctaccaaactagtgattattggtctcagatcgctgataaaaggtacatgtttgatatgtcaaaactggaagctgaagagcttaagacagttcagaaggctgatgttatagcttggtacaacacatacataagatcatcgtccccaaagcgaagacgtctagcaattcatgtgtatggttgcaactcagatattgctgaggctgctaaactccaggagcaatcttggactataattgatgacgttgaatcattgaaggcttcgtctcaattttattcaagcctttgttgagggaagttgggcatgatctgtcagtgtgtgcaaagcgcgtaacttggacattgccgaggcccgctaaggtgcaagaatttcgtggatcataatagatgatttaggccccttctgcagatcaaccgccatgttatctatggccggcttgaaattgaacagcatcgttgcacctgaccaacatcatcaacgagtatagtgctagttgggtaagaaaaataggattttgtcagtgcattatgtgattttcataacaaacacacatggctttattgttactttgcgccaagaaatgttgatcttccaatatggcgtagtaattgatggatgagtttttgaggaaacataattttgtacttggagatgtaaaatgtttctggaatctttactgaacaattttggaagtcttgtcttattatatactttaccctcc

SEQ ID NO: 5006 - DNA, 1595 bp, Zea Mays
cccggcgacctccttcccaaatcctagcccccccccaccctagcaccaccgcggcctgccttctctgggcgggtccttcccagatccatcacgggaggttaaaaaggaggcgggcaggtggtggatggacgggccgaagcgacacctgcgggtgcgcctccgcgtcactgcgcgccggcggggcgcctacggcgatggcgctggaggcgcgttggggcccaggcggcggaagtgccggatggagacccccgttctcaactccgctgccaagcttcagcgccgcgagatcgggggtcgccagctcgcggcacgcggcggcggccccgccgccgccgtgcccgagcgcttccggaacatgcagctccaggaggagttcgatacatatgatgacaatgctaacctatttgtgaagctgcagtttcttaaaagaagatccaaaattaatgagattgttgcagcaaaggatatcatatttgcccttgctaattctgggctttgtgctgcttttaaccgagtaacaaacaagcgcataggcttcttgaatttgagcccagatgaagtgattcggagcttgttctacaacaagaacaacgattcccttattaccgtttcagtttatgcatctgacaatttcagcacattgaagtgcagaacaaccccggttgagtatattagaaggaaccagttagatgctgggtttcccctctttgaatcagagtctctgaaatggcctggatttgtggagtttgatgacgtaaatggaaaagtactcacatattcagcgcaggatggtatatataaggtctttgacttgaagaactactacttcctatattcaataccagatgaaaatgtgcaggagataaagatcagtccaggaatcatgctcttgatatacgacagaacaccaagttatgtcccattgaagatattatctattgaagatgggaaacaactgaaattttttaagcacttgttacatcgcaacaagaaaattgatttcattgagcagttcaatgagaagctccttgtcaagcaagaggacgaaaacttccagatacttgatgtgcggagttctgagctaattgaagtcaatgtctccaagtttatgaccccttcagcattcatttttctttatgagaacaatctcttcttgacattccgaaacagaacagtcgctgtatggaacttccgaggagatcttgtgacttcatttgaggaccatttactttggcatcatgattgtagcaccaacaatatttacatcactagcgaccaggatcttattatctcatactgcaaatcggaggcagtggctgaggatggtacagttggatccatcaacatgagcgagatcatgactggcaagtgtatcgccaagattactgccaacgatcctgccctaagtgcgccccctcgcagaaatggtcgcagcaagcggcggtcctcggtctggagcaccgttccagaagctctggaggacgtcacggcactgttctatgacgaggacaggaatgagatctacaccggcaacagtcatggactggtgcatgtatggtctaactagatggttctttatctgtaagctcctgaat

SEQ ID NO: 5007 - DNA, 1311 bp, Zea Mays
cgaatagcgcatgttcggtttcatctggcgccggcctgacaacgatgatggatggagactatcggaatgctgtcaaattggtcattgaatttaaggagaccggtctcaaacctgaggtgtatagctatctcattggcttgactgccttggttaaagagcaaaaagaattctcaaaggctctgcgaagattaaatgcatcggtgaaggatggctcaatttctaaactggatgctgagagcatgcatagtatcaacaagtatcaatcggatttgttaagtgatggtgttcttttatcgaactgggtagtacaagagggcagcagcgaagttctaggacttgtgcgtgagaggctcctatcattgtatacttgtgctggttgtggcttggaagctgagcaccaactttgggaaatgaagcttcttggccgagaacctgatacacagctctatgatgttgtattggcaatttgtgcttctcaaggggaagctgctgctgttcgccgcttgcttgcaggagtcgagtcaaccagcgccggaagaaggaagaagtctatgtcatggctactgcgaggctatgtcaaaggtggcttcattctagacgcctcagaaacactcattcagatgctggacatgggcttgcttcctgattacctggatagagctgctgtactgactgcactgcggaggaacatacaggaatccggcagcctagagtcctacttgaagctttgcaagcgactatctgagacagatctgattggaccatgtattgtgtatctatatgtccgcaaattcaaattgtggatggcacacatgctttagagttctgatgaaccctttcgtcatatatccactcatggcaggtacaaaatggagatctctaaaaaatgtgtgtggctcaaacgcttgtccctgatgaacaagacatagaagcttcaatttcggtgaaccggttggtacataataatggttccttgtatatttttgaccgaagtagaggtatcaactggttgtttgttgtaaacagcgctgttgtagtactctgaacagagtccatatcgtacatgtaaattctctgtgtcactgttctcatatgcagttgctgttgaaatctgtgcgttactgcagcctgtaggggataggcaaaatggaaacttttgttgatataaatataatgtacagttctgtcgtgactgaacttctaaagttgtaccgagatgaacttctaaagttgtaccgagattacacgatacatctctgtttttctgtttgtggtgtggtttgtggcagtaactgaatgtaacttggtttg

SEQ ID NO: 5008 - DNA, 1093 bp, Zea Mays
ctaacttgtagtgagataccatcgcatcttcagcctgctgattagctcgcaggacaataaaacaatattttatcaacggaaggagaatcacagtgtagataatgagagacatgactccgaggaggtcatctgtgttgttgatcccgtttgtgaaggtgctggagaaaacatagagcggagaagtccccatgtctccgtagaccacacctatgctctggaatgctaggtgcagtgtggtcgcccagccaaccttcattaccaaagtgcatactctgaatcagattacatttgcctcgaaaagaaagcaagaaagaaagcagacaatatgcttttaggcacacaacccttagatgatgaagcagctagctgatatgcttagtctcttcagtaaggcaaggacgaacacgacagtgcagcagttacttaagatttcagcagaaccatagaaacactttacgagatgaaaaaaagaacacatacaagaagaaaaaaaaactcaaccacatatggatactcccattagactttgttctaagaaggcaacaggggtttcatggaccctggagttcaagggtcgagaatctttcgtgcaacacgttacacacggctctaaggcaaaaggaggatcattatctgattggataagagtagtcggagaactaacatataccttggctgcatgcgtcgatccaccagcagggaacattccagcctccatgtgcagtgaatcatatctctgtagcctcttgggcggcattttctccgacgcatcatcagcatcaccgtgagcagctccgttgctgcttgtgtggtgaggttcagccatgctagactagaagtgcatgcatgttggcggaggccagacgctgttgctgtcgttcgcttcacttgccgaggtcttcgttcaacgccgcagccgtgaaacgcttgtgattttctttacacaagccgggaaggtggctacgtgcgtggtgggagggcgtggtgacttttcttcatccgcagtggctgtcactggattccgtcgcgactgcaaaacacaaacggttgttttcagtgaggaccatgtagatgcagcgaatgcagagctttg

SEQ ID NO: 5009 - DNA, 3941 bp, Zea Mays
atgccaagttatgctcatcatcatccctaccagcgtgtacaaccgatgagtgtacccactcattgtcctaatcaaaatcctcaagcactaatgggtcataacttgtaccacctgtctccctactcttttggaacctactttgcatcttccggtttgccacgcaaccttggtgttgtcattaccatatgggcaccgattgtcatggtttacttcatggacacacaaatatggtatgccattttctccactgtctttggaggtgtttcaggtgccctaagtcatgtgggtgaatatgtaagagagaaggacatgttgatggctccgtcatattcaagcaatttatccatcattcagtggccacctttcctccttgctagcaaggtacccgcagctgttcatatggccatgaattccaaagaaggggatgagcatgagcttattgagaaaatcaaacttgatggagacagatatgatgcagttatagaatgctacaaatccttgatgattatactcaatagccttctgctagacactaatgatcagaatattgtcaatgatattgataaaaaagtgacttatagcatgataaaaaaaactttcttggaagacttcgaaatggcagaaatcggcaaagtaagttctacattggctagattgttgcagctcctgaaaagtgaacctattaatgatgttggagagaggaaaattgttaatgccctgcaagactttatggaaattacgacacgtgatttcatgaaagatggacagagtttcaaagatgaggatgagagaaatcaaagattcatgaacctaaatatgaatatgataaaggaagattattggagggagaagtttgtccggctgcacttattgttgactatgaaggattctgcaatggatgttccaataaacttggatgctcgccgtaggatcaccttctttgcaaactcgctttttatgaaaatgccaagagcaccacgcgtgcatgatatgatttcatttagtgttctgacaccatactacaacgaagaagtactgtattcatcacatgacctgaatagaaaaaatgaagatggtatctcaattttgttctacctacaaaagatctatccagatgaatggaataacttcctagaacgtattggagttgaatcaaataatgaagtgtcgataaaagggcgcatggatgacatccgtttatgggcatcttaccgtggtcaaacacttgccagaactgtgagaggaatgatgtactatagacgagctcttgaactacaatgctatgaagatatgataaatgaccaaggttatggcctagctgatttggatacagctaaagctgcaaggtccaaggccattgctgatattaaattcacttatgttgtctcctgtcaactttatggcgtgcataagacatccaaggattcccgagaaagaggtctctacgagaatatcttaaacctcatgttgacgtatccagcattgcgcattgcttacatcgatgagaaagaagtacaattacgaaatggtaaaatagagaaacagtattactctgttcttgtgaaaggtgatgatgaggaaatctaccggataaggctccctggtaaaccaacagaagttggagaaggcaagcctaataatcaaaatcatgccataatcttcactagaggagaagcacttcaagcaattgacatgaaccaggataactatctagaggaagcatttaaaatgagaaatctcttggaagagttccttcttacacatggaaagtcagagcccaccatattgggtgttcgggagcatatatttacaggaagtgtttcatccctcgcctggtttatgtccagccaggagaccagcttcgtcactattggacaacgtgttcttgccaaccctcttaaggtacgatttcattatggccatcctgatgtttttgatagactctttcatctgacaaggggtggcataagcaaggcatcaaagattatcaaccttagcgaagatatatttgcaggtttcaattcaactctgcgtcgaggaaatgttacacatcatgaatacatacagttgggcaaaggacgtgatgttggaatgaaccaaatatccaactttgaggccaaggtggcaaatggaaatggtgaacaaacactatgccgtgatatttatcgactaggacacagatttgatttctacaggatgctatctctgtattttaccacagttggcttctacttcaatagcatggtggctgttctcacagtgtatgtatttttatatgggaggttataccttgttttgagtggcttagaaaagtcaatactgcaagatccaaatatccaaaacataaaaccatttgaaaatgcacttgccactcaatctgtattccaacttgggatgttgctcgttctcccaatgatgatggagattggccttgagaaaggatttggcagagcattggcagagtttgtaatcatgcaacttcagttagcttctgtattcttcacttttcatcttggaacaaagactcactactatggcaggacgatacttcatggtggagcaaagtatagagctactgggagagggtttgttgtgcgtcatgcaaagttcgctgagaattatcggatgtactcccggagtcactttgtcaaagcactggagctgcttattcttttggttgtctacctagcttatgggagttcatacagaagctcaagtttgtatttgtatgtcacagtttcgatatggttccttgttttctgttggctgtttgcaccttttgtcttcaacccatcctgctttgagtggcacaagactgttgatgactggaatgactggtggaagtggatgggcaatagaggtggtattggattagcgcctgaacaaagttgggaggcttggtgggtgagtgaacatgaccacctgaggaatgcaacaattcgaagcttgctcttggagttcatcctttccctgcggttcttgatctatcagtatggtattgtttaccacttgcacatagtgcatggcaacaaaagcttcttggtatatgcactgtcatggctggttatagcagttgctcttgtgtcactaaaggttgtttcaatggggagagagaagtttgttacaaggattcaactagtgttccgcatcctcaagggcattgtgttccttgtgctcattggtttgcttgtccttttatttgttggttttgaccttgctgtctcggatgttggcgccagtatcttggcattcattcccactggctggtttattcttctggttgcgcaattatgtggaccgctgtttcggaggttgatcatagagccacttcacttgctgtgttgcccatatggtaccggtggtgcatgcagaggtccctgctgtgccaggttcagacagaggaccggtgctgcgcttcggaagatgggaccatgggactccatccaggagatggcgaggatgtacgaatacaccatggggctcctcattttcctgcccattgccgtgctatcgtggttccccttcgtctctgaattccagacacggctgctcttcaaccaggccttcagcagggggctgcagatctctaggatcctcgcggggcagaatggtagcggcacaaagagcgactgatgctttgacattaacggagttatccattccgttgtgccatgtggtatctcgttgctattgtccgctaccgttatgtgtagaatcaagtatgttcatcgtttgaaaaagtgtcgcgcagtttgagtgtgtatgtcggattttaacctcttaattcagttcatattcattggttgtttccatttgatttgcacgtatacgttggaatctgtctgattttcggtgttaaaagtaagtgtttgtttttagctagaactttctctactcctttaaagcaccaattttatatgtcatgctttgcgtacgaagca

SEQ ID NO: 5010 - DNA, 4244 bp, Zea Mays
atgccaagttatgctcatcatcatccctaccagcgtgtacaaccgatgagtgtacccactcattgtcctaatcaaaatcctcaagcactaatgggtcataacttgtaccacctgtctccctactcttttggaacctactttgcatcttccggtttgccacgcaaccttggtgttgtcattaccatatgggcaccgattgtcatggtttacttcatggacacacaaatatggtatgccattttctccactgtctttggaggtgtttcaggtgccctaagtcatgtgggtgaatatgtaagagagaaggacatgttgatggctccgtcatattcaagcaatttatccatcattcagtggccacctttcctccttgctagcaaggtacccgcagctgttcatatggccatgaattccaaagaaggggatgagcatgagcttattgagaaaatcaaacttgatggagacagatatgatgcagttatagaatgctacaaatccttgatgattatactcaatagccttctgctagacactaatgatcagaatattgtcaatgatattgataaaaaagtgacttatagcatgataaaaaaaactttcttggaagacttcgaaatggcagaaatcggcaaaaaaagtgaacctattaatgatgttggagagaggaaaattgttaatgccctgcaagactttatggaaattacgacacgtgatttcatgaaagatggacagagtttcaaagatgaggatgagagaaatcaaagattcatgaacctaaatatgaatatgataaaggaagattattggagggagaagtttgtccggctgcacttattgttgactatgaaggattctgcaatggatgttccaataaacttggatgctcgccgtaggatcaccttctttgcaaactcgctttttatgaaaatgccaagagcaccacgcgtgcatgatatgatttcatttagtgttctgacaccatactacaacgaagaagtactgtattcatcacatgacctgaatagaaaaaatgaagatggtatctcaattttgttctacctacaaaagatctatccagatgaatggaataacttcctagaacgtattggagttgaatcaaataatgaagtgtcgataaaagggcgcatggatgacatccgtttatgggcatcttaccgtggtcaaacacttgccagaactgtgagaggaatgatgtactatagacgagctcttgaactacaatgctatgaagatatgataaatgaccaaggttatggcctagctgatttggatacagctaaagctgcaaggtccaaggccattgctgatattaaattcacttatgttgtctcctgtcaactttatggcgtgcataagacatccaaggattcccgagaaagaggtctctacgagaatatcttaaacctcatgttgacgtatccagcattgcgcattgcttacatcgatgagaaagaagtacaattacgaaatggtaaaatagagaaacagtattactctgttcttgtgaaaggtgatgatgaggaaatctaccggataaggctccctggtaaaccaacagaagttggagaaggcaagcctaataatcaaaatcatgccataatcttcactagaggagaagcacttcaagcaattgacatgaaccaggataactatctagaggaagcatttaaaatgagaaatctcttggaagagttccttcttacacatggaaagtcagagcccaccatattgggtgttcgggagcatatatttacaggaagtgtttcatccctcgcctggtttatgtccagccaggagaccagcttcgtcactattggacaacgtgttcttgccaaccctcttaaggtacgatttcattatggccatcctgatgtttttgatagactctttcatctgacaaggggtggcataagcaaggcatcaaagattatcaaccttagcgaagatatatttgcaggtttcaattcaactctgcgtcgaggaaatgttacacatcatgaatacatacagttgggcaaaggacgtgatgttggaatgaaccaaatatccaactttgaggccaaggtggcaaatggaaatggtgaacaaacactatgccgtgatatttatcgactaggacacagatttgatttctacaggatgctatctctgtattttaccacagttggcttctacttcaatagcatggtatgagccttatgcttggacttatcaacttagtaactgacaaatacaaattccaggaagtagaaaagcagattgattcaccctataacttctttttacgaaaggaaaaaaggtgatatctggggcttggagtttcaacttttgagcaatcaaacatgcagaagttctcactgctaaaaccattagaaaattatgtttttgaaagattgaaactggtactttgtgcaagattaagctgggacacaaagtatgctccctgatgttttatttatttacctcagataattcatacaaagcttgcatgttgtataaagtgattactgattagtgtgttttattgatgttttgtgaaaacatgaaacagcagctcataacgagtatattattcgaaacacatagtgcataaatcttgatgcattttgtgatctttgttctataattttcatgagttgacttggacgtgtatattaccttcaggtggctgttctcacagtgtatgtatttttatatgggaggttataccttgttttgagtggcttagaaaagtcaatactgcaagatccaaatatccaaaacataaaaccatttgaaaatgcacttgccactcaatctgtattccaacttgggatgttgctcgttctcccaatgatgatggagattggccttgagaaaggatttggcagagcattggcagagtttgtaatcatgcaacttcagttagcttctgtattcttcacttttcatcttggaacaaagactcactactatggcaggacgatacttcatggtggagcaaagtatagagctactgggagagggtttgttgtgcgtcatgcaaagttcgctgagaattatcggatgtactcccggagtcactttgtcaaagcactggagctgcttattcttttggttgtctacctagcttatgggagttcatacagaagctcaagtttgtatttgtatgtcacagtttcgatatggttccttgttttctgttggctgtttgcaccttttgtcttcaacccatcctgctttgagtggcacaagactgttgatgactggaatgactggtggaagtggatgggcaatagaggtggtattggattagcgcctgaacaaagttgggaggcttggtgggtatatgcactgtcatggctggttatagcagttgctcttgtgtcactaaaggttgtttcaatggggagagagaagtttgttacaaggattcaactagtgttccgcatcctcaagggcattgtgttccttgtgctcattggtttgcttgtccttttatttgttggttttgaccttgctgtctcggatgttggcgccagtatcttggcattcattcccactggctggtttattcttctggttgcgcaattatgtggaccgctgtttcggaggttgatcatagagccacttcacttgctgtgttgcccatatggtaccggtggtgcatgcagaggtccctgctgtgccaggttcagacagaggaccggtgctgcgcttcggaagatgggaccatgggactccatccaggagatggcgaggatgtacgaatacaccatggggctcctcattttcctgcccattgccgtgctatcgtggttccccttcgtctctgaattccagacacggctgctcttcaaccaggccttcagcagggggctgcagatctctaggatcctcgcggggcagaatggtagcggcacaaagagcgactgatgctttgacattaacggagttatccattccgttgtgccatgtggtatctcgttgctattgtccgctaccgttatgtgtagaatcaagtatgttcatcgtttgaaaaagtgtcgcgcagtttgagtgtgtatgtcggattttaacctcttaattcagttcatattcattggttgtttccatttgatttgcacgtatacgttggaatctgtctgattttcggtgttaaaagtaagtgtttgtttttagctagaactttctctactcctttaaagcaccaattttatatgtcatgctttgcgtacgaagca

SEQ ID NO: 5011 - DNA, 2275 bp, Zea Mays
ctcgattgagccgttgctttgggcgttccatacataaatcgccatcgcggcatcgggccaagcgcgaaattattgcgagtttgctagccccaaccacaccaacaccacccgctccgcgtggccatcttcctcctcgtctccactctccactgcaagagctagacgaattaatgctgaggcgtctagctcttccctcgccggcactggccgcatgctaaggcgagagtggccttcttctcatgaccagtgcatggttggtccgggcgtacgttcccatgttgctccgtagcagaatctcgtcggcgtccatggagaagacgcgccgtcaccgggtgctggctgtgctgctgctgctggtggtggtgctggtctccgctctccctgatctcgggagctgccacaaagatgatgccggacaaggaggaactacgaacccagaggaagatatggtctctgtctccgaagctagcaggacaacccaccacggtgaccggaccaggaaattcctgcacgagcagcagcagcagaacaggtactggtccggggatttcggcgacaaggtgtcgtcgttgacagactccagccagtaccctccagacagtggaggcagttcttctcaaagcccagcgtcgacgttcaagccagaccagtggcagccatggctaccgtgggcacccaaggccccgccaccgatgagcgttcctccagcgcaggccccggcacctttccccgcgggggtggtctcaaaccctgggcacagcatcgcgctgcccccgcagccggcggtggtggtgccggccgacgccggcagtaggccggcggtgggtgccggcgttccggctggaggagcgggagcgaggccgcgctctggcggtgttggcaggcctgtctacgccatggctgcggccggggcctccctcgccgcggccgcggccgtggcgctcctcgtcctctgctaccggtccagcagcgtggtcaccgtcaggccctgggcgacggggctcagcgggcagctgcagaaggcgttcgtcacgggcgtgccgtcgctcaagaggtcggagctcgaggccgcgtgcgaggacttcagcaacgtcatcggctccctgtcggattacatggtgtataaggggacgctgtccaccggcgtggagatcgccgtggtgtccaccaccaagaactctgccaaggagtggtccaagcactgcgagtcacaattcaggaagaagataacaagcctgtccagagtgaaccacaagaacttcgtcaacctgctgggctactgccaggaagagcagccgtttacgaggatgatggtgttcgagtacgctccaaacggcacgctcttcgagcatctgcacgtcagagaagacggttacctggactggcccactcgcctgcgcgtggcggtcggcgtcgcctactgcctggagcacatgcaccagctgagcccgccggagatcctgcgggcgctggacacgtccaccatctgcctcaccgacgacttcgcggccaagatctccgacgtcttcttctgcgacgagccccgccggcaggaggggagcctgtccctgtcggcgctgtcggaccgggagagcgtggtgtacagctacgggatggtgctgctggagaccatgaccggccggttcacggcgtccgacggcggcctgctagaggcctgggccgcggcctacctgagaggggagcggcagctccgggacgtgatggatcccgccctgcggcggtccttccacgccgccaccgtggacaggctggacggcgtcatcaggggctgcaccgaccgggagcccaggaggcggctgaccatagcggaggtcgccaagcgcctgagggagatcactgccatgtcacccgacgcggccacccccaaggtttcgccgctgtggtgggcggagctggagatcatctgcgcagaggtcaactgaggtcaacctgagacggacgtgccaatgtttgtcgtgaaaaggctgtttcgtggtagatacacaggttgcttctttttgatatttttattttttaggtttatgttgaagtttgtgtccatctgtacatatgaacaaaatgaagtgtgcaaccaagctgattgttttaaaatattattttaataattaattattaaaaagaattgcaaaagttgtacgatttcaagatctgtctgtcttaagagctggttccaaccttcataggtaacgatatctcttcgcaatttatttgagctcttaacaaattttagttaaaaaatgaatagaaataaata

SEQ ID NO: 5012 - DNA, 3216 bp, Zea Mays
ataaatcgccatcgcggcatcgggccaagcgcgaaattattgcgagtttgctagccccaaccacaccaacaccacccgctccgcgtggccatcttcctcctcgtctccactctccactgcaagagctagacgaattaatgctgaggcgtctagctcttccctcgccggcactggccgcatgctaaggcgagagtggccttcttctcatgaccagtgcatggttggtccgggcgtacgttcccatgttgctccgtagcagaatctcgtcggcgtccatggagaagacgcgccgtcaccgggtgctggctgtgctgctgctgctggtggtggtgctggtctccgctctccctgatctcgggagctgccacaaagatgatgccggacaaggaggaactacgaacccagaggaagatatggtctctgtctccgaagctaggtgagatcttctttcagctaatcctgagccggaccggttgtccgattctagttttctttgagcattccagattcggacagttctcctaaaaaatagggttttttaagctgatgctctcggattttctggtgtgcttatttttacctttagtcgtgtttttttctcagtttatataagtactggtttggaagtattcccgaggatagtgaaattagctcaatttctcctgtgaattcctgagggaatttaattttctaaactaacctaagtgtttttagctcaaacattggtgtttagctaccgaacagggatggcattaggccccgctcttttttttcttaatctctactatataaagtatgacttctcacttttttaccattatcttgcgtcacacgataaaattatacacaagtgaaggtttaatcattggttatttactctttattctcacatataaccaacaaaacatatattttttatgttttatattctataatcaaacataatataaacaaaagtctatataaaaggcgtatcaaggcatctaactatgctagctgaaaagccaataccgattcagctttgacttctttcatgtagcagatgacacatcttcagcgccatgcctttcagttttcacctggaaacagcgaatagaaaaaatcaatgcggatcacctgtatattcggcacacctatatatctacccttcatgcatggatcacatttcacaaactgtacgtagtaccaaccaacaactacactactgtcgatagaaacaaggatgggcttggaatcatccatccatccattggttgtcaggaattgacagctgaaccaacgacacacaccaaggcaccaagcagcctcatccctcagatgatgatgacacatcgacgcttctcagattgttctgcgcctcttgtgctcacactcctttttgcctccgctcaattattgccttattggcagcaggacaacccaccacggtgaccggaccaggaaattcctgcacgagcagcagcagcagaacaggtactggtccggggatttcggcgacaaggtgtcgtcgttgacagactccagccagtaccctccagacagtggaggcagttcttctcaaagcccagcgtcgacgttcaagccagaccagtggcagccatggctaccgtgggcacccaaggccccgccaccgatgagcgttcctccagcgcaggccccggcacctttccccgcgggggtggtctcaaaccctgggcacagcatcgcgctgcccccgcagccggcggtggtggtgccggccgacgccggcagtaggccggcggtgggtgccggcgttccggctggaggagcgggagcgaggccgcgctctggcggtgttggcaggcctgtctacgccatggctgcggccggggcctccctcgccgcggccgcggccgtggcgctcctcgtcctctgctaccggtccagcagcgtggtcaccgtcaggccctgggcgacggggctcagcgggcagctgcagaaggcgttcgtcacgggcgtgccgtcgctcaagaggtcggagctcgaggccgcgtgcgaggacttcagcaacgtcatcggctccctgtcggattacatggtgtataaggggacgctgtccaccggcgtggagatcgccgtggtgtccaccaccaagaactctgccaaggagtggtccaagcactgcgagtcacaattcaggaagaagataacaagcctgtccagagtgaaccacaagaacttcgtcaacctgctgggctactgccaggaagagcagccgtttacgaggatgatggtgttcgagtacgctccaaacggcacgctcttcgagcatctgcacgtcagagaagacggttacctggactggcccactcgcctgcgcgtggcggtcggcgtcgcctactgcctggagcacatgcaccagctgagcccgccggagatcctgcgggcgctggacacgtccaccatctgcctcaccgacgacttcgcggccaagatctccgacgtcttcttctgcgacgagccccgccggcaggaggggagcctgtccctgtcggcgctgtcggaccgggagagcgtggtgtacagctacgggatggtgctgctggagaccatgaccggccggttcacggcgtccgacggcggcctgctagaggcctgggccgcggcctacctgagaggggagcggcagctccgggacgtgatggatcccgccctgcggcggtccttccacgccgccaccgtggacaggctggacggcgtcatcaggggctgcaccgaccgggagcccaggaggcggctgaccatagcggaggtcgccaagcgcctgagggagatcactgccatgtcacccgacgcggccacccccaaggtttcgccgctgtggtgggcggagctggagatcatctgcgcagaggtcaactgaggtcaacctgagacggacgtgccaatgtttgtcgtgaaaaggctgtttcgtggtagatacacaggttgcttctttttgatatttttattttttaggtttatgttgaagtttgtgtccatctgtacatatgaacaaaatgaagtgtgcaaccaagctgattgttttaaaatattattttaataattaattattaaaaagaattgcaaaagttgtacgatttcaagatctgtctgtcttaagagctggttccaaccttcataggtaacgatatctcttcgcaatttatttgagctcttaacaaattttagttaaaaaatgaatagaaataaata

SEQ ID NO: 5013 - DNA, 2126 bp, Zea Mays
gttcaaaatactgaaaatatgttgactgattcgctaaaagaaatttctttgccttctccactccaatccatgtacgtgatggtgatggaggagatctcagcaaaacaacaagaataagcagtaacaacaataatctagcctgcctgtccttagcgtagtcatgccatggcgggcgatgcgctcatcgtcatcgtcactagcttcctcctcgcgctgccgtcagcgacggcaataggcaaggtctgcggcaacgccggcaactacacggccaacggcagcgcctgcgtgaacggctcgttgcagtacgcgcggagggcgtgcccctacgccaaggccgccagcgtctacgacgacaactgcctcatcggctactccagcgccaacatcctcgtcccggcctataacgccacccgggacacgagcacgctcttcgactactggaacagcatgaccatcgccggcaacggcacactggtggccgcccacgtcgacgacctgctgacgcagactgcccagcaggctgcctccagcccgaggaggttcgtcacggcctacatggacggctccagcaacgccgtcatcccgacgctctactccctggcgcagtgcacgcccgacctgtcagccggcgactgcctggcctgcctccagcggatcctcggcttgctcaacgccacgacgtcgatgacgcagatcaggccgtcgtccggcgctccggcgccaccaccaccgtctccgacgacaaataaaggatctggggtgaagccttgggtaattgcggtgtctgtagcacctcctgtggcggtagtagcattctgcttcatcctttacaaccgtaggcaaaggagaaggttcagaagaggtagatctaaactacgacaaaagcatcctcgcaacaacttgaaaggagacgaactagattgggaaatggaaacagagctctcagagttttctgtttttgacttccatcagatattggaggctacagataacttctctgaagaaaataaacttggggaaggtgggtttggccccgtttataagggtcagtttcctgatggaactgagatagctgttaagagacttgcttcacattcagggcaaggttttgtagagttcaagaatgaagtacaactcatagcgaaactccaacacacaaatttggttaggctcttgggatgttgctctcagggagaggagaaaattttggtctatgaatacttgccaaacaaaagcttggacttctttatctttgatgaaaacaggaaatcgttactggattggaaaaagcgtctagcgataattgaaggaatagcagaaggacttctctacctgcataagcactcccgtttgcgtgtcattcatcgagatcttaaaccaagtaacattctcctggacagcgaaatgaatcctaaaatttcagactttgggttagcaaaaatatttagctcaaataacatcgaaggaagcactacaaggagagtggttggtacatatggttatatggctcccgagtatgcctctgagggcatcttctctatcaaatctgacgtattcagctttggcgttctcattcttgagatccttagcggaaaaaggaattccggcaaccacgattatggagatttcatcaatattctcggatatgcatggcaattgtatgaagaggcaagatggatggatctcgttgatgcctcattggtaccaatggatcactcatctgaaatcatgaggtgcatgaacattgcattgctgtgtgtacaagagaatgccgctgatcgaccagccatgttggatgttgttgcgatgctaagcaacaaggctaagaccctggctcagccgaaccacccagcgtatttcaatgtacgggtaggaaacgaagaggagtccactgctgctacggcgtcaggcagtatcaatgagatgaccgtatctgtcacaactggtagataatttttgtttgtacaaagtggttactgttgagcttatatatataattatccttttgataatgtgcaatgcagacatatttcattatatggggtatatgtttatttaattactctattttgtgcagctttcttttcttttcttgagtaaagagtatggtcacccgtcgtaatatg

SEQ ID NO: 5014 - DNA, 1247 bp, Zea Mays
ccccaatccatacaggcccttattgcccacggcccacggcccaatgccgaaccaggcccagctccattttcgccgccgccgttggccggcaacggcattgccgcgcgcccgccgtatctggcttcggctgccgtcgcctccctccccgccctgcgcaacccctcctcgccgcgccgtcaagacgcctgtcttcttctcatctcgtcggcgctcgtcctccctccctccctcccccaggtcctgcttcctccccatggcgtggatctggatggtcctcgcggcgggagccgtgctcctgtgggcgatctctctgggaaggatcttctcctccgccgcgccgtcctgtgtgcccctgagcccgcagttcatgccccctctccgcggcgacaggaggacccggaacgtgatgctcgtcgtcgcccaccccgacgacgagtccatgttctttgctccaactatccttttcctcaagtcaaaaggtcacaacattcacattctgtgcatgtctcgaggtaatgctgatggtctcggagatactcgtaaagaagaattgtaccatgcctgtgaaacccttaagattccacatgaacaagttgaagtcttggaccacccgaaattgcaggatggatttcatgagaaatgggaccatgaactagtatcagaacttgtcatggagcatgtccaactatgggtcattgacatgattgtgacatttgattcatatggagtatcaggccacccaaaccacagagatgttcattacggcatatggcaagcctgaatattcttcgcaagtacagtggtccggttgacatttggctttcttcgctgatctccgtctcaaggtcaaagcagtcaatctatactctagttaacagtagcccgtccagaagctatgaggcaatggctgcacacagaagtcagtgggtttggtttagaagagtgttcgtcatgctctcaagttatacctacataaacatgctacagaaaatttagcacgtgatacgacgtcatatcagagcgagccgccattgtcgtctccaatgtcgtacttgtgcgttgtcaattgtatatttgtactgtatgtatcaatgattttataggcagtgctcatagggtgactgtacggcttcttgttcccaattctctaccatagtatatttgtaagttcttgggtgtggtcaaacgatttctggttcgatttgacgtccttgacgaactgacctgctaactaatcaatccttccg

SEQ ID NO: 5015 - DNA, 2318 bp, Zea Mays
acgctactggatacttccgatgcctgttccgctgtttctcttctcccgtgtcttctcccgtttacctgccgtgtgcgactactaggaggtcgccgccgccgtacgctcagcttctctgcgccggcgacaagcacccaccacaccaggattgtgtttattggatttgagtgtctgattgtgtcagtcaaatttgagttcatcacatccagcccccgcaaccccgtccgtgggcttccccatgcgctgtgtggcactacggtagccgaccctcagcagatcttgcgcggctgtcctcaccagtcgccaacggcctcctcgcccagtcgaccttctcagacagcacccctcgacagcacccaagcaaccgaccgaagtgagcagtgactcagttaggtaagttcagagataatgtttcattttttctacgaattttatgaatacatgctcctcttatatgaactgcaactatctctaccctagaacagacatcaacatgtacatgactattaaatttcctgttacattgttctacctatattgtaacaaatgtcctttcactgttgtcattatgtcaacttagttaattatatgggcactaatatattttttatttataaatacaccaacaatttacgaggagctgcgcccattcgttttcaaaattctaattgtaatgtccacttcttcagtagattcacagtgtacggaagggagccacttaatacttagtaaaacaccatcagagttgggagaagactgtggattgctatagtcctggtcaagggttgatgcctgctagtttcaaagttagatctgtacctttagatggcaatagcgaagcatttgaggaggttcttgacccagattttggagagtcagctattggacgtgtagcacctgttgactctggtctttggtggataattctgttaagggcatatggaaaaattactggagactatgctctacaagaaagggttgatgtgcagacaggcatcaggctaatactgaatttgtgcttgtctgatggatttgacatgtttcctacattgcttgtaactgatggatcatgtatgattgatcggcggatgggaatccatggtcatcctctggagatccaggctctgttctattctgctttacgctgtgcccgagaaatgattggggtaaccgatggatccaagaacttgatccgtgctattaacaacaggctcagtgctctgtcatttcacatcagggagtattattgggttgatatgaagaagataaatgagatttatcgctataagactgaggagtattcccatgatgctattaacaaattcaacatctacccagagcaaattccatcttggcttgcagactggattcctgtgaaaggcggttaccttataggcaatctgcagccagctcacatggatttcaggtttttctccctagggaatctgtgggcgattgtctcatctcttgctactcaaaggcaagcagagggtattctgaaccttattgaagccaaatgggatgacatagtagccaacatgcctcttaaaatatgttaccctgcactagagtatgaggaatggcgtatcatcactggcagtgatcccaaaaacacgccctggtcgtatcataatggtggatcttggcctacattgttatggcagttcaccttggcttgtatcaagatgggtaggcgtgacttggcacggagggcagttgaggtggcagaaaagaggctctcagatgacaagtggccagagtattatgacaccaggacaggaaggttcattgggaagcaatcacggctatatcaaacttggagcattgctggatatcttagctctaagatgttattggactgtccggagatggcatccatactagtatgcgatgaagacttcgagctgctggaaggttgtgcttgcagcttgaataagaatgctcgcaccaaatgctcacgtcgtgcggccaagtcgcaggttcttgtgtagttccatgcctgttcttgacccaaaagctgcaacgctccttcaacttgttgtaattgttcgtcacagaagctggcactagttactagttacttaagcagaatgatcacaaaccacctatgccgatttttttggcgagttcgtggttgatccatttatacaggagtatatgttgttgtctgtacattttatctaatggattttatgtatcctgctggtcaactcaagttgattggtagttttttttatgtaagcagacagcatgtaaatatcaccgctcgttacaagtgtactaaaagaaaagttagagagacataatgacggaatgag

SEQ ID NO: 5016 - DNA, 2361 bp, Zea Mays
acgctactggatacttccgatgcctgttccgctgtttctcttctcccgtgtcttctcccgtttacctgccgtgtgcgactactaggaggtcgccgccgccgtacgctcagcttctctgcgccggcgacaagcacccaccacaccagctacgcggctcctctggtccccatgagcgcaggccacaaactcaccttctcccacgaacggtgaagccgcgacggcgcgacgactccacagccccagtcctcctccactcaccccgccgcattcccatcagcggccggccaccgcctttctcctgcgcgtgtggctgcggtctgcctcagtagctagagcagcatagtcgcacatccaacccctgcaaccccgtccgtgggcttccccatgtgctgtgtggcactacggtagccgaccctcagcagatcttgcgcagctgtcctcaccagtcgccaacggcctcctcgcccagtcgaccttctcggatagcacccctcgacagcacccaagcaaccgaccgaaatgagcagtgactcagttaggattgtgtttattggatttgagtgtctgattgtgtcagtcaaatttgagttcatcacatccagcccccgcaaccccgtccgtgggcttccccatgcgctgtgtggcactacggtagccgaccctcagcagatcttgcgcggctgtcctcaccagtcgccaacggcctcctcgcccagtcgaccttctcagacagcacccctcgacagcacccaagcaaccgaccgaagtgagcagtgactcagttagagttgggagaagactgtggattgctatagtcctggtcaagggttgatgcctgctagtttcaaagttagatctgtacctttagatggcaatagcgaagcatttgaggaggttcttgacccagattttggagagtcagctattggacgtgtagcacctgttgactctggtctttggtggataattctgttaagggcatatggaaaaattactggagactatgctctacaagaaagggttgatgtgcagacaggcatcaggctaatactgaatttgtgcttgtctgatggatttgacatgtttcctacattgcttgtaactgatggatcatgtatgattgatcggcggatgggaatccatggtcatcctctggagatccaggctctgttctattctgctttacgctgtgcccgagaaatgattggggtaaccgatggatccaagaacttgatccgtgctattaacaacaggctcagtgctctgtcatttcacatcagggagtattattgggttgatatgaagaagataaatgagatttatcgctataagactgaggagtattcccatgatgctattaacaaattcaacatctacccagagcaaattccatcttggcttgcagactggattcctgtgaaaggcggttaccttataggcaatctgcagccagctcacatggatttcaggtttttctccctagggaatctgtgggcgattgtctcatctcttgctactcaaaggcaagcagagggtattctgaaccttattgaagccaaatgggatgacatagtagccaacatgcctcttaaaatatgttaccctgcactagagtatgaggaatggcgtatcatcactggcagtgatcccaaaaacacgccctggtcgtatcataatggtggatcttggcctacattgttatggcagttcaccttggcttgtatcaagatgggtaggcgtgacttggcacggagggcagttgaggtggcagaaaagaggctctcagatgacaagtggccagagtattatgacaccaggacaggaaggttcattgggaagcaatcacggctatatcaaacttggagcattgctggatatcttagctctaagatgttattggactgtccggagatggcatccatactagtatgcgatgaagacttcgagctgctggaaggttgtgcttgcagcttgaataagaatgctcgcaccaaatgctcacgtcgtgcggccaagtcgcaggttcttgtgtagttccatgcctgttcttgacccaaaagctgcaacgctccttcaacttgttgtaattgttcgtcacagaagctggcactagttactagttacttaagcagaatgatcacaaaccacctatgccgatttttttggcgagttcgtggttgatccatttatacaggagtatatgttgttgtctgtacattttatctaatggattttatgtatcctgctggtcaactcaagttgattggtagttttttttatgtaagcagacagcatgtaaatatcaccgctcgttacaagtgtactaaaagaaaagttagagagacataatgacggaatgag

SEQ ID NO: 5017 - DNA, 4557 bp, Zea Mays
cgaaatgagcagtgactcagttaggattgtgtttattggatttgagtgtctgattgtgtcagtcaaatttgagttcatcacatccagcccccgcaaccccgtccgtgggcttccccatgcgctgtgtggcactacggtagccgaccctcagcagatcttgcgcggctgtcctcaccagtcgccaacggcctcctcgcccagtcgaccttctcagacagcacccctcgacagcacccaagcaaccgaccgaagtgagcagtgactcagttagattcacagtgtacggaagggagccacttaatacttagtaaaacaccatcaggtaaccactttgtagttcaagtgagctgaatcgcccaaattcaagatagtgtatctctacatgctagtatgatttctttaaatatgcattgtgtgagtatatgctagatcacaatcttttactttcacaataggttcttgctgtcagtgaccacaatttggtttagttacaatgactatagcatgacctttacgatcatgccctcaagcatccagttttttttaccatatggatatgtgtggatacaatagcagttagttttattgtctatcccaattaagaatggccacaatgtagcatttgattgacatacacctctaatatatcgtacataagcaagaatatgtgaatacagtagcggtttgtttcattacctgaatttatttattaagaatggccataaaaaagggtgtttcgttacctatatatgaacacatactacactatatacaaattcaaaccaagtgtaactctggcatattgtttctaaaaacactaaccgttagttcatgtgatgttcatcctctttgagatttcatcagactgtgtttctaacaatggacaaaaaaggaataactaatgagttcaaacaatactattatgtccttcactaggaaactggtcagtacatagtttgcctctttatatataatataaatttaacaatgcaatttatagcttctttctccgatatatacaagctaaaaaaataagtgttcaactgtgtaggaacagtgagatcaatgattcaatgcctgcacctagatatgacatgtggtgattctgttgactgtactttaaactcaagttgtgaacaactaaactcaaactatgagtaattcattgtaacatataactgttgtcttttttacaatgttcactattgtcttgtgcatgtatcgggtttgttatgctcctagaaccttcgtagcgacagccgccgaacctcgtggcgcaaaaacaattttttttttgaaaaacaggtattatgctggtaaaggcttatgtggctgtagacatgttcaactaatatcttttttccgcatatttgtcaatgatccaatttgttattttcaaactttatttaccatgaagattactaattgtatattgttataattcaagtttggttatatcccttcatcatataaaaagtatcctacaatcaaaaattacgcgcgctgggcgcgcgccaaccactagtatcatttaagagaaagcaagttcgatactacaaggactcacaagccacacttttgagggccatttcttctttactagattgaatacttgcactggccagtttaatttaccataaaattcctctatatatttcacttgtatgcatgctgtcgcgatcattctcctttgtctagtgctgtgattttacaaggaagctagacagtagtcgtattaccgtttgcattctcggtttgaggcaaccgaattccctttccaacttaatttccaaagctgcatccaaacctcctttgcaaataggcacaaaaatgcaccgtcgttaatcgctattaatcacacaaaacatacgttggaatttggattgtattgctactttttgtatcttcaagcttgtctgctgtgatatccttgcctgaaccaagagccaagggataatggttttttgaaaagaaaaaaaaattaaatgtgaaagagggcaaaagaaaatttcggccacgtgaaccacatcttccttcgccacatccggagctcatgtttattaactgccacgagcccacaaacgtggcgcgccctgcgccgtacgatgccacagtagcctatattttacactttcccaaaccaaaaactatcctgtctgtcttaatcccgttccaatcgctgttacctgataattaccgcagcgatcgaaacgaaccagcctcaaacccatttccttcccgtgcttccttgttcctcctcatcccaaaattcgcaagcgccgattccaatcaggaaaccggaaacctttcttcctccgcaattcaatccggcgggccccgaagccggcgccaatggcggccgccgccatctctcacctccgccggggcgcgcagcaccacgcagtgctatgcatctcgctgtcgcgccgccgcttctcctcctccgccgtggccgcggcctccccgctcgccgcggccgcgcgccgcctcctctccacgacggcagactccgccaccgcgtccacgtcgggggagcactacaagccgccgcccttcgaccccttccgcgccgccaccctatcgccctctgctccgccgctagagtcggcccggctcgaggatgagcccccgagcagtccgccgccgcaggatgaggcggccgcgtccgtggcggcgcacgagcaggcgacgctggcctgccaggagctggaattggagggcctcaaggcgggggtggaggcggtgaagagcagggaggagtcgccggaggagaaggaggcgtggtggctgctcagccgagcggtcgtcaactactgcggtagcgccgtcgggacggtggccgcgaacgatccgtccaccagccagatgctcaattatgaccaggtgttcattagggacttcgtgccatcggccatcgcgttcctcctcaagggtgagagcgatattgtgaagaacttcctgctccacacgttgcagctccagagttgggagaagactgtggattgctatagtcctggtcaagggttgatgcctgctagtttcaaagttagatctgtacctttagatggcaatagcgaagcatttgaggaggttcttgacccagattttggagagtcagctattggacgtgtagcacctgttgactctggtctttggtggataattctgttaagggcatatggaaaaattactggagactatgctctacaagaaagggttgatgtgcagacaggcatcaggctaatactgaatttgtgcttgtctgatggatttgacatgtttcctacattgcttgtaactgatggatcatgtatgattgatcggcggatgggaatccatggtcatcctctggagatccaggctctgttctattctgctttacgctgtgcccgagaaatgattggggtaaccgatggatccaagaacttgatccgtgctattaacaacaggctcagtgctctgtcatttcacatcagggagtattattgggttgatatgaagaagataaatgagatttatcgctataagactgaggagtattcccatgatgctattaacaaattcaacatctacccagagcaaattccatcttggcttgcagactggattcctgtgaaaggcggttaccttataggcaatctgcagccagctcacatggatttcaggtttttctccctagggaatctgtgggcgattgtctcatctcttgctactcaaaggcaagcagagggtattctgaaccttattgaagccaaatgggatgacatagtagccaacatgcctcttaaaatatgttaccctgcactagagtatgaggaatggcgtatcatcactggcagtgatcccaaaaacacgccctggtcgtatcataatggtggatcttggcctacattgttatggcagttcaccttggcttgtatcaagatgggtaggcgtgacttggcacggagggcagttgaggtggcagaaaagaggctctcagatgacaagtggccagagtattatgacaccaggacaggaaggttcattgggaagcaatcacggctatatcaaacttggagcattgctggatatcttagctctaagatgttattggactgtccggagatggcatccatactagtatgcgatgaagacttcgagctgctggaaggttgtgcttgcagcttgaataagaatgctcgcaccaaatgctcacgtcgtgcggccaagtcgcaggttcttgtgtagttccatgcctgttcttgacccaaaagctgcaacgctccttcaacttgttgtaattgttcgtcacagaagctggcactagttactagttacttaagcagaatgatcacaaaccacctatgccgatttttttggcgagttcgtggttgatccatttatacaggagtatatgttgttgtctgtacattttatctaatggattttatgtatcctgctggtcaactcaagttgattggtagttttttttatgtaagcagacagcatgtaaatatcaccgctcgttacaagtgtactaaaagaaaagttagagagacataatgacggaatgag

SEQ ID NO: 5018 - DNA, 4982 bp, Zea Mays
ctccacgctactggatacttccgatgcctgttccgctgtttctcttctcccgtgtcttctcccgtttacctgccgtgtgcgactactaggaggtcgccgccgccgtacgctcagcttctctgcgccggcgacaagcacccaccacaccaggattgtgtttattggatttgagtgtctgattgtgtcagtcaaatttgagttcatcacatccagcccccgcaaccccgtccgtgggcttccccatgcgctgtgtggcactacggtagccgaccctcagcagatcttgcgcggctgtcctcaccagtcgccaacggcctcctcgcccagtcgaccttctcagacagcacccctcgacagcacccaagcaaccgaccgaagtgagcagtgactcagttaggtaagttcagagataatgtttcattttttctacgaattttatgaatacatgctcctcttatatgaactgcaactatctctaccctagaacagacatcaacatgtacatgactattaaatttcctgttacattgttctacctatattgtaacaaatgtcctttcactgttgtcattatgtcaacttagttaattatatgggcactaatatattttttatttataaatacaccaacaatttacgaggagctgcgcccattcgttttcaaaattctaattgtaatgtccacttcttcagtagattcacagtgtacggaagggagccacttaatacttagtaaaacaccatcaggtaaccactttgtagttcaagtgagctgaatcgcccaaattcaagatagtgtatctctacatgctagtatgatttctttaaatatgcattgtgtgagtatatgctagatcacaatcttttactttcacaataggttcttgctgtcagtgaccacaatttggtttagttacaatgactatagcatgacctttacgatcatgccctcaagcatccagttttttttaccatatggatatgtgtggatacaatagcagttagttttattgtctatcccaattaagaatggccacaatgtagcatttgattgacatacacctctaatatatcgtacataagcaagaatatgtgaatacagtagcggtttgtttcattacctgaatttatttattaagaatggccataaaaaagggtgtttcgttacctatatatgaacacatactacactatatacaaattcaaaccaagtgtaactctggcatattgtttctaaaaacactaaccgttagttcatgtgatgttcatcctctttgagatttcatcagactgtgtttctaacaatggacaaaaaaggaataactaatgagttcaaacaatactattatgtccttcactaggaaactggtcagtacatagtttgcctctttatatataatataaatttaacaatgcaatttatagcttctttctccgatatatacaagctaaaaaaataagtgttcaactgtgtaggaacagtgagatcaatgattcaatgcctgcacctagatatgacatgtggtgattctgttgactgtactttaaactcaagttgtgaacaactaaactcaaactatgagtaattcattgtaacatataactgttgtcttttttacaatgttcactattgtcttgtgcatgtatcgggtttgttatgctcctagaaccttcgtagcgacagccgccgaacctcgtggcgcaaaaacaattttttttttgaaaaacaggtattatgctggtaaaggcttatgtggctgtagacatgttcaactaatatcttttttccgcatatttgtcaatgatccaatttgttattttcaaactttatttaccatgaagattactaattgtatattgttataattcaagtttggttatatcccttcatcatataaaaagtatcctacaatcaaaaattacgcgcgctgggcgcgcgccaaccactagtatcatttaagagaaagcaagttcgatactacaaggactcacaagccacacttttgagggccatttcttctttactagattgaatacttgcactggccagtttaatttaccataaaattcctctatatatttcacttgtatgcatgctgtcgcgatcattctcctttgtctagtgctgtgattttacaaggaagctagacagtagtcgtattaccgtttgcattctcggtttgaggcaaccgaattccctttccaacttaatttccaaagctgcatccaaacctcctttgcaaataggcacaaaaatgcaccgtcgttaatcgctattaatcacacaaaacatacgttggaatttggattgtattgctactttttgtatcttcaagcttgtctgctgtgatatccttgcctgaaccaagagccaagggataatggttttttgaaaagaaaaaaaaattaaatgtgaaagagggcaaaagaaaatttcggccacgtgaaccacatcttccttcgccacatccggagctcatgtttattaactgccacgagcccacaaacgtggcgcgccctgcgccgtacgatgccacagtagcctatattttacactttcccaaaccaaaaactatcctgtctgtcttaatcccgttccaatcgctgttacctgataattaccgcagcgatcgaaacgaaccagcctcaaacccatttccttcccgtgcttccttgttcctcctcatcccaaaattcgcaagcgccgattccaatcaggaaaccggaaacctttcttcctccgcaattcaatccggcgggccccgaagccggcgccaatggcggccgccgccatctctcacctccgccggggcgcgcagcaccacgcagtgctatgcatctcgctgtcgcgccgccgcttctcctcctccgccgtggccgcggcctccccgctcgccgcggccgcgcgccgcctcctctccacgacggcagactccgccaccgcgtccacgtcgggggagcactacaagccgccgcccttcgaccccttccgcgccgccaccctatcgccctctgctccgccgctagagtcggcccggctcgaggatgagcccccgagcagtccgccgccgcaggatgaggcggccgcgtccgtggcggcgcacgagcaggcgacgctggcctgccaggagctggaattggagggcctcaaggcgggggtggaggcggtgaagagcagggaggagtcgccggaggagaaggaggcgtggtggctgctcagccgagcggtcgtcaactactgcggtagcgccgtcgggacggtggccgcgaacgatccgtccaccagccagatgctcaattatgaccaggtgttcattagggacttcgtgccatcggccatcgcgttcctcctcaagggtgagagcgatattgtgaagaacttcctgctccacacgttgcagctccagagttgggagaagactgtggattgctatagtcctggtcaagggttgatgcctgctagtttcaaagttagatctgtacctttagatggcaatagcgaagcatttgaggaggttcttgacccagattttggagagtcagctattggacgtgtagcacctgttgactctggtctttggtggataattctgttaagggcatatggaaaaattactggagactatgctctacaagaaagggttgatgtgcagacaggcatcaggctaatactgaatttgtgcttgtctgatggatttgacatgtttcctacattgcttgtaactgatggatcatgtatgattgatcggcggatgggaatccatggtcatcctctggagatccaggctctgttctattctgctttacgctgtgcccgagaaatgattggggtaaccgatggatccaagaacttgatccgtgctattaacaacaggctcagtgctctgtcatttcacatcagggagtattattgggttgatatgaagaagataaatgagatttatcgctataagactgaggagtattcccatgatgctattaacaaattcaacatctacccagagcaaattccatcttggcttgcagactggattcctgtgaaaggcggttaccttataggcaatctgcagccagctcacatggatttcaggtttttctccctagggaatctgtgggcgattgtctcatctcttgctactcaaaggcaagcagagggtattctgaaccttattgaagccaaatgggatgacatagtagccaacatgcctcttaaaatatgttaccctgcactagagtatgaggaatggcgtatcatcactggcagtgatcccaaaaacacgccctggtcgtatcataatggtggatcttggcctacattgttatggcagttcaccttggcttgtatcaagatgggtaggcgtgacttggcacggagggcagttgaggtggcagaaaagaggctctcagatgacaagtggccagagtattatgacaccaggacaggaaggttcattgggaagcaatcacggctatatcaaacttggagcattgctggatatcttagctctaagatgttattggactgtccggagatggcatccatactagtatgcgatgaagacttcgagctgctggaaggttgtgcttgcagcttgaataagaatgctcgcaccaaatgctcacgtcgtgcggccaagtcgcaggttcttgtgtagttccatgcctgttcttgacccaaaagctgcaacgctccttcaacttgttgtaattgttcgtcacagaagctggcactagttactagttacttaagcagaatgatcacaaaccacctatgccgatttttttggcgagttcgtggttgatccatttatacaggagtatatgttgttgtctgtacattttatctaatggattttatgtatcctgctggtcaactcaagttgattggtagttttttttatgtaagcagacagcatgtaaatatcaccgctcgttacaagtgtactaaaagaaaagttagagagacataatgacggaatgag

SEQ ID NO: 5019 - DNA, 1878 bp, Zea Mays
aaatacatttcgaaataaataaaaaagaaaactattcctaaccctaaggcccactaggggcccatctacctaaacctaacagccgcgcgctgcgctccctggcttctctcccagccgccgcctctattctcctttccctcttctctctcccctcgcctatctcctcccccgacgcgcctgcaccaacagtggaagagctcgctagcgaagcaggcctgggttgcggcgcacagcgtgaacgcgttcggcaagagaccctcctcgagcgtctcaccgaaaaggcggagcgcctccgcctcagcgccattttgcgagaggcaggacaccatggccgtccaggagatgaggtcccgcaggccgacgggcattccgtcgaacacgctgcgcgcggcggccacgacgctacacatgcagtagagcgtgaggagcgagttggcgacgacggaatcagtctcgacctataggaatcgttgaatgcccggtacaaccgatcaagtttcgacaacccctggttcgtcatcggggtctcctactccggcgctctcagcgcctggttcaggctcaagttcccccatttgacatgtgggagcctcgcgagctcaggggtggttcttgcagtgtacaactacaccgactttgacaagcaggttgatagtccgggaataggttggagagtcagctggtcctgagtgcaaagctgtccttcaggaaataactgaactcgttgacgaacagctccggctggagagtcactcggtgaaggctctatttggagcacagatgctgaaaaacgatgtcgactttctcttcttcctggcggatgccgcagcgataacattccaatacgggaacctagatgccttgtgccctccattaatacaggcaaagaagaacaggaaaaacttggtggtacatgtcccttctataattgtacatgagatctgtaaaatcttactggaagacagaaggagccagcaaagaaataactatccttgtattaacattttaatgtaaattgttttaccaattaaactcccctgccaatagcaaataagaggaataagcatagtagtttaatctataaagatggaaaatagttacactgttgagtgaaaattctgcaggcaacctgtcgatggatgaccaaacacattatacaattttactattatatcttcctcttttagagcatcctttttgatcttccatttactggttttgcaggaagcatatgctcaatttgtgtttttagatccatgatatgttgtcggtctgttgtttgtagtcctagatatcttcgtttttgtcactactaaaaacaccgatcggttctgatgtactgctatttattgctctgatatttttgtcatgtatgtgattggtgacttgggctttactagaggaacattcgtggtatagttttgaagagagaagtgagtcataaaattagagatatctgcattcattgtgatctatctttaacacttcatttttactgtagacatcaagtaagtggcgacatcacaacccctacaagtttgtgcctcaaaacaagaggatacaagaagttggagtgcttttgtgaaggcttttgcgaatcacttgaaacgttggtacttttgtgaatgattttgtaaagtgtttgcaaatatgtgcaaaacataataacatgtgtaggttttgtgaatgattttgttgtggtgcttgttgatggtttatgtgatgtggatctatcattgtgcaatactaattaaatttgtatatctatgtgattatgtgtataaaaattggtgatttgtgatgcttttgtatatataacagttgttgaatgctaattaatggtatattatcattattaacgactataactaggggcaa

SEQ ID NO: 5020 - DNA, 2736 bp, Zea Mays
tctctctcctctctccggcccctctctctcgtttctggcagcagtggtgcggtactaccaccgctctcactccacacacacacaccgagtatacggctaagcaggagagagaacgggagagtgagactgagacggggtcccaagtacaattctcgcctggttcttgatcgaaggcatgatcaagaatcaccagaaagttctagatctttagacggcagtcttccttggactcctcggtttcttttgttctgagctctagccatggagggtgggggagggagtggaatgggtgggttcccggaagccacgggtaaccttctcgatgccgcagctcaggagttccaccctacggtctgtgccccctatcctctacagccgcttccgcaacagctatactgcccccacccatatccagccatgccggtgcctccgccgccgcaaatagccatgttacagccagtgcctccgatggcgatggccatggcgccgcagccggggtacaccttgccaacgacgacgccggtggtcaatggcccgtcgagccgcgtcgtggtgctgggccttgtcccgccgcacgcgcaggaggccgacgtggcgcaggcgatggcgccattcggcgcgatccgctcggtcgacgcgtgcgcggtggcgtccgagggcgtggccaccgtccatttcttcgacatccgcgccgccgagctcgccttgacctgtgtccgcgagcagcacatgcgccagcagagccgcctcgggcagctctacgcggcggccgccgtagccccggcgtgggctcctgcaccgacgccccaggcctgggactggccccaccccaacgacgacggccgcggcctcgtcctcgggcacgccgtgtgggcccacttcgccaccggcgccgacgacggcgacaaccgcggctccctggtggtcctgagccccctgcccggcgtctcggtcgctgacctccgccaagtcttccaggccttcggggacttgaaggatgtgagggagtcggcgcagcggcccagccacaagttcgtggacttcttcgacacgcgcgacgccgcgcgcgcgctcgccgagctcaacggccaggagcttttcggccgccgcctcgtcgtcgagttcacgcgcccttccggccccgggccccgcaggcgcgggtacgcaccccaccagcaccggcccaccgcgccgactccgccgaggcttcaagcgacgtggcgaccgtcccaaccgacgtcgtctcagccgccggcatcctcgtcgtcgtccggttccgtaagggcgagggaaggagtggtgcttctgaggaggagctcctgtaagtctagcgcgggcagcgaccagtcgtccaagggaggcaatgccggaacgagccatgagcgcaagaccaagggcggcaagatcgtggtggcggcggcggcggcatcctcgtcgaccccgacagcgtccgggaagcaaacccagaaaggcgtcgggagcagcggcggcgggagctggaaaggacgaaagagcgggtgggaggcgcgcttcctgttcaaggagcccgaggccggcggcggcgccgacacgcaagcaacgccggcttcggagatggatacgaggaccaccgtcatgatcaggaacataccgaacaaccagaagctgctgctcaacatgctggacaaccactgcatccaatccaacgagtggatcgtggcgagcggcgaggagcagcccttctccgcctacgatttcgtctacctccccatagatttcaacaacaagtgtaatgtgggctacggcttcgtcaacctgacatcgccggaggctgccgtgcggctgtacaaggcgttccacaagcagccatgggaggtgtacaactcgcgcaagatctgccaagtgacatacgcgcgcgtacaaggcctggaagcgctgaaggagcacttcaagaactccaagttcccgtgcgacagcgacgagtacctgcccgtggcgttctcgccggcgcgcgacggcaaggagcttacggatccagtgcccatcgtgggccgctcgcccgcggcgtcgtccgcgtcgtcgcctcccaagagccgggcggctagcgtggaccggcttgggcaggagctgatgccggcgccgtcgtcatccgcggacggcgcgtcgtcgaccactacgtccacccacgcgccgtccgaacacgacgaggaggaggaggagggagacatcaggctcgcaggcgagctgcggcggcttggctacgacgactagctggctccgatcctagctgcagctaggcgggcgacgcctagctcagcaacgatcggcatggcgtggcgtcgcttcgagaagcgcggaggcagtagtgacttcggccaagcttttcacagatccgtagcgctcgctcctgcacgcgcaggcgaagcaagtgaagtggactgggacttgactttggagaagcaaaagtgagctgatgttcgttggttcgtagacgctgcgcacagcaggtgtggagtcgtgttcttttggattttggtttgaagtttcctactacttgtttctttgaaacttggagctatagctagcttaggcttagctaggactgctgggaggggaaagggcatgcaggggactatcaattcgtggttcgtcatgcgctcgttctttacattaaaataagattgttattagtacagctttacaatacttctgcatattcggagagagactctgatctcatatcatcacgagttgcta

SEQ ID NO: 5021 - DNA, 2520 bp, Zea Mays
caaaagcagccgcaaaacgcaaggagcagcaagcaagacagtgagaccacagcacacacgcagtcaccgcagcgggatatatataaagataaaagaggtgtgtggagcgggagaaggccggactgaaggaggaagacgagcagggagagggaggtagggcaaaaggaagagaatccgagaataaattcagagagggagggagggagggccatgatgatggcaggcgtggcgtcgtaggtggttaaagcgaagggcgcccctcgtcgtccgatgctcccgggccgtctttattacggctgtcgccgggctgggctgcggtcggcggcggaagggagtcttctggcggagatatgagaggattgttttagtgaggtctatgagctggtaccagaactgctcataatattcaggggaaaaaaaaggcaacatggcggaatcgaaggtcgcaagtctggatgcccgaacgacgaagatcagaaacgtccccatcgcagtgaccccagaagggttctggtgctgcccgtcgcaagccgtgctccagaagacggcgaagagccaaaacccgcaggcgaagacgaagcccaaagggggtgcctcgcctctcgcaccaaaggcggcaccaccaatccagagggcacccacaatctcgtccgagagaaggacgcactcgactccgaccagggctaagaccaactcagaggagcagaggtgcttgccgccggcagaggacgctgcggctaataataatgccactaatccgccgaaggcggtgaacgagaggccacagaagcagcacaaggtatctgtggggttcggccagctcgagacgagtgacttgaaggtggtgctgtatggcaaggacggcgttgcggtgaagatgagcgtccacaagaacaccctagctggaaacagtaccttctttgctgacaagctctccgggcagtctccggcgtcgagtatagaagtgactgactgtgaggatgtggagatttatgtcgagacagttgggttgatgtactgcagtgatgtcaagcagaggcttatcaagcaaaccgttcctcgtgttcttcgagtcttgaaggttgcagagctgctgggtttcccagcatgtgtcatgtcatgcttagactacttggaagcggtcccttgggtcggggaagaagaggagaatgtggtctcgtctgtccggaacctgcagagcgagagctatggcgtcagtcctgtgctgaagagggtagcaccatctgatcgaacaaccccaccaaacgatacgttttcacatatcatcgaactggtcttgagaagcagcgaggacagggggcggcgcgagatgaaatctctggtgcagaagcttctgaaggagagtagcactggctgcatgagtgggtcttccgacctgtgttctgcggtcctctacagatcatgccggaactgcctggattccttactaatcctgtttcagcaagcaaccgacagtgatttcgctgagcaggctcttaataccaaagaaccagttttccgacaagttgctctagaagcagataacctgctctggttagctgagatcttggctgacaggaatgccgctgacgagttcgcggtcatatgggctagccaacgtgagctggctgggctgcactctaggttgccagtcaagtcgcgccaccttgtcagctgtgtcacggcgaggctgttcgtgggcatcgggaaaggggagatgcttccttcgaaggacacgaggcggcttctcttggacgtctggttgcagcctctcatggatgactacaactggttgcagcacggctgcaggtcgttcgaccggaaagtggtggaggaaggtgttgggcggaccatcctgacgctccctttggaggatcagcagacgatcctgctctcgtggcttgggagcttcctgaaggttggggacagctgccccaatctccagaaggcctttgaggtttggtggaggagaactttcgtaaggccctatgctgagcagcaaggtaatcgatcgcaatcaggtcggagttgagatgtcaattggttgcagaagaagatagtcttgtttcctagtgtagtatatttgatgagaagttagggtggcggtttcttcttgcgtggtagcccgcgtgggagatccccagtatgtggaggaaatgcggttagtactcttgacctgcgtgaggcttgaggaagttcgcgttgtgcttgtgatgcttcgtatgtatgtcaagatctctgaattctgggtgcagaatttgtatcgtcaggcatctgttttgatgctctgttctgcttctcacaacgttgcacgatgttaattaaggatctgttatgtaaaagaactcgacgccttcaatgcaactgtaaagattttgcagaatgtgttcttctaaagtggagacatatcggtttctatttgtgttgtatggatgattgtccagtttgaaacggtgatgtgtgttaggaaatgaatatctgatacattgattgagggctggaggattatgtataggatcc

SEQ ID NO: 5022 - DNA, 1948 bp, Zea Mays
ccgcattccatcgcccccaaggccccaatcatggctggaaagctagcccgcccccaattggcaggcactctaccaacctatgtgtcccctgtgcacatgcctggcatatggcacactcactgctggtctggccctaaacccacatttgttatatagagatagggattagactcccgagtgcctttgccttccttaaccaagaagcatatagctactgattgatgtctgcctgggtgcgcgtataaaagctagctagtgccgtaaagaaagagagagcgagaacgagtggcgatggcagtactgcacttgcaggcggcggcggtggcggtgctgctgatggcgacggggctgcgcgcgcagctgcgtgtgggcttctacgacagctcgtgcccagcggcggagatcatcgtgcagcaggaggtgagcagggcggtggcggccaacccgggcctcgccgccggcctgctccgcctccacttccacgactgcttcgttgggggctgcgacgcgtccgtgctcatcgactccaccaagggcaacacagcggagaaggacgccgggcccaacctcagcctgcggggcttcgaggtcgtcgatcgcatcaaggcgcgcgtcgagcaggcctgcttcggcgtcgtctcctgcgcggacatactcgcgttcgcggccagggacagcgtcgcactcgtaagtcacactgctttagtgtcagtggacgcctgccttttgattttaacccgacatgattagtttacatggatttggaatccaatgctggactggactagactgaaaagcatatgtgtctgttcgaccttttttgacgcacatgatgccgcgtgcagctgcctgaaagaactcgatgcattgccgggcccgggcatgggtccaactcccaactttatttacagtatttgcttactctccaatccatccatccatccatccgtacgtataggccggcgggaacgcgtaccaggtgccggcggggcggcgggacgggtccgtgtcgcgcgcgtcggacaccagcaacctgccgccgccgacggccaacgtcgcgcagctcacgcagatcttcggcaccaagggcctgacgcagaaggagatggtcatcctgtcgggcgcgcacaccatcggctcctcgcactgcagctccttcagcggccggctgtcggggtcggccacgacggcgggcgggcaggacccgaccatggaccccgcgtacgtggcgcagctggcgcggcagtgcccgcagggcggcgacccgctcgtgcccatggactacgtctcccccaacgccttcgacgagggcttctacaagggcgtcatggccaaccggggcctgctgtcctcggaccaggcgctgctcagcgacaagaacaccgccgtgcaggtcgtcacctacgccaacgacccggccaccttccaggccgacttcgccgccgccatggtcaagatgggctccgtcggcgtgctcaccggcaccagcggcaaggtcagggccaactgcagagtcgcctgattcatcgtcatcactcgtgtggagttgtagattcattatattgattgatttggaccggacgacgtcgacgggatgctacatggcctgcttgcgcaattgtatgtatgcctgtacttgcgcgtgtatgggtttcgctgtgcaaattttcgttgtctcccccgattgattgaggcgtgtgtgcgtgtgtgtctcttctgaatctgaatggaaaatctgtaacctgagctaaaactgctcgtgtactacccaatagttgcttcaaactacgatggatttttattcaaactatcacttccaaacacgcacaaatatgtactcaatcaactagggatcggagaaactggtttgtaaagggaattttataaacacaagctattcagacatgtaactcgacatgggcctaagttctcgtcgacctgattgctc

SEQ ID NO: 5023 - DNA, 2806 bp, Zea Mays
ccatctcctctgtctccgcctcgtcgcttccgcccactcttcctcgccgctgcctcacggccccattgctccgagcgcggcgccggtcgcgatccgaccgggggtgcgcggcgccgaatggtgtgatcgaccccgtcgggaattgggatcgaggtcatgcagcgggctccggagcgccgccgcggcgccgggccgctcctgctgctggcgctgctcgtcgcattggcggccgcgcccagactcgtgcgcgcggtcaccgacgctaccgacgtctctgccataaacggactgtacatgtcactgggatcaccacttctacctggatggactggaaatggtggagacccgtgcggtgagagctggcagggtgttgtgtgtaccggctcttccataactggaatttgggaagtttaggaaacttcactgccatcaccagcttagagcttaacaacaataatattggtggaaccataccggaggacctacctgttacattgcagagtcttttcctctctgctaatcaacttactggaagcatcccaagttcactgtcaaaactcgaaaacttaacagccatgtcagtcaacggcaaccatctaaatggagacctaccagacacttttgattcactcaatagacttgtaaatttggatatttcttcgaacaacttgagtggtgtgttaccatcttcaatgaaaaacctggcatctttgacttcattgcacatgcaagataatcaactgtctgggacccttaacgttttgcaggatctcccactgaaagacttgaacatagagaataatcttttttctggaccggtgcctgcgagtttgcttaacataccaaacttcaaaaaggacgggaatccattcaataccagcatcgtcccatctgcatctccgccttcaacaggaccagctccaacaccagcagcatcaaaaccagctccaacaccagcacccaccacttcaaattcaacgcccccagcaccagcaccctcatttccttcaagatctcctcccccgcctaaaacaacctcaaactcttctgaaggatcaactacccgagatagcacttcaccatctaagaaacacagtacatcaaccctcaagattgttggctttgttcttgccggagtagtgctgtttattatcatagtcctcctagtattattttgtctatccaagtaccaagagagacggtcgagatatgatcataacagaagtcagcaggcaagggtgcatcatagggttgaaccgcaaatcaagccacctccagtgcaacaaagcaatgatcttaaaaaaggttcaggtgaggtacttgatagaaggggccatgaactaagttcatcaacggcagctctcgcaaagaaatctcctgaaaaccaaaaggagcatgtaattaattttgatcgaacagattcagatctgtttcctgtttctctaccaccaccacctcctccacctccattacccccaattgaaagagttattgcaaatcccattgttccaccagaaaagcgatatagtcctccaccaaagacaagtagctctacttctgccacatcattctctattgcatctcttcagcaatatacaaatagcttcagagaggagaatgtgataagagagagtagattaggaaaggtttacctagcagagcttcctgatggcaagttattggaggttttgaagattgacaatgctaatggaagaatatcagtagatgacttcctagaagaggttgaatgtatcttagatatcaagcatcctaacattcttgagttagtcggatactgtgctgaatatgggcagaggttacttgtgtacaatcactttagcagaacgacactagatgacacacttcatgatggagaggatactgaaagtgcactgtcatggaatgcccgcctccaggttgctcttggttctggaaaagccttagagtatctccatgctagcttccaacctccaattgtgcaccagaattttgaaccagctaatgtgctccttgacaaaaagttctcagtgtgtgttgctgaatgtggactggcagaattgatgccaccaagttcagtcactcagctgtcaggtcggatgcgtgcattactgaactacgaagcacctgagttgcaggattctggggtcgtttcagaaaggggtgatgtatacagctttggtgtagtgatgctggaacttcttactgggcgtaaaccatatgacagttcacgcccgcgtcatgagcaacatcttgttagatgggccagttctcagcttcatgacatagaatccctgtccaagatggtggacccatctatacgtggacaatgttctgagaaagcattgtcacgtttcgctgacataatcagccgctgtatccagcagccagaattcaggccaccaatgtctgaaattgtacaagacctagctagacttgtaaatgccaccggtgaggaatcagagtaacccccaaaaaaagcatggagccatggaaggcatacaatacaaacgtcgcgaccaaacatgatattatatatagcgacagtggcggagcctccgccaagcgccaaggcccggcctgatcgggcacgtgtccaggcttccgccgaggaacacttgggtgggctctcgatcggcctagcacacggatgtttggatgggtcaggcagtggtgtcgatttcaggccggctccgccactgtactgtatagcaaggtgtatatatagcaagaccccggattcttgtaataatagtcagggattcgttaaatttgttactctaaagctagtcatttacttgttcgcccg

SEQ ID NO: 5024 - DNA, 2837 bp, Zea Mays
ccatctcctctgtctccgcctcgtcgcttccgcccactcttcctcgccgctgcctcacggccccattgctccgagcgcggcgccggtcgcgatccgaccgggggtgcgcggcgccgaatggtgtgatcgaccccgtcgggaattgggatcgaggtcatgcagcgggctccggagcgccgccgcggcgccgggccgctcctgctgctggcgctgctcgtcgcattggcggccgcgcccagactcgtgcgcgcggtcaccgacgctaccgacgtctctgccataaacggactgtacatgtcactgggatcaccacttctacctggatggactggaaatggtggagacccgtgcggtgagagctggcagggtgttgtgtgtaccggctcttccataactggaataaccatgaatgctgcaaacttgggaggacagttgggaagtttaggaaacttcactgccatcaccagcttagagcttaacaacaataatattggtggaaccataccggaggacctacctgttacattgcagagtcttttcctctctgctaatcaacttactggaagcatcccaagttcactgtcaaaactcgaaaacttaacagccatgtcagtcaacggcaaccatctaaatggagacctaccagacacttttgattcactcaatagacttgtaaatttggatatttcttcgaacaacttgagtggtgtgttaccatcttcaatgaaaaacctggcatctttgacttcattgcacatgcaagataatcaactgtctgggacccttaacgttttgcaggatctcccactgaaagacttgaacatagagaataatcttttttctggaccggtgcctgcgagtttgcttaacataccaaacttcaaaaaggacgggaatccattcaataccagcatcgtcccatctgcatctccgccttcaacaggaccagctccaacaccagcagcatcaaaaccagctccaacaccagcacccaccacttcaaattcaacgcccccagcaccagcaccctcatttccttcaagatctcctcccccgcctaaaacaacctcaaactcttctgaaggatcaactacccgagatagcacttcaccatctaagaaacacagtacatcaaccctcaagattgttggctttgttcttgccggagtagtgctgtttattatcatagtcctcctagtattattttgtctatccaagtaccaagagagacggtcgagatatgatcataacagaagtcagcaggcaagggtgcatcatagggttgaaccgcaaatcaagccacctccagtgcaacaaagcaatgatcttaaaaaaggttcaggtgaggtacttgatagaaggggccatgaactaagttcatcaacggcagctctcgcaaagaaatctcctgaaaaccaaaaggagcatgtaattaattttgatcgaacagattcagatctgtttcctgtttctctaccaccaccacctcctccacctccattacccccaattgaaagagttattgcaaatcccattgttccaccagaaaagcgatatagtcctccaccaaagacaagtagctctacttctgccacatcattctctattgcatctcttcagcaatatacaaatagcttcagagaggagaatgtgataagagagagtagattaggaaaggtttacctagcagagcttcctgatggcaagttattggaggttttgaagattgacaatgctaatggaagaatatcagtagatgacttcctagaagaggttgaatgtatcttagatatcaagcatcctaacattcttgagttagtcggatactgtgctgaatatgggcagaggttacttgtgtacaatcactttagcagaacgacactagatgacacacttcatgatggagaggatactgaaagtgcactgtcatggaatgcccgcctccaggttgctcttggttctggaaaagccttagagtatctccatgctagcttccaacctccaattgtgcaccagaattttgaaccagctaatgtgctccttgacaaaaagttctcagtgtgtgttgctgaatgtggactggcagaattgatgccaccaagttcagtcactcagctgtcaggtcggatgcgtgcattactgaactacgaagcacctgagttgcaggattctggggtcgtttcagaaaggggtgatgtatacagctttggtgtagtgatgctggaacttcttactgggcgtaaaccatatgacagttcacgcccgcgtcatgagcaacatcttgttagatgggccagttctcagcttcatgacatagaatccctgtccaagatggtggacccatctatacgtggacaatgttctgagaaagcattgtcacgtttcgctgacataatcagccgctgtatccagcagccagaattcaggccaccaatgtctgaaattgtacaagacctagctagacttgtaaatgccaccggtgaggaatcagagtaacccccaaaaaaagcatggagccatggaaggcatacaatacaaacgtcgcgaccaaacatgatattatatatagcgacagtggcggagcctccgccaagcgccaaggcccggcctgatcgggcacgtgtccaggcttccgccgaggaacacttgggtgggctctcgatcggcctagcacacggatgtttggatgggtcaggcagtggtgtcgatttcaggccggctccgccactgtactgtatagcaaggtgtatatatagcaagaccccggattcttgtaataatagtcagggattcgttaaatttgttactctaaagctagtcatttacttgttcgcccg

SEQ ID NO: 5025 - DNA, 1648 bp, Zea Mays
ctgagccagcgcttttttttttctcgagcggtgccacacggccacattgccacaagcccacaaccagacggggagagagcgaaaaacggggcgaccgagctagctcgccgtcgtttccggctcccctccctcctcccataccgttgccctacccccactaccgcgccccgcggccccgccgggtcctcctccctccgctcgctcggaaccagaggcctcgcgacgtctcgcgccatgcgggctcgcgatctgctagggtttcctccggcgggcgcggccatgtcgtcggcggcggcgctcctcctcctccccctcctcaccgttgctggccaggggccggtctgccagaggccgcccgtcgccgccgtcatcctgcagcaggcgtccacctgtcgagcggtggacgccccagggctccggggtcaccgcgccggcttcgtggagggggatgatggggccctgcaaaaggcagtagcacttgtgctgcagaacagggaggattttgtcgctattcttttttatgcttcgtggtgccctttttctaaaattttcaggacagattttcaaaaactgtcatcctttttcccaacaattgctcatttttcttttgaagaatctaatatcaaaccaaggtgcgtctttctaaaacagataaacactgctgttagatttaactatatttagtatgcaactcaaacttcaatatctgaattgcagagtattgtcaaggtatggagttcgtgcattcccgacgattttccttctgaactctacagtgcgtgtgcgttatcatggatctcgggccatgaattccgttgctatgttctataaagatgttacaggcctgaatcctgtgtcattggacgctacatgcctggagagaatggaggattcagttactatagttgatcatggcaaaaaggctgaaaaggatgattctctgttatcgtgggcaaggtcaccagaccgattacttcatcaagatacatgtcttgcattggctagctcctttgtcctcttgaggttgcttcatttccttcttcctaagcttaatgcatgtatgaagcaagcctggaggatgcgactgtatgaattgaataggttgtttcctagcttgtcttgaggaaggcaatatggaactagaaaacttgaactgactctcgaataaggcagcatacttataagaagtgatgcagacaacaaaccggatcactaggaagccagtgtcaagttaatccacattggtgattcagtttgagtagtgaaaatataccgctaccaactctcaatatcctgaagttcaggaggtctcatcaatggatgcactgtattacatccatgtcgaactcattctgtgtcaactatgtttggtctttccttgggagatatcttgatgcaagcataagtgacattcatggaaatgctgacttaatagtaagtcatctgtaccactgtaccattagccatctcagtctgagttcagatttgtatcttggtgttactcataaacacaaaaggcatgtattataagaaagattgttcattcattttagtcataggcatgattgatatgtttgtgatccaataaattccagtgaagtctgtaccttttgttttcccattctgttggttgtatagtaaaatttgc

SEQ ID NO: 5026 - DNA, 1040 bp, Zea Mays
aaattccccagcgtctcctctcctctcctctccttccccggcaccgtgctctgttgtgctgtttggttccgtcgcgtcgcgtcccgtgctcagatcagatctctcctctcccccgaccccgagtggagtgcctccctccccccctcccgctccagactagcggagagagatctcggcaccgccgttcgtcgccatggcggcggccaacgctcccatcgccatgcgcgaggcgctcacgctcaccagcctgggcatcgcgccgcagttcgtcaccttcacccacgtcaccatggagtcggagaagtacatctgcgtccgcgagacctccccgcaaaacagtgtcgtcatcatcgacatggccatgcccatgcagccgctccgacggcccatcaccgccgactccgccctcatgaaccccaacaccaggatcctcgccctgaaagcccaaatacctggaacaacacaggatcaccttcaaatatttaacattgaggctaagactaagatcaagtctcaccagatgccggagcaggtcgtattctggaaatggatcactcccaaactgttgggtttggtgacacaaacatcagtttaccactggtcgattgaaggtgattctgagcccaccaagatgtttgataggacggctaatctggcaaacaatcagatcatcaactatcgatgtgacccagcggagaagtggcttgtacttattggaattgcacctggagccccagagggaaacctggtttttctaagaaacaagccgacctcttcttccccccagatttccaggatgattttcctgtagctatgcaggtttcacaaaagtatgggcttatctatgtaattactaagcttggccttttgtttgtatatgacttggaaactgctgcggcagtttacagaaatagaatcagtccagaccctatattcttgacggcagaatcttcctctactggtggattttatgccatcaacagaagggggcaggttttacatgccacagttaatgatgcaactgttgtaccttttgtcag

SEQ ID NO: 5027 - DNA, 1827 bp, Zea Mays
cgcaactcacaggctcgactcttccagcctccgactccgcatccgcctccccggcggagcctctcgccaccgcacagcctagatccgcccagaggagctcaatctccccctcgaggccccaaaacgagatcctctgcattcctgcataggcgcctcatcgttcctggcctagcacagatgcagacggctgcttcgtttgggtatgcggcgggacggggacctcggaagcgagctacaacgacgtccccccccccccccccccccccccccccccccgcaccgatcgccgccgtggccctggctcgggtggccaccaggagatctgtcctccctccctcaaacgacgcctccatctcctcgcatttccttctccttttccccttttcaaacattcaggagccgaaggtgccagccaccctttgctcggcgcgtgtcccggcgtagctcacgacgcatcctcacctgcctgcaccgagccaaggagagtcgttggctatgcgcgttagctccgctgctgggtggtcaccatcgtccgagcacaacacagtgggatgcagacagattgaggattctttgtttgtagaacgccatggatgagaggctgctcatgtttgatgtggttgatgacgtgtggacagtgctaacatgattgttcgagttggatgcacacgagagccttaggtggtttggacatgtcttcgagccaagagttgaaatcttgatgggattatgttggggcagatcttaactggaatacatatacggaacccggttggcagcagaggtagtgccccggtgcgccgcgcgcaggggcacgcgacagctacaaatattcggtggaggactggcttaggaaccttggatgcaaggtgattggaaggaaatttgttgaggtggagatggactagaccaaggctaatatcaaggggtacctgtgagggaacaggactacactggatttggctcccgtctcaagagtaaagtgtgtttcagcaacctgctagccggccaccaaaggaccaattatctatttttgttgatgttaatatattaaaatctggttatagtaaatatacataatatgctgtcatctagatcaatacacatatatgcctttgagacataaatatgtgtcatgattcaactttcatgaatagtttttctcaacgactcgcatactaatgatattagcaaattatttaaaataataaccatgatatacaacttatataaattattatgttatatttgtacattttagctaaactatttgacatctaatataattgtaagttcataagcgtagatatattttctagatatgagcttagcggtaggtaattttgcttatctattaccgtaataagcttgatgactgaggtagacatctgatttatatttaatctaactgtttctctatgtgaatggatacatatattaactcaggtagcactacaactagcaatgtatggatgaattgaaggaagtaaaagaaggcagacaatcttatagaaactctgcatattgaaaccgccatgattggcaaagaagttggatgcatctttgcattggtgtgttcttatcaccaagcagtaatgtgaagcaagttcatttgttgactaagaacggatcaacacaaattagtgaagattttgttcacaagagatgcaggatggagaggtggtagatttcaatatggctttgatactattttttccacttacaatattttgtatggaacaagaaaaaacaatgtatgtggttactattgtaattcaagaatttatttctaaataataaatatatttgtttatattttgtttatga

SEQ ID NO: 5028 - DNA, 2195 bp, Zea Mays
ctctcaacaagtttgttcgagccgattcgttccaacttccaagggttttagcggcagcggcagccggagatgggggagcgggcgaaggaatggctcctcgcagcaggcgccggcgccgccgtcggcgcgctctctgccgccgctgtcatcgatcttctctcgagatccaagcggagagagaggtacgcgcgggacctgctggagtccaatggaatgacgactgggaacactcggtccagcaagcacctgggctctcttggtagctcggctcttctctctgatgaagtggtctctgaacagcttacaaggaatatacaattttttggcatggactctcagaagaaagtgactgaatcctatgttgtggttattggtcttggaggggttggcagtcatgcagcatcaatgctcctgagatctggtgttggcaggttgcttcttgtggattttgatcaggtatcactctcatcactaaatcggcatgctgtggcaaccagagatgacgttggaacttcaaaagcgttgtgcctcaagaagcatttttcaatgatatacccagagtgccaaatagatgcaaaagtgcaattgtatgatgcatcgtctgaggaggaaattctttctggacagcctgactttgttcttgattgcatagataacattgataccaaggtgtcactccttgcagcttgcgtgcgcagaggtttgaaggtactttctgcaatgggggctggagctcgagctgatcccaccagaattcgtgtcgcagatttgagagaatcaagcaatgaccccctctctcgatcggtgaggtacaggctcaagaaagaacatggaattgagggtggaataccagtagtcttttcattggaaaagccaaaggcaaagcttcttccttttcaagcttcaaaagaagaggaaactccatcagattaccagattgtgccaggattcagggttcgcattataccagtattgggaaccatccctgcaatatttggtcaagttatggcctcctatgtggtcactcagcttgctggattagattttcaaactgaaccagttgttaacctggatttggatcattaccgtatacttcatcagcgtcttattgagcatgaggaactgatgtatggcacagccgagcaagttctggtagatgctgaagaggtaatgtacattgtcaaagaattgtggcgtggtcgaagtgctagagaccaaagccaggacactggccggaagatgtggagatctgtgaacgaactaatgcttgttcggtgggacaaatcaaaggctgctggcatctcaaacttaatacttgtcaagttcagtgaggctgacgcccatgaatccaccacactcgaccgaataaaagaacaagaacctgaattctactctatggtttcactttcgacgcgtgtcgaactagactgccacggacgcgaagatctcaaccacttgccacagcgcacatggtatggagcgagcggacccagagccacctctccagcttcgccccaggcccagcgtgctcgctgcctcgctctgccggagcctccctccaccatggtccacgtggccacagcaagaagaagaatccccatgcggcggcggtggcgaccgcattggaggaagcagggatgtgcggcgcgaggccaaggccatggcacgcctacgagatggcctagattctcgtgggacccacgatgccgcgcgcgcagtagcatcgcaccccgccacaggaaacaggatgctgcagggaggcgcccgaagcgccgccacggggacgaggacaacccatccccgaccccgacggcgttgtgctggcagacaccgccatcgtgggcgaggacgaccgctgaggtggaggcggcggaggagaagaggctgaggatcagcccgaggccggactcgtctgccgctgcggcggcggagcgcgcgccaggcgaaggcggccgagatggaggcagccgccagcaaccaccgccaagagctggcgtctttggagcccaagcctcgtggcaccacaccaactactttcccatcaccgatgacccgctcgagcccaccgccgccgaggagggcgaggacgccgatgacaatgagggcaacacggaggagtggaggacattgtctagcgcctccgactaagctagactgcaacttttaaaatatatgtgagagaatgaagcttcttc

SEQ ID NO: 5029 - DNA, 2143 bp, Zea Mays
cgaagcaaaccgaaacaaacaaacccaagtgcgcgtccgagcctcgaggcggagaagaaaccggagcgagatatttgcatttcagtccctgcgaagagaaaaccgtcgcgtcctcgccgcgccgctcgcgtcgggatcccgccgccgccctactcggtcgaccatggggacggcgacgatggcgactgcggtgggcgcggccatgctgctctacttcgtgctgagccggcggctggcgggcgaggacgtctcagcccgcggcggtggagggggaggagtcgggtctggaaagcggcggagggggcgcgcgctgcggcggccggtgcagccgccggcgacgtggatcgaggcggtgggcacgctcgcggaaacgctgcgtttcacctactcggagacgctcggcaagtggcccatcggggacctcgccttcggaatcaagtacctcatgcgccgacagggcaatttacatgttgccagtgtatatgctggaagtgattgcattgaattgaaaggacctcaaatcatggaagagctgattgttctacggcggttgattgacctgtgctttcttttctctaagaagccatttccagtgtttcgggaattagctggattttcacaggaggatgttcttattgaggaaccaaaggcggggattttgaagcctgcccatacaattatacgtgatgagtgcaccaaatccttccttgttttgatccgagggactcatagcatgaaagatactctgactgctgctactggggctgtagtgccatttcacctctcacttttggatgaaggcgatgtgagcaaattagtgttaggttatgcacactgtgggatggttgcagcagcccgctggattgcaagaggtgtaacaccatgcctccgtgaagcagtcagacaatgcccagagtaccaaatcaaggttgtgatgaaacaagcacagaatgtcgcacaggctgttgctagaagtcggtctgcattttcctcatggtcatgcatgggtgcacgtcgtcgaggtgtaggtgtagttactgcatgttctaaagatgatatgagagtggaaacccatgtaacatcaacagttgagtcaaagtctgtccttgtagaacattgtggcgccaagaccatagaagaactgcagtatactgcagctagtgtttctgttcatgatgcagcagaggaagaagaggctcttttgagtgaacatgaaacctccagggagaatgccgaagaagaaacaacagagggtgagttgtggtatgagtttgagaaggacttggatcgacaagctgaaatggaggcacgaacaagggaggaagaggcagctgcagccaaagaaataatggaagaggaaagtgctgtgctaaaaggtgtagatgacaggcagtccttcacaccagatagcttggagaggcagcaattctacccccctggtagaatcatgcacatggttgcaatgcctcccacagacgctgacccagatgatccggttgctgctgacgagtgctgtgttggaatatatgagacccctagagatctttacagcaagattcgactctcaaataccatgatcaatgaccactacatgccaatgtataagaaaatgatggaaacattgattgagaagttcgcgagggatgaggactgctattgtacaggttctactgcagaataacatggaagcatgaatgacctatgtacatcgataactgtacaatactccgtgttagctgttattagcctatctgacattgcaatatacaagaggtgatgtcctcctgacccgtgaaaaaaggattttagttagggtcatgtgagtgtgtgatgtgtaaatgtaaaagaaaccagaatcagcaatttaataccttttccagtcatatttgcttgtactttacaagcatgtgatgcttggatcttgaaatctaaatgtttacaaggcattttaaagtcaggcgcttagcaagaagagcgttttgacattgttcatacagaccaatgggcaatgactacagggaactaaaacgataagagttgcaatggcgcactggtgcttgtttagctagccatactatttgatacttgacatggctgttaagaactgaaatgtaaagtgaaagtagagaacggaagaaattgt

SEQ ID NO: 5030 - DNA, 2477 bp, Zea Mays
aacaatggttgcagatgcagacgcggcgaagcaaaccgaaacaaacaaacccaagtgcgcgtccgagcctcgaggcggagaagaaaccggagcgagatatttgcatttcagtccctgcgaagagaaaaccgtcgcgtcctcgccgcgccgctcgcgtcgggatcccgccgccgccctactcggtcgaccatggggacggcgacgatggcgactgcggtgggcgcggccatgctgctctacttcgtgctgagccggcggctggcgggcgaggacgtctcagcccgcggcggtggagggggaggagtcgggtctggaaagcggcggagggggcgcgcgctgcggcggccggtgcagccgccggcgacgtggatcgaggcggtgggcacgctcgcggaaacgctgcgtttcacctactcggagacgctcggcaagtggcccatcggggacctcgccttcggaatcaagtacctcatgcgccgacagggcaatttacatgttgccagtgtatatgctggaagtgattgcattgaattgaaaggacctcaaatcatggaagagctgattgttctacggcggttgattgacctgtgctttcttttctctaagaagccatttccagtgtttcgggaattagctggattttcacaggaggatgttcttattgaggaaccaaaggcggggattttgaagcctgcccatacaattatacgtgatgagtgcaccaaatccttccttgttttgatccgagggactcatagcatgaaagatactctgactgctgctactggggctgtagtgccatttcacctctcacttttggatgaaggcgatgtgagcaaattagtgttaggttatgcacactgtgggatggttgcagcagcccgctggattgcaagaggtgtaacaccatgcctccgtgaagcagtcagacaatgcccagagtaccaaatcaagattgttggccattcattgggtggtggtactgctgcattgctaacctacatccttagagaacacaaagagttttcttcaacaacttgtgttgcatttgcacctgcttcttgcatgacatgggaattagcagaatcaggcaagcattttgtgacaacggttgtcaatggagctgatctggttcccactgtatcaactgcatctattgatgatctccgttctgaggaactcgcctgcagtctttttctggtgcgagagagagggttgcaggtgctggagcatttctacgtcctgtttcaaacaaaacccaggttgtgatgaaacaagcacagaatgtcgcacaggctgttgctagaagtcggtctgcattttcctcatggtcatgcatgggtgcacgtcgtcgaggtgtaggtgtagttactgcatgttctaaagatgatatgagagtggaaacccatgtaacatcaacagttgagtcaaagtctgtccttgtagaacattgtggcgccaagaccatagaagaactgcagtatactgcagctagtgtttctgttcatgatgcagcagaggaagaagaggctcttttgagtgaacatgaaacctccagggagaatgccgaagaagaaacaacagagggtgagttgtggtatgagtttgagaaggacttggatcgacaagctgaaatggaggcacgaacaagggaggaagaggcagctgcagccaaagaaataatggaagaggaaagtgctgtgctaaaaggtgtagatgacaggcagtccttcacaccagatagcttggagaggcagcaattctacccccctggtagaatcatgcacatggttgcaatgcctcccacagacgctgacccagatgatccggttgctgctgacgagtgctgtgttggaatatatgagacccctagagatctttacagcaagattcgactctcaaataccatgatcaatgaccactacatgccaatgtataagaaaatgatggaaacattgattgagaagttcgcgagggatgaggactgctattgtacaggttctactgcagaataacatggaagcatgaatgacctatgtacatcgataactgtacaatactccgtgttagctgttattagcctatctgacattgcaatatacaagaggtgatgtcctcctgacccgtgaaaaaaggattttagttagggtcatgtgagtgtgtgatgtgtaaatgtaaaagaaaccagaatcagcaatttaataccttttccagtcatatttgcttgtactttacaagcatgtgatgcttggatcttgaaatctaaatgtttacaaggcattttaaagtcaggcgcttagcaagaagagcgttttgacattgttcatacagaccaatgggcaatgactacagggaactaaaacgataagagttgcaatggcgcactggtgcttgtttagctagccatactatttgatacttgacatggctgttaagaactgaaatgtaaagtgaaagtagagaacggaagaaattgt

SEQ ID NO: 5031 - DNA, 2014 bp, Zea Mays
cttgattttcgttgcttagctgcttttcatggggaactgacaagacaagaagacttgatgctatgaatagagtgatatatgaagtattcccagaaccaaatcgtcaattgttacagaggattctcaaaatgatgcagattgttggatcacacaaagctgaaaataggatgtctccgtctgctttggcagcttgcatggcaccgcttcttcttcgtcctcttcttcttggtgaatgtgaaattgatagtgaattcaatatggctggggatggttcattccagttgcttcaagctgctgctgctgccaaccatgctcaagctattgttattattatgcttgaggaatatgatcagatatttgatgatattgaagacggttcgtactcttcagatgcttatactgagtctgacattgacaaggaatattcgacagacaatgacatccctgaagacgatggttcctatggttgtggtgaagatgttgaagaagatttaaatgatgatactgaacactcttctggcattaggattgataatgcagatgataaggttaataacaataaatcaagcactacatgtgatgacaatgataaagttgttcagcctcctgctgcaagggccatgagaatagaacatgttcattcacagatcatatacaaaaaccaaatgctgattcatcatatttgagtgcaaagtttacagagaaaactggcggctcaacttatgaaagcaaaaggaactcatgggggcgtacttcagcaagaaaaggcttgtcaacagaggaggctggctgttgcagtgataatgacgaggctcatattgcgaagcttgaaaacaagaagacccatctccaatctaaacttacggaggaggtaaaagaaaacacagtcctccaggcaaatttagaaaggcgaaaagcagcactacatgagcgtcgtgtagcacttgaaaaagaagtggaaaatttacgagaccagctgcagaaggagagaaatttgagggcttcattggagtctgggttaatgaatatgcgaagaggacaagtgtccttcccatcaacgatagacaccaagactaaagctgatcttgaggaagttgctgctgctgaagctgatattatgaacttgaagcaaaaggtttctgatcttcgggggcaactcaactaccaagtccagttgagttccacctcgttatgtgaatcatgcaacaagcgggcaataaatgcagacaagcttgtcgaaggtgaacaaaatgctggcctttctccacagattggctcctcagtcgaagcaccaccaattcaagggtctaattctgtagttcctgacatgttatgggctacaaaccaaatggttcagaagatgttgtattcaaagggtgagattgcaaaggacggccaagatggatcacttacatcaaaatggaactttgcacagagaccacactcaaatagtccagttatgagcagggttcaaggttccaatgcctattcaagtactaaaaacgaggaatctggagccgcaccgtcctctgcattagccaagctgactactcgactcaactttttgaaagaaagaagggccttgctcgccagtgagatgcaaaacttagatctgggtcgctcccaggcccagaggcacacggctcctccgaaaactgagactccgaccgacaagtagaatcgttttattgttaggctacacaagcccacaaaagcattctgccatcggggtgtgacaagtccagctgccacgatcgatgctcatgtaggatcgcaggcagtgaagaaaagttcgattggacaatggataggctacctacctatagagtaacttgatttgtaaattgcagaggtaatcgtgtcttcgccatgatgattcatatgtcaagttttgtagcgacaccgacgaccaacctggtttgtactattatctccaattacacaataccctgaatactctggaacaaaaagccaaatggcgcttgcaaataatctgtcggtctgtgtggtactc

SEQ ID NO: 5032 - DNA, 3349 bp, Zea Mays
cagtgaggcgggtggttaggctacgtatttccctgggatcgtcggggccacggaatttcccggagaaagtgcgggcgtgagggacgagcggacgagcctcagcggcgagagaaaatagaacggggagaccggagcggcggcgggggaggaggagacggaaggaggggatcgagaggggcgcgcgcgaacagaagagagaaagaggaggtggcaggtttggttccgcgcgcgccgacgtgagattccgggcccccgtgccagcaggttcaaataatggattaaaaacttaagctgacacttatggcggatgctcaattcaacccagtgaatccgaagctgacccatgaagaactaaaataagctttatgcttcagtgtcttctgaaatcatcctgaggtattgataagtcagcaacctagagcagaaaatgtcagctccggaattcaggacttcttaccagcaagtatcatcatcacagccccctgagaatgtcggtcaactcaaggtctgccgatgtgggtcgggagactctaactttcagatcactaataaatctgatgctggtgaaaattcaccgacaacttgtccaagctgtcaggttcttaagagtggaaatttattgctctcatctaaagggattggatggacagtatggaaaaaacggtggtttattcttacaaggacatcattagtgttcttcaggagcgatcctagtgtcccccctcccagaggaagtgaaccaattgttacacttggtggaattgacttgaataacagtgcaagtatgatagtcaaagaagaaaggaaagttataacagtcatctttcctgatggccgtgatggacgcacttttacccttaagtgactactgactagtggggcaacaggtgcgtcagtaggattggggttgcaatgcagaaactatagaggacctaaatgaatggagaagtgcattggagaatgctctggctcaggcacccagtgttgcgaatacagcggggcaacatctggcagtcagcactgatataacagaacctgttgaagctgctgttgaacaattggaggataagtctgtaattggcagaccagcagaatttgcacttgtcgatgctgatggcactacagcattcctggagaaggccttaaagttcatcgaagactatggtgtcaaggttgaaggaattctccgtcagtctgctgatgttgaagaagtcaaacgcagggttcaggattacgaaaaggggaagaatgagttctccccagaagaggatgcacatgttatcggtgactgtattaagtgcattcttcgagagatgccatcttccccaattccggcaccatgttgcactgccctggttagagcttaccgaactgacaagacaagaagacttgatgctatgaatagagtgatatatgaagtattcccagaaccaaatcgtcaattgttacagaggattctcaaaatgatgcagattgttggatcacacaaagctgaaaataggatgtctccgtctgctttggcagcttgcatggcaccgcttcttcttcgtcctcttcttcttggtgaatgtgaaattgatagtgaattcaatatggctggggatggttcattccagttgcttcaagctgctgctgctgccaaccatgctcaagctattgttattattatgcttgaggaatatgatcagatatttgatgatattgaagacggttcgtactcttcagatgcttatactgagtctgacattgacaaggaatattcgacagacaatgacatccctgaagacgatggttcctatggttgtggtgaagatgttgaagaagatttaaatgatgatactgaacactcttctggcattaggattgataatgcagatgataaggttaataacaataaatcaagcactacatgtgatgacaatgataaagttgttcagcctcctgctgcaagggccatgagaatagaacatgttcattcacagatcatatacaaaaaccaaatgctgattcatcatatttgagtgcaaagtttacagagaaaactggcggctcaacttatgaaagcaaaaggaactcatgggggcgtacttcagcaagaaaaggcttgtcaacagaggaggctggctgttgcagtgataatgacgaggctcatattgcgaagcttgaaaacaagaagacccatctccaatctaaacttacggaggaggtaaaagaaaacacagtcctccaggcaaatttagaaaggcgaaaagcagcactacatgagcgtcgtgtagcacttgaaaaagaagtggaaaatttacgagaccagctgcagaaggagagaaatttgagggcttcattggagtctgggttaatgaatatgcgaagaggacaagtgtccttcccatcaacgatagacaccaagactaaagctgatcttgaggaagttgctgctgctgaagctgatattatgaacttgaagcaaaaggtttctgatcttcgggggcaactcaactaccaagtccagttgagttccacctcgttatgtgaatcatgcaacaagcgggcaataaatgcagacaagcttgtcgaaggtgaacaaaatgctggcctttctccacagattggctcctcagtcgaagcaccaccaattcaagggtctaattctgtagttcctgacatgttatgggctacaaaccaaatggttcagaagatgttgtattcaaagggtgagattgcaaaggacggccaagatggatcacttacatcaaaatggaactttgcacagagaccacactcaaatagtccagttatgagcagggttcaaggttccaatgcctattcaagtactaaaaacgaggaatctggagccgcaccgtcctctgcattagccaagctgactactcgactcaactttttgaaagaaagaagggccttgctcgccagtgagatgcaaaacttagatctgggtcgctcccaggcccagaggcacacggctcctccgaaaactgagactccgaccgacaagtagaatcgttttattgttaggctacacaagcccacaaaagcattctgccatcggggtgtgacaagtccagctgccacgatcgatgctcatgtaggatcgcaggcagtgaagaaaagttcgattggacaatggataggctacctacctatagagtaacttgatttgtaaattgcagaggtaatcgtgtcttcgccatgatgattcatatgtcaagttttgtagcgacaccgacgaccaacctggtttgtactattatctccaattacacaataccctgaatactctggaacaaaaagccaaatggcgcttgcaaataatctgtcggtctgtgtggtactc

SEQ ID NO: 5033 - DNA, 2322 bp, Zea Mays
atggcaaggaggtcgaagcacctggggcagggcgtggtggagacgaacctcccgtattgcttctttaggttgggcatgtcgtggcccctagaattcgacgaccaacaatcccggggaatgggagggcgggggtggccgcggaccatcaccacttccttggatgtagcacaggatctgggaggtgaatggagagcacgagatctgggaggtgaaggggatcgcgggggcaatcccgttgattgtgggggcgaccgcggacgtggggatgagcggaggatgtcgcgggtgggagtgggaggcagaaccgtggctgctcgtccgccagaaccaagcaggtgtaaacatgcttcatcattcaaatagccggaaccaaaggaacaggggatcaagaatcaaaactctactccaagcgaccttgctttcaggtgttgtcttttggctcctgtatcaggtgaagcattcctatgataagaaaaacgagtacttggatgatgctgaggaccagcttacccataatgatagaagcatattccaggcgaggaaacaaaaggcaggtagttacagtgatagcaacgtccaaatggttgtcgacaattctgatgtaacaactaaaccagaggaaggtgatgtagatcatcattctgatacttttgatcataacgagaagactgtagaaactgtgttcgataaagatagtactaacctgcatgaagatgacaagagaaacactgagagttcagaagcggaaggacaagtcaacagtggagatagtaatacagaagctaataataataagaatgaagatgaaaccaccagtcttgtagaaggacgcaagcatgatactgaatccaactctgctgctgagagtaaaagtgaagtcaattcaactggagatgaattgtcccaaaacaatcatgcacaagaggaaaacactagggaggcaagtggaatgtctcatgatgaagtagcgcatggtgacgaatcaaccagtgcaagtggaacttggaatggatcagatggagaaggtgagaaaaaggaggcagttgatactcaaactggttctgaaacccttcctgacgatgccaagaccgaagcaactgatgaccgtggtactaacagcctttctgacgaaacagggaacataccatcagttcatactgataattcacaaaatgatgccagtgaaaaccaaggagatgcaacatccactacctcagattcatctgagcatggcatcagtgaggctgtccatattgaaactggattggaacatggaagtgcaacaacatcatctgttactggatctggtgatgacagggataactcatctgatagctcctctgcaggaaaaaatacggagactctatctggtgatgataagaccaactccagcagcactccgcatgcggctccggatccgtattttgcggagtctagcacactattcatcagtccagcaggctccgtatccggctccgtaaaacgcacggcgtgtacccagactccccatttccacgctttctctctcctctccgcagctctctcgcgggcgcgcgtgcctgctggcgggccccaggtgtcatagactgcatgcggagtgggatggggagtgttgctggaaacggagccggatacggagaggagagagaatgtgtcggccgcgcgttttagggatacggagtcgcacactgctggagttggtctaagggcatggaaacaggtacaaccactgaagcgtcatattccaaagaagagaactctgagaacagcagtgtctcaactgaagcagagaactcccgaggagattcttccattggagtgaatggttcttcagaaacgtctaccaatggtgagcaggtggatcccaagactgaaactagcacatccaccagtaacgtgcacaatgaatctcaaggggctgatggcagttctggatcaaataactcaattggtaacggccctgaacaaaccggtaaaactgaaaggcagtgataccactatctagacacgaacattgttttagtataaagatttgtttcctggagattgaagaggctagtactgaaccaagaaaaactgttcacattgtggcttatggtgattttagttgatactgctgaagtacaattgtgcacatcgcaagatcggttgtctgctatgcttattgcttatgccatgatttctcgtcaagttgtatcagaacgagtcattatagctgtacggttattaatctctactagtacaatgcccgtcccttctgttgcaatgcaaggacacacaaattattcaaatataatattagtcaaattattcaaatataat

SEQ ID NO: 5034 - DNA, 1011 bp, Zea Mays
cacgtccagattgggaattccatcacgcctcgtcctctccgtcccgaccagaatcatcgcttcttcctgctccggcgatatccgccgccgcctgcggtccggccgagatggggagcacttcctctatgctcacccaatacgatatcgaggaggtccaggaccattgtaaccacgcatgagatcgtatcgctgtaccaccgcttctgccagctcgaccgtaacggtggtggcttcgtctccgctgacgagttcatgtcggtccctgagttcgccgtaaatcccctctcccagaggctcctgaggatgctggatgggctcaacttcaaggagtttgtagcatttttgtcagcttttagcccccgcacaagcctgcagcaaaagattgaatttattttcagggtttatgatactgactgcaacgggaaggttgcttttgatgacatcttgagcatcttgcgagatctgacaggttcatttatgacagagcaacagagacagaaagtcttgattcatgtgttagaagaagctggatacacaaaagattcacattttacactcccagactttatgaagattattggcaattctgagctcaagatggaggttgaagttcctattgactaaaaacctaacaagcatcatctagttgcttcaggcctgtatcttcatttgtgttaaattaagtagatggtatatttatatccttgcaactcaaatcatgatcagagatgtaattaaggaaacatatgtacctgctatttggaggtttagttggctcgcacttatacacaacgcttgttatacgccgtgatatcttccagataaccttacggatgtaaggttcactacaaatgtgtcaaaaaaaattaaatgatcaaggcattactgaatttagagttgttaatactagatatacattttgtctaggtgcatatacatacagtaagctatatgtatgtagaaaatctaagacaacttataatttggaacggagtctcttggaaaaggtta

SEQ ID NO: 5035 - DNA, 2822 bp, Zea Mays
gaaaaagctcccccggccttccacagcttctcccattccactcggtgctttgcccgaggcccggagaagccttatcgcctcctccttgcacgccgaccgatcgccacaatcccccaccgctcgcctgcctggtgcccgccatgccggagatcaagtgcggcgcggccgagaaggtgaagccggcggcgagcccggaggcggagaagcccgcggacatcgctggcaacatctcctaccacgcgcagtacagcccccacttctcaccgttcgcgttcgggccggagcaggccttctacgccaccgccgagagcgtccgcgaccacctcatccaggaaaaagatgcagctctagggaatggcggcttgggtaggcttgcatcttgctttttggattcaatggcaacattgaatttgcctgcttggggctatggcctgcgttaccgatatggactgttcaaacaacacattgccaaggagggccaggaagaagttgcagaagattggcttgataaattcagcccttgggagattcccaggcatgatgtggtgttccctgtcagattttttggccatgttgagattttgcctgatggctctcggaaattggtcggaggagaagtcctgaaggctttagcatatgatgtgccaatccctggatacaagacaaaaaatgcaatcagtcttcgtctttgggaagcaaaagctactgctgaagatttcaacttatttcaattcaatgatggtcaatatgagtcagctgcccaacttcatgctagggctcaacagatatgtgccgttctttatcccggtgatgctacagaagaaggaaagcttctaaggctgaagcagcagtttttcctttgcagcgcatcacttcaggatatgattgccagatttaaagaaaggaaatctgatagagtttcagggaagtggagtgagttccctactaaagttgctgttcaactgaatgacactcaccctactcttgccatccctgagctaatgaggttacttatggatgaggagggacttggttgggatgaagcttgggacattacatataggacaatttcctacaccaatcatacagttctccccgaagctcttgaaaaatggtcacaaattgtgatgaggaaattacttccccgacacatggaaattattgaggaaattgacaagcggttcaaagaattggtaatctccaaacataaggaaatggagggaaaaatcgattcaatgaaagttttagataattcgaacccccagaagccggtagtgcgcatggcaaatttgtgtgtggtgtcttctcatacggtgaatggagtggctgagttgcatagcaacattttgaagcaagaactatttgcagattatgtctctatatggcctaccaaattccaaaacaaaactaatggaatcacgcctcgaagatggctccggttttgtaaccctgagttgagtgaaatagtcacaaaatggctaaagtcagatcagtggacaagtaatcttgatctgctcactggacttcgcaaatttgcagatgatgaaaagcttcatgctgagtgggcagcagccaagttatcttgcaagaagcgcctggccaaacatgtgttggatgtgacaggtgttacgattgatccaactagcctttttgatatacagattaagcgcatacatgagtacaagagacagctcctaaacatattgggagctgtttacagatacaaaaaattaaagggaatgagtgcagaagagaagcagaaggtcacaccgcgcactgtcatgataggagggaaagcgtttgcaacatacactaatgccaaaagaatagtgaaattggtgaatgatgttggtgctgttgtgaacaatgatcccgaagttaacaaatatctgaaggttgtctttatcccaaattacaatgtatcagtggctgaagtgcttattcctggtagcgaattgtcacagcatattagtactgctggtatggaagcaagtggaacaagcaacatgaaattctctctgaatggttgtgttatcattggcacccttgatggagctaatgttgaaataagagaggaggttggagaagataatttcttccttttcggtgccaaagccgatgaagttgctgggctgaggaaggatagagaaaatggtctgttcaaaccagacccacgttttgaagaagccaagcagtttataaggagtggcgcttttggcagctatgactatgaacctctcttggattcccttgaagggaattctggatttgggcgtggtgattatttccttgttggctatgacttcccaagctacatcgatgcacaggatcgggtggatgcagcctacaaggataagaagaagtggaccaagatgtccatcttgaacacagctgggagtggcaaattcagtagcgatcgcaccatcgcccagtatgccaaggagatatgggacatcaaggctagccctgtcgtgtgaacgagggggttgcgattcaacaccaaacgtagtttcttggggtgctataatagtaaggaagaataatgacccacggtgcttgacgcccacttgcgttgtaggcatggaacgggggcacctagcttgttctacagcgctgtctattttgaattggtgcgactttgttgctcttttttcctcccccttatatcttatgaaacaagatccttttgatctgtgctctgaaataaaataattcagttatgatattcgtcgccataatgtgcttgagaaatggatgtcccttcctccaaggtcagcagtgcccaaactccacaagactgtttgatctaagcatattgatat

SEQ ID NO: 5036 - DNA, 2855 bp, Zea Mays
attccactcggtgctttgcccgaggcccggagaagccttatcgcctcctccttgcacgccgaccgatcgccacaatcccccaccgctcgcctgcctggtgcccgccatgccggagatcaagtgcggcgcggccgagaaggtgaagccggcggcgagcccggaggcggagaagcccgcggacatcgctggcaacatctcctaccacgcgcagtacagcccccacttctcaccgttcgcgttcgggccggagcaggccttctacgccaccgccgagagcgtccgcgaccacctcatccagagatggaacgagacgtacttgcatttccacaagacggatccgaagcagacgtactacctgtccatggagtacctgcagggccgcgcgctcaccaacgccgtcggcaacctcggcatcaccggggcatatgcggaggccgtgaagaagttcggctacgagctcgaggccctcgcggggcaggaaaaagatgcagctctagggaatggcggcttgggtaggcttgcatcttgctttttggattcaatggcaacattgaatttgcctgcttggggctatggcctgcgttaccgatatggactgttcaaacaacacattgccaaggagggccaggaagaagttgcagaagattggcttgataaattcagcccttgggagattcccaggcatgatgtggtgttccctgtcagattttttggccatgttgagattttgcctgatggctctcggaaattggtcggaggagaagtcctgaaggctttagcatatgatgtgccaatccctggatacaagacaaaaaatgcaatcagtcttcgtctttgggaagcaaaagctactgctgaagatttcaacttatttcaattcaatgatggtcaatatgagtcagctgcccaacttcatgctagggctcaacagatatgtgccgttctttatcccggtgatgctacagaagaaggaaagcttctaaggctgaagcagcagtttttcctttgcagcgcatcacttcaggatatgattgccagatttaaagaaaggaaatctgatagagtttcagggaagtggagtgagttccctactaaagttgctgttcaactgaatgacactcaccctactcttgccatccctgagctaatgaggttacttatggatgaggagggacttggttgggatgaagcttgggacattacatataggacaatttcctacaccaatcatacagttctccccgaagctcttgaaaaatggtcacaaattgtgatgaggaaattacttccccgacacatggaaattattgaggaaattgacaagcggttcaaagaattggtaatctccaaacataaggaaatggagggaaaaatcgattcaatgaaagttttagataattcgaacccccagaagccggtagtgcgcatggcaaatttgtgtgtggtgtcttctcatacggtgaatggagtggctgagttgcatagcaacattttgaagcaagaactatttgcagattatgtctctatatggcctaccaaattccaaaacaaaactaatggaatcacgcctcgaagatggctccggttttgtaaccctgagttgagtgaaatagtcacaaaatggctaaagtcagatcagtggacaagtaatcttgatctgctcactggacttcgcaaatttgcagatgatgaaaagcttcatgctgagtgggcagcagccaagttatcttgcaagaagcgcctggccaaacatgtgttggatgtgacagggaatgagtgcagaagagaagcagaaggtcacaccgcgcactgtcatgataggagggaaagcgtttgcaacatacactaatgccaaaagaatagtgaaattggtgaatgatgttggtgctgttgtgaacaatgatcccgaagttaacaaatatctgaaggttgtctttatcccaaattacaatgtatcagtggctgaagtgcttattcctggtagcgaattgtcacagcatattagtactgctggtatggaagcaagtggaacaagcaacatgaaattctctctgaatggttgtgttatcattggcacccttgatggagctaatgttgaaataagagaggaggttggagaagataatttcttccttttcggtgccaaagccgatgaagttgctgggctgaggaaggatagagaaaatggtctgttcaaaccagacccacgttttgaagaagccaagcagtttataaggagtggcgcttttggcagctatgactatgaacctctcttggattcccttgaagggaattctggatttgggcgtggtgattatttccttgttggctatgacttcccaagctacatcgatgcacaggatcgggtggatgcagcctacaaggataagaagaagtggaccaagatgtccatcttgaacacagctgggagtggcaaattcagtagcgatcgcaccatcgcccagtatgccaaggagatatgggacatcaaggctagccctgtcgtgtgaacgagggggttgcgattcaacaccaaacgtagtttcttggggtgctataatagtaaggaagaataatgacccacggtgcttgacgcccacttgcgttgtaggcatggaacgggggcacctagcttgttctacagcgctgtctattttgaattggtgcgactttgttgctcttttttcctcccccttatatcttatgaaacaagatccttttgatctgtgctctgaaataaaataattcagttatgatattcgtcgccataatgtgcttgagaaatggatgtcccttcctccaaggtcagcagtgcccaaactccacaagactgtttgatctaagcatattgatat

SEQ ID NO: 5037 - DNA, 1191 bp, Zea Mays
cagcggccagcaaactgcctccgtcctccctgcgggctgtgccgcctcttcttcgcgtcggcgccgccctcctcccttctcttctgctgctgatggaactggatcctcgcctctacgagaacgtctctgtcagcgacaatgatgtccgaaacatagttctatcttatcttatgcacaactgttttaaagagacggcagaggcattcctatctagcaccgggttgaatttacctgtcgactatagtgtggatgtggataagccaatttttaattttgtgctagaagggaatgcccttaaagccatagagctgacagaagaaatggcacctaacttgctagagaatgatatggatctacattttgatcttcttagtctccacttcattgagctagttcgctccaaaaaattcacagaagctcttgactttggccagaaaaaattgacatcatttcagaaggttaccaagtatattgagaaactagaggactttatggccctcctggcttatgaagagccggagaagtcacctatgtttcatctactaagcccagagcacaggcagaatgttgcagagggcttgaatcgggctgtccttgcacatgctaatcttccagcatattcatcgttggagagggtggtccagcaagcgactgtggttagacaatacctacagcaggaagttggcaaggcctttctgagcaagtaaatgtgcaaatggtcacttcttcagaacagggtaaccacctctccaggccatcatgtacatgtacccttgtggagtgcatacacgatgaagtagtttatacagttgaggtgttgttgacaccacttatacagttgcaatggtgttgtactttgaaaaggagggtgctgtatgctgtctgcttccttgatttacattctgttttacttgtctctctgccttagacatggcgaaagcatgtatgtatgacctgttgagctattctgtgcgttcgttcggtgaactcagttcgagtcggtttgtaattggtcttttttattactaccgccatgtgcagaggctaaaggtccgaactctggatgcgtaagcgtaacgggttattctgtccatggtactcctatttgcgatttccatatataagggactgtgaattcttcatcacttgtagatgttgatataattttttcagaaaaaaaaatgttcagag

SEQ ID NO: 5038 - DNA, 1249 bp, Zea Mays
tcgatccaaaacataaaatacgagggtcaaatcctcctttcgggaattctcgtctcgctcggctcctctgggcccacagcggccagcaaactgcctccgtcctccctgcgggctgtgccgcctcttcttcgcgtcggcgccgccctcctcccttctcttctgctgctgatggaactggatcctcgcctctacgagaacgtctctgtcagcgacaatgatgtccgaaacatagttctatcttatcttatgcacaactgttttaaagagacggcagaggcattcctatctagcaccgggttgaatttacctgtcgactatagtgtggatgtggataagcgtaaagggaatgcccttaaagccatagagctgacagaagaaatggcacctaacttgctagagaatgatatggatctacattttgatcttcttagtctccacttcattgagctagttcgctccaaaaaattcacagaagctcttgactttggccagaaaaaattgacatcatttcagaaggttaccaagtatattgagaaactagaggactttatggccctcctggcttatgaagagccggagaagtcacctatgtttcatctactaagcccagagcacaggcagaatgttgcagagggcttgaatcgggctgtccttgcacatgctaatcttccagcatattcatcgttggagagggtggtccagcaagcgactgtggttagacaatacctacagcaggaagttggcaaggcctttctgagcaagtaaatgtgcaaatggtcacttcttcagaacagggtaaccacctctccaggccatcatgtacatgtacccttgtggagtgcatacacgatgaagtagtttatacagttgaggtgttgttgacaccacttatacagttgcaatggtgttgtactttgaaaaggagggtgctgtatgctgtctgcttccttgatttacattctgttttacttgtctctctgccttagacatggcgaaagcatgtatgtatgacctgttgagctattctgtgcgttcgttcggtgaactcagttcgagtcggtttgtaattggtcttttttattactaccgccatgtgcagaggctaaaggtccgaactctggatgcgtaagcgtaacgggttattctgtccatggtactcctatttgcgatttccatatataagggactgtgaattcttcatcacttgtagatgttgatataattttttcagaaaaaaaaatgttcagag

SEQ ID NO: 5039 - DNA, 1310 bp, Zea Mays
tccaaaacagatgtacattaaccctacataaactactactaggactatgtggatcaacttagggttgccccacaaataaatgtggcagccatgggtgtaggtgagagtgtttattaccactgtactagcagggaaggtggttatgctatgcatacacacagttcaccgacagcccacacctgcagacaccatgtggcccccccttcagttgcccctcccctcatcttttgcctctatagttttatccattgacgcacgcttggtctactgctcttggccccagcacccctgctctccagtcagtgtatgccgccttctatcaaggtggcttggtgactggtgagtgaaaactaggtccagacatattctccactcctttcctctcttactacctacgcagctaaccacatttatcactcactgcagaagcaagtacaggctgggcagtttatattcactcaaaccagcccgttcctcccccacacggccacacacacttcacttcataggcgccccagcagagctcatctctgcctcctgtgtccttctccatgacagagaatctccactccaggaaaatggtacagccaaagaagtttcgtggagtccggcagcgccactggggctcctgggtctctgagatcaggcatcccctccttaagaggagggtctggctgggtacctttgagacggctgaggaggcagcgagagcatatgatgaggctgctgtgctgatgagcggacgcaacgccaagaccaacttcccaatccaaagaagcagcacaggggagcctaccccagctgcgggaagggacgcccgcagcaacttcagcagcggctcctctaccaccaacctgtcccagattctcagtgcgaagctccgcaaatgctgcaaggcgccatcaccgtccctgacctgtctccgccttgaccctgagaagtcccacattggtgtttggcagaagcgtgcaggagcccgtgctgactccaactgggtcatgacagtggagctcaacaaagatgcagcatccactgatgctgcatcacagtccacatcagcaacaactgctccaccagccacgccgatggatgaggaggagaggatcgcactgcaaatgatcgaagagttgctgagcagcagcagcccagcttcaccctcaaacggagatgaccaaggtcgcttcatcatctgaaaagcatggatcaaacagcacaagtcaccatcccagatcagagtttcgctagggatgacttgcatctgcactggagtaggcatgcaatatcccgcagtctcgagattgtgcacaagc

SEQ ID NO: 5040 - DNA, 2085 bp, Zea Mays
tcgccaaaaggaaaatctcgccgtcacgccgtcactctacaggaccagttggctgcatatggaggtcgaggacctcgaggatctctacaacatcgacgcgtcgtacgaccaagacgacccggatgacgctcgaggatccagcgccgacgaggaagaggatgaagaagacgacgaagaggaggaggaggaggagccggagggggcgcggttggtcgcgggcgattgcggaccatccccacgagctagggtttccgagtttgcggcggctgccggcgccgccgtggagcgggcccacacggccaactgccccgtctgtatggacccgtggacctcccaaggtccgcatcgcatcagttgtatcccatgtgggcatgtctatgggagatcttgcctagagaagtggttaacccagcgcgggaaccgaagtgcgacgtgccctcagtgtggcaaaaggtttaaacataaggacatcatcaacctctatgcacaagaggttgctgttcctaatagtgaacttgagaaggaaatttcatacttaaggcgggaaatctgttctctgaagaagatggttgtgcaccatgataaaatgtttgaggagatgatcaagaggcagaatgatggtgttcgctcaaagagacagaaagtggctgagcactcatatgaagccgcaaatctggtggcatctaccccagccacaataagttttagcttacagaacgaattacctgtggctggagctcgagtcatcagcatagacacatctaacaaaataatacttgtttctggaagggcaaatgctataggtgctgaatatgttgttaccaagattagcatgctgtccaaccgtgaagtacgcaaaatccatcttcctcctgaaaccaaagctgttagggatatgtgtatcctgcctggtggctctgctatttttacatcactaggaaggaggctatcacttttcaggctcctggttggtcgtgtgcagtaggtgcatctggttcacatcatatttatgctggattgcagaacgggatggttgtggtatttgatatccgtcaaactgtgaggcccttgcgttgtatggtggggctatctgcaaatccggttcatactctccactctgtcattgataacaacggttccaggaaggttctttcagcttctgctataggtccctgcatgtgggatgctgatagcaaccaaagcaggccgcatttgctaactgggacgggagatgagcgtgtctgcatatctcttgcatgtgccgctccatggagtgaccttttggtggcttccttccggcccagagttgatccatcaggagatgcagttgccgcatcccaagtttatctatcacaaacgcctacacggtctgggcaggggaaaccagggcagcacacccttatcaggaggaggacgggtaacacctgcttcgctgaaggcacgacttgctatgccaacgtgagcgagctgcgcatgtcaaaatcggccatcataccttacggatacggaggccaccagcagaagcacctgttctcctacggagacgagtcgctgcgtggggtccggacctggcaactgccttcgtttgggatgcatgctgacctctgcacccaccgggagcccatccttgatttaaggtacgctgctgaaactgaaggaccaggtgggtaccttggttgcttaagcgaggagaagctgcaggtgttcagagttaattaattgttaggtagcttagctggtcagtgagggagcagcttctttttgacttttggtagctcagctcagctaattgctaggtaacataacatcactgtgaaggtcgtgcttgtttggtgaagctgctgtgtacatacagggcaacagctgaaattgcctagttttggtgctgctggctgtttgtttgtgtcactgactggagtgaagaccatctccagcaattcctcccatatttcactgactagagagagtagcatagaaagtgtacataaatacacaatgcattccagagacgctacgcatgtgtattatacaagttgacaggtacgcaaacacatacatggagtgttcatacgtaatagcatctgg

SEQ ID NO: 5041 - DNA, 2125 bp, Zea Mays
cacgcgccatcgcaattcgccaaaaggaaaatctcgccgtcacgccgtcactctacaggaccagttggctgcatatggaggtcgaggacctcgaggatctctacaacatcgacgcgtcgtacgaccaagacgacccggatgacgctcgaggatccagcgccgacgaggaagaggatgaagaagacgacgaagaggaggaggaggaggagccggagggggcgcggttggtcgcgggcgattgcggaccatccccacgagctagggtttccgagtttgcggcggctgccggcgccgccgtggagcgggcccacacggccaactgccccgtctgtatggacccgtggacctcccaagttgtatcccatgtgggcatgtctatgggagatcttgcctagagaagtggttaacccagcgcgggaaccgaagtgcgacgtgccctcagtgtggcaaaaggtttaaacataaggacatcatcaacctctatgcacaagaggttgctgttcctaatagtgaacttgagaaggaaatttcatacttaaggcgggaaatctgttctctgaagaagatggttgtgcaccatgataaaatgtttgaggagatgatcaagaggcagaatgatggtgttcgctcaaagagacagaaagtggctgagcactcatatgaagccgcaaatctggtggcatctaccccagccacaataagttttagcttacagaacgaattacctgtggctggagctcgagtcatcagcatagacacatctaacaaaataatacttgtttctggaagggcaaatgctataggtgctgaatatgttgttaccaagattagcatgctgtccaaccgtgaagtacgcaaaatccatcttcctcctgaaaccaaagctgttagggatatgtgtatcctgcctggtggctctgctatttttacatcactaggaaggaggctatcacttttcagcatggcaactgacagcattgttcttaactgggatttgccggctcctggttggtcgtgtgcagtaggtgcatctggttcacatcatatttatgctggattgcagaacgggatggttgtggtatttgatatccgtcaaactgtgaggcccttgcgttgtatggtggggctatctgcaaatccggttcatactctccactctgtcattgataacaacggttccaggaaggttctttcagcttctgctataggtccctgcatgtgggatgctgatagcaaccaaagcaggccgcatttgctaactgggacgggagatgagcgtgtctgcatatctcttgcatgtgccgctccatggagtgaccttttggtggcttccttccggcccagagttgatccatcaggagatgcagttgccgcatcccaagtttatctatcacaaacgcctacacggtctgggcaggggaaaccagggcagcacacccttatcaggaggaggacgggtaacacctgcttcgctgaaggcacgacttgctatgccaacgtgagcgagctgcgcatgtcaaaatcggccatcataccttacggatacggaggccaccagcagaagcacctgttctcctacggagacgagtcgctgcgtggggtccggacctggcaactgccttcgtttgggatgcatgctgacctctgcacccaccgggagcccatccttgatttaaggtacgctgctgaaactgaaggaccaggtgggtaccttggttgcttaagcgaggagaagctgcaggtgttcagagttaattaattgttaggtagcttagctggtcagtgagggagcagcttctttttgacttttggtagctcagctcagctaattgctaggtaacataacatcactgtgaaggtcgtgcttgtttggtgaagctgctgtgtacatacagggcaacagctgaaattgcctagttttggtgctgctggctgtttgtttgtgtcactgactggagtgaagaccatctccagcaattcctcccatatttcactgactagagagagtagcatagaaagtgtacataaatacacaatgcattccagagacgctacgcatgtgtattatacaagttgacaggtacgcaaacacatacatggagtgttcatacgtaatagcatctgg

SEQ ID NO: 5042 - DNA, 2573 bp, Zea Mays
cacgccggcccaaaatgccccgccgcctagctacgacctacgccggccgcatcgccgccgcgacgccgtccccctcgggcccttccatcaccgtcaccgtctcgccgacaccggcccccacccctcttgacacgcgcggatattccctaccgcgccgccacctcatctgcgccgttgcccgaatcctccgctccccggtgtcacacaccccgctgcttgacctcgatgactacctccgctctctccgcctcactctcaccaccgcggaggcttctgaggtcatgaaggcgctcgcccccgacacctctctcgcgctcagcttcttccgcttcgccgccacctccctccccggcttccggcacgatgccttctcctataaccgcatcctggtcctcctcttcagcaaccgcgccgatcccgccgaggccatgcggctcatcgcggagatggagcgcgacggcgtgcccggcaacatctccaccgtgaatttgctggtcgggatgggcgtggaggtggggaggtgcctggacctggcaagtaagtgggggctcaggctgaacgggtacacctacaagtgccttgtgcaggcgcatctgaggagtcgggaggtgtggaaggggttcgaggtatatgagaagatgcggaggaagggctacaagctggacatatttgcatataacatgctgcttaatgcgcttgccaaggctggaatggttgaccaagcttaccaagtctttgaagatatgaaacaaaactactgtgatccagatgcatacacatacactatactaattagaatgtctggaaaggctgggaagaccactaaatttgtctcattgttggaggaaatggtgtccgaaggatgtgttcttaatctgattgcttataatactgttattgaggctcttgggggacaactccacaggttgaatgagattctagatatttgtagtggatgtctgaataggccagtttattcttatttgatcaaggcactctgcaaatctggtcatgcaagtgaggctcatagtgtattctgccgtatgtggaattcccatgaaaaaggagaccggtatgcttttgtatcaatgcttgaggcactatgcaatgcagaaaagacaacagaggctattgatctactgcatatgatgcctgaaaaggggattactacagatgttggaatgtataatatgatattttctgctcttgggaagctgaagcaggtgtctttcatgagcagcctctatgatacgatgagagccaatggtgttgttcctgatgttttcacgtacaatattatgatttcaagttttggtagggttggcttagttgataaggcatctgaactttttgaggaaatggaggatggcagttgcaagcctgatgtcgtcacctataattctatgataaattgtcttgggaaaaatggagatctcgatgaagcccacatgcttttcaaagatatgcaagagaaaggatatgatcctgatgtcttcacttacagcatattgattgagtgctttgggaaatccaataaggttgatatggcatgcagcttgtttgatgagatggttgcacaggggtgcattcctaatattgtaacctataacattttactagactgtttagagagacgagggaagacaacagaagctcataaattttatgaaactctgaagcaacagggattgactccagactcgataacttactcaatacttgagagattggaaagtagatctcaacgaacagtaagaatacgtaaaccaagccggaatacaggctgggttataagtccagtgtgataacctaccctggatctttcagttgcatacctccggtgtagtggggctgaggacaaatagtctgtatgcattatgcaaacttgcaagtatattgctggtcaataatgtcagcaagtgactactcaattaccgtgaaaacaatatagtagtcctgactcatcagaattatatgtatataatagtattgcatggctgctgatatttgatatcttggttctgaacaattcgtggaagatggacatcttgagaacaggtaaaaacatctctactttgtcatcgtattagaggaatgatttcaagatgtgaggatctatctttggaagctcagagttagtacctagattcatatttgttaaaaccagatcaggccagcagtttagctcggaaaagatggaaccagagaaccagttagttctggctgcagttttggtctttggatcattttttatgcatctaaaaaactaaggctggtgtgggtcatagatggaaggttgtgtacttatgtgcaccgcggaagggaattatgaagaagacacgttccattttctctttgtgcaacatcgctgtagccttggcagttcctttacttatgtgaatgtgaatgtatgtgagaactgttcctgttcagatgaaacataaccttctccttaatctgccaacaagctttagcatagcaaagtactcttttattaaatcttttgatgtatacaattgtacattagcctaggaaaaagttctccttgaatagtggaaaggagttgtgcgatc

SEQ ID NO: 5043 - DNA, 2685 bp, Zea Mays
agccgcgtccccgcccgcgtccggtcctccgccgccaccactcacctcccttctgacccaaccggcgccctccccctcggccctcgcgttccacgaccacgagccgtgctctcgcgtgcgcgtcgcgtcgcactcgcatcacgaattcacgattcagccagcaacgcatcaccccttcccacccccacagggaccaggcctccaccacccaccttacccaggccataccccccgccccgaccgggggtctcctatcctcctgccctcaccgcgggtgcccgcaccgcgcggcgacgcctccccttcaaatctcccaggagctaggggcctcggccaccaccaccgcaccgcaccgtctcggacgcggctgcagctccgagcattggattccgaccaactgaccgagcggcgtgtcagatgatctcgccggcgatgtgtcgttcggcgccgcggcgggccgcgcaggtccggcgcctcctgtcgtcggccgcgcccccggcgcacgccggcgctgccgtgcctgggccctgcatcgtgcacaagcgcggcaacgacatcctccacgatccgtggtacaacaaggatacggcgttccccatgacggagcgcgaccgcctcggtctccgcggcttgctcccgccgcgggtcatgtccttcgagcagcagtacgagcgatttataaactctttccggtcgctggagcacaatacccgcggcgagcctgactccatcgtcgcgctggccaaatggaggatcctcaacaggttgcacgaccggaacgagacattgtactacagggtgctaattgacaatatcaaggattttgccccgataatatacactcccactgttggcttggtctgtgaaaattacagcggtctgttcagacgaccccgtgggatgtatttcagtgcaaaggataagggggagatgatgtcaatgatttacaactggccagcagagaaggttgacatgatagttgtgactgatgggagtcgcattctaggcttaggtgaccttggtgttcagggcataggtatacctattggtaaactggatgtttatgttgcagctgctggtattaacccacagaaggttcttccaataatgcttgatgtgggaacaaataatgaaaagcttctggaggacaagctatatttaggactgaggcaacctcggctggaaggagaagaatacttggctgttgtagatgaattcatggaggctgtccatgcacgttggcctaaagcagttgtgcagtgataaaatcacagtttgaagacttccaaatgaaatgggcctttgagactcttcagaggtatcggaaccgattttgcatgttcaatgatgacgtacaggggacagctggagttgctctagcaggcctacttggtgctgttagagcacagggccgtcctctccaggattttacgaatcaaaagatagtcgttgtgggagctggaagtgctgggataggtgtgcttagcatggctaaacaggcaatgttaaggatgcctgggatccacagaaccggggaagggcataatcaattctgggttctggacaaagatggccttattacgaaagctaggaaggacctggattctgcagtggcgcgttttgccagaggctttggtcctgatgaggtcccagatctctatgagggggctagtcttgttgaagtggtcaagaaagttaagccccatgtgcttttaggactatctggagttgggggcatatttaatgaggaggttctcaaagctatgaaagaatccgattcccctcggcctgcagtttttgcaatgtccaaccctactactaaagctgaatgcactcccgatgatgtattcaagcatgttggagataaagcgatatttgctagtggaagcccttttagtaatgtttctttaggaaatggtaaatctggttatgctaatcaagcaaacaacatgtatctatttcctgggattggtttaggtgcccttctttcaggtgcccggcatgtttcagatggcatgcttcaagcagcagctgagtgcctggcatcatacatcacagacgacgaaattcgaaaaggaatcctcttcccttcggtctccagtattaggcacatcaccgcacgtgtcggcgcagcagtcgtccgtgccgctgttgctgaagacctggctgaggggtgctgtgatgtgggtcctagggagcttgggagtatgtcagagtcggaagcagtggactacgtcgctcggaagatgtggtaccctatttacagccctcttgtgagcgacaaataataaatccgaagatctcgatgcctgcgcagaagcagatgttccattgaaggaatgtatcggatttgatatttttcttaaccatctctaaattagctgctcatctagaaagcatttcggcagagattggtgcccacgcatatggctaatgtatggctacattcatttgctctagacatgatttcgtcaccaggggacactcagttttgaaccgttgagcttcatactgccacgggaaccgtatttttcatcattattgtaatataaggcgccggagtttctgtcctgaaaataagcatgagatcagaagcgatatgatatcctttttataccaccaagaatcctgttcacggtccgtttaagaggaatttgatggaacacgtgctagaactgtttgaag

SEQ ID NO: 5044 - DNA, 574 bp, Zea Mays
gtgtttcagtgattattattagtatacatctgcactgacatgttggttggctgccgtgtccttccttgggctaaggcgaatctcaactacactgcacaagcactcattatatctgcagcctgtattgctggcttcttcatcactgctgacaaaaccattctacggaacgcacgacaaaacaccatcgggaagcttgacaagtcaacctgatgcagagatgtagctgaagctgaaaaggttctctggttgccgcggcggttgatagggtgtcttttgccccatatgcagtggcaccatttctcttcgtggacaagtaatttttgggtgtttggctattcaaaccagaggttgttctgtaatgacttgtctaactgatggacccaactattgtatccagtttactccgaatttgaatcagaataaaaggtggttctatatgttcgtagacatggcttagacccttgttctgaacattcacttgacctggaatttgtgatgctaaagaacggggattagcgatgtgatttctttctaattaccgaatagagactagacagagcaggttaatgttgga

SEQ ID NO: 5045 - DNA, 635 bp, Zea Mays
atttttcttcccctttgtcttgacggccttaagttaagcggaagctgtactgctgggagcaaagaacgccgcaatagctggtactgtggttgcagttcccacgttggttggctgccgtgtccttccttgggctaaggcgaatctcaactacactgcacaagcactcattatatctgcagcctgtattgctggcttcttcatcactgctgacaaaaccattctacggaacgcacgacaaaacaccatcgggaagcttgacaagtcaacctgatgcagagatgtagctgaagctgaaaaggttctctggttgccgcggcggttgatagggtgtcttttgccccatatgcagtggcaccatttctcttcgtggacaagtaatttttgggtgtttggctattcaaaccagaggttgttctgtaatgacttgtctaactgatggacccaactattgtatccagtttactccgaatttgaatcagaataaaaggtggttctatatgttcgtagacatggcttagacccttgttctgaacattcacttgacctggaatttgtgatgctaaagaacggggattagcgatgtgatttctttctaattaccgaatagagactagacagagcaggttaatgttgga

SEQ ID NO: 5046 - DNA, 1872 bp, Zea Mays
gcacgcttggttaaactccgggcgatggccgagcaaggacgcacccgggattggacctatcgacggtggcagcccgcagcccatcggtttcgccgaccggcgcctcgttcgcatcgactccacctcctcctcctcgcacgctataaactagactagagcaatacccgtggtggatgttccaccgcctgctccgccgcgcgatgccgctcccgccgccgcagtccccgcttcctgctccccggatgccgggggtcaccggcgggcgcctcttcgcttcgctgccgtcgccgccgcccctccagtctcgaagagaggtgcatgtgtggtatcttttgcctgatgagttgaaggatgcctcccaactcaagatgtacacggagctcctttccccttctgaaaggaagactgctttgtctatgaacggggaaaagttgcagaaaggtgccgtgctgtcccgtgcactgctgcgcaccaccctctcgagatatacagattgcaaagttgatccaagatcatttgagtttaagaaaaacaagtttggcaaacctgaggtactgtggcgatctgatgacagcaggatggaatggcctttacatttcaatatttcacacacatcatctttgattgtctgtggcataaccatggatactcctattggcattgacgttgaagagaagacacgaaagacagccaagaatattttatctcttgctcgccgttatttcaccccatctgaaattgattatctagctaaaattccagatcctgatgctcagcaaaaggagttcgtaaaactatggactcttaaagaagcatatgtaaaagctcttggaagggggttttcaggcgcccctttcaacaaattctcgattatattggcagcaaatggcagaatccaaatttctgtggtatactatttccctctttgtgctcatgcttgtcagtataattcttatactacttgcatgaatttatggaatcggtcagtataattttgggtggactggtcccttagaccaacaaatttctatgggttccttttaactcttgatcacacagtgaaaaacatcttctttggattctttgtgacgttacgaattttttgaagaaaaaaaagtatcatgttcttttgtgaccacacttgcaagctctactgctccacaaatgcaacctaataattaagtgtttttgccaaagaaagcaagaaaaattctgaattgtcttcaatcctttggagtttccaggcaccaaaagtatcgaacggttctgactctatccatgactgtctgtccgagaattggcagtttgcacttgctgaactaaacagttctcattacatggcaatctgtatagaggatgactcaacaagttcagattctggaaacggtagactgccactaggattgaaagtatggaagaccactccgttcgtggaagatatacttgtttctggaacggaagctgtaaaacttgtcagttaagtatgtgagaggatatctgccattggtcaagtgatttcgccagatgacaatgtgatgcaacgaatgtatttggacgaagtatgcgctgtgcagggaggctgaacggttttcttcgagcatactgcatgcattgatgaactgaccactgacactgtgtgctttagttaagatttggaaatgcaatgacatacactttggagtcctgatattcatattagcatatcacgacactgtttcgaaaggaataaacatttatctctctcttgtgtgtgtgtgtggggtaattttagacgtattttgtactgattggtccttgttatctgacggatcattggaagaaatattcatgcatcagcatgcttctatcggtggcataggaattctgctattg

SEQ ID NO: 5047 - DNA, 2276 bp, Zea Mays
gcacgcttggttaaactccgggcgatggccgagcaaggacgcacccgggattggacctatcgacggtggcagcccgcagcccatcggtttcgccgaccggcgcctcgttcgcatcgactccacctcctcctcctcgcacgctataaactagactagagcaatacccgtggtggatgttccaccgcctgctccgccgcgcgatgccgctcccgccgccgcagtccccgcttcctgctccccggatgccgggggtcaccggcgggcgcctcttcgcttcgctgccgtcgccgccgcccctccagtctcgaagagaggtgcatgtgtggtatcttttgcctgatgagttgaaggatgcctcccaactcaagatgtacacggagctcctttccccttctgaaaggaagactgctttgtctatgaacggggaaaagttgcagaaaggtgccgtgctgtcccgtgcactgctgcgcaccaccctctcgagatattgcaaagttgatccaagatcatttgagtttaagaaaaacaagtttggcaaacctgaggtactgtggcgatctgatgacagcaggatggaatggcctttacatttcaatatttcacacacatcatctttgattgtctgtggcataaccatggatactcctattggcattgacgttgaagagaagacacgaaagacagccaagaatattttatctcttgctcgccgttatttcaccccatctgaaattgattatctagctaaaattccagatcctgatgctcagcaaaaggagttcgtaaaactatggactcttaaagttagtgaactttcgtaagcaattgatttgtgtttttgtattatcattatttagaacactggtcagtagtacctttcttatgcaaagcttaagattcttaactgaactagtcacctaccacttgaagcatactaggaccaaggagacatgagggtagcatggaagtgtatttcatgatttatatatgaaggatcacacttttttttatcgaacactcagcagatgatcacacttaactgtgggtggtaagaaacccagtgcgcgcgcgcgcacgctacagggaactcaatcatctgctagctccaaactggaaacagcagcaggaagcacgcctgcaacacatgcagacacccctacacctaccgaagctaacccggaggactctgggcttgaaggaaatccccttggcaccagccaaagaccacaaaaggcttccgccttggccaacctaacaaccacaaccaaattcggaggagttccttgaaagacaataacatttctgtgtttccacaacatccaagctctcaggacaaccagagtcaaattcttttttgctcagcccactcatacgagcactattgaagcaccaccactgatcaaaatcattctcacccagccctggatggaggttctgcattccaaagggcctgagcagctcaaatcaaaactgccgcacatacaccttttatctagttcatttaaatcgtcattggatttcttagtcaacatttccttcctaagtcagagacttacatgttacaataataattttgattacatgtatcgttgatgtcttaattttgtaggaagcatatgtaaaagctcttggaagggggttttcaggcgcccctttcaacaaattctcgattatattggcagcaaatggcagaatccaaatttctgtgtttgcacttgctgaactaaacagttctcattacatggcaatctgtatagaggatgactcaacaagttcagattctggaaacggtagactgccactaggattgaaagtatggaagaccactccgttcgtggaagatatacttgtttctggaacggaagctgtaaaacttgtcagttaagtatgtgagaggatatctgccattggtcaagtgatttcgccagatgacaatgtgatgcaacgaatgtatttggacgaagtatgcgctgtgcagggaggctgaacggttttcttcgagcatactgcatgcattgatgaactgaccactgacactgtgtgctttagttaagatttggaaatgcaatgacatacactttggagtcctgatattcatattagcatatcacgacactgtttcgaaaggaataaacatttatctctctcttgtgtgtgtgtgtggggtaattttagacgtattttgtactgattggtccttgttatctgacggatcattggaagaaatattcatgcatcagcatgcttctatcggtggcataggaattctgctattg

SEQ ID NO: 5048 - DNA, 1547 bp, Zea Mays
gcaagacagtggtaaaaaaaccagggctctggaggcatttatgacttgacagtaattccaacttcattttcctctcttagtatcttgtgtgactcatgaagtataaggcaatgctgactaggcaattcagttgtatactgaatgaatatcgtcatctaatgcttgaggtacaccaagacttcagggttactctttattactctgttgttgattttcttagtgacttggtttgtttgatcttctaagttgtaacccaaacgaaggaatcgatctatttgtgagtaggctagctgttggttcaagagggaaaccctaagcatgagggaaggcataagttactgcaggaagaaagaagtcacccgagtctcctgagacaccacaagacccatctgggaggaaaagacaagaatgaagtgcagaagaagcaaagccctaatcctctacatctaattttcgcactcccatttccatctgcagtagcttatagctctttgctctacttatatgggaagaggattcatacatcatcttggctcaaggattacaaagtgaggaaagagctctgaaaagtgatggctgtcccacaagttgacaagaaaatgcttggtgaacttgaagccatgggattcccaactgcacgttcagttagggcactccatttttcaggtaattccaatcttgaatctgctgtaaactggcttctggaacatgaaagtgacccagatattgatcggctaccactgattccaagagaaataagcattgaatgcggtgacacatcagatgaagtaagaaatgacgttgaaggaatgagggatactgtgcaggagcagaaacctaaagaacacactgaaactgggagacagaatgagacatcccagttggaacgagaaccaaatgcagatggacaggaggaagaagatagaaagaggatattagcactatataagcaaaaacgagacgaggaagggagggcaagagggcggatacggagtcaattacaagaggatcagagggagaggattcgagctgctaaagaccttatggaagcaaagagaagtctcgaggaaaatcaaaggaagcgggtgatggagagtcgggtagcagatcaagaggaggagaaaagagcgagggagaggatacgccagcgtatagctgacgataaggtaaagcctgctggacgcgccgtcgttgcgtcagagcagctgagagactgcctgcgaaccgtgaagaagaaccacagggatgaccctgctgcagtggcaagagcgtaccaggtgttgctcaagattgttggcaacgtagcgaagaacccaggggaggagaagttcaggaggatccggctcagcaaccctgtgttcaaggacagggtgggcagcgtgcgaggcggcgtggagttcctggagctgtgcgggttccgcaggttcagcggcatcgggtacctggtgatgccgagggacaaggtcgacgtggctctgctcaccgccgccggcgtcgagatcgcgtcggccttggagaacccctacttcggcctgctctccaagtga

SEQ ID NO: 5049 - DNA, 1629 bp, Zea Mays
cgctgcttcgtcctctctcttcttccttcccctcccccgctcgccaatcgccatcggtcactcttcctcaccttcaccttcaccttccgaaaagagagaccgaggaggatcacaggaggacatccagataagcaggaatagaacaaccccataaaccatatcggaccatacatttgcaaaagcttgtcggttttctagcctccaatcgtccctcaactcaagcctgatgaaagaagaggaggtgaatccttaagagcaagcagactttgctgactgaacaagacatgtgacttggcaagaaagcatggaaaaatattggcattagcacgactccaaccaggttgtctgccatagttttgctggagggacaaaaacagaagcgttcctgactctacctcaaggatgagagctgcgtcctccacggtttaccctgtctaccttagcctccaccgccaccccaacagccaccaagcctcttttcgtccctcgagagcaaaccatgacaacacccataaatgtaccaagccacccaaagttcttagacggtctctcttctccctgcctgcctcatttcttctcctccacacatcctcctcccttgccgtagatgacgcaaacatgccatctacctcaacaattgacaccacgatcacagatcgcatcttcatggacttcagcgtctgtccaagctactttcgctcagacagacctctaggagctgagctttcctcgtgccctgattccgagcctcttggtcgtgtcgtctttggtctctatggccggcttctccccgtcactactgccaatttcaaagctacgtgtactgcagctgcatataggggcacccttgtccacaagctccttcagggacagttttttgctgctggtcgacaaggtcctcggcatgacaagggtgaggtccagcctccctctggcctcgttaggaattctgagactgttaaccctaaagcgttcgagctaaggcatgcaaggcctggcacgctttcgttatgccttggacagaatgacgatgatgacgacatcaagctcaaccccaattatcacaatcttgaattcttggttactacagggccaggaccctgtcctgagcttgatggccagaacatcgtctttgggactgtattggaaggaatggatgtcatcaccagcatcgcaaccatacctacctacaaaccagctgaaaggatccgcctcttcaacggctttgcgcagttgattggtgatggaagggctcaaactgcccgggctatgtgggaccgcccgcttaagaccgtgtatatcagcgactgcggggagctgacagtaaccaaaccatctctttcccctccaagcttgccatgactgccagtgtaatgacactacccacatagccagttttctgtctctgttgcttgggtcctctttctgtactctatatatgcagtgtatatattacctgtgttattaaacttatgcatgttccatgagctgtatatatatcgcttccgttgttaatttatgcatgttccctttgacaatgactgtacttgatgagtacatggatgttaattatatggtcaaggcctaatcaattatagagtcctaagcttaaggggagtcgaagtcaac

SEQ ID NO: 5050 - DNA, 1359 bp, Zea Mays
acataatctatttaaagatagtggacatcttcagtagcagctgccgtggccaccataagaatcctccttcagagccatatgtccttgagattatgttggaagtggaggctgtgtgcaaggcgtgacagcgtgtcgtggtcaaggaccctaagctctagcgccaaattcatatcacatttgttctagaatgagatcatgaatggtccctggggttggcctggttcacgctccattctcagtgcgttttccgacatcgttcttcaagcaagcatgcgagctggctcctattttcactgagcttgtggattgtgtgagcttagatggggagtccttgcaagctgctttgtctagaacaaagcaggttcatgaatttaccgcaaggctgctagatattcatgataagatgatgttgataaataataaagaggatatacgcttaatattgcaccggtcggactatatgttggattctgaaatcaattcactgcttcaaattgaaaactctaggagctatattttgccaccaacgctgcaactttctgttgttccatcaggattaccaatgctagaatctgtatggattctatcagctgttcgcctactgatgcttatgtgccaatttagtgagactggagtcatacactccatacaaatctatacaaaatcaaagtggttggcaatgcagtgatgctcggtgaaatcataaactacgtgcagtccctacaatgacaagttgagtttatgtccatgaaactggccaccgtgaatccccaggtggacttaaatagcctgcctaacgtcctccctaaagatgtacatcagtcttgtggtccgccacatttctcgctggagacctcagacgcttcgttgtcgtacctcagccagcctcaccatggaagccctcttggctgcatggacaaccagagttgtatgcatccacttgacacgacgttttgcctggcgataaatccgcagtatcatttcctcaacggtgttagcgatgcatcgtctcagttgcagctaatttgatgcttgtgtttatggaaaccaagaggtggcgctgatccattggaaacctggttgtgtatgaatgggtttccagctacttctattcttggagatagaaaccaacatgtttggtttttgtttttattcgctttagaacaactcatttttgtacgaaaagaggcatttagctataattgtttgttgtagtatgtttaccgcaggatagccgttccatgaaatacataaaaacctgatactgttgttatatttggtttagtcatgctcttatggaacctttaatgaggatttttctatatcaagatatcatcgtcatcgtcattattattgcat

SEQ ID NO: 5051 - DNA, 1375 bp, Zea Mays
acataatctatttaaagatagtggacatcttcagtagcagctgccgtggccaccataagaatcctccttcagagccatatgtccttgaggttggggttttgcaagattatgttggaagtggaggctgtgtgcaaggcgtgacagcgtgtcgtggtcaaggaccctaagctctagcgccaaattcatatcacatttgttctagaatgagatcatgaatggtccctggggttggcctggttcacgctccattctcagtgcgttttccgacatcgttcttcaagcaagcatgcgagctggctcctattttcactgagcttgtggattgtgtgagcttagatggggagtccttgcaagctgctttgtctagaacaaagcaggttcatgaatttaccgcaaggctgctagatattcatgataagatgatgttgataaataataaagaggatatacgcttaatattgcaccggtcggactatatgttggattctgaaatcaattcactgcttcaaattgaaaactctaggagctatattttgccaccaacgctgcaactttctgttgttccatcaggattaccaatgctagaatctgtatggattctatcagctgttcgcctactgatgcttatgtgccaatttagtgagactggagtcatacactccatacaaatctatacaaaatcaaagtggttggcaatgcagtgatgctcggtgaaatcataaactacgtgcagtccctacaatgacaagttgagtttatgtccatgaaactggccaccgtgaatccccaggtggacttaaatagcctgcctaacgtcctccctaaagatgtacatcagtcttgtggtccgccacatttctcgctggagacctcagacgcttcgttgtcgtacctcagccagcctcaccatggaagccctcttggctgcatggacaaccagagttgtatgcatccacttgacacgacgttttgcctggcgataaatccgcagtatcatttcctcaacggtgttagcgatgcatcgtctcagttgcagctaatttgatgcttgtgtttatggaaaccaagaggtggcgctgatccattggaaacctggttgtgtatgaatgggtttccagctacttctattcttggagatagaaaccaacatgtttggtttttgtttttattcgctttagaacaactcatttttgtacgaaaagaggcatttagctataattgtttgttgtagtatgtttaccgcaggatagccgttccatgaaatacataaaaacctgatactgttgttatatttggtttagtcatgctcttatggaacctttaatgaggatttttctatatcaagatatcatcgtcatcgtcattattattgcat

SEQ ID NO: 5052 - DNA, 2133 bp, Zea Mays
ccccctcctccccggtctcgcacgcgatgccccgccgtgacagtcgccgcccatcaacggcctcgccctccttcctccatcgtcccgctcgcacgaatctagctagctaggcgaagagctcgagcaagacgggcgggtcggcggcgcccccgcgggcccgctgcagcgcgtcggcggcgcgccagacccaggcatcggcggcgcccgtcgtcgtctcctcgcggtgccgcctcatgtggccgcccagcgcctgccccatctcgaagccgagcccgcagacgtggcactcgtgctgcgcctgcggctccctgtctcctcctccgcctccgccgccgccgacgccgtcgccggcctgctgatgatgcttgtgctgctgcctgagcgccctggcgccgacgccgagctcgaggccgtggcggccccgcaggtggctggtccggtggccgccgagcgcctggaacgaggtgaaggcgcggctgcaggtcctgcacacgaacaagctattccatggcggagcaggatggcgacgcggggcagaggccacccgactccgttccggttattatattggtttaaccttggatcgcgttaattcgggccatgaggaggttattccggtggtttgatatcggatctcgttaattcgggccctgaggagtttgtgcgggttgaaatccccaacacgctaattcgttcgggaacattcctcggtgctaatgaagactcaactagaacccttgcagaaatcgagaagaagattgcaagggctaccgtgttacccagaaatcatggggagaatgggagaaactatgttcccatatgaggtctcctattcttcagctgaagatcatacttgctgtggagcctttgatcccttcagagggaccaaggattggagagaacattttcggttacacgatagtggacatcttcagtagcagctgccgtggccaccataagaatcctccttcagagccatatgtccttgagattatgttggaagtggaggctgtgtgcaaggcgtgacagcgtgtcgtggtcaaggaccctaagctctagcgccaaattcatatcacatttgttctagaatgagatcatgaatggtccctggggttggcctggttcacgctccattctcagtgcgttttccgacatcgttcttcaagcaagcatgcgagctggctcctattttcactgagcttgtggattgtgtgagcttagatggggagtccttgcaagctgctttgtctagaacaaagcaggttcatgaatttaccgcaaggctgctagatattcatgataagatgatgttgataaataataaagaggattaccaatgctagaatctgtatggattctatcagctgttcgcctactgatgcttatgtgccaatttagtgagactggagtcatacactccatacaaatctatacaaaatcaaagtggttggcaatgcagtgatgctcggtgaaatcataaactacgtgcagtccctacaatgacaagttgagtttatgtccatgaaactggccaccgtgaatccccaggtggacttaaatagcctgcctaacgtcctccctaaagatgtacatcagtcttgtggtccgccacatttctcgctggagacctcagacgcttcgttgtcgtacctcagccagcctcaccatggaagccctcttggctgcatggacaaccagagttgtatgcatccacttgacacgacgttttgcctggcgataaatccgcagtatcatttcctcaacggtgttagcgatgcatcgtctcagttgcagctaatttgatgcttgtgtttatggaaaccaagaggtggcgctgatccattggaaacctggttgtgtatgaatgggtttccagctacttctattcttggagatagaaaccaacatgtttggtttttgtttttattcgctttagaacaactcatttttgtacgaaaagaggcatttagctataattgtttgttgtagtatgtttaccgcaggatagccgttccatgaaatacataaaaacctgatactgttgttatatttggtttagtcatgctcttatggaacctttaatgaggatttttctatatcaagatatcatcgtcatcgtcattattattgcat

SEQ ID NO: 5053 - DNA, 2276 bp, Zea Mays
ccccctcctccccggtctcgcacgcgatgccccgccgtgacagtcgccgcccatcaacggcctcgccctccttcctccatcgtcccgctcgcacgaatctagctagctaggcgaagagctcgagcaagacgggcgggtcggcggcgcccccgcgggcccgctgcagcgcgtcggcggcgcgccagacccaggcatcggcggcgcccgtcgtcgtctcctcgcggtgccgcctcatgtggccgcccagcgcctgccccatctcgaagccgagcccgcagacgtggcactcgtgctgcgcctgcggctccctgtctcctcctccgcctccgccgccgccgacgccgtcgccggcctgctgatgatgcttgtgctgctgcctgagcgccctggcgccgacgccgagctcgaggccgtggcggccccgcaggtggctggtccggtggccgccgagcgcctggaacgaggtgaaggcgcggctgcaggtcctgcacacgaacaagctattccatggcggagcaggatggcgacgcggggcagaggccacccgactccgttccggttattatattggtttaaccttggatcgcgttaattcgggccatgaggaggttattccggtggtttgatatcggatctcgttaattcgggccctgaggagtttgtgcgggttgaaatccccaacacgctaattcgttcgggaacattcctcggtgctaatgaagactcaactagaacccttgcagaaatcgagaagaagattgcaagggctaccgtgttacccagaaatcatggggagaatgggagaaactatgttcccatatgaggtctcctattcttcagctgaagatcatacttgctgtggagcctttgatcccttcagagggaccaaggattggagagaacattttcggttacacgatagtggacatcttcagtagcagctgccgtggccaccataagaatcctccttcagagccatatgtccttgaggttggggttttgcaagattatgttggaagtggaggctgtgtgcaaggcgtgacagcgtgtcgtggtcaaggaccctaagctctagcgccaaattcatatcacatttgttctagaatgagatcatgaatggtccctggggttggcctggttcacgctccattctcagtgcgttttccgacatcgttcttcaagcaagcatgcgagctggctcctattttcactgagcttgtggattgtgtgagcttagatggggagtccttgcaagctgctttgtctagaacaaagcaggttcatgaatttaccgcaaggctgctagatattcatgataagatgatgttgataaataataaagaggatatacgcttaatattgcaccggtcggactatatgttggattctgaaatcaattcactgcttcaaattgaaaactctaggagctatattttgccaccaacgctgcaactttctgttgttccatcaggattaccaatgctagaatctgtatggattctatcagctgttcgcctactgatgcttatgtgccaatttagtgagactggagtcatacactccatacaaatctatacaaaatcaaagtggttggcaatgcagtgatgctcggtgaaatcataaactacgtgcagtccctacaatgacaagttgagtttatgtccatgaaactggccaccgtgaatccccaggtggacttaaatagcctgcctaacgtcctccctaaagatgtacatcagtcttgtggtccgccacatttctcgctggagacctcagacgcttcgttgtcgtacctcagccagcctcaccatggaagccctcttggctgcatggacaaccagagttgtatgcatccacttgacacgacgttttgcctggcgataaatccgcagtatcatttcctcaacggtgttagcgatgcatcgtctcagttgcagctaatttgatgcttgtgtttatggaaaccaagaggtggcgctgatccattggaaacctggttgtgtatgaatgggtttccagctacttctattcttggagatagaaaccaacatgtttggtttttgtttttattcgctttagaacaactcatttttgtacgaaaagaggcatttagctataattgtttgttgtagtatgtttaccgcaggatagccgttccatgaaatacataaaaacctgatactgttgttatatttggtttagtcatgctcttatggaacctttaatgaggatttttctatatcaagatatcatcgtcatcgtcattattattgcat

SEQ ID NO: 5054 - DNA, 2718 bp, Zea Mays
agcaaaaatgagacgacgaagcagcaagactcccgccgcaggactgcttccttcgtatgatcgtatcctacgtcctgaccccagcccgcccgcggtctcctacaaatccccgtgcccgactgcccgtagcccccccaagctccggcctccggctgccccgcccccgcgacagcgactccgcccccagacctcgtcaacccgccgcccgcacgtcactccactaacgtgtccccccggcccaccatacccgatggttccccgccaccccacgaccttgacctcgcccgggccgcgccgtcgctgtccccgcgcctgcagcccccgcacgcagccccacccccgacgccacacactcgcacacactaccggaccagggcgaccagaacgctgcgacgggctgcgctgcgcagtccacgccacgccacgccgcacggcaggccgacggaatagtaccgtgccgttggcggcacgtacagcagttcaggccggccttcccctcgcggctctgtccgttataatccgcacgaccgcacgcacggtgcagaagtaagggctgggaccaccggacgacgatgcggggctcctcgggcgcgcgcatgaccgcgcaggacgcggcggaggcggcggtgggcgcggtcgggtgcggctacgacctgacgggggacctccgcctgggccgcgccaagcctggtggccggctggtggacctcgacggcgccgggaagggcccggggacgtcccagtccgcgtccccgtcgccgcgggagctggcgttccccggcggggccgccgtggcgggcgtgccggccggggtcgtcgccggcaagggcgagcgcgcgcggttccgctccgacgtgctccccttcgcgcagatggcggaggaggtgaaccggtcgctgtcgctgcccgccagcaagatcccctcgggcgccttcaacgccatgttcgactaccgcgggtgctggcaccgcgacgccgccgccacgcgcagcctctgcttcgacgcccgcctcgtcgagctctacagcgtcgaggccgtgcgcgccagcctcgccctcagggaccacgtcaggcgggacctcccgcccgtctgggaccccgccgcgctcgccgactccctccctgcaggttcatcgacaagtacgggactcacgtcatcgtcggggtgaagatgggaggcaaggacgtggtgtgcgtgaagcagctcaagggctccagcctcacgcagagcgacgtgcaggcccggctcaaggagctcgccgacgacaggttctcggaggattccacagcaagttccaattcttccaccgcgggaggcggcaggttgtcgcaggggctaaacgttgggcccggatcggccgcctggcagtccttcagatcacccgtcgtgtctcacaaggatgacatggtgtgcattcacgtcaggagaggcggcgtcgacagcggccagggccacggcaagtggctctccaccatcaccggcttcccggacgtcatctccatgtcgttcgtgcccataacgagcctgctcaccggcgtccggggcagcggcttcctcaaccacgcggtgaacctctacctcagatacaagccggccatagaggagctgcagcagtttctcgagttccaggtgcctcggctctgggctccagagttcggtcagctcccgctctccctccagaggcggaagaacatcctgccgtctctccagttcaccctcatgggccctaaacttcacgtcaacactgccaaggtcgactcctgcctccgcccggtgaccggcatccggctgttcctggaaggcaagaagagcgaccagctgggcgtccacctgcagcacctgtcggcgacgcccggcgcgatcacggtgctcggcgaggccgcgtcctcggcggacgacgcggccgccgtgaacgagcgcgcctacatcgagcccgtccggtcgccgctgctctcgcacatctgcacggcgcccgtgcagtacaacggcgcgcttatcgacgactgcgccgccatcgtcaccagcgcctggctcgaggtgcgggacgcctgctgcctcaagaaggtgctcttcctgcgcctcggcttctccggcgtcgcggacatgaagatccgccgctccgagtggggcggggccctggtcgcgccgcgcaggtccgggtcgctgtcggcgcgcctcagcgccgcgctgtccggtggcctggcgccggcgccgccggcggtggaggagaaggtggaggtcaactccgccatattccccaagggcccgccggtgccgctcccggttcagaagatggccaggcacatcgacaccaccgaggtgagcaggggccccgacgacctgccgggctactgggtcgtcaccggcgccaagctctgcatggaaggcggcaaggttgcgctcaaggtcaagtactcgttgctcatcgcagtgcaagaggaccctgaaggacactgacgctttgaggcctccattgccgtcgtcgacgcctcaactctctctgtctgtgttgtgttgcggcggtgtaaagttcagttgtgggcaactacgttgtacagaatacagtgtgcccagaggctgatgtttttttggtttgttcactcagttcttgcaaatctaggaacagtttaggtttagatataatactgagaaattacctgattcgattgagcattcaatacatgaaaaattagtgccggctgcatctgcaatttcat

SEQ ID NO: 5055 - DNA, 1257 bp, Zea Mays
gcccaggggcacaaccagcagactgcaactgccactgcatgcagctgtacttggtggcgagagggggggagcttttaagcgagcctagtcgtgtctcctctcctctcccctcccctcctccgtgctgctccgcccctcgatcggctggctctactttgcatggtccccggccgggcctcctcttgcgtgctctccgacctcagtcacggcgcccatcacggccccttaaaaccgcatactacacagaaacatataccaccaagcttgctagcttgtcgcctcacaagctacggcgagctactaggcgaagtagaattattcctggggccgcgcggcagctagctcctagctcgcagccggccatggcgaagccgcaggaggtccgcagcgtcgactccttctcgcagctaccgttcatccggccggcgccggcgccgagggacgccaccatccgtctgtttggccgcgagttccccagcgaccacaaccagcagcagcaggacgccgcgtccgactcccccgacgctgccaacaacggcagcacggtcacgtgcgagagcaacggcgcggccaagagcggcgccgcggccgagaggaagttcgagtgccactactgctgccgcaacttcccgacgtcgcaggcgctgggcgggcaccagaacgcgcacaagcgcgagcggcagcacgccaagcgcgcccacctccaggcctccctcgccatgcaccgctacgtgcccggacacatgtacggcctcttcaactactacccccacccccaccccatcggcggcggcgcccgctttgaccaccccgcgccgccgccgccgccgctgcagcactacccgatgtggacgactagcgccagccccgcggggccctacggcggcggcccgggctccatgtcgcagccaatcaacggtagcccggtgcccgcggggctctggagggtgccgccgccccccgcggctactgccatggagaatttcggcgtgtccgcccggcacggcgctagtggtggcacggccttcccggtcgggccgcctggtggggaggcagcagcgtgcaaggacgataaggcggcggtgatgatgagcttgctgtccccctccccctcgctctcgtcgtgctcgtccacgtcgccggagacgaagctagcaggtctccgatctctcccgtcgttgtggattagcagtcgcaagcgcgtgtcaattctcatagttttctaaataatcgtttctacgtacaaaacaaaaacaa

SEQ ID NO: 5056 - DNA, 1997 bp, Zea Mays
ggctgccggcctgctaacgcgtttcacccaaactcctcccctcttctctctctgcccctggtatgttaagcaattgatgattactaatccactctaacataaactaatcccacgataattacgtcccggcggatatcacccacatctcctgttgctactggagctcgactcatctcgtcctccgtcgcgagacaagaaagtagtaggaagggaggaagatagaggggttgcgtcccagccccacctgctatctcctctcttcttccccttcctcggcggctttccaccattcaggttcagactggaggggccttcctgccaatctccagtgcgtgttcttcagtggaggcgccggccggactcgcgatggagcgggacggccagcagacccgccgcgacaagctcatcatcgatacggatcccggcatcgatgatagcatggctatcctaatggcgttcagagcacatactctggaaatcattgggctcacgaccatattcggcaacgtcgacacagaaggcgcaacatgtaatgcactattgctgtgtgagagagcaggacatcctgaggttccagtagcagagggcagccacgagcccctaaagggaggaaagccccgtattgctgattttgttcatgggtcagatggcattgggaatctgtttcttcctgcaccctctgctaagaaggttgaggaaagtgctgctgatttcatggttaataaggtctctgagtttccaggagaggtctctgtgcttgctttgggacccctgacaaatgtagcattggccatcaaacgagacccttcctttgcaagcaaggtgaataaaatagttgtactgggtggagctttcttcgtggctggaaatgtcaaccctgctgctgaagcaaatattcttggagacccagaagcagctgacataacaacacaagtctgtttgacagatgagggtctcttggagctaagaaactcaaaagggaagcatgcaccgttcttatctgagacgtgcaagttctacagagattggcatgtcaagtctgatggcttccatggaattttccttcatgatcctgtgagcttcactgccgtgcttcatcccgagtacttcacattcaagaagggtgtggtgagagtggagacccagggcatttgcactggccacactttgatggatcagggattgaaaaagtatgcctttttttctgaataactcataaagattgactatttgatgtttgttagtttcaacaatcttacatacactacatacacattaatatgacataaatctcaccaaattacttataactcttggagtaagcaaaccaaggcaaaagttaccccacaggactatgtttcaacaaatttctatttcacaattgtttctgcttgttcctactatggtgcaggtggaattcagagaacccttggtcagggtataaaccgatttcagttgcatggacggttgatgtgccaaaggttattggctttgtaaagaagctgctcatggcaccatgagcaaggtaccgccatttagcgacatcaatgctctctgatgcccaagaaaatttggcaagtacagagccactctcccagctgcattatacttatttcctggacctggaaagcttcctgttcctccaatagtaagaggatcaccatggttcttttagttgaggtcttaatgatttagatcgacttctatactgcgactaaaaatatcgatatcacaagagtggataaccgtgtctaagccatttcgtccttcaaatctgggagtcaaattgtgaaagcttatgcagcagtctcaaataccatgatgtaaattctggcgtatgacagcatgtctcacacatttgtatcaatacatttcgaatcaatgagatttcccataccctcagtgcatgcaaagatcgtaatcttgttttaatgtgcctctcgtgtaaagcaaagtgccaagaaaaggcacatgataatttgcgttagaaaataaac

SEQ ID NO: 5057 - DNA, 1328 bp, Zea Mays
cgcactcaggcctattctctcgtcctcgcgctcctgggtacctcgtgatggactcgttctcgagcgcggaggaggtgcgggagatgcgggaccgcatggccgaccttgtcgctgggttcgatggcgccaactccgcggtgttctccaccaaggatcatcggcagttaaaggacgactacttctttaagagtgctgagaatatctcattcttctttgaggaaaaggcatatggagatgatggatgcttgaaacagccgaaagaactttcaattaataaagttgggcatgcattacatgaacttgatccggtgttcaaaaagttttctttctcagagagtgttgcaagcttgttctcttctttaggctacaagaggcctgcagtcattcaatctatgtacatatttaagcaaccaggtattggtggtgaggtcgtgccgcaccaggataatacattcctttacacggaacctcgtacatgcacagggctgtggcttgcacttgaagatgcaacaatcaacaatggttgcctgtgggcaattccaggatcacataaaaagggtttggtgagacgtatggtcagagatgaaaatggtacacattttgatcggccctccccagtctatgatcagaaagaatttgtaccgctggaagtaaaatctggtgctttggtggttatacatggagatcttatacatcagagttttgagaacctttctccagcgtcaagacatgcattcagcttacatgtagtggatactgaaggatgtaaatggtccgaagacaactggatacaaaggaaaacggcccctgaaccgctctatgtgtcttagcaaaaccagtaactagtgccgtaaaacaatagagattcccagcaagtgatttgtggatcgcttctctgcacaataaaatgggggaatcaagctgcgccatgctgtttccgtttcacctgtaaacatatgagggcttgttcggttatttccaatacacatggattggatgggattgaaaaaaattgagaagaagtttgacttgtttgggattcaaactcattcaatcccactcaatccacatggattgagagctaaccgaacaagccctaaactgtaaatactattgctactgtaataccataaaaaatctctctcggctgggtaggagaaagactgcctctacgatattatattaaaaagaagctcaatcggagtcctaactgagaatgtctactaaatgtgtcatcccatgcagcaggagagttcgtccctataggtcagatctttactcgtgctttgagtcctctaagtctctacacgatgatccacctctcatag

SEQ ID NO: 5058 - DNA, 1801 bp, Zea Mays
gtcatatgtaccaacggtccaaccccaagcagcgtctcgagaagaagttccgtacccttcactccactattccggtcaacccatccctttcctccgcctccgcttccgcgtccgcccgccgctatgccgccagccagtagcctcaccgccgaccagctcagcttcttcgaggccaatgggtacctcgtgatggactcgttctcgagcgcggaggaggtgcgggagatgcgggaccgcatggccgaccttgtcgctgggttcgatggcgccaactccgcggtgttctccaccaaggatcatcggcagttaaaggacgactacttctttaagagtgctgagaatatctcattcttctttgagggtacgtgatttgttcccctcagactaaatgactaatatgaatatgtcacaattctattaaatccatttttcgaattaggatttgatactgccttggactatgtgcaaatagctgtacttcattcaccgacttattttagtgtttttgtagatgtacgtctgtgaaaactttttacttgatactgagatttttctattcctgcttgaaagcctcattttttttcctttgacactttcactcacagaaaaggcatatggagatgatggatgcttgaaacagccgaaagaactttcaattaataaagttgggcatgcattacatgaacttgatccggtgttcaaaaagttttctttctcagagagtgttgcaagcttgttctcttctttaggctacaagaggcctgcagtcattcaatctatgtacatatttaagcaaccaggtattggtggtgaggtcgtgccgcaccaggataatacattcctttacacggaacctcgtacatgcacagggctgtggcttgcacttgaagatgcaacaatcaacaatggttgcctgtgggcaattccaggatcacataaaagtattttttaacacaattactttatgcctaagaacgtcttggaaggcaggactaagtttaatttttaacttttgtgttttgtattagagggtttggtgagacgtatggtcagagatgaaaatggtacacattttgatcggccctccccagtctatgatcagaaagaatttgtaccgctggaagtaaaatctggtgctttggtggttatacatggagatcttatacatcagagttttgagaacctttctccagcgtcaagacatgcattcagcttacatgtagtggatactgaaggatgtaaatggtccgaagacaactggatacaaaggaaaacggcccctgaaccgctctatgtgtcttagcaaaaccagtaactagtgccgtaaaacaatagagattcccagcaagtgatttgtggatcgcttctctgcacaataaaatgggggaatcaagctgcgccatgctgtttccgtttcacctgtaaacatatgagggcttgttcggttatttccaatacacatggattggatgggattgaaaaaaattgagaagaagtttgacttgtttgggattcaaactcattcaatcccactcaatccacatggattgagagctaaccgaacaagccctaaactgtaaatactattgctactgtaataccataaaaaatctctctcggctgggtaggagaaagactgcctctacgatattatattaaaaagaagctcaatcggagtcctaactgagaatgtctactaaatgtgtcatcccatgcagcaggagagttcgtccctataggtcagatctttactcgtgctttgagtcctctaagtctctacacgatgatccacctctcatag

SEQ ID NO: 5059 - DNA, 1874 bp, Zea Mays
cgcgcccttagtttcctccaatttgcttgcaaccgaacaacatcgggtccatattgtcatatgtaccaacggtccaaccccaagcagcgtctcgagaagaagttccgtacccttcactccactattccggtcaacccatccctttcctccgcctccgcttccgcgtccgcccgccgctatgccgccagccagtagcctcaccgccgaccagctcagcttcttcgaggccaatgggtacctcgtgatggactcgttctcgagcgcggaggaggtgcgggagatgcgggaccgcatggccgaccttgtcgctgggttcgatggcgccaactccgcggtgttctccaccaaggatcatgtatgccatccacttcgattgggctagtctcgatccatgcgtttgttacgctcctttccttcttctcatacaaaccctgttgccgaaacacctacatctttatctttttgaaaattccattgcttggtggaaataataggaattttgccacttgaaacgttgcctgttataattatgcttgttataattacgcctgtgtctatgaattgtgggtccatgagtccatgagtccatctgtgtatatgaaatgtggggtctgatggcagttttacaaacttgtttcggggtgatggcaaatatcagttgtgcatgctcagatttagcaatggtaagttgttttccattgcagcggcagttaaaggacgactacttctttaagagtgctgagaatatctcattcttctttgaggaaaaggcatatggagatgatggatgcttgaaacagccgaaagaactttcaattaataaagttgggcatgcattacatgaacttgatccggtgttcaaaaagttttctttctcagagagtgttgcaagcttgttctcttctttaggctacaagaggcctgcagtcattcaatctatgtacatatttaagcaaccaggtattggtggtgaggtcgtgccgcaccaggataatacattcctttacacggaacctcgtacatgcacagggctgtggcttgcacttgaagatgcaacaatcaacaatggttgcctgtgggcaattccaggatcacataaaaagggtttggtgagacgtatggtcagagatgaaaatggtacacattttgatcggccctccccagtctatgatcagaaagaatttgtaccgctggaagtaaaatctggtgctttggtggttatacatggagatcttatacatcagagttttgagaacctttctccagcgtcaagacatgcattcagcttacatgtagtggatactgaaggatgtaaatggtccgaagacaactggatacaaaggaaaacggcccctgaaccgctctatgtgtcttagcaaaaccagtaactagtgccgtaaaacaatagagattcccagcaagtgatttgtggatcgcttctctgcacaataaaatgggggaatcaagctgcgccatgctgtttccgtttcacctgtaaacatatgagggcttgttcggttatttccaatacacatggattggatgggattgaaaaaaattgagaagaagtttgacttgtttgggattcaaactcattcaatcccactcaatccacatggattgagagctaaccgaacaagccctaaactgtaaatactattgctactgtaataccataaaaaatctctctcggctgggtaggagaaagactgcctctacgatattatattaaaaagaagctcaatcggagtcctaactgagaatgtctactaaatgtgtcatcccatgcagcaggagagttcgtccctataggtcagatctttactcgtgctttgagtcctctaagtctctacacgatgatccacctctcatag

SEQ ID NO: 5060 - DNA, 1667 bp, Zea Mays
gccgctctcgtcgatttccgtctctctctccattttgcgcccgcacctccccacctccacctcccctcctttcggttgttgtctgacttgtctcctactctcctcgccttcccccttgccttagggtttatcccgcgctccgcctcgctccgtccctccctgattcgcgcgatctccgcgcggccatggtctccggcgcggcgcccaacccggacgggggcggcgcccaaaacacccagcgcccgccgccgcttactcaggccggggcccggacggccctcgccacgccgccggcggtctccggcggcgccgcgcactccgcttctaccagtgggggcagcgccggctcaccaccgtccagccgcagcgagcagcacgcccccgacggtgctgccaagggtcccgccctcggggccgcgcccgcggcggccgcgtccacgccggccagcgacagcacgttcctccgcttgaataatctcgacatcaacggcgacgacgcgccgtcgtcgcaggctcctacgagcaagaagaaaaggagaggcacacgggcagtgggtcctgataaaggtaaccggggactgcgccagtttagtatgaaagtttgtgagaaagttgaaagtaaagggagaacaacatataatgaggtggcagatgaacttgttgctgagtttacagaccccaacaataatattgaggcaccagatcctgataaccctaacgcgcaacaatatgatgagaaaaatatacgacgaagagtttatgatgctttgaatgttctgatggctatggacattatatctaaagataaaaaggagatccagtggaagggcttgccgcgtactagtataagtgacattgaagaaatgaagacggagcttgtgggactgaaaggtaggattgaaaagaaaagtgcttatctacaggagctacaagaccaagtctgcaaaacctgattcaacgaaatgaacagtcatatggttcaggaaacacgccttctggtggagtggctttgccatttatcctagttcagacccgacctcatgctaccgtggaagttgagatatcagaagatatgcagctggtgcattttgacttcaatagcaccccattcgagctgcacgacgactcatacgtcctaaaagaaatgcgattctgtggaagagaacaacatgacagcactcaagagtcgatatcaaatggaggtgagagctcaagcgtgtcaaatatttattggcaacacgtacagcatgtggaaaggccaaacaatggcacaggtaggttaccgagctcaccgcctattccagggatcttgaaagggcgtgcgaagcacgagcactaacgctagggtgttggttcactttccttttcgtctgagcagttggttttattgcatttctccgttgtgtaaagggccctgtaaattattaggcaagcgggagcgtagcttgatctaatttagctctgcaccagattggtagaacgacgggtgctctaagtagttgtgtaactataactatccttgaatcggtttctttagtatggttgagagaagggttgacatgtaattttgtagagccttgtaaaattaaaattgttgatttctatcagggtgaaatttctgggcacaatctttatttcgtgttccttttcccatcagtgaacgtaaa

SEQ ID NO: 5061 - DNA, 3038 bp, Zea Mays
caagttgggaataccaagtcctcctagcttgaaaggtcgagctgttattagtgctgctgaaatgggaatctcattcccactgaaacgaagagatcagttactggagtacgttttaactctaatgggtagggatcaaagtaatgatctcactgatttcaacactgagcttttgcacacacagagccttgctttaagtgcctgtactactcttgtctcgctagaaccaagattgccaatggaaacaagaaaccgtgtcatgaaggcaacattaggtttttttgctttgccaacagagccctcaagcattgttgagagtctcgtaacaaacctaattattctgttaggtgccatcctgcttacaagtggtgaagatggtcgaagtcgagcagagcagttgctgcatattcttaggcagcttgatccatatgtatcatcatctctggaacaccaaagaagaagaggatgtgttgctgtacaggaggtgttaataaagtttcgcaatctttgttctggtggattcggtgcattgggctcctatccaactttcacaatgaataaacaaatcgatcgagggactaggagcttgtcaagtttgccatctgcatttgtgttgcctagtcgagattctttaagcttgggagagaggacaatggcataccttcctcgttgtgctgatacagacacggaagttaggaaagttgcaattcagatcattgcacttttcttcgacatttcattgtcacttccaaagcagaaggcatatcctaatgatattgatctggaatcctcgtatagtgctttgtcctcccttgaggagttagtctctattgtcagaagggaggcatctgttgatcaaactgaactatttcagagggttgtatcctcagtgtgtattctattatcaaaggatgagctggtcgtcttgctacactcttgtacgttggcaacatgtgataagataaaacagtcagcagatgcttcaattcaagctattatcatgtttattatcagaagaggcaaggagctacgtgaagctgatgtctcgaggacaactcaatctttgctctcatctgctatttctcttactgacacacactcacgccaagaggttctgaatgctatatcatgcctagcagaaaacaccaatcacgttgtggtctttgatgaggttctatctgtggctggaaaagatatctgtacaaaagacataccaaggattcgtggaggctgggccatacaggatgttttttatgcattttcccagcacaaggagcttgcacttctattcctggagtacactttatctatacttcacaaagaacctgtcataataaacagttctgagaagggggagagtacctctgagtcattggctgatgactgtattctacaggcaactatgtttgctctcaatgcatttatgagaggtggtgggaagattgggaaacaagcagttgagaaaagttacccttctgttctttcgggccttatactgaagctcggaagtcttaatggtgttgctgaattgggccgaaatgaacttctacgatcgttgttaattgcatttcagtcattttgcgaatgtgttggtgatgtagaaatgggaaagctattagctcgagatggggaacaaactgagaaggacaaatggatcgagcttgttcaggaaatcgcatgcagttcctcagtaaaacgaccaaaagatgttctgccaacttgtgttatcttgtgtaatgctctcaaccgaaatcagagggctgaaagggaggctgctgctgctgcactatcagaatttatccaccacattgaaaaagaacctacattgcttgaacaaatggttgaggaaatgtgtcaacatgtttctgatgattcaccaactgtcaggagcctctgtttgcgtggacttgtgcaggctcctgagagccacatgcttaaatacatccagcaagtgttaggagtaatattagcacttcttgaagaccccaacgagtctgttcaattaactgctgtccaatgcttgttaaatgtccttaatttgtcagaacaagatgctgttggtccaatcttaataaatctcttagtaaggctgcgaaatcttcaggtctcaatgaatacgaaaatgaggtccaatgcgtttgcagcttatggtgctttaagtgcatatggtgttggtttgcagcgcactgcttttattgagcagatacatgctacccttccccgtctgatcctccatcttcacgatgatgacctaagtgttcgtcttgcctgtcggaacacattccagctccttgcgacattgatggaagtagagggcttgtctgtgctcctcagcaagcagtattttgcttctgatcgccgttctgactatgaggacttcattagagacttaacaagacaactttgtcggttgtctcccgccagagtcgacagctacctagaatcggctatccaggcattcgatgcaccttggccagtcataagagcaaacgcagtttgtttggtgagttgcatgctatcctttttggatgatcagcgattcattgctccttatttctcccaggtatttgctacgttggttggtagaatgagccaatcgccagacgcaattgttcgagcatcagcatcgtctgcgctgggcattctgatcaagagatctaacatgctgaggtcactggtttcacgatatgatcgagcagattcatcacgcaattcccagagcggtgattctaacaccaagacaccatcagagtttcaagaacaggcagaaggaaatccgaatgatggcgcaagtggagcggcaataaaggggactgaagccgatcactgatgtaaatttactcgtatatacgtatagtgttctagctatgcatgcttgtgtatatgctgtacttccctcgcaaataggaacaggagagcaaatttatgctgccatgtcaatagatcttcagtacacctgtaaagcaaccactcacagttagatgattatttattgaatcaaatattatttatatattgaattgaattttcttcgatgcagt

SEQ ID NO: 5062 - DNA, 3273 bp, Zea Mays
atatcccatcttgtatttggaaaaacagaaatggagactggatcattcaaaagttcctctcatttttctcattcggcccaaaagtggaagatgttgatgacacatatgcagcattggcgttgatgtatggttatgccgcaagatatgctccatcaactgttattgaagccagaattaatgcacttgtggggagtaatatgcttggaaggttgcttcatgttcagcatcctactgcaaagcaagctgtgattactgcaatcgaccttttaggtcgagctgttattagtgctgctgaaatgggaatctcattcccactgaaacgaagagatcagttactggagtacgttttaactctaatgggtagggatcaaagtaatgatctcactgatttcaacactgagcttttgcacacacagagccttgctttaagtgcctgtactactcttgtctcgctagaaccaagattgccaatggaaacaagaaaccgtgtcatgaaggcaacattaggtttttttgctttgccaacagagccctcaagcattgttgagagtctcgtaacaaacctaattattctgttaggtgccatcctgcttacaagtggtgaagatggtcgaagtcgagcagagcagttgctgcatattcttaggcagcttgatccatatgtatcatcatctctggaacaccaaagaagaagaggatgtgttgctgtacaggaggtgttaataaagtttcgcaatctttgttctggtggattcggtgcattgggctcctatccaactttcacaatgaataaacaaatcgatcgagggactaggagcttgtcaagtttgccatctgcatttgtgttgcctagtcgagattctttaagcttgggagagaggacaatggcataccttcctcgttgtgctgatacagacacggaagttaggaaagttgcaattcagatcattgcacttttcttcgacatttcattgtcacttccaaagcagaaggcatatcctaatgatattgatctggaatcctcgtatagtgctttgtcctcccttgaggagttagtctctattgtcagaagggaggcatctgttgatcaaactgaactatttcagagggttgtatcctcagtgtgtattctattatcaaaggatgagctggtcgtcttgctacactcttgtacgttggcaacatgtgataagataaaacagtcagcagatgcttcaattcaagctattatcatgtttattatcagaagaggcaaggagctacgtgaagctgatgtctcgaggacaactcaatctttgctctcatctgctatttctcttactgacacacactcacgccaagaggttctgaatgctatatcatgcctagcagaaaacaccaatcacgttgtggtctttgatgaggttctatctgtggctggaaaagatatctgtacaaaagacataccaaggattcgtggaggctgggccatacaggatgttttttatgcattttcccagcacaaggagcttgcacttctattcctggagtacactttatctatacttcacaaagaacctgtcataataaacagttctgagaagggggagagtacctctgagtcattggctgatgactgtattctacaggcaactatgtttgctctcaatgcatttatgagaggtggtgggaagattgggaaacaagcagttgagaaaagttacccttctgttctttcgggccttatactgaagctcggaagtcttaatggtgttgctgaattgggccgaaatgaacttctacgatcgttgttaattgcatttcagtcattttgcgaatgtgttggtgatgtagaaatgggaaagctattagctcgagatggggaacaaactgagaaggacaaatggatcgagcttgttcaggaaatcgcatgcagttcctcagtaaaacgaccaaaagatgttctgccaacttgtgttatcttgtgtaatgctctcaaccgaaatcagagggctgaaagggaggctgctgctgctgcactatcagaatttatccaccacattgaaaaagaacctacattgcttgaacaaatggttgaggaaatgtgtcaacatgtttctgatgattcaccaactgtcaggagcctctgtttgcgtggacttgtgcaggctcctgagagccacatgcttaaatacatccagcaagtgttaggagtaatattagcacttcttgaagaccccaacgagtctgttcaattaactgctgtccaatgcttgttaaatgtccttaatttgtcagaacaagatgctgttggtccaatcttaataaatctcttagtaaggctgcgaaatcttcaggtctcaatgaatacgaaaatgaggtccaatgcgtttgcagcttatggtgctttaagtgcatatggtgttggtttgcagcgcactgcttttattgagcagatacatgctacccttccccgtctgatcctccatcttcacgatgatgacctaagtgttcgtcttgcctgtcggaacacattccagctccttgcgacattgatggaagtagagggcttgtctgtgctcctcagcaagcagtattttgcttctgatcgccgttctgactatgaggacttcattagagacttaacaagacaactttgtcggttgtctcccgccagagtcgacagctacctagaatcggctatccaggcattcgatgcaccttggccagtcataagagcaaacgcagtttgtttggtgagttgcatgctatcctttttggatgatcagcgattcattgctccttatttctcccaggtatttgctacgttggttggtagaatgagccaatcgccagacgcaattgttcgagcatcagcatcgtctgcgctgggcattctgatcaagagatctaacatgctgaggtcactggtttcacgatatgatcgagcagattcatcacgcaattcccagagcggtgattctaacaccaagacaccatcagagtttcaagaacaggcagaaggaaatccgaatgatggcgcaagtggagcggcaataaaggggactgaagccgatcactgatgtaaatttactcgtatatacgtatagtgttctagctatgcatgcttgtgtatatgctgtacttccctcgcaaataggaacaggagagcaaatttatgctgccatgtcaatagatcttcagtacacctgtaaagcaaccactcacagttagatgattatttattgaatcaaatattatttatatattgaattgaattttcttcgatgcagt

SEQ ID NO: 5063 - DNA, 3764 bp, Zea Mays
tccctgctggcattcggtcccttagcggcccttctccttgaatactggcgcccccacaaaggttctgtgctacttgggtccacttttccccagaaacctttctttattttggcaagatgaggtccctaagatgaaagcttacatcagtgatcctgaagacctaaagcaagatagcacataccaggaaaaatgggatgacatgataataaattttttggcagaatgtttggatgttgtgaatgatactgagtgggtcatttctttgggtgatgcatttgcacggcagtatgatctgtattctatatctgacggacacgctgctttgctgcacagatgcttgggaatgcttcttcagaaggttgatgataggatttatgtcagcgagaagattgattggatgtgtagacactcaagtatgtctattcctattaatcgccttggacttgctcaaggcatcgggctggttgcggcttctcatttagatacagtgttggagaaactgaagaacatactagatagtgcagagcaaagtgctttccagaggttcctctcatttttctcattcggcccaaaagtggaagatgttgatgacacatatgcagcattggcgttgatgtatggttatgccgcaagatatgctccatcaactgttattgaagccagaattaatgcacttgtggggagtaatatgcttggaaggttgcttcatgttcagcatcctactgcaaagcaagctgtgattactgcaatcgaccttttaggtcgagctgttattagtgctgctgaaatgggaatctcattcccactgaaacgaagagatcagttactggagtacgttttaactctaatgggtagggatcaaagtaatgatctcactgatttcaacactgagcttttgcacacacagagccttgctttaagtgcctgtactactcttgtctcgctagaaccaagattgccaatggaaacaagaaaccgtgtcatgaaggcaacattaggtttttttgctttgccaacagagccctcaagcattgttgagagtctcgtaacaaacctaattattctgttaggtgccatcctgcttacaagtggtgaagatggtcgaagtcgagcagagcagttgctgcatattcttaggcagcttgatccatatgtatcatcatctctggaacaccaaagaagaagaggatgtgttgctgtacaggaggtgttaataaagtttcgcaatctttgttctggtggattcggtgcattgggctcctatccaactttcacaatgaataaacaaatcgatcgagggactaggagcttgtcaagtttgccatctgcatttgtgttgcctagtcgagattctttaagcttgggagagaggacaatggcataccttcctcgttgtgctgatacagacacggaagttaggaaagttgcaattcagatcattgcacttttcttcgacatttcattgtcacttccaaagcagaaggcatatcctaatgatattgatctggaatcctcgtatagtgctttgtcctcccttgaggagttagtctctattgtcagaagggaggcatctgttgatcaaactgaactatttcagagggttgtatcctcagtgtgtattctattatcaaaggatgagctggtcgtcttgctacactcttgtacgttggcaacatgtgataagataaaacagtcagcagatgcttcaattcaagctattatcatgtttattatcagaagaggcaaggagctacgtgaagctgatgtctcgaggacaactcaatctttgctctcatctgctatttctcttactgacacacactcacgccaagaggttctgaatgctatatcatgcctagcagaaaacaccaatcacgttgtggtctttgatgaggttctatctgtggctggaaaagatatctgtacaaaagacataccaaggattcgtggaggctgggccatacaggatgttttttatgcattttcccagcacaaggagcttgcacttctattcctggagtacactttatctatacttcacaaagaacctgtcataataaacagttctgagaagggggagagtacctctgagtcattggctgatgactgtattctacaggcaactatgtttgctctcaatgcatttatgagaggtggtgggaagattgggaaacaagcagttgagaaaagttacccttctgttctttcgggccttatactgaagctcggaagtcttaatggtgttgctgaattgggccgaaatgaacttctacgatcgttgttaattgcatttcagtcattttgcgaatgtgttggtgatgtagaaatgggaaagctattagctcgagatggggaacaaactgagaaggacaaatggatcgagcttgttcaggaaatcgcatgcagttcctcagtaaaacgaccaaaagatgttctgccaacttgtgttatcttgtgtaatgctctcaaccgaaatcagagggctgaaagggaggctgctgctgctgcactatcagaatttatccaccacattgaaaaagaacctacattgcttgaacaaatggttgaggaaatgtgtcaacatgtttctgatgattcaccaactgtcaggagcctctgtttgcgtggacttgtgcaggctcctgagagccacatgcttaaatacatccagcaagtgttaggagtaatattagcacttcttgaagaccccaacgagtctgttcaattaactgctgtccaatgcttgttaaatgtccttaatttgtcagaacaagatgctgttggtccaatcttaataaatctcttagtaaggctgcgaaatcttcaggtctcaatgaatacgaaaatgaggtccaatgcgtttgcagcttatggtgctttaagtgcatatggtgttggtttgcagcgcactgcttttattgagcagatacatgctacccttccccgtctgatcctccatcttcacgatgatgacctaagtgttcgtcttgcctgtcggaacacattccagctccttgcgacattgatggaagtagagggcttgtctgtgctcctcagcaagcagtattttgcttctgatcgccgttctgactatgaggacttcattagagacttaacaagacaactttgtcggttgtctcccgccagagtcgacagctacctagaatcggctatccaggcattcgatgcaccttggccagtcataagagcaaacgcagtttgtttggtgagttgcatgctatcctttttggatgatcagcgattcattgctccttatttctcccaggtatttgctacgttggttggtagaatgagccaatcgccagacgcaattgttcgagcatcagcatcgtctgcgctgggcattctgatcaagagatctaacatgctgaggtcactggtttcacgatatgatcgagcagattcatcacgcaattcccagagcggtgattctaacaccaagacaccatcagagtttcaagaacaggcagaaggaaatccgaatgatggcgcaagtggagcggcaataaaggggactgaagccgatcactgatgtaaatttactcgtatatacgtatagtgttctagctatgcatgcttgtgtatatgctgtacttccctcgcaaataggaacaggagagcaaatttatgctgccatgtcaatagatcttcagtacacctgtaaagcaaccactcacagttagatgattatttattgaatcaaatattatttatatattgaattgaattttcttcgatgcagt

SEQ ID NO: 5064 - DNA, 3793 bp, Zea Mays
atgactaacatggtggatttgtttgctcgtttggttgtgcttctgcataatccacttgctaggggtcaactggccacccagatcctgacggttctgtgctacttgggtccacttttccccagaaacctttctttattttggcaagatgaggtccctaagatgaaagcttacatcagtgatcctgaagacctaaagcaagatagcacataccaggaaaaatgggatgacatgataataaattttttggcagaatgtttggatgttgtgaatgatactgagtgggtcatttctttgggtgatgcatttgcacggcagtatgatctgtattctatatctgacggacacgctgctttgctgcacagatgcttgggaatgcttcttcagaaggttgatgataggatttatgtcagcgagaagattgattggatgtgtagacactcaagtatgtctattcctattaatcgccttggacttgctcaaggcatcgggctggttgcggcttctcatttagatacagtgttggagaaactgaagaacatactagatagtgcagagcaaagtgctttccagaggttcctctcatttttctcattcggcccaaaagtggaagatgttgatgacacatatgcagcattggcgttgatgtatggttatgccgcaagatatgctccatcaactgttattgaagccagaattaatgcacttgtggggagtaatatgcttggaaggttgcttcatgttcagcatcctactgcaaagcaagctgtgattactgcaatcgaccttttaggtcgagctgttattagtgctgctgaaatgggaatctcattcccactgaaacgaagagatcagttactggagtacgttttaactctaatgggtagggatcaaagtaatgatctcactgatttcaacactgagcttttgcacacacagagccttgctttaagtgcctgtactactcttgtctcgctagaaccaagattgccaatggaaacaagaaaccgtgtcatgaaggcaacattaggtttttttgctttgccaacagagccctcaagcattgttgagagtctcgtaacaaacctaattattctgttaggtgccatcctgcttacaagtggtgaagatggtcgaagtcgagcagagcagttgctgcatattcttaggcagcttgatccatatgtatcatcatctctggaacaccaaagaagaagaggatgtgttgctgtacaggaggtgttaataaagtttcgcaatctttgttctggtggattcggtgcattgggctcctatccaactttcacaatgaataaacaaatcgatcgagggactaggagcttgtcaagtttgccatctgcatttgtgttgcctagtcgagattctttaagcttgggagagaggacaatggcataccttcctcgttgtgctgatacagacacggaagttaggaaagttgcaattcagatcattgcacttttcttcgacatttcattgtcacttccaaagcagaaggcatatcctaatgatattgatctggaatcctcgtatagtgctttgtcctcccttgaggagttagtctctattgtcagaagggaggcatctgttgatcaaactgaactatttcagagggttgtatcctcagtgtgtattctattatcaaaggatgagctggtcgtcttgctacactcttgtacgttggcaacatgtgataagataaaacagtcagcagatgcttcaattcaagctattatcatgtttattatcagaagaggcaaggagctacgtgaagctgatgtctcgaggacaactcaatctttgctctcatctgctatttctcttactgacacacactcacgccaagaggttctgaatgctatatcatgcctagcagaaaacaccaatcacgttgtggtctttgatgaggttctatctgtggctggaaaagatatctgtacaaaagacataccaaggattcgtggaggctgggccatacaggatgttttttatgcattttcccagcacaaggagcttgcacttctattcctggagtacactttatctatacttcacaaagaacctgtcataataaacagttctgagaagggggagagtacctctgagtcattggctgatgactgtattctacaggcaactatgtttgctctcaatgcatttatgagaggtggtgggaagattgggaaacaagcagttgagaaaagttacccttctgttctttcgggccttatactgaagctcggaagtcttaatggtgttgctgaattgggccgaaatgaacttctacgatcgttgttaattgcatttcagtcattttgcgaatgtgttggtgatgtagaaatgggaaagctattagctcgagatggggaacaaactgagaaggacaaatggatcgagcttgttcaggaaatcgcatgcagttcctcagtaaaacgaccaaaagatgttctgccaacttgtgttatcttgtgtaatgctctcaaccgaaatcagagggctgaaagggaggctgctgctgctgcactatcagaatttatccaccacattgaaaaagaacctacattgcttgaacaaatggttgaggaaatgtgtcaacatgtttctgatgattcaccaactgtcaggagcctctgtttgcgtggacttgtgcaggctcctgagagccacatgcttaaatacatccagcaagtgttaggagtaatattagcacttcttgaagaccccaacgagtctgttcaattaactgctgtccaatgcttgttaaatgtccttaatttgtcagaacaagatgctgttggtccaatcttaataaatctcttagtaaggctgcgaaatcttcaggtctcaatgaatacgaaaatgaggtccaatgcgtttgcagcttatggtgctttaagtgcatatggtgttggtttgcagcgcactgcttttattgagcagatacatgctacccttccccgtctgatcctccatcttcacgatgatgacctaagtgttcgtcttgcctgtcggaacacattccagctccttgcgacattgatggaagtagagggcttgtctgtgctcctcagcaagcagtattttgcttctgatcgccgttctgactatgaggacttcattagagacttaacaagacaactttgtcggttgtctcccgccagagtcgacagctacctagaatcggctatccaggcattcgatgcaccttggccagtcataagagcaaacgcagtttgtttggtgagttgcatgctatcctttttggatgatcagcgattcattgctccttatttctcccaggtatttgctacgttggttggtagaatgagccaatcgccagacgcaattgttcgagcatcagcatcgtctgcgctgggcattctgatcaagagatctaacatgctgaggtcactggtttcacgatatgatcgagcagattcatcacgcaattcccagagcggtgattctaacaccaagacaccatcagagtttcaagaacaggcagaaggaaatccgaatgatggcgcaagtggagcggcaataaaggggactgaagccgatcactgatgtaaatttactcgtatatacgtatagtgttctagctatgcatgcttgtgtatatgctgtacttccctcgcaaataggaacaggagagcaaatttatgctgccatgtcaatagatcttcagtacacctgtaaagcaaccactcacagttagatgattatttattgaatcaaatattatttatatattgaattgaattttcttcgatgcagt

SEQ ID NO: 5065 - DNA, 1425 bp, Zea Mays
tgcacagcccgtcgcctccactcgtgaaccgggacacacgtacgttgaacaaacacccaaggcctgacgagacgagatccggacctccgtcctcccaactagggcgcgcgcgcgacctcggcaccggcggcctcgatccatcgttctctcggatccccgccagtgcatgccctggaacggacggacggaatggcagcgtcgccggaccacctcttcggcctgcgcaacagcttctacgtcggcgcataccacgccgtcatcaccagcagccagtccctccccgcgcacgcgctctcccccgacgacctcgtcgagcgcgacgccctcatgtaccgctcctacatcgccatcggctcctaccagctggtgatcggcgagatcgggcccagcgcggccacgccgctccaggccgtcaagctgctcgccgtgtacctctccggcgacggcgggaacagggaatcggtggtctcgaggcttcgtgagctcctgtcagacgcggcggtcgggagcaatccgattctccgggtgatggccggcaccgtcttcatgcacgaacgcgattacgccgaggctctcaagcacaccaactccggtggcagcatggagctgacggaccacgcagagaagcagctcagggtgatgcagcagctggacgaagaccacacgctgacgcagctcgccaacgcatgggtcgaccttgtgctgggtggttccaagatccaagaagcgcgcctcatcttccaggacctgtccgagaagtacccgacgacctgcacgattcttaacgggaaagccctgtgctcgatgcacatgggcaacttcgaggacgcggaggggttgctgctcgagtcactgaacaaggacgccaaggatactgagactctcgccaacctcacggtgtgcagcctgaacctggggaaacccgcaacgcgctacctcaaccagctgaagctcgcacacccggaccacgcgctggtgaagcgaatgtcctccgctgcagagagcttcgacagagcctgccaagcaatggcgtgaacctcgtttgcgaaaattacatttgttttccctaggatgagtcggaataacatcgtgatctactctgaagcaaagcagctagtgcatggctttctcatgggcagcttggactccaccgtcggcatgcttttccactggtctcggatagtacattcggcctcgctggtgcgctggaaaggcccaggtgtttcctttaccttttgggctatgctctctctctctctgacgccttgttgcgatgggagtgactgaggggaagcaatccttgaaatcctaaacaggagatagcatgaaacagtatttggttcaggtactgcaatgctgggggtcatatctcatatgcctgttccgatctgcatataataatagggtgtttggttcaatgagact

SEQ ID NO: 5066 - DNA, 3338 bp, Zea Mays
cgttctccccacacaagaattgacctccgttttattgccgctcatctcaatctaatctctctctctagctcccccaatcgccagatcacagagagaggggaagagcgtgaggagggacgagaaagccaagctgtatagcgagaaagctcagttgagttctgttctgcttttgtcttcctctctcgctggatctactactcccaccactgcctctgcctcggcctcgttgctgctggctgcgtgcgtgactgcgtgcctttgcccaaagcaagcctgcctgctcggtggctcgcttcggttgcagctgcagtgacctcaccctgcctctatgcttgctctcccaccatgtggtggtggtcttcgcgctccaactaacccccaccagcagcgcatcacaccaccgcatcgcaccgcgatgccaaccctggtggcgtcacgcggcccggcggcttcttccgcgcgccgcattgcaatgccgccaccgccgctggacggacccgtgaaggagtactagctagctagctagcccagcggcagcgggcgaggcgaagggagcggaggtcgttcttgcagacatgttcaagtcgcggtggcgcggcggcagggccaaggccgtgttcaagctgcagttccacgccacgcaggtgcccgagctgggatgggaggcgatggtggtggtggtgacgccgcaggacgctggccggccgacggcgcggtcggagcccgcggaggtcaccgatggcgcgtgccggtgggcggcccctgtcatggaggccaccaagctccccaccggcaaggacaagatctaccagttcctcgtctatgagaccgggtcgagcaaggcggcgctgctgggggaggccacggtgaacctggcggagtacgccgacgcgttgaagccgtcggtggtgacgctcccgctcaagggcagccccggtgcgctgctgcaccggcgagaacggcgacgctctgccagcggtggcgaagacgccaaagaggaggacgacgctgcagagccagctgagcaagtttgaggacgaggacagcgagaaggcaagagcagccgcggatgcgatgagtcctgtgcaagatggattgttgataagaaaaccgccagacatgaggtttccatcaagaagaaatgtgcctatgtctgctgatccagtgggccatctccacaatggcagcagtttcgatgccgtctcagtgtcgggttcagatggaagttctgggcgatatacccccaaaattagcgcaagcacacacaactcatttcttcaggatagtagcaatgctctctcgccatttgccaacaatcgcaccgtgaggaacccattgaccagttctggtgactggtcaggaagctcagctcctgatgctagtacggatgggtcaacaagcaattctggtgaggcagggttaagaggggaagaggatgatgtagataagctaagaagtgagatagccactttaaccaggaaagtggatgtttcagatatggagttgcagactctccgaaagcaaattgtgaaggagagtcggcgtgggcaagatctcttcaaggagatgagtagcctgagggaggagagggatgcactcagaagagaatgtgaaagactcagaggggcaaagaatatgatccatgattcaaatggctcagagaaacggctctcagatggggatgacccatggtcacagattgaagaactgaagcaagatctgagtcatgagaagaatctaaattcagatcttcgtctgcaacttcaaaagatgaaggaatccaactctgagctgcttctggctgtgaaagatcttgatgagtcgttggataaaaaaaacagagagatttccattttgcaagaggatacacaggaggatcagcaggaggcagaatatgagcatgcgctgtcaaatgtgcacaactctggacagaaattagccttatctgaaacgagttcataccaagagaaggaagatgagcttatgctggatgcactggcaaagaagcgtgatgacatctctacctctgagcttgaaaagaaagtccttgagttgagcaatgaaatcgagttgtacaagaaagaccgtgaggatatcgagatgcaaatggagcaacttgcacttgattatgagattctaaagcaagagaaccatgacgtgtcttcgaggctggagcaagcacaactgagggagcagctaaggatgcaatatgagtgttcggctcatttagctattataagtgatcttgaggccaatgttgagagcttggataatgagctccagacacaggctaaaaagtttgaagctgacatagcagaaataacgagcgcaaaggtggaacaagagcagcgggccattaaggctgaggattctctgaggaagataagatggaacaatgcagctactgcagaacgacttcaggaggaattcaaggtgttgtcttcacaggtatcttccgctttcagtgcgaatgaacgacaccttgtgcaagcaaggaaagaggtcgcggagctgcagttgcagaagagccagttagaagagttgctgcagaaggcccaaggagatcttggatcagttcaggatcagcaccgggcgaaggtccaacagttaataaccctagtggatttcaagtcaaaggagatagacaggctactgacggagctcaaaagcaagagtgacgagttccatgaccaaaaaagatgcgatgaagcaaggctgaatgctctgtcagaagaaatggacctactcaatgccaagatcgacgagctatccagcgagagaaacgacctctctgaaaagaacgcgcagaaagacaaggaactggccggaatcagtgaaaaggacatgcagttgcaagacaagactgctgagatcacttcactaaataaggagcttgtatctctcaaagaccaagtgaagacgcatctggacgaactgcacgatttaaaatgtctgaaggacaggaaggaggagacaattggaaaactgcaaatagatattgggtcactgaaactccagtgcgacaacttgaagacttcgctgtccaagaaggagtccgagaaagataaccttgcctctcaggtgctggagctgagaagatcccttgagacccgggaagaaggggcaaaggcaaatggccaaaattcagacgcgaagaacaatccgcatactaataataagcgcatgaagcacaataccggctccaccgggagcattgctgcactgccaggcaccaacggacagggtgaagacgatggtgactgcaatgggcatgacatgagaaacacatgaaccacggccatccgactgactgacatttatttgctgctggcaaaacg

SEQ ID NO: 5067 - DNA, 3783 bp, Zea Mays
ccctcctccccacgcctgtggacccaaaaaaaatcaattcgattttctctcttccgttctccccacacaagaattgacctccgttttattgccgctcatctcaatctaatctctctctctagctcccccaatcgccagatcacagagagaggggaagagcgtgaggagggacgagaaagccaagctgtatagcgagaaagctcagttgagttctgttctgcttttgtcttcctctctcgctggatctactactcccaccactgcctctgcctcggcctcgttgctgctggctgcgtgcgtgactgcgtgcctttgcccaaagcaagcctgcctgctcggtggctcgcttcggttgcagctgcagtgacctcaccctgcctctatgcttgctctcccaccatgtggtggtggtcttcgcgctccaactaacccccaccagcagcgcatcacaccaccgcatcgcaccgcgatgccaaccctggtggcgtcacgcggcccggcggcttcttccgcgcgccgcattgcaatgccgccaccgccgctggacggacccgtgaaggagtactagctagctagctagcccagcggcagcgggcgaggcgaagggagcggaggtcgttcttgcagacatgttcaagtcgcggtggcgcggcggcagggccaaggccgtgttcaagctgcagttccacgccacgcaggtgcccgagctgggatgggaggcgatggtggtggtggtgacgccgcaggacgctggccggccgacggcgcggtcggagcccgcggaggtcaccgatggcgcgtgccggtgggcggcccctgtcatggaggccaccaagctccccaccggcaaggacaagatctaccagttcctcgtctatgagaccgggtcgagcaaggcggcgctgctgggggaggccacggtgaacctggcggagtacgccgacgcgttgaagccgtcggtggtgacgctcccgctcaagggcagccccggtgcgctgctgcaccggcgagaacggcgacgctctgccagcggtggcgaagacgccaaagaggaggacgacgctgcagagccagctgagcaagtttgaggacgaggacagcgagaaggcaagagcagccgcggatgcgatgagtcctgtgcaagatggattgttgataagaaaaccgccagacatgaggtttccatcaagaagaaatgtgcctatgtctgctgatccagtgggccatctccacaatggcagcagtttcgatgccgtctcagtgtcgggttcagatggaagttctgggcgatatacccccaaaattagcgcaagcacacacaactcatttcttcaggatagtagcaatgctctctcgccatttgccaacaatcgcaccgtgaggaacccattgaccagttctggtgactggtcaggaagctcagctcctgatgctagtacggatgggtcaacaagcaattctggtgaggcagggttaagaggggaagaggatgatgtagataagctaagaagtgagatagccactttaaccaggaaagtggatgtttcagatatggagttgcagactctccgaaagcaaattgtgaaggagagtcggcgtgggcaagatctcttcaaggagatgagtagcctgagggaggagagggatgcactcagaagagaatgtgaaagactcagaggggcaaagaatatgatccatgattcaaatggctcagagaaacggctctcagatggggatgacccatggtcacagattgaagaactgaagcaagatctgagtcatgagaagaatctaaattcagatcttcgtctgcaacttcaaaagatgaaggaatccaactctgagctgcttctggctgtgaaagatcttgatgagtcgttggataaaaaaaacagagagatttccattttgcaagaggatacacaggaggatcagcaggaggcagaatatgagcatgcgctgtcaaatgtgcacaactctggacagaaattagccttatctgaaacgagttcataccaagagaaggaagatgagcttatgctggatgcactggcaaagaagcgtgatgacatctctacctctgagcttgaaaagaaagtccttgagttgagcaatgaaatcgagttgtacaagaaagaccgtgaggatatcgagatgcaaatggagcaacttgcacttgattatgagattctaaagcaagagaaccatgacgtgtcttcgaggctggagcaagcacaactgagggagcagctaaggatgcaatatgagtgttcggctcatttagctattataagtgatcttgaggccaatgttgagagcttggataatgagctccagacacaggctaaaaagtttgaagctgacatagcagaaataacgagcgcaaaggtggaacaagagcagcgggccattaaggctgaggattctctgaggaagataagatggaacaatgcagctactgcagaacgacttcaggaggaattcaaggtgttgtcttcacaggtatcttccgctttcagtgcgaatgaacgacaccttgtgcaagcaaggaaagaggtcgcggagctgcagttgcagaagagccagttagaagagttgctgcagaaggcccaaggagatcttggatcagttcaggatcagcaccgggcgaaggtccaacagttaataaccctagtggatttcaagtcaaaggagatagacaggctactgacggagctcaaaagcaagagtgacgagttccatgaccaaaaaagatgcgatgaagcaaggctgaatgctctgtcagaagaaatggacctactcaatgccaagatcgacgagctatccagcgagagaaacgacctctctgaaaagaacgcgcagaaagacaaggaactggccggaatcagtgaaaaggacatgcagttgcaagacaagactgctgagatcacttcactaaataaggagcttgtatctctcaaagaccaagtgaagacgcatctggacgaactgcacgatttaaaatgtctgaaggacaggaaggaggagacaattggaaaactgcaaatagatattgggtcactgaaactccagtgcgacaacttgaagacttcgctgtccaagaaggagtccgagaaagataaccttgcctctcaggtgctggagctgagaagatcccttgagacccgggaagaaggggcaaaggcaaatggccaaaattcagacgcgaagaacaatccgcatactaataataagcgcatgaagcacaataccggctccaccgggagcattgctgcactgccaggcaccaacggacagggtgaagacgatggtgactgcaatgggcatgacatgagcggacggggcagcgaaggagctggcctcgctgaaggagagcagcaaggcggtggaggaggagctgaaggagctgcacgagcggtactcggcgattagcctgaggctcgcggaagtggagggcgagcggcagcagctcgtgatgaccgttcggtcgctgaagaactcctccttgcggtgactgatgcatctccacccaaattgctgtagctaaaaggatttagacgataggtttgtccgtgacgtggttttgtccgtcagagttacagtacacagcatgtagatctcgtcacagtaaaatgtgcagtaatatagccataagttgtaatagttgtcttaccctctctacagtgtcagtgtgtcgtgctgtataatttccgtggcgtcattgtgttgtgaagtaaggaaaatgagaaggaaaagagtggtctttcagtttaatctcagaaa

SEQ ID NO: 5068 - DNA, 2946 bp, Zea Mays
cctgaactagaattctacaacttactgtcagtatgcatggttctgaaatctggacactaaaattctgtaacttcaacttcttaaaaaaaaaggaaatgtggaacctgcccttcaggaaataaggtggagaggtgtaggataggcagttcattaccctatagtctctgcggactgaagggattcttttaagagatttgcacattccacaccatgcctttgcacctaggttattcaggctgaaattgaagcatcatttatcatcccaaagtttgccatgaaagttcccatgtatgaaggccactatgacaaagtttgtgcttacctaaattttgtttctattatatacatataaaaaataatgaattttgttctaacaatacactctatgcacagcacagaaatggggcaaaagcatcttacgtcaattattgtttgttgtaaagtcacttttggcaatcgagacagagatggaccctaaaagcttggacaacataagagcatatctaaaagactagctaaatgacttattaagctaaattttgactaatcatcaacaaaataactctccaacagactacctatctgactcgctaaactatctgactcttcaaattggcttactcaatagccaaacctgactcttcaaattggcttactcaatagccaaacttggctagccacctaactagccaaactagaagtgaaatgctacatataaaatgtaatccctacgaagaaataaatagagagttaaatagagagccaaaaacaaagaatctctaagattcagatacgtggctcgccaagccaaactgcatgctgcgcaatgcgagtgagtagagtagggaatggggtgggggtgctcatattgcaaaactaaacagaccttggttctccaaattgtccgctttgccatggttcggaagcctctagttaggattcgtgagagcaaaatcgagcacttgttccaaatccaagaaaaccgccgtgcgtccagatcgaacagcaggaggagtgcggtgacagagacagcaaacatacctgtatccctcctcctcctgggttcctggcaaggtgaggagaggagactggagagaccgactggagcggggagaggagaggagtgaagactgaagagagtgtggttgggagagaagctgccgcgtcagccttctggtcaggatcagctttatccgggcaaagccccactgcagccccagaaacagaagaaaccgttaagagtggtccatgaccatgagcgtgggcgtggctagtgtgccgcgtccgtggatatgacgccgacctctcttctcttctcccctctcctctctagccgtagtagctagcaagccgaaggctggagctgcctgcctgaattctctcgtttctctgcttcttcctcctctcccgcccagaaccagaaccaggaagcatcgcgagccaccggcgagccctcgtcgccgccaggacgtgcaccgacgaccgggtctctgccggccgctggcctttctacaggtcttcgccgtccgctggggctaagcaagctagcttgcgagggagcatatatggtcctccgcgtttcatgaccttcatgaggtgttccgcggccgtctccgacggcattgcgctgcgcttccccgccgagggcagggccctccgcggaggcgtctgcgcgcgcgggcgcgggctgctcgctctgggttcccacaggagcagcagtaggagggcgaggcgcaggcacgtggcggtcttcgcgaggcggcggctcggcaagtggcagcggccgtggtggaggaccttcttcgcggactggaacgacgacgaggagagcctggccgggttcagggaggacgacgagctgctggaggagattggggccgaccaggagctgtcggagaaggccaagttcgaggagtggaggcggaaggccgaggccattgttgagctgcgcgaggcccagcaggacgcgttcaacgccgaggagcggtcgtgggaggactggaccggcggtggcggcggtggtggcgcgccggagaatggtggaggtggggactggggcggggaggccagcttgtcggagcagataaccgatgatcctgcggagatcgtctgggataagggcgtcgttgaggttttcagaggtactatcgatgaggattacgaggatatgctgttcgaagatcgagtttttatgtatgcctccacgaactcggccaaattcctagcattgctgatcgtggttccgtgggtgatagattttctagtgcacgactatgccatgatgccctttttagagaggtatgtccagaaggtgccgcttgcagctgagttacttgatgtgaggcgcagccagaagctgcagatggttaaggacctgaacatcgagaaggcaagataccgtcttgaagtagagatcggcaaatctcccccgctctctgatgaggaggtctggtttgagctgcgggaaaaagcgcttgagttgagggacgattggaggctagaaaaccgacaagcttttgcaaatgtatggtccgatatggtttatggggttgttctattcctgcttatctgcttcaaccagagcaaagttgcgatgctcaagttcacaggatataagttgctaaataacatctcagacactggaaaggccttccttattattctagtatcagacatccttctagggtaccattcagagtcaggttggcatacaatggtagaagttattctcgagcattacgggcttgaatccgatgaagcggcggtcacattttttgtttgtctggttccagttgctttggatgtgtacataaagttttgggtatacaaataccttccaagattatcacccagtgtgggcaacgttctggatgaaataaagcgccactaaggaatcatttggataaattattgccttggaggctgggaaactggttacaatttgca

SEQ ID NO: 5069 - DNA, 3493 bp, Zea Mays
cctgaactagaattctacaacttactgtcagtatgcatggttctgaaatctggacactaaaattctgtaacttcaacttcttaaaaaaaaaggaaatgtggaacctgcccttcaggaaataaggtggagaggtgtaggataggcagttcattaccctatagtctctgcggactgaagggattcttttaagagatttgcacattccacaccatgcctttgcacctaggttattcaggctgaaattgaagcatcatttatcatcccaaagtttgccatgaaagttcccatgtatgaaggccactatgacaaagtttgtgcttacctaaattttgtttctattatatacatataaaaaataatgaattttgttctaacaatacactctatgcacagcacagaaatggggcaaaagcatcttacgtcaattattgtttgttgtaaagtcacttttggcaatcgagacagagatggaccctaaaagcttggacaacataagagcatatctaaaagactagctaaatgacttattaagctaaattttgactaatcatcaacaaaataactctccaacagactacctatctgactcgctaaactatctgactcttcaaattggcttactcaatagccaaacctgactcttcaaattggcttactcaatagccaaacttggctagccacctaactagccaaactagaagtgaaatgctacatataaaatgtaatccctacgaagaaataaatagagagttaaatagagagccaaaaacaaagaatctctaagattcagatacgtggctcgccaagccaaactgcatgctgcgcaatgcgagtgagtagagtagggaatggggtgggggtgctcatattgcaaaactaaacagaccttggttctccaaattgtccgctttgccatggttcggaagcctctagttaggattcgtgagagcaaaatcgagcacttgttccaaatccaagaaaaccgccgtgcgtccagatcgaacagcaggaggagtgcggtgacagagacagcaaacatacctgtatccctcctcctcctgggttcctggcaaggtgaggagaggagactggagagaccgactggagcggggagaggagaggagtgaagactgaagagagtgtggttgggagagaagctgccgcgtcagccttctggtcaggatcagctttatccgggcaaagccccactgcagccccagaaacagaagaaaccgttaagagtggtccatgaccatgagcgtgggcgtggctagtgtgccgcgtccgtggatatgacgccgacctctcttctcttctcccctctcctctctagccgtagtagctagcaagccgaaggctggagctgcctgcctgaattctctcgtttctctgcttcttcctcctctcccgcccagaaccagaaccaggaagcatcgcgagccaccggcgagccctcgtcgccgccaggacgtgcaccgacgaccgggtctctgccggccgctggcctttctacaggtcttcgccgtccgctggggctaagcaagctagcttgcgagggagcatatatggtcctccgcgtttcatgaccttcatgaggtgttccgcggccgtctccgacggcattgcgctgcgcttccccgccgagggcagggccctccgcggaggcgtctgcgcgcgcgggcgcgggctgctcgctctgggttcccacaggagcagcagtaggagggcgaggcgcaggcacgtggcggtcttcgcgaggcggcggctcggcaagtggcagcggccgtggtggaggaccttcttcgcggactggaacgacgacgaggagagcctggccgggttcagggaggacgacgagctgctggaggagattggggccgaccaggagctgtcggagaaggccaagttcgaggagtggaggcggaaggccgaggccattgttgagctgcgcgaggcccagcaggacgcgttcaacgccgaggagcggtcgtgggaggactggaccggcggtggcggcggtggtggcgcgccggagaatggtggaggtggggactggggcggggaggccagcttgtcggagcagataaccgatgatcctgcggagatcgtctgggataagggcgtcgttgaggttttcagaggtactatcgatgaggattacgaggatatgctgttcgaagatcgagtttttatgtatgcctccacgaactcggccaaattcctagcattgctgatcgtggttccgtgggtgatagattttctagtgcacgactatgccatgatgccctttttagagaggtatgtccagaaggtgccgcttgcagctgagttacttgatgtgaggcgcagccagaagctgcagatggttaaggacctgaacatcgagaaggcaagataccgtcttgaagtagagatcggcaaatctcccccgctctctgatgaggaggtctggtttgagctgcgggaaaaagcgcttgagttgagggacgattggaggctagaaaaccgacaagcttttgcaaatgtatggtccgatatggtttatggggttgttctattcctgcttatctgcttcaaccagagcaaagttgcgatgctcaagttcacaggatataagttgctaaataacatctcagacactggaaaggccttccttattattctagtatcagacatccttctagggtaccattcagagtcaggttggcatacaatggtagaagttattctcgagcattacgggcttgaatccgatgaagcggcggtcacattttttgtttgtctggttccagttgctttggatgtgtacataaagttttgggtatacaaataccttccaagattatcacccagtgtgggcaacgttctggatgaaataaagcgccactaaggaatcatttggataaattattgccttggaggtattcgatgggtatatttgcttggcatattaagttttcatcaaatctgaagggcgtccttcgtctggaaaggccttgcctagaatgcctgcctggccacgccatcaatcagagtgtccggctgttcgggaggactgggaattggagaagtaatctgagctagtccttatgtatattctaaaacaatatcttgtggatagataaccatagaggaaacttgaggcttttggtctgagatttatcattggcggcaaagcatttttgccttagaaattcttttgcatgatggaggccacaggttggttggaatctgtaaggttattgtttcaggatgatgtccagagctgcaaccttcgttggtgctcctattttagaaccgaaacgtatcgacatcttgatgtccagagtttgcagggttcagaaaccgaaatatgatatgcaagttttaaacttcgttactaagtcgtaaagttcaattgtaaactgtttcggttcgaacctttatctttcgataaagcaagtttctttttgattaatttaaccaaggtaggcttcgtgttgcaatgaaagca

SEQ ID NO: 5070 - DNA, 3304 bp, Zea Mays
accttttccttccccgccggccgccgcgcagcgcgagcggagtcgccctctccagtagagtaggagtgacgtctctacctatccacctcagccccctcttttcattccccacccgcgccgcgcgagcggagtttcgcagcacgctgcggctcgcttcgccagaattcctggcgagggtacagaattccgcatcgaaacggaagggttccgctcaccgagaaaattggcctcaatcgcgcgtccgtcctcagcgtcgtgcgttcggatgccaaggagggaacaacaactggggtttcagcaaaggattggacaaacacaatattggcacttgtgtctcctaattccaaaccggaggacttcaaccgcccaggtcatatttttcctcttaaatacagagaaggtggtgtgttaaaaagggctggacatactgaagcatcggtggaccttgctatgttagctgggttacctccttttgcagttctttgtgaaattgttgatgatgatgatggctccatggctttgttaccaaaactgcaacaatttgcaaagagggagaacctgaagataatatcaattgcagacctgataagggtgatgttggggatggacaagagatcttagtacgagtgcattcggagtgcctaactggggacatatttggatcagcgagatgcgattatgggaattaacttgctctggcaatgaccatgattgagaaaactggccggggtgtagtagtctatcttcgtggccatgagggtaggggtattgggctgggtcacaagcttcaagcatacaacttacaagatgatgggcgcgatactgtcgaggcaaacttggagctagggctgcctgctgactcgcgggagtacggtataggtgcacagatattacgccatcttggtgccaggaccatgcggctgatgactaacaaccctgccaagtacactggactcaagggctatggtttaagtgtccttggtagagtgccattgctaacaccgataaccaccgagaataggcgctatatggaaacaaagcgattgaagatggggcatgtttatggaagccgctccagtaatcatgcaaacggcagtggcttggctggtgctggcgagagagaggagcaggatcagaatgacagtgctggcgtgcaagagcgaactccagaagcttgagtgcctaactctgcgttccttagagctgctccaatgggagtcttaaaaagagatgcatcttaaaatatagggctccatggcaaaaaaatcactccaacggggacctcattttacaaaaactcaggaaacaaatttgggctccggtctcattggtcccaaatgtaggacttgaaactatcggccctattctcgttcccacgcccccacgaccttcggtcttttcctgttgcattcgttctcaagccgtctctcccacaaaccaaaccctctgcctgtcgagaagcattggcgagatggatggacggccaccgccttttcctcgttcacggccaacaggttggcctcgttgaacttccatggagatggcactagatgtgatagggagatcatcagctgtgtcttctccgccagatttgcgcaggcctcctgtggccgtggctgcagagcgaaggcctgcaagtatgtctgcaacttcccaacagacacaaggacaagcgtcttggcatcgaatcgctgcagaccatgccgatcggagtttatcagtggcaccgatgatgtatcaagatccattgtcaatgattgatgactataggtaataacctttctgttgagattagtagtcgattatatttgctcatgaattcaatcgatggtgatctgggatctccatggttgagaaattgaagtcaaggcctggtgaggttacttgtactggtaggtgctgatagatgtagtgctcaccgatgcttgtgaattgaattattggttctgaaaatatcctcacttcaaccatgcatacgagattatgagtaaatgtgaattccatacactctgttgccccagtccaatacaaccttgctgaaccttgcatatttgtgtgagcaggtacatttttgggagtctctttaatgtttttcttgtttggtctcataattagtggagtacttcaacttatgtgcattattatatcaatttgattaccaaactttattgtgtatagcgtcaaagctgttttgaatgtcttgtgtttgtgtatatttcattctaattccataaccagagtctgctcatatttttacactactctattgaaccaagaacctgaagatgtatttgcctgccaagaaaatatggagagcgaaaatgaggtcatggagtcaccaccattgaatgattcaaattcacagtcaaaaccaaagggtcgatccaagaattttaatgaagctgaagacattttgttgatgtcagcttatcttaacatacgtaaagatgcaattactggaagggatcaataagaaggcaacttttgggaaagagttgagaagtactttaacgttaacaggacatttgagtcagatcgtaactggtcatcgttgaagcatcggtggggtataattcacaaataagttagtagtttccaaggtttccatgacagtatcgaaaggaaaaatgaaagtgggaagacaagtgatgataagctggctgaagcaaatgtaatgttccatcaatttaaaaataaggccttttctttgttccatgcgtggaacattctcagacatgagccaaagtgggctgaagataaaacatctaatgaagggaatgcaaatggggacagtcatcccaatgctcaaagacctgcaggaaggaaagctgaaaaggaaaagatgaaagcaaaaaggcgcaacagtgatgaagagtctgatcctttcattgaagaggtaaaaaaatttgagagaatcgagagagaaaactgagagcgaacgaaaggagcgtgatgaaagatactttgagctgcataagaaaaaagtagacttggagcaagaccagcatgacaagttgataatggcacttgagtcttgacacgagcacaatggatgaccaaggaaaacagtattttcagttgatgaaagaagatattttagctcgacgctttgggagtaggcagccatagttatttagtttttaatactttagacttttttccattcaaaacagattatcttgatgttcatgtaatgtaagaacatattttcattcaaagcagattatcttgatgtttgcaacaatctgtgttgacattgttttctggttactgtaaaagttgagttgaaattttgcttctgaaa

SEQ ID NO: 5071 - DNA, 2689 bp, Zea Mays
cgcagtccgcgctcctcttccctcactggtgctcgccttggctgctccactcccagctccaaaaccctaaccccgcgagacatccagcagctaggagcgggtccaggagctcaccgtcgagcgaccgctacactcgacctcaccggtttctaatgctgatcaaagcatgagcttcactcctgttccaaggttcaggggggcagcctattcgcagttgtgtcctcagtctagcagttgtgctgaacatttggtaaatgtggatggggcgagtgcaaaagacttgtcagttgacccaagcacattttgtattccgcaagatgctaatcagggattttgtagccgagctttacagtacactagttctgtttcaaagcagggatttgcagctcaaggtcttcctgtaaatgctgcagagtttggtctgaataatgattcttctttggtgggaggatatcaacaatttgactaccttctggggcctcctcaaactgaagtgtgtgaaggaatgtggatgaaaaatatcaacacaagtatcatccaccggcgtagaccttctaatgcatcctgccttgatcatacagaagaactaacttcctatgaaaatgatgagggagctatctcatttggaagtagttgtagcacaggaattgcgagttatccatatagtactcctttgcaaagaaatagccacatttcggatacgcgggatggaacttgggatgctctcgtgcaaatgcaagaggctttggaagcatccaacagtgacaatggactcaatgaagagtgcagtgatttgactttcaatcatgcagaactttcaggtgggaatgccgtaaagcataaagttgtttgggacaatggctctttaaacagtccatctttcacctcaaatttattgtctttccctggtgatactgagaccaccctcacaagtgcctccactgtttattgtacctttcagaactttgctgatctccaacataagatgaacaacaatgagcaaaacaaattatctagtgaggttgaactgcctcgtcagaaagtgcccatgacaaaccatgttaatggaagtggaggtgaaatgcattctgctgaatggggaacgaaccctggtctcatagaatcttctggctttatgccaagcaatgaagacagacaaaacgatatatcacatcaaccgtcaagttcatttgtatacagtgcagatggaactgtggatcattgctcaaaaaagtcacccctcatgtatgaatgtgaagagcagatggaaattgattcacttttaaattcattcggtgtatcaactgattcattttcacaaacatatggaatgtttgagcgaagcaacaatttggttgagtttgatatgaagaccgaattagatgaaagtggttctgctgcatgctttaataataatgccccatatatgcaaactggaccacctgagtcagctatatctgatggatcttcttatcctgaacagtatcagtctacttctcaaacatgtggcttagtttatgcttcagcatctcagtggcaaaatatgtcaagttctggattgcctttactggattgtcgcaaaagtattggtgagcccacttcaataattagcctggggggaaatggtaaaggacacttgctgcccacaagtgaagatactttattacagaaaccacagagtgttgctcctgatgctagattggaaatgaccgacaatgttgctgattgctatctggagtctgctgctagcttggatggccattcttgtccactaggagcttccgcatgtcatgatgaagcaatggcagccaaagatttgcagacagcacaacatggcgtagtcacagattgcacctttggaatacatacttcaaaccacgctggacattcagacatgctgctacccattacacagactacttctgttcaagagcctggcttgagtttgtccaaggatctgaactcatcatgtattcgaggaacagaggttaagaaagtagatttaacagcaacatacaattctgaacgccatggcatcctccgcctcaagtcttttgaacaaaaaactcctgagagtatgggtatgaaaacatacatatatcattgtggtgatcatagccagattgttgatcctcagcagagtatcatactcgctgcaagcaaaccttcacactcaagtgttttgccagttgacaaatctgatggcaaggtcgtttcacagcaaaaaaagcggaaaagggctgcagaaaaccttttagcgtggcatgatcacatcatgcccgggcatgggagcatgcatcgtagaagaacacctgaattggattgggctcgtgctaccaaaagattggttgagaaggttatatgatttttgatatgtcatataaaaccctttctgttgtgcaatttttccccactggtctgacatccttattgtgcatagcaggtagatggtgagaatgcaacaatgggaagtagcacctttaatactccagctcggaagagacttattttgactactagcctgattcagtatattcttcctgttgtaccagctagacttcttgccgcaaatgttactaattccattgaggccattgtataccacatttctaaatccgcactcagtgacgcatgtgacactgctctatctgttgtgaatgacacgctgatttattcataatatctatgt

SEQ ID NO: 5072 - DNA, 3173 bp, Zea Mays
cgctcctcttccctcactggtgctcgccttggctgctccactcccagctccaaaaccctaaccccgcgagacatccagcagctaggagcgggtccaggagctcaccgtcgagcgaccgctacactcgacctcaccggtttctaatgctgatcaaagcatgagcttcactcctgttccaaggttcaggggggcagcctattcgcagttgtgtcctcagtctagcagttgtgctgaacatttggtaaatgtggatggggcgagtgcaaaagacttgtcagttgacccaagcacattttgtattccgcaagatgctaatcagggattttgtagccgagctttacagtacactagttctgtttcaaagcagggatttgcagctcaaggtcttcctgtaaatgctgcagagtttggtctgaataatgattcttctttggtgggaggatatcaacaatttgactaccttctggggcctcctcaaactgaagtgtgtgaaggaatgtggatgaaaaatatcaacacaagtatcatccaccggcgtagaccttctaatgcatcctgccttgatcatacagaagaactaacttcctatgaaaatgatgagggagctatctcatttggaagtagttgtagcacaggaattgcgagttatccatatagtactcctttgcaaagaaatagccacatttcggatacgcgggatggaacttgggatgctctcgtgcaaatgcaagaggctttggaagcatccaacagtgacaatggactcaatgaagagtgcagtgatttgactttcaatcatgcagaactttcaggtgggaatgccgtaaagcataaagttgtttgggacaatggctctttaaacagtccatctttcacctcaaatttattgtctttccctggtgatactgagaccaccctcacaagtgcctccactgtttattgtacctttcagaactttgctgatctccaacataagatgaacaacaatgagcaaaacaaattatctagtgaggttgaactgcctcgtcagaaagtgcccatgacaaaccatgttaatggaagtggaggtgaaatgcattctgctgaatggggaacgaaccctggtctcatagaatcttctggctttatgccaagcaatgaagacagacaaaacgatatatcacatcaaccgtcaagttcatttgtatacagtgcagatggaactgtggatcattgctcaaaaaagtcacccctcatgtatgaatgtgaagagcagatggaaattgattcacttttaaattcattcggtgtatcaactgattcattttcacaaacatatggaatgtttgagcgaagcaacaatttggttgagtttgatatgaagaccgaattagatgaaagtggttctgctgcatgctttaataataatgccccatatatgcaaactggaccacctgagtcagctatatctgatggatcttcttatcctgaacagtatcagtctacttctcaaacatgtggcttagtttatgcttcagcatctcagtggcaaaatatgtcaagttctggattgcctttactggattgtcgcaaaagtattggtgagcccacttcaataattagcctggggggaaatggtaaaggacacttgctgcccacaagtgaagatactttattacagaaaccacagagtgttgctcctgatgctagattggaaatgaccgacaatgttgctgattgctatctggagtctgctgctagcttggatggccattcttgtccactaggagcttccgcatgtcatgatgaagcaatggcagccaaagatttgcagacagcacaacatggcgtagtcacagattgcacctttggaatacatacttcaaaccacgctggacattcagacatgctgctacccattacacagactacttctgttcaagagcctggcttgagtttgtccaaggatctgaactcatcatgtattcgaggaacagaggttaagaaagtagatttaacagcaacatacaattctgaacgccatggcatcctccgcctcaagtcttttgaacaaaaaactcctgagagtatggttgacaaatctgatggcaaggtcgtttcacagcaaaaaaagcggaaaagggctgcagaaaaccttttagcgtggcatgatcacatcatgcccgggcatgggagcatgcatcgtagaagaacacctgaattggattgggctcgtgctaccaaaagattggttgagaagacttcttgccgcaaatgttactaattccattgaggccattgtataccacatttctaaatccgcactcagtgacgcatgtgacactgctctatctgttgtgaatgacacgctaccgaaccagagcagcacttctggtaaggaaggctcaagaatcctatcagaagttctggaaacatatgagtcgaggcttggcaagctggaaatttccttgttaagctctgaaaaggcgacgacattgcatgatctggcatcagagctacaggacttggggcggtggtatattctctatcatcttgcaaagtggcatgggtacactaacaattctgagctcgaccctggcgcagctactgtcaagaaacatgaaggagctgctgcagcaccagtaaactcgctgagtgatatcaagtgtcgcttactgaactagggcagctcagcgactactaacaagtcaacccaacccgtgttatgctgaactgcgtataggaatatagaaccatagaacatactgctgctgtggataggcctggcgcggtggtgagaagccttctactgagccaaaggtcttgggtttaacacaacctttctgcaaaaatgtagagataaaggctgactctgttatttcttctctagaacctcactcatgtggaagtcgtcatcactgggtccgtctttagaacgtactgccgccccgttgccttgttggctttttttttgtttgtaaatgagaggcaacctctccgtttagacttaggaatatggtgatgtgacttaccatgtgctatgtgatcattagatgtaggagcacgggaagatcattttgcaagtatagctaacgctagctgtctggaacttccagatgttactgttcttttggccagtttgctagatggttatgatccggtggttgcagtttttgattgtcttttatctggtg

SEQ ID NO: 5073 - DNA, 3098 bp, Zea Mays
caacgagatgcaaccaaatccccgtccactccaccagctctgcaatccgacaagagatttgccaattatttctcctagaaaaaccgatcgcatcagtccccatcctcttcgccgtggggtcggcaggcagggcaaggctaggcagcgcctctccgcgtgtggtccgtgtgcgagggtccgctcctcctcccctccgtgcacccggagggcagcggcgtctcttcttcctggtcgaatctccccgcggctgtgaataggaggaggtcgacgacgccatagcaaaaaacaaatccttggaatgctttcggagggtcggggattcgtcgccggctgcctgcactgatgcttggagcgcgcgaatctgctcaagttttgatcttggcgtgctcttgagtctggaatccgggcattcattggggctttgttctcagtttgcaaggctgcaaggccgtgctagtttgaacccatggagactactagcacaacaaatgaacagactgataggggggcgatgtgggagttggaaaggaatctcgatcagcccatggatgcagaggccggcagattgagaaatatgtacagggaaaaggtggaacatttgctctttactcgttgctttgccggcatgcaaagataaacactattccgaatcagcatagaacagatgaagaactaacaacatacagccgccacacatatgatgagaaatctcttgctgcaaagatcaaaaggtggttagaggggcaccaattcagaaagaatgtcattcttattcttgttctttttggtacttgtatggcagttggagatggaatcctcactcctgcaatatcagttctttctgcaactggaggaatacaagtggaagagaaaaaaatgaaaaatgatgcggttgtcatcgtctctgtggtcatattgattggattattcagcatgcagcactttggtactgataaagtcagttggctttttgcgccgatagtatttgtttggttcatactcattggagtcctgggcgctgtaaacatttccaaatatgaccaatctgttctcaaggcttttaatcctatctatgtatatcggtactttaagcgagggaagactagctgggcttctttgggaggaattatgcttagcattacaggaacagaagcactgtttgctgatctctcatatttccctgtacaagctattcagattgctttcacggtggttgtgtttccatgtcttcttttgcagtatacaggccaagctgcctatatagctcagaacaaagatcatgtctcccatgccttctatttttcccttccagattctgtactctggccatcattcattgttgcaacagctgctgcaatagttgctagtcaggcaactatatcgatgacatattcgattatcaagcaagcacttgctctagggtgcttccccagagtgagaattatccatacttccaagaagtatctaggccagatatacagtcccgatattaattggatccttctggtattctgcattgctgtcactgctggatttaaaaaccaaagccagatagcaaatgcatacggtactgccgtgataatggttatgcttgtgacaacatttctcatgatccctataatgctgttggtgtggcgcagccactggaccttggtcatcctgttcaccgtgctgtcactgtttgttgaaattccgtacttcaccgctgtggtgcggaagatcgaccagggtggctgggttccacttgtgtttgctgttgccttcctcatcatcatgtatgtatggcactatggtacgctcaagcggtatgagtttgagatgcacagcaaggtgtccatggcatggatcctaggccttggtccaagcctcggtctggtcagggtgcctggtgtgggcctggtgtacaccgagctggcaagtggtgttcctcacatcttctcacacttcatcaccaacctccctgccatccactccaccctggtctttgtgtgtgtgaaataccttcctgtctacactgtgccactggatgaaaggttccttgtgaagcgaattggtcccaagaacttccacatgtttagatgcgtggcgcggtatggctacaaggacatccacaagaaggatgatgacttcgagcagatgctcttcgacagcctgatgctattcgtcaggctggagagcatgatggaagagtacacggattctgatgagtacagcacccgtgagacgaacctgtcaggcagcgccaacccaagaatcaatggcatcagcgccggttcaaacatggatctcagctacacatcccatgactccattatacaggtgcagtccccaaattatacggggaacagccaggcggtgtcaccaggtcagctgtaccataccgtgggcgacgagattgcgttcctgaacgcgtgcagggacgccggggtggtgcacatcctcgggaacacagtcatcagggcccgcagagattcagggttcatcaagaagattgctatcaattacttgtatgctttccttaggaagatctgcagggagaacagcgccatcttcaatgttccccatgagagcctactgaatgttgggcaggtgttctatgtgtaagcactaaaaccaaacacatgtagtagatgagagttcagcttcggaaccactggagagaatctagctgtgttttgttcataggtaataggagtataatagttgaaagaattgtacagcaaaacagcatctttaatgtgaccatttggagcctgatcagtagtggctagggctggacgaaatacttgtggctcgataactcgctcgactcggctcgttttgattctgtagcgagccaagctagcattttagctcggttctctaatgagccagctcggattagctcgtgagctagctcacgagccaaacgagccaagccacaacacaagtttgtctagtcgtaagtgtcgtctcatctcttatagtctcgatttctcgtagttatgatcagtgatatggacatgtgtggatgcgtcatatgcttacatgtttgcattattgtatggctacatacctacattgcatatttaatatttgatcattggttatggttttgt

SEQ ID NO: 5074 - DNA, 1317 bp, Zea Mays
tacaaactatggcaaacattaggcagctaagcctgaatccgctttgtggcgcctatgcgcccgcagcaaccaacgaggcaacggatcgagttcctctccgaactccaactctgcgccgcaatccactcaagaaggttagccctcgtggtctcggatttggataatcctccgccgaggtatgaaacaggaggcggccaccagcatagtggtgacccaggaggacgtcctgcaccactacaaggagcctccaccccgccgcgaggacgatccgccagcactggctgcgtcgctgtcgttgccgtcgtcactgtcggaggacgatggcgacgccatgccgcagccatcttcatacgcggtcttgccgcgccgggaaggcgagctggtgtctgcggaggagctgctgctggtgccgccgctcaacttcgccatggtggaccacggcgtgtaccgctccggattcccggacgcctccaacttgccgtttcttgagacgctccgactccgctccgtcctgtgcctgtgcccggagccatacccggaggctaatctggagttcctccgtgcccacgggatcaagctcttccagttcggaatcgacggctccaagttttggacttttgatactgaaataacaggaaccatttgtgaacataccagaagatagaatccgtgaagctctagaagtcatcctagatgcaagcaaccatccggttcttattcactgcaagcgaggaaagcatcgaaccggctgtgtggttggatgctttaggaaattgcaacgctggtgtctaacttcaatatttgacgaataccagcgttttgctgctgccaaaacaagagtttctgacctacggttcatggagctatttgatgtatcgagcataaagcatttagcatttgagtcgtctgtatgatagtaacattggtgcatgataacaactcaatactggttccattacggtgtcatctttttcatttaagaaaaaaaatcatttctaaaaatgctaccttattactccctccatccccaaatataattcgttttagactaaatatatattaattaattaatctataaatattatttgtatttgtatgtatatattcattatcattgtggacggaaaaaaagtctatattttgagacagagcgagtatttttttagcataatggtttgggagaggcaagtcataagaataagtcctgactacatgtggttattatcagttcatatatgtgataatggcagcttaatatctgttgctaagaaaatggacgaaatcgctcgagtctacttcattgtgggagttcttttt

SEQ ID NO: 5075 - DNA, 3013 bp, Zea Mays
ttctcgttcggtcgttttcgttcccctacctccagtccagtcccaggtccgagccggaccttgatcgccgccgtgcctcggcgcaaggaatggggccttcggtcttacccttgcacgcgccgccggcatcaggagacgtctctgtgtgcttcgccgtgccttcagccgtagccggcgccgcatcagcgtgctccagagaggaccgcagcttccagcacgtgtccctgacaccgccccacactggattgggaagggccgctgaccccacgcacctgcccgctggccagtgttggaagtttcagactcagttatttgaaacatcaagatggttaatttcggaaagaaattgatggctgatcaagtggacgaatggaaaggatactacatcaattacaagctgatgaagaaaatgttaaagcaatatgtccaacaaacccaacatgatgagaaagatcgcgaacaagttcttaaagacttttcaaggtttcttgatgaccagattgaaaggattgtgctttttctgctacaacaacaaggccatcttgccagtaggattgagaaattggcagaaaaacgcactgctcttctggaagagtatgacatatcacaagtttatcagctgcatgatgcatacagggaagtcgggcttgatctcataaagcttctccgctttgttgatgtgaatgctactggtatacgcaagatactaaagaaatttgataaacgctttggctacaagttcactgattattatgtcaccactcgtgcaaatcatccttattctcagcttcagcaagtatttaagcaagtgggaattgtagctgttgtaggtgcattatcgcgcaaccttgaatatctgcagcatcatgaaggaagctttgtatccatctatgatcgtccagcagttaccttgaaggaccctattatagaccaagtaaaccatgcagtacagaaactcacgcatgccacgaattttatgcaattcttgggacagcacgcgcttattgtccaggaagatgcagaaagcgagtcggaggatcttgttggtgatcagagctaccatttcatgtccctggtgcttaatctagtgaacacattcctttacatggtgaatacatatatcattgtgccgactgcagatgactatgcagtaagccttggggctgctgcaactgtatgtggtataattattggatcgatggcagtcgcccaagtattctcctcagtctacttcagtgcctggtcaaataagtcctacttcaaacctcttgtgttcagtagcattatgctgtttcttggaaacctactgtatgcattggcatatgatctgaattcactaatagttctcctgactggacgactgctatgtgggtatgcaattttctcaattcactctatctcacttgatttacgttccacttttgtatgctagcattgatctgggtgaaaattactagtatgacaaatgcaggttgaggatccttaagctgagggcaatattctagaatatttatattgctgaatagaaaacaaaatggaaactgtatatcttacaaggagataaaggattttaaatctcgagactggcattaaaatatatgcttttctatttcttttatagaacttaactagttatccctacctccctttgggctagtaatttgtctatattgtttaaggttcttgattttctgacggtgcatctgtgatcgagctgccagcatgtaatgtgcaggttaggttctgcaagagcagtgaaccgtcgctatatcagtgactgtgtgcctctcaagatgaggctacaagcctctgccgggttcgttagtgctagcgctcttggcatggcatgtggccctgctcttgctggttttctccagattaaattcaagatatactcgctcagttttaatcagagcacattgcctggatgggtcatgtgcatttcttggcttatttacttattgtggttgtggcttacattcaaggaaccagaacacttcactaaaactctggtcaatgaacagccgtcagaatctggccgccaaggaaattctaacttggaggcaggtctagctgaaccattgcttcaaggtatagaacgaaggcaggatgagaactcagaagttaatgatgatactgaagtagagtcagaaagctctcatgaaccagcaacatcaattgcttcagcatacagattgctaactccatctgtgaaggcccagctactgatatacttcatgctcaagtacgcaatggaaatactactatcagaatcgagcgttgtcaccacatactattttagctggtctacaagtgctgtggctatctttctagcgattcttggattaacggttcttccagtaaatgccattgttggaagctacgttacaaatttattcgaggataggcaaattttgttggcatctgaagtcatggttctcatcggtataatcatgagcttttgtttcacacctcactactccatcccgcaatatgttctttcagctttcatcacatttgtatttgctgaggtgcttgaaggagtgaatctgtccttgctctcacgagtaatgtcatcgaggctttcccgagggacctacaatggtggactcctttcgacagaggccgggacgttggcccgtgtagttgcagatgccacgattactgcagccggttatctcggcacggacctccttctgaatgtcactcttctcccatcccttgtgatttgcatagtctccatcgcagcagcactctacacttacaacaatctctattgaagctattgttgctgtacaagtgtacaacaatgttcctaagctaaaatgttcctgcccacaacgggtttgtatatctgttcaagcatggtttgtaaacattttgatcaagtttgtatgcaaaatttcttgtatttagtgcatttatgtaaagattcatcctgtaaagaattataaactatgagacgctattgccatttatgatcatttatgtttatctttttagccttatgtta

SEQ ID NO: 5076 - DNA, 3681 bp, Zea Mays
ttctcgttcggtcgttttcgttcccctacctccagtccagtcccaggtccgagccggaccttgatcgccgccgtgcctcggcgcaaggaatggggccttcggtcttacccttgcacgcgccgccggcatcaggagacgtctctgtgtgcttcgccgtgccttcagccgtagccggcgccgcatcagcgtgctccagagaggaccgcagcttccagcacgtgtccctgacaccgccccacactggattgggaagggccgctgaccccacgcacctgcccgctggccagtgttggaagtttcagactcagttatttgaaacatcaagatggttaatttcggaaagaaattgatggctgatcaagtggacgaatggaaaggatactacatcaattacaagctgatgaagaaaatgttaaagcaatatgtccaacaaacccaacatgatgagaaagatcgcgaacaagttcttaaagacttttcaaggtttcttgatgaccagattgaaaggattgtgctttttctgctacaacaacaaggccatcttgccagtaggattgagaaattggcagaaaaacgcactgctcttctggaagagtatgacatatcacaagtttatcagctgcatgatgcatacagggaagtcgggcttgatctcataaagcttctccgctttgttgatgtgaatgctactggtatacgcaagatactaaagaaatttgataaacgctttggctacaagttcactgattattatgtcaccactcgtgcaaatcatccttattctcagcttcagcaagtatttaagcaagtgggaattgtagctgttgtaggtgcattatcgcgcaaccttgaatatctgcagcatcatgaaggaagctttgtatccatctatgatcgtccagcagttaccttgaaggaccctattatagaccaagtaaaccatgcagtacagaaactcacgcatgccacgaattttatgcaattcttgggacagcacgcgcttattgtccaggaagatgcagaaagcgagtcggaggatcttgttggtgatcagagctaccatttcatgtccctggtgcttaatctagtgaacacattcctttacatggtgaatacatatatcattgtgccgactgcagatgactatgcagtaagccttggggctgctgcaactgtatgtggtataattattggatcgatggcagtcgcccaagtattctcctcagtctacttcagtgcctggtcaaataagtcctacttcaaacctcttgtgttcagtagcattatgctgtttcttggaaacctactgtatgcattggcatatgatctgaattcactaatagttctcctgactggacgactgctatgtgggtatgcaattttctcaattcactctatctcacttgatttacgttccacttttgtatgctagcattgatctgggtgaaaattactagtatgacaaatgcaggttgaggatccttaagctgagggcaatattctagaatatttatattgctgaatagaaaacaaaatggaaactgtatatcttacaaggagataaaggattttaaatctcgagactggcattaaaatatatgcttttctatttcttttatagaacttaactagttatccctacctccctttgggctagtaatttgtctatattgtttaaggttcttgattttctgacggtgcatctgtgatcgagctgccagcatgtaatgtgcaggttaggttctgcaagagcagtgaaccgtcgctatatcagtgactgtgtgcctctcaagatgaggctacaagcctctgccgggttcgttagtgctagcgctcttggcatggcatgtggccctgctcttgctggttttctccagattaaattcaagatatactcgctcagttttaatcagagcacattgcctggatgggtcatgtgcatttcttggcttatttacttattgtggttgtggcttacattcaaggaaccagaacacttcactaaaactctggtcaatgaacagccgtcagaatctggtaagctaacaatacactgaaatggcaacatgttttgtttgaattcatgaatatgctcgaatcaaaccttattgtacaatcaggatgtgtatgcttatcattcttaggaacttttctgagatgtttatttccttattatgaaaataggccgccaaggaaattctaacttggaggcaggtctagctgaaccattgcttcaaggtatagaacgaaggcaggatgagaactcagaagttaatgatgatactgaagtagagtcagaaagctctcatgaaccagcaacatcaattgcttcagcatacagattgctaactccatctgtgaaggtttccttccccctcccttcccaattatcgatttttctttgtcttgttcttggttcaaacgtttgaaagaaagaagctcacaatctacatagggttcttttgtaaataaagttagataaattaactatataatataataaaactgcatctttaaatagtaatgggtaaatacattccagttactagtaggtacatctgcatgtcatacaagcaaacataacggacacgccatgtaaaagaaactaggccaacctaggagaaactaggttgcatttattattatattattattaagatgaaaataggcacccaaatttaccttgacaaggacttgaacctaggtggtctgggtttacgagcacacccttgaccaagtgagctagctcagttcccttgacacaccagccagatgaaaagttgcatgtgcagctacccctttttccacgcccttttcatcttccaatctttgttggagctaccttctcatgtattcatatctttaaaaaatggttgtttgtcaggcccagctactgatatacttcatgctcaagtacgcaatggaaatactactatcagaatcgagcgttgtcaccacatactattttagctggtctacaagtgctgtggctatctttctagcgattcttggattaacggttcttccagtaaatgccattgttggaagctacgttacaaatttattcgaggataggcaaattttgttggcatctgaagtcatggttctcatcggtataatcatgagcttttgtttcacacctcactactccatcccgcaatatgttctttcagctttcatcacatttgtatttgctgaggtgcttgaaggagtgaatctgtccttgctctcacgagtaatgtcatcgaggctttcccgagggacctacaatggtggactcctttcgacagaggccgggacgttggcccgtgtagttgcagatgccacgattactgcagccggttatctcggcacggacctccttctgaatgtcactcttctcccatcccttgtgatttgcatagtctccatcgcagcagcactctacacttacaacaatctctattgaagctattgttgctgtacaagtgtacaacaatgttcctaagctaaaatgttcctgcccacaacgggtttgtatatctgttcaagcatggtttgtaaacattttgatcaagtttgtatgcaaaatttcttgtatttagtgcatttatgtaaagattcatcctgtaaagaattataaactatgagacgctattgccatttatgatcatttatgtttatctttttagccttatgtta

SEQ ID NO: 5077 - DNA, 1602 bp, Zea Mays
agagacggcgaacagcacccgcactccgatccacatgtgcattgccaatcgcgcgcccttcgcctacgccacagcccacaggccacagccaacagccgaggccgaagccgaggccgcccgcgccgcgccgtgccaacgccttcgccttccctgatgaccagacgcgcaccggcgccttcccacgtctgcacagcgcccaccgacagcgacgcgggcgcaatcctccaaagtccaaagtccaaacccgtggcgcggggcagccgagcagggcgcgcctccgccaccacaaagagacttcgcgccacactagcctaatccccgcgctggcccctggcgggcagataacggtcgcggcacggaaagggcgagagagaagggcgccagagcactagtacaggaggcgcggagcaggaggaaacacatggcagatgaaggcgaggagggggtgccgccggccgcgatggtgggggaggcgccaaccgaggactttgggctgcccgctgagctgatggccgtgctaccatcggacccgttcgctcagctggacgtggcgcgcaagatcacctccatcgcgctctcgcaccgcctcggccgccggccgcctccgccgcgctgaggaggaaaaggagacactgctgcgggacaactctgcgctgtccaacaccgttaggaagctgaacagagatgtcgccaagttggaagttttcaaaaagacacttgtgcagtcgctccaggaagatgacagcagtgataatactgctcccagggcaagcgttgcagcaacttcaaacttctctgcgccatcagttttttttgtcagatgaagattctgcatttccaacttccaaatcatcacagatttcagaaactgcgagttcagtttcagaggaaaatagccaagttgaaccagatgcacctaggccaccccgtccacatgtatttttgccgtcatacaacagcacaccaaggagaactcccccagactcacctccaaggcgttatgcatcggtatcaccgccgaggcgacattcaatctccgttacgtcgatgaatatgtttaatgacaggtcctcaggcttttctagtcagcatagctctccatttgaccctccaagtcaaacaggacgaacaagagttgatggaaaggagttctttcgtcatgtcagaaatcggttgtcgtatgagcagtttggtgcattcctggctaatgtgaaggagctgaacgcacacaggcagaccagagaggataccttaagaaaggctgatgagatctttggtcctgaaaacaaggacctgtacaccgtttttgagagcctaataactcgcaacattcgctaatctcctcaagggttgaagcattaccaatgattactagtgattcatgttttaccggtatattttggttacaatgttcaacactttttttgtatttgaagtctgtagtctgttgtggattcttggtatatagtctatagttctttctttttttttcatgctaatgtccatgtagagtcctctgtttctatgtaagctacaacttatattctaatacaaatgttgtctgatatttcttgaacataaataatagactagaaatgtgaa

SEQ ID NO: 5078 - DNA, 2558 bp, Zea Mays
ccacaggccacagtacagaatgacagaagcgaggcgcgcccactgcccacgccacgcactcctatactcctatgctatgcctctcctcccctccacagagtggcagtggcggggtgaggtgagagagagtgagactgtgagagtgagagaccactccatctctccttttactctcctctcccctcccgctcgcttttttcagcggggggagagaggccgcggcggcagcttgcagcaccagagagagagagagagcgagcgagcgagcaaaggccaacagatcacagctagctccgccccgccccgcctaccagagttttcaatttcaccgcgacgtcaaaagaaagcagcttttggtggtaatctcttggagcattgcagcggcgagcgagatctgccacgacgcgccagctcctgcagcggcccggcggccccggcctgccactgctactcatctgcgccgctggcagaggagctgccgctaccgctgccgccgcacccattgcctgcccctgcagcctgcccaagcagcaagcacaaagccccatcccgcatcaccctcaggctactccaaactactgcaccgtccactgtcgcccgcgcgcctcagccacgcagtcttatgcatcaatgcatgccctagcattctgcggcttcccccgtgcggcgcccaccgctggagagtagagacacgcggatagcaccaagaccagcgccggctacgtagctgctgctcggtgtctcttcagactcttcttactaggggggaaggaggaggaccaaggcaggcagtcggcagcgaggaggtgaaaagggcagcagctgcccgtgccgtaggagaggccgggcggcggccgcgtacgtccgttgcagcgcgcgcgcgcgcgctctggcctccgtgcgataccacgcgacgctgaatcgccgatcgacatgacgctggaggctctgtgcccgaccagcagcgacgtcctcgtctacgacaccttcaacgccgccgccgcatgcgccgctgcttctgcggggaccttccttttcggcaatgcaccaccggtggaggtgccggcggcggcggcggcccaggcgaacggggagaacagcgtgcagcaggggcggaggaagcggcggcgacggcagaggagcaccaagaacgccgaggacgccgagagccagcggatgacccacatcgccgtcgagcgcaaccgccgccgccagatgaacgagtacctcgccgcgctccgctcgctcatgccggactcctacgtccaccggagcgatcaggcgtccgtggtcagtggcgcaatcgatttcgtgaaggagctggagcagcagctgcaatccctggaggcccagaagctggcgctgaagcggcagctgcagcagcagcagcagcgcagcgtcacggccgcgatacgcgacgacgcggcgcagccggctcgaggccgtgatgacatcggcgcgggcgcgggcggggacgccgcggcgcgcagcgaggtgtcggcgccggagccagacccgcctccgttcgcgcggttcttccggtacccgcagtacgcgcggcggcacgcggcggcgcgggaggacgccggcgcggaggagacgagccgcgcctccgcggtggcggacgtggaggtgggcgtggtggtggacgcgcacgccagcctgcgcgtgatggcgccgcggaggcccgggcagcttctgcggatggtggccgggatgcaggcgctcggcctcgccgtgctgcacctcaacgtggccaccgccgcggtcgacgcgacggcgctctacacgctcagcctcaaggctacgtaaaggagaaaaggacgatcatggagaatcctctcttggcttggcgagcagagcaggcacctggcccgtcgtccattgacatggcgaggagatcgatgtggactgcagagaaagattgtgttgtgtgccgctgccctgcctttttcttttctagtgctgcgtgtttcaggacagcagagactgactgctgagtaagctatatgtgtttgtgtgccccggagccgagccggacccctcaacgtagcaggtggaggaagggtgcgccctggcgacggcggaggagatcgccgcggcggtgcaccacgtcctatgcatcatcgacgccgaggcgacgccgcagaggctgctcgctgccggagcaccagggacagggcagccggacgtctagctagtcaggatgattcaggacgaggtcttcccggcgtaacggggcggcatgggctgcgcggggtgtctgcttccgtttcttgtaaagtgcagtggcgtgcgtgcgtggctggccagcacacgagagcctgatggcgtagcgtaggtacagagtatgtaacgggcaataacacgcaggttcgtgtctggacctgtggtctctcgttcgtgcatgcctatgcgtgcccttgtgtttgcgtgtgacgggaattggaattgaggacgggaagcaggaatgcaggaacagggaagggatcggacgttgttttcttcatgcgctcagcacaactgcgcaagggaaggggagccgtgctgaatcttgc

SEQ ID NO: 5079 - DNA, 1919 bp, Zea Mays
cgaacttgagtccctttcttttctcaaatggaaagaactagtgtggccagaattagatcaattgctccgcgacgaggatgacacaactggtgcatcgactccatatactgctgctattcctgaatacagagttgttttcattgacaaatctgacctgtcattccaagatagatcatggacactagccaacggtactggtgtgattgatattcaacacccttgcaggtctaatgttgctgttcggaaggagctgcacaaaccagcttcagatcgctcttgtatccatctcgagtttgacatttctggcactggtcttgtgtatgaaaccggagaccatgttggtgtatatgcagaaaattctgttcagactgtggaggaggttgaaaggctacttgacctttctccagacacattcttctccatccatgcagatgcagaagatggatctcctcgtaaaggaggaggttccttggccccacctttcccatctccatgtaccttgcggactgcgcttctacgatatgctgatctactcaatccaccgaagaaggctgctttgcttgctttagcttctcacgcatctgatccagctgaagctgagcgacttagattcttggcttctccttctggaaaggatgagtattctcaatggataactgctagtcagaggagccttcttgaagttatggccgcattcccttcagctaagccaccactgggagtgttttttgcagcaatagctcctcgtctgcaaccacgatactactcaatttcatcatctccaaacaggatggctccctccagaattcatgtaacatgtgcgttagtttatgggccttcaccaacaggaaggatccaccaaggagtttgttcaacatggatgaagaatacaattcctctggaatatagcgaagaatgcagctgggctcccatctttgtgaggcagtcaaatttcaagttacctgctgatccgtccactcctattatcatgattggtcctgggacagggctggctccttttagaggcttcttgcaggaaaggttagcattgaaacaatctggggcagaattgggcacttcaatccttttctttggatgcaggaaccgtaatatggactacatatatgaagatgagttgcaaactttccttgaggagggggcgctttctgagctaattgttgcattctctcgggaagggccaacgaaagaatatgtgcagcataagatggtggaaaaggccacagatatttggaacatcatctcaaatggtggttacttatatgtttgcggtgatgccaagggaatggctagagatgtacacaaaatgcttcatacaatagtccaagagcagggatctttggataactccaaaaccgagagctatgtaaagagcctgcagatggaaggaaggtacctccgtgatgtatggtgacacatcacctcaaataagccatagctctagcgtgtggaagtaaagctggctttgcgtgtatgacatgtctaatgccaacccaatcgtcagctttggaatgaagcgtgccattgatgatatactgaaatgagttgatcagtgcaattctttgacatctaactatttattattatatgagatgggaggaactgatggagaataaatgctgctgtagatttgtagaagttcaaaaaaattgggtacccctgacaagtttgtagccaagggggtacatcatacagtttgagatgaggacactatgtatactgtttgagacgaggacattatgtatactactctagaaggctaccgaaaccaaattttgcatctgtttattaaaagcttgtacttttatcatggtatccgtcgttggcaatctacaactttgtacagccgcaatgttgcatcgaaggtgcagcttgcttcggcacccgtagggatgcaagtt

SEQ ID NO: 5080 - DNA, 2746 bp, Zea Mays
aagattgagatactaggccttggagggaatttccgtggagaatcaggatcggccccattgccgtctctagcaccactagtagcgaagccactggttgttggtaggtgcacgcaccccaccccctcctgccgtcctcgatctcgtctcctcctccctacccaatccctcgcggtgggcgagggtggaagcgagtgacgatggcggcgctggaggcggcgagggagtgggcgggctccgtcataccgccggagctcgccgccgccgcggggggagacccactcgccgcgctggcggccaccgccgcggccctcgtcgcggggctgcttattatcgctgtctggttccgatccggaggcgggacgccgtccaagccggtcgccacgccggtacggccaccgccggtcaaggtggacgccgacgccgacgttgatgacggccggaagcgcgtcaccatcttcttcggcacacagactggcaccgccgaggggttcgcaaagtccatggcggaggaggcgagggcgcggtacgagaaggccgtgttcaaagtggtggatctggatgactatgctcaggaggacgaggaatacgaggagaagctgaagaaggaaactgtggtgctgtttttcctagcaacatatggggatggggagccaactgataatgcagcacgattctacaaatggtttactgagggaaaagagaaggaagtttggttgaaggatcttaaatatggtatttttggccttggaaacaggcaatacgaacattttaataaggttgcaaaggtggtagatgagctagtagaggagcagggtgggaaacgtcttgttcctgttggccttggagacgatgatcagtgcattgaggatgatttcactgcatggaaagaactagtgtggccagaattagatcaattgctccgcgacgaggatgacacaactggtgcatcgactccatatactgctgctattcctgaatacagagttgttttcattgacaaatctgacctgtcattccaagatagatcatggacactagccaacggtactggtgtgattgatattcaacacccttgcaggtctaatgttgctgttcggaaggagctgcacaaaccagcttcagatcgctcttgtatccatctcgagtttgacatttctggcactggtcttgtgtatgaaaccggagaccatgttggtgtatatgcagaaaattctgttcagactgtggaggaggttgaaaggctacttgacctttctccagacacattcttctccatccatgcagatgcagaagatggatctcctcgtaaaggaggaggttccttggccccacctttcccatctccatgtaccttgcggactgcgcttctacgatatgctgatctactcaatccaccgaagaaggctgctttgcttgctttagcttctcacgcatctgatccagctgaagctgagcgacttagattcttggcttctccttctggaaaggatgagtattctcaatggataactgctagtcagaggagccttcttgaagttatggccgcattcccttcagctaagccaccactgggagtgttttttgcagcaatagctcctcgtctgcaaccacgatactactcaatttcatcatctccaaagatggctccctccagaattcatgtaacatgtgcgttagtttatgggccttcaccaacaggaaggatccaccaaggagtttgttcaacatggatgaagcgaagaatgcagctgggctcccatctttgtgaggcagtcaaatttcaagttacctgctgatccgtccactcctattatcatgattggtcctgggacagggctggctccttttagaggcttcttgcaggaaaggttagcattgaaacaatctggggcagaattgggcacttcaatccttttctttggatgcaggaaccgtaatatggactacatatatgaagatgagttgcaaactttccttgaggagggggcgctttctgagctaattgttgcattctctcgggaagggccaacgaaagaatatgtgcagcataagatggtggaaaaggccacagatatttggaacatcatctcaaatggtggttacttatatgtttgcggtgatgccaagggaatggctagagatgtacacaaaatgcttcatacaatagtccaagagcagggatctttggataactccaaaaccgagagctatgtaaagagcctgcagatggaaggaaggtacctccgtgatgtatggtgacacatcacctcaaataagccatagctctagcgtgtggaagtaaagctggctttgcgtgtatgacatgtctaatgccaacccaatcgtcagctttggaatgaagcgtgccattgatgatatactgaaatgagttgatcagtgcaattctttgacatctaactatttattattatatgagatgggaggaactgatggagaataaatgctgctgtagatttgtagaagttcaaaaaaattgggtacccctgacaagtttgtagccaagggggtacatcatacagtttgagatgaggacactatgtatactgtttgagacgaggacattatgtatactactctagaaggctaccgaaaccaaattttgcatctgtttattaaaagcttgtacttttatcatggtatccgtcgttggcaatctacaactttgtacagccgcaatgttgcatcgaaggtgcagcttgcttcggcacccgtagggatgcaagtt

SEQ ID NO: 5081 - DNA, 1563 bp, Zea Mays
gaggcagactagcgtgcccctcgatctggcaccgaggaggaagctgcagaggcctacgacatagcggccatcaagttcagaggcctgaacgccgtcacaaacttcgagatcagccggtacaacgtggagaccataatgagcagcaaccttccagtcgcgagcatgtcgtcgtcggcggcggcggcggcgggtggccggagcagcaaggcgctggagtcccctccgtccggctcgcttgacggcggcggcggcatgccagtcgtcgaagccagcacggcaccgccgctgttcattccggtgaagtacgaccagcagcagcaggagtacctgtcgatgctcgcgttgcagcagcaccaccagcagcaacaagcagggaacctgttgcaggggccgctagtagggttcggcggcctctactcctccggggtgaacctggatttcgccaactcccacggcacggcggctccgtcgtcgatggcccaccactgctacgccaatggcaccgcctccgcctcgcatgagcaccagcaccagatgcagcagggcggcgagaacgagacgcagccgcagccgcagcagagctccagcagctgctcctccctgccattcgccaccccggtcgctttcaatgggtcctatgaaagctccatcacggcggcaggcccctttggatactcctacccaaatgtggcagcctttcagacgccgatctatggaatggaatgattcgggccgcccggtcgtggctgctggtcggcctccgctcgccgctggcgtctcgcatgtgcgaaaagggtggggagaagccatgagaacacgagactgacatgggcgctctcgcacaaaagacataaagcggggggactgaaagatcagaggtaccagtagacagtagtagtatgatggaagagacagtaagcagcgagtagtgtgctgcaggatacactgaccatcgatctgctaacaacaaaatgatcgttgcagctagctatagcatatttgcctttgcccttttgtagctttggtctggtctctctctctctctctctcttttttcagctttgttgctccccagcgtcctgcactgcatgccagctgctttgaagctttctctttctactgacatggttctgcaagtgccatcatagctttagtcagccctgtacaatggatgcaggaacgtcgtctttgaattggatctctgtagctcatctctccccctagctcccccactttgttttcttttttgtgctttcctttctgctgcctctgctagcgttatgtgtactgaacaagttcatcaaacagatatagcacccttgcaactatgaatcaatgtcggtcttatttaatgaaactctcccaaatttaccgccttaacgatacgttcatactacaaccattttgcctccctggaaggtacggtttcccgttctgctgttgatttctcgtttgcagcattctgtatgcctttcctttgcccagcgagaataatattgtatgcgtttgaataccaatgattttgcaaaatctctactattttatcaatagtgaatgtgtcac

SEQ ID NO: 5082 - DNA, 2687 bp, Zea Mays
gtcggtcgctcgttcgcctgttccccttgttcgtctgtctgtctttgacaccacagcgcccgcctccgtttgcactgttgcctgccgccctccttcctgctcctgctcggctcgctacggctacgggcactggcatcgacagtgacatccccgctcgcgccgtcctcggtcctccctttcttctgcctctcgctcgcgcgtgcagttgagagcggctcggcagcgcagcgtgcgcggacacggcagcgccagttactctctctctctctctctctctctctctctctctctctctcctcgctgctcggcgtccaattcaatgcgctcctgcgcaacggggcagagcagcgacctccttccttctccaccattgggttgagctccgccactcaattcaatgcctgtccgctcttgaagaaacgcctcctcctctcttctttaaccgccccgtgtcatcactcttactcgtacgtgctcgcgcacgccggtttcaatacgtccgctggcctctgcgtgcgtcgtctcgtcacgcaggcagcaaggcgtggagaggagaagagggaggggattgaattgattgatggggttgctccgctgagctagctcctccggccgtccttcccgtcttctacctctaggtgggtattgccattgctcggtggatcgcagtgggagatgaattacctccggagccggagcctgaagcggctcctgtccctcggccgccggagcaacgccgatgagtgcgccgaggagtgcgtcgacgtcgacccgccgccgaacaagcccacctggaggtgcttctcgtacgaggagctcaaccaggccaccaatggcttccaccaagacaacatggtgggcaagggcgggtacggagaggtctaccgcggggtgctggacgacggccgcgccgtcgccgtgaagcgcctggcgccgacggccgcggcggacgagaagaaggagaaggacttccttacggagctgggcacggtgggccacgtccgccaccccaacgtgtccgcgctcctgggatgctgcgtcgaccgcggccttcacctcgtcttccacttctccacccgcggctccgtctccgccaacctccacgacctgaagctgccggccatgtcgtggaagcagcggcacgggatcgccgtcggcaccgcgcgggggctgcgctacctccacaagggctgcgcgcgccggatcatccaccgcgacatcaaggcgtccaacatcctcctcaccgccgactacgagcctcagatatcggacttcggcctcgctcggtggctgccgtcggagtggacgcaccacgccatcgcgcccatcgagggcaccttcgggtgcctggcgccggagtacttcacgcacggcatcgtggacgagaagacggacgtgttcgccttcggcgtcttcctcctcgagctcatctccggccggaagccggtggacggctcccacatgagtctcatcgcgtggggctcgtggacccgcggctcggcgacggctacgacggcgggcagctgaggcggctcatgttcgtcgcgtccctctgcgtcagggccgccgccgtgtggcgcccgaccatgacacaggtggtggagctactggagtccggcgagatttctcaagagcagtggcagatgcccgaggaggaggagcaagacgagctgtgggacttcgacgatctcgacgacttcgacgaggacgactacgacgacgagtccgattccccctcgatctcctcgtcggcatgcagcatccaccccgatgattagccccaaaatacttgcgcgtgtcagtagattattatcgttgttattattcaacctgctgatacggtccttgattgtatcggtgtgtacatacaccatccatccctagtagagaatagtaatatgaaaatccgggagaaaatcgagagagacagagagagagagagaagaggatccaggcccgtggctttcagttttggtgtcgccatctcatcaggaatcttccccgtccataatacgccgtccgtccgtcttaactccagcagccgatctgatcagctcctgacagcgacggatgcgtgctggtttcttcccaaaccagctgacagtttggcatgccgggccgtgcgaaccagaaactgtcgttggtgtggtggtgcttggctttatttctgtgggcgagccatggatgatgcagggactgagggacccctggcctgaatcgcaggagccaggagcggtttggctacgagcggttagctagcttgctagcagccacatgctcagagcagaggcaagccaggtggtgggtttcggtttcggctcggctgccgttggttagcttgcccaagtgcagttgggcggccctactgcccggctgttcaggagcgcgtctgaaagcgaggtgatcagtgagctaaccacggcaacgggatcggttgatcattgagcgaccttgagacaggacgaagcaagtcgctctgtcagacgagaggcaataatttgcccttttttcacttttcatgcatttcagtcgtgtgtgggtgtgttagttaattcgggatgcagtcatgcatggccgcaagcccgttggcttgttttaatctataccgatttttaatacttttagagtgtgttcgtttgtttcggaatcatgacctagaaccaatccaaccagtaatgattatctaa

SEQ ID NO: 5083 - DNA, 3735 bp, Zea Mays
gaagcctggagaaacgtttgttgttcttccagaacacgccctcggaatcctatcgcctcccacagcacacgacgcgcctttgctgaactctctctgtcgccatgctgccggcggtcgccgctgcatcccccggcctctcacatctgccgcgctaccaccaccttggccgtcgctttcacctccgccgccaccgccttctacctgctattccggccaggctatcgtgtggggccacccacgcccgccgccttctccttgccggcgcgttcgcaaaaggggagggttcttcaggacaggatgttgatcactctgctggtgccacaaattctgggtctgcataccttggtctcttcgttcgattgcttggcttggataatgacacccgtgatagggagcatgctgtttgcacactctatcaatactcccttggtggaaggaagagcatcgatgagataatgcaattccctggttgtattgttctcatcattagcctcctgaaatcagagtccattcttgcctgcgaagcagccacaggtcttctgcgtaacattacgtcagttcacatatataggaagatggctggtgagagtggagcaatggaagaaatcattaatcttctctgtaaatctacaataacccccaagattctagagcagtgtttgtgtaccatttggaacttttctattgatgaaaaatggaggtacaaggttctgaagagcgatgtcctaatgaagattgttggttacctggatgaagaagacatacaagtcaaagaagccgctggtggtatcatatcaaatttagctttgagttcctctagtcatggagctttggttgaagtaggcgtcatcccaaaattggttcatcttttgcaaaccaaagaagatgactataagattattagaaaggaagctaaaagttcactaatacagctggccactgatgattgttactacagccttataatagaggagggtctagttcgggttcctttggttggctcagctgcatataaagcctttaaacctctccctcattcatggccctcttttcctgatggctctaagattcagcggagttctcatccctcaaagtacggtgctaccgaactgctccttggcttgagtgtcaatgagaacgatacaaaaccagatgaagctaaaattaatgctatgataggacgttctaatcagcaattccttgcacgtgttggagctattgagttggatgatcaaggacaagaggaatctggatctgaaaagaatgacatgtataccattttgccatgggtagatggtgttgcacggttagttttaatccttggacttgaagatgtctctgcaatcaaaaaggctgctagagcaatgggtgatgcatcaataaatgaacatatgcgtacctcattcaaggaagctggggctgttaaacctctacttcagctgctcaagcacaaagatgtacatgttagagaagctggtgcttatgcgttggaaaaattatgtgtaagtgccacagtctgccataatatcaaaacagaaggtggactagaattgcttgtaaatatagtcaaggatcgacatactccagtagaactactagagaagataatttatatactttctcgaatgtttgacatggggatttgcatggttgctgtgccggatactgaaggttataaggatagtgaaaacagtgcaaagacatctgttaaccaagagatgtccagtatgattgttggcaaacatatcaactatgctgtggttctacatactaaagtttcagcgaggaccctctttgggacacacagatctttaagacacaacttatgcagtccatggcgagttgatctttgattttgatgctatctcacacttaacggaagttctaaaggaagcatcgccaaggttgcaagcaaaagtctgttgtgtacttgaccatatagcagcttcggagcaacatgccaccgcaatgactgctgcttgcactggttcagtaattgaagctattcttgaaataggggttattcatgcataaacggtgaaaaaatcacttctttgctaagaagaacgctcaaatcaaatttcccccttcagtcaaaggattgtcttgcggcatgcctcattaagctagaatccagagctggcttatcaggagatcatggtgttagtagtatagatatggagataactatctatgagactattccaaggctaattgagcaaatgatgatatcactttcgtttgaaaataaaagaagtgctgtaatagagctcaacaagataatatctggtggtgtgctggaatatacaagagcagtggcagattctggaggcatatttccactggtgaaaatgcttgaagaggcggatggagatgcactggaggctatcttatctatcttatataatctgagcatggatccagagaatcacccagcaataattgctgctggagcagtgcctctgttgaagcggattgttcgtacagaagccccacaatggagtagtgcaattcagctgttgagaacattgcctgtatgacattgatgaagaaaatggccattcatcgccaacaaacattataaactgcacttagggcctgtttggtttgatggctaacttgccacactttgcctaacttttgtgcctaaggttagttcttcaattcgaacgactaaccttaggcaaagtgtggcacatttagccacgaaccaaacagccccttagtgcatgcacaggtacattgttaagatttcatcagtgtctacacgatcagtttgttccaaatgcctctgcgattatgattctttgaggttgttaatcactagggatgctagtcaccgtatcacttttacatgtataccttctctcttaacattacaatggtagaggataaccataattggagtacatatttggatatggatacaaggtttactgcctttcttggatgtttaggagacaaaattgatgcaaaaataaaattcaattagtactcacaggactactagctgctttgggaattttctggaatatataaaaagaagtgaactcaaaaccattcaactttttatcttagtttcagttgcgcattgctgaatttaacatatgtgcaattaagggttggcaatcataatactcatggatagaagtagaatttgtgaaggttctaagaatttattttctggtcctccttgatgactcgacgatgatcagagcatagggaggcatacttttatcttcgaacaaacctttggtggatatacaagtatttgttgactgaagaatccgatgcagcagaaaatgtctttgaaaaaccaatttcttagattgaggttgcggttgaacctagctccagctccctatcatcatcaaaatttgaattttatgatctggaagaaagcatcagcaaggcatttcctccaaagtagcgatatatgctgcccttttggctagttgaaaagcacaccggggcctgatgtgtccttttgctcacatcacatgccacggcaatagctagtaccacgaactattttggataccggcagtttgctggttgtgagaggacccaagaaagttcaaattgtagcttgctaaatcgtcgtgtttcgacactaggtgactttactctttaaaaatgctatcctttttgtgtaacctgaaatcctgaataacctccacggtgccaatatcaaaagaatctctttttgactccagctggggtaatcgtgaggca

SEQ ID NO: 5084 - DNA, 2871 bp, Zea Mays
ggcggtttcggcattttgaaagccagccgccttcctataattagcgagggtcccagattctctctcttcacgcacacgcagcagcagacgggacgcaacccaagtagtacgcaagccgaacagattttccccatttccctgctctcctcgccctccccacgaaattccctgcttgatcacgccgatttcagctgtttgcaacacttcctcttgttcgatttttattaactcgtcgactccacctcaccgaggtcaaatctttggcatcggattctgttctgtgctgccttttggtttcggcgccgaattcagttccgattccgaacagttagcagctttaagcggctttcagttcgagcgcgtcggaggcatccctgattccggcgatgtcgttgcccgcgatttccatgtacaccagtccgccgggcgcggtctactcttcggagttcgacccagcctcccgtggctcgtcgccttgcaccaccgctgcgcccccgccgccggccgcctcgtaccgcttgccctccggcggcggcggcctgtcttgcctcttctcctcgccggcagctgcggccgcgccgccccgcgccccggctcacgacgacctcggtgcgctgtggcacaacagatccgacgacctgagcgtccccgccgacgggggcgggtactcctactcgcactcccactcgtcttcgcagctaaagcggagggacctgcatcaccaccaccacagccccgtgtcggtgttccaggggccgtccacctcttcaccatcccggagcccaccggcttcttggctcgccgcccgcgaccgcgaccgcctcttcgctggcttcgtgcgcaacgctctcggttcctgcgttgactacgcgccgcccaccagccctcgcccggaggtcggcgccagcgagctcgcgttcgagctcgacgagaacctcgcggaggctagccctgcctgcgagccatacgcccaagagctgctcgcgagtgcccaggatcgccaccgcatcttccacgaggagctggtcgtgaaggccttcttggaggccgagaaggctcaccgtggccagacgcgcgcgagtggtgacccctacttgcaacattgtgtggagactgctgtgctacttgccaaggtcggcgcaaatgcaacggttgtctctgctgggcttctgcatgacaccattgatgattcattcattgactatgaccacatcttccatatgtttggtgctggggttgccgatctcgtcgaaggggtatccaagttgagccacctcagcaaacttgctcgtgacaacaacacggcaagcaggacagttgaagcagatcgcttgcatacgatgctcctcgcaatggcggatgcacgcgctgttctaataaagcttgcggatcggctgcataacatggagaccttaaaagctttgccttgtgccaaacaagaaagattcgccaaggaaacaatggagattttcgtgcctctagctaaccggctaggggttgctagctggaaagaccagctggagaatctctgtttcaagtatctgaatccggaagagcacgaggagttgtcgtccaaacttagggaatccttcgacgaagaactgatcacatctgccgtggataaactggataaaggcctgagggatgctggtgtctcgtaccacagtctttctgggaggcacaagagcctatacagcatccattgcaagatgctaaagaagaacttgacgatggaagagatccacgatatacacgggctgcgtcttttggttgagagcgaagaagattgctacgaagccctttgcgtcgtccacagactgtggcctcgagtcaccggtcgattcaaggattacatatcacgtccgaaactaaatgggtatcggtcgctgcacactgtcgtcatgagcgaaggcgtccacccgttcgaggtccagatccgcacgagggagatgcatctgcaggccgagtacgggttcgcggcgcactggaggtacaaggagggcacctgcaggcactcgttcgtgctccggatggtggagtgggcaaggtgggtgctcacatggcagtgcgaggcgatggacagagaacggactgcctcccttggcagtgatgacggtactgtgagcgtgaggccaccaccagcatgcccgttcccccagcatgcagaggactgcccatactcgtacacccgccaatgcaaccatgatggaccgctgttcgtcatcctcttggagcatggcaagatgtctgtccaagaattcccggcgaacttgacggtgatggatctcatggaccgcgtgggcgccaacagctcgagatggagcccctacagcattccgatgaaggaggacctgcggccgagggtgaacggcgagcccatatgcgacccagaccggaggctcaacatgggggacgtggtggagctgacgccggccctgcctcgaaagtccctcagcgggtaccgggaagagatccagcgcatgtacgatcgcggcggcttcgcgctctcagcccggggcggcggcggcggcggcggcggcgccagacgctgctgagagacagtagcaagacgacgatgcgtagccctttttttttctagtaccattgtaccattcaattcgttgtaaatacgtagtatagcaggtaggtaggccttgcagccggggtgggtgggttctgaaatctgttgcaccctgtcctgaaccccatgcagtgtgtaaaaagtagaacgctgtgtatgtaagctgttcaagttcgtctcagcttctatctcaggccctgtttgaattacaaggactaattattagccactaaagtttagttcattttagtttagttcatttgtcgccaaccaggccgactaatagagag

SEQ ID NO: 5085 - DNA, 1729 bp, Zea Mays
aaaagcttgaggaaagtggcaagaggcgcctgcctaagatttccaagaaccgacacgggcattattaaagacagaccgcgcatgcacagtcaccagggatcaaaagggtgacagtccaagggaagaagaagaagaaaaggagaaccactgctcgcgctttgcaccagaccactagctccgagaagcggcaggcaggcaggcactcgaacaaatcagcagagccgggacacatgatatatatatataatatataaaccgagagagcacagagccaacccaagagagcagctgagcagccagccgtggaggaagagatgtacccataccgcatgagcaacgtgatgatcgggtacctgaacctggccacgctcctggcctcgctccccatcatcggggcggggctgtggctggcaaggggtagctcctcctcctcctccaccacgtgctcgtcgatcctgcagacgccgctcctcgccgtgggcttcgcggcgctgctggtctcgctcgccggcttcgtgggcgcctgcttccacgtggcctgggcgctgcggctgtacctcgccgccgtcgcactgctcgtcgccttcctcctcggcctcaccgcgttcggcttcgcggtcaccgcgggcggcggcggcgcgcaggtgtacggccggccgtaccgggagtaccgcgtcacggactactcggcgtggctccagaagcgcatgcaggacgacaggtactggcgccccgccctcgcctgcgtcgtcgggtccaaggcctgccccaagatccagaactggacgcccatggactacctccagcacgatctcacgccaatacagtccggctgctgcaagccgccgacggcgtgccagtacagcggaggcatgccagtcggggcgcaggacgaggactgctaccggtggaacaacgccccggacatcctctgctaccggtgcgactcgtgcagggccggcgtgatggagcaggtgcgccaggactggcacaagatctttgtgctcgacgtcgccgtgctcgccgctctcgtctgcatctgctcatgcgggtgctgcgccttcaggaacgctcgccgctcccggtcccagtacccatacggggtggcgatgatggggtggtagaagagaacagatctactaggctagctgtagcttctcaatgcctgtatgatattttgatccagtcttctgtggaaaaagataaaataacacttgggatctgtatgtgttattagcccctgtggtactctgtttgtttccaggtccgcagagtttagtttctgtagatatttgagttaagaggagactaagccatgaagtaaaagagatgcctagtttttttccccttcaatatggtagccagcattgtatcatgtagaattttaatccaggacagaagtggttccatgtatatgggggaaaccaaaccacaccagaagctatcagctatgcctgttctactgttggcgtggcttccttatgatgtgattacactggattcctttacactgaagtcaaatcgggggcaggctattcagcaatgtttcagaaacatgttcactggaattccgacaataacccttttttggcacataatacaaaatagagagagagagaatctcatgcaggcataatcactcacggtgatcatatattattggcattgattgtcgcagaactggtatcaggtatggtacagcaatttgttttcaatccgagtgacagtc

SEQ ID NO: 5086 - DNA, 841 bp, Zea Mays
aatttggcccggggcttcacttaatcctggttccgccactgcagcgcaacctcgatcgcgcacagaggcccattccgccgaggagtggcacgaggagagacgacaggtgcggggatggggtcagttttgctgccaacgctgcggctgaagagtgaggtcgacgccgccatccgcgacaccctcgataaggtcctcgttctccgatttggtcgcgccaccgacgccacttgcctccacctagatgacatcctggataaatcttcttgggacatatccaagtttgctatggtagcattagttgacatggactctgaggagattcaagtttacattgactactttgacattactttggttccagcaaccattttcttcttcaatgcccatcacatgaagatggattcagggcaatattcagaggtgcgatgaaaggcaaactgatagtgtcttgcccccttcctcctgagaggataccaagattccagcttcttttcaaggatgtctgagaaaactgcagctcatcacgtgcacacaatcagctacctagcccaaggatcacaggatctgagtggtgaggaaatatcaccatcttgtgtgtgtgtgtgtgtgggtgggtggatggagttcgtagctggagttgtcctgcgagattgaagcgaggtgttcctaggagccagaaggggcaccgcattggtttctgatgtacgcacactaacggtttctgaaatttgagctagtaatctgaatgaaatccaaaccgaataaccgatacagatttttgcttaccaccctaccttccgtggggaagaaatacagcagtctgtcagtcagtcaggaaaaa

SEQ ID NO: 5087 - DNA, 1581 bp, Zea Mays
atacagcccacagacacttccttcctccacgcttgggcacggcagcggcgccgcaaagccgaacgagagagagaagcagagaacccctcctcgacctcggcctctcctcttcctcctccgctcccaaaatcctagggttttgctcgccgcggcgcgatggagcccacctcatcggcgtcgatcgcgcggcagacgtgggagctggagaacaatatccccgcggcggcctccgacccggacgcgatggacgcgatctaccgctacgacgacgcgtctcaggcgcgggcgcagcaggagaagccttgggccaacgacccgcaccacttccgccgcaccaagatctccgcgctcgcgctgctcaagatggttgtccacgcccgcgccgggggcaccatcgaggtcatggggctcatgcagggcaagtgcgagggcgacgccatcatcgttatggacgcattcgcgctccccgttgagggcaccgagaccagggtcaatgcccaggccgatgcctacgagtacatggttgactactcaaccatcaacaagcaggctggaaggttggagaatgtggttggctggtatcactcgcaccctggctatggatgctggctgtcaggaatcgacgtgtcaactcagatgctcaatcaacaattcacagaaccattcttggcagttgtgatagaccccacaaggacagtttctgctggtaaagtggagattggagcctttagaacatacccaaaagattacaagccaccagatgagcctgtatctgagtatcagactattccactcaacaagatagaagattttggtgtccattgcaaatcggtctctttctccaacttctttgtttggctcacatatgtggtttagttctgccctaactgaatttcttgcagtactatgctttggatataacttatttcaagtcatccctggattctcacctccttgatctgctctggaacaaatattgggtcaacacgctatcttcatcatcgcttctgggcaacagagattatgttgctgggcagatctttgatttagctgataaactagagcaagctgaaggccagctggcacacagtcgatttggtggtatgattatgccatcgcaacgaaagaaagagaagagtctccactggctaaggtaacacgagatagctccaaaatcacagctgagcaggttcacggcctcatgtcacaggtcataaaagacatccttttcaactctgttcacccgtcaagcaaggcaagcacaagtgctccaccagattcatccggtcctgagcctatggttgaagcctgagttccagcggaaggggacaatggatatttgtgttatgttatctgattcagaaggtgcaaaacaagttatcttttgagtacagaatcatcatgtaattatgagttgccatcttgggctgccactgagagggtgtgatttgggtccggttagcaatctcatgtattggatttcggatcagtattcgaagctttcataacgaggagccatcatcttattttagctgtttgtttggcttgccatttagttattggaagggtcgcttctttaag

SEQ ID NO: 5088 - DNA, 1067 bp, Zea Mays
gttactctgtaagcccaaagctccgaaacagagcccaaaagactacgagctcgcggggaagacggggacttccggagagagagagagagagagagagagagagagagcaggaagcaggggctagacgcggatcggcgagcatgaggggcggcggcggcggcgggatgatggacgatgaagagagggtgggccatgcggagatcccgaccagtttcggtcccgagctgcgcgcctgcctccgatgccgcctcgtcaagacctacgaccaggtaccctcctgcggcaccgctccccttctctctcctcacgctttggggatgcggtgtaggttcaccagccgtccgttgacgggagggttataggactgtggatttcatttcgtcgagagcagttcgttctcgtcgtcggctaggttcagggagaacggctgcgaaaactgcccgtttctagagatggacagagagcacgacaacgtcgtcaactgcaccacccccaacttcactggaattatctctctgatggaccccagtaggagctgggcagcccgttggttgagaattggcaggttcattcctgggtgctatacacttgctgtctcggaggagcttccagaagagtatcaagggatttgtcaagacaacaacgtgcagtatgtgccgcccaagcgtgtctaagtatcaagacggcaatgatggtgtcttggtcctgaagcagtatagataattaggtagaagtatctgtgcttgccaagggaactgctcctcttatgctttgtatccgagtgctaaggcagtctatttcatgttagtgataaggctgtctatttaggtggtgaaccggcgggtgattgaatcttatccaataaccttgatgcctgttcttgaaatctgtgacaatgcggctcatgtgcgtctgtcatgttctttcacatctatgtatatatgaagaaaaatgtaatagctaaaggtcgttggaccatgaaccctcggcccctgaagaccctatgtataagggactcaacatgtttaagtgtaattcgagataaaacataaaaatgtgattaggcc

SEQ ID NO: 5089 - DNA, 2622 bp, Zea Mays
aagagagagaaagaggtgatattgataagacgggaaaataccctaggctctcgccagtctccggtgcggctcaacaccgaccgaacccgtgaaaaattcgttctcctttcgatccgtttggcggggggctcggccggatccgaccggaggggcgccgccgatccatccggtcgcagccgcgtctgatttggtgcggattttggcgagataccccgctcctagctccgctgtttcaaggataacaaagatggcgtcgccgcggggcgggttcgatgagcaagatcgccggacggagaagggcaccgaggtgttcgtcggcgggctgccgcggtcggccacggaaagcacgctccgagagggatatggttttgtgcggtttgcaaagagggattatgctaatactgccaaaaggcaaaagaatggtattgaggttcaaggaaagaggcttgtggttgagctttcaatggatcaagatacagttttctttggaaatctttgcaaagagtggactttagaagaatttgaagaattgattcacaaggcattcaaagatgttgtttcggttgaccttgcaatggcgtcaaatcttggttcttcaaacaagaagaatatcaatcgaggctttggatttgtgagattttcttctcatgcagctgcagcacgtgtaatccgcatcggttcaagaacagatttcatgcttggtgatattttgcatcctgcgataaattgggctgataaagagtctcatctggatcctgatgaaatggccaagatgaagtctgcttttattggtaacctgccagaagatgttaatgaggagtacttgagaaagctttttggacagttcggtgaggtagtacgggttgctatctcaagaaaaggacaatgtccagttgcttttgttcacttcgccaaacgttcagagcttgagaatgctatagaagaaatggatggtaaaacggtgagaggacctggtcgagggccgtctttcaagatccaggtgtcagttgctcgacctacggcagacaacgacaagaagcgatctcgtgaagaagtgagaactagaagatcaaatgcatcaggagataggcgagattattctcatggaagatatggacacgattcacttgatcgtcaagtgaaagctccaagattatctaattatgtggccgatgctgctgacccctatgaatcagctgttaattcattaccttcagctgtcaaggaagtcttgcttcgaattctacgtctaagaattggtactcgatatgatattgatatccattgtgttaaaagccttgatgagcttcctgagtcatctgctcttgctgtccttaatcagtttttgatatcaggtggagacaaacacaacaaaggagattattttgcatcgttggttgctaagcaccaggctgagacctttggcttaacacatgcattacacggtaccacttatttgtcaagaaatccggaaatgcatagcaagcgatacccacatgaagattatgattttgtgacacccaggagcagtaggtacgattcgtcagcccatcatccttcaacatactacgaagacgatccaccagtgtctgagtcaagggttagaagatatgctgaagaaaggtccaccattgtaagaagcccagaaccacgtccgcgatatgacgaaacagacataagaataaacccagaaccaagattaccatatgaatcaagacacaacgccgaaaagcatctcgatcgaagatacatacaagagcatagttcaaatattgaaagaccagctgaagaagctctcctttctagggaaaggagatttctgcctgctgcagggtacatgccgaacccaggcggctcggatttccgctccaggtcgcccgccgaatattcagcacaacgccaacaaatgaggtttgatccattcacaggtgaaccttacaagtttgatcccttcacaggggagcccatcaggccagatccgaaccagcgccgctcaggaagcctgtactgatcagattagttggagcgatatgccagataagaccctgaaacaaagctagatctggataactcttcttcttgtctgccaagtgtctctgtgattttgcttgtgggctacagatcatgtaccccgagcaccatgtgtgatccagtcggactaatcatttcggcattgaaaagtcggactaactttttttgtgcccataacgctacgtattgtttggtagattaattaaaaattcatccggtgaaaagcaattttctggtatttttctggaggtgcagtaggcgtggtaatgcagaatttcaactgctacgtacactgcaagcgctgttttacccgattcgtctttacgtgttgccaaatgtttcattgacttcatagaactgatttcgactactttggatgctgagcaagggaccatgcctttctcacatatactcatctggagaatgtcaagcaagacggcccatctggacacatggcaagaagagataaactagctagctgcctcccaatgatgctactaccttctcttcgactgcttcaacgttcacatgcccctcccttgcatggcgtagtaaactgggttgcttgaaaaaacgccacttctaagcgta

SEQ ID NO: 5090 - DNA, 1660 bp, Zea Mays
gttttaaaccgcaggaaccaaaaggccactgcagcagacggaggacggcgacggtggcggcggggaagagccgaagaggacgacgagggatagaacggcgagggagaagctgtctctcttcacgctcgggatcgttaaccgtagctgacaaccgtgcggaaacaccggattgtgagggccgaggagagaggtgcggcgaggcctctcgaggaggcgggggcgggatggcgacgccggggaagggaggggcagcgcggtttgcggccgcgctcttcgtcctcctgaatctcgctgtggccattgctgggaagagctactacgacgtgctgcaagttcccaagggcgcgtccgaggatcagattaagaggtcgtaccgcaagctcgcgctcaagtatcatccggataagaaccccgacaacgaggaggccaacaagcgcttcgctgagatcaacaacgcgtatgaggtgttgacggaccaggagaagaagaagatctatgaccggtatggcgaggaggggttgaagcagttccaaggcgggagaggaagtggcggtggaatgaacattcaggacatctttagcagcattggttgttacaatcatggaaaccaatttttgtaatttacttacaaaaggtggaagacaaaaggacaacaacaaagcttcactccatagctgagtttggtttttttggtggtggtggtggtgggatggaagaggaggaacaacaaattttaaaaggtgatgaggtgattgttgaactggatgcttcattagaggacttgtacatgggcggttcattaaaggtttggagagagaaaaatgtcataaagccagcaccaggaaagaggcgctgcaactgtaggaacgaagtttaccatcgacaaataggtcctggaatgtatcaacagatgactgagcaggtctgcgaccaatgtccaaatgtgaaatttgtacgagaaggtgaattcttgactgttgatattgagaagggaatgaaagatggacaggaggttttgtttttcgaggaaggcgagcctaagattgatggcgaaccaggcgatttgaagttcaggatccgaacagcattacacagccacttcaaacgagaaggcaatgacctgcatgcaacagttacaatatccctgctgcaagctctggttggtttcgagaagacaatcaagcatcttgacaaccatctggtagaaattggcaccaagggcatcaccaaaccgaaggagatcaggaagttcaaaggtgaaggcatgccactataccaaagcaacaagaaaggtgacctgtatgtgacattcgaggtgttattcccgaaaaccctaaccgctgaccagaaggccaagcttaaggatgttctcgtgtagaccattgttttccacttgtatgctactgagtttgaggcagagcgccttgaggaaaattttcggagtagcttgcataggaagcagcagctgcttcctttttatgtgattttccattgcaaatcctagcagcatggtcttctttttctttcccttgcgttttgttatgcgcccttaacagctcggtgtaggtttagaaggcacaacaaaactgtaccagaatatttgtacctttggaattctgaatacatagattgaacacctcgggtgcttgcttattctatg

SEQ ID NO: 5091 - DNA, 1458 bp, Zea Mays
gtgatggtgatgctcgctcgtagtgcatgtgcatccatccgacttcccaacagcctacctctcgcgttccaggacaaaacgcagtcttggctcggcagccgaggcgagaggagcctttgcccacctttgctcactcgcttcgctttccatcctgttgcgcggccgcggcgcaggtgcggttggccatcacaggccaaggacccctcttcctcttccctttgacccaccaccgcccccctcttcccttcttcccccactgtcgccgctcctcgtcttccactctctccactttgctgcttcttctcccttattaatgctcgtgggctcctatgatccgccctccgccgcgggtttcttgatccatccccggcccaaggaagcggaccccggcgaacactcctgacagattcgcccgtccgccgctccctcgattcggtcctccccgtcagcggacctctgcagcatagcatctggtccgtccctggagatgtccggcgtacaggagcagttcgagatcaagttccggctgccggacggcaccgacatcggacccaggcggttcccgccggcgtccaccgtcgccacgctcaaggagaccatcatcgcccagtggcccaaagataaggaaaaaggtcctaggactgtgaatgatcttaagcttattaatgctgggaagatactggagaacaacaaaaccctatcagaatgcaaaagcccgatttgcgacttctctgcgatgacaacaatgcatgtcgtcatccgcgcaccgacttcaagcaaacagtctgataaaagagcagaaaagaaagcgaaaaatttcaggtgcggttgtgccattatgtgacagcattgtgaatagtagcagagagaacgtggccatttcagttttctccctttttttttcctgctctcgctggagtgttgtattatgttcgaggcgctttctcctttcattttgttttgaagtaccgcgtgcaagcttcaacagctgtcaagtgccctttaatcgtgagtgtgcatcaagcacagaattagaaggcggttggctgctaattacccttaatcttgagtttgtcaagcacacaatttgaaggcagtcattagcgtcgaaactacgatgtccaccctatccaatcttccatggtttcacgcttctcttctatatttatgctaccctgggtgacaaatgtttaatgtatgccttccatgctagatgaactttttggaacgccattctaactcatcaatttctattctgtaaaactaaaaccagttgtaatctgccatagatcagtatgcttgctatatgggagtcacattgatatgttttgcaactgttgctcatactctaaattagtagtagtttattgctggttcatctcagtttgcatcagctaccgtaaggtttgtatagacccaagttggatcacaatgtatcagcagggccgttcctgtagg

SEQ ID NO: 5092 - DNA, 1466 bp, Zea Mays
gtgatggtgatgctcgctcgtagtgcatgtgcatccatccgacttcccaacagcctacctctcgcgttccaggacaaaacgcagtcttggctcggcagccgaggcgagaggagcctttgcccacctttgctcactcgcttcgctttccatcctgttgcgcggccgcggcgcaggtgcggttggccatcacaggccaaggacccctcttcctcttccctttgacccaccaccgcccccctcttcccttcttcccccactgtcgccgctcctcgtcttccactctctccactttgctgcttcttctcccttattaatgctcgtgggctcctatgatccgccctccgccgcgggtttcttgatccatccccggcccaaggaagcggaccccggcgaacactcctgacagattcgcccgtccgccgctccctcgattcggtcctccccgtcagcggtgtttaggacctctgcagcatagcatctggtccgtccctggagatgtccggcgtacaggagcagttcgagatcaagttccggctgccggacggcaccgacatcggacccaggcggttcccgccggcgtccaccgtcgccacgctcaaggagaccatcatcgcccagtggcccaaagataaggaaaaaggtcctaggactgtgaatgatcttaagcttattaatgctgggaagatactggagaacaacaaaaccctatcagaatgcaaaagcccgatttgcgacttctctgcgatgacaacaatgcatgtcgtcatccgcgcaccgacttcaagcaaacagtctgataaaagagcagaaaagaaagcgaaaaatttcaggtgcggttgtgccattatgtgacagcattgtgaatagtagcagagagaacgtggccatttcagttttctccctttttttttcctgctctcgctggagtgttgtattatgttcgaggcgctttctcctttcattttgttttgaagtaccgcgtgcaagcttcaacagctgtcaagtgccctttaatcgtgagtgtgcatcaagcacagaattagaaggcggttggctgctaattacccttaatcttgagtttgtcaagcacacaatttgaaggcagtcattagcgtcgaaactacgatgtccaccctatccaatcttccatggtttcacgcttctcttctatatttatgctaccctgggtgacaaatgtttaatgtatgccttccatgctagatgaactttttggaacgccattctaactcatcaatttctattctgtaaaactaaaaccagttgtaatctgccatagatcagtatgcttgctatatgggagtcacattgatatgttttgcaactgttgctcatactctaaattagtagtagtttattgctggttcatctcagtttgcatcagctaccgtaaggtttgtatagacccaagttggatcacaatgtatcagcagggccgttcctgtagg

SEQ ID NO: 5093 - DNA, 3444 bp, Zea Mays
cgagggcgacggaggcagggtcactcgaaaggagaggcagcgcatcgccgccgtgcacaacgccgtctggaacacccccccccccccccccccccccccccccctcgctccaccggtcgccactcgtctgacgggagcatggagggttctaacttgaaaggtttggtagatgatgaaattgtcgtgaagacaggcaaagctgcaggcatcggtttagcttttggcagtgtgtatggtgcactacattctatgttgtttgatggacctcaggttggcaataatgtcaagtatccccagctgatcagaactaccaaggtgtgtgggcattatgccgcaagcttagcggtttttggagctacatttgtaggtgtcgagcaggctcttgcaaggtacaggatgaagaaggacatcattaatggtgctgttgcaggttttgctgctggtgcttctctgggtttcagtggtaagagacatatttatcttgctccagtgttatttctaacttaaagctatagtaaaaataaactcttgggatatgtcggttacctgtatttgtgtgaattgtcatcgatgacattttacttgaaatttctctattaatgtcgaccacttgttcacacaattttctttggtgttggggccatcatgctttggaaatttcttatgcagcatagtagaaattatcttcgtgctatatgtgaacttcatttctcaattaatagatagaattgcactggtgagaaatgcgatgccataaagggtgctttggaattagatttgctgtatgcattttttttgataggagattcttgtctgttatcataaggtctaggatgctaattctaccagaggaaaaaaatcaacatgaagcattcgacgatgctttactgcaaatttacatttgacatagttacacccattgttgcatgttagatatcatgggaaggcgtctatttattgatttcctactcatgttactcttccacttctactgatgatcctcatgtgttgtcccatgtgttcattacacaattattaccttgttcgatgaagtaatatactaatttgtcaatgaggccttgctgtttgtgcagctggaagcttccgggcagcattcttttcaggctctgcagtcgctttgacatctgtagtgctggatgtcaccggaacgaaaactactgatgaagaagaaaaaggccagcactagccaccctgagatatggaagagtactatctgtttcagaggagtttcatctctaaagaaatgctagtagagtagtagtataggcggcagtgaggatttcttaaccatcgatactagcacacaaacgtactactccctccgttttttatttatttatcgtgttttagtttaaagtgggcgacaaatattcgagaatggaggtagtatgttcataatagaggtagtaggttgtatacttcgctggggtcatggtctgaggtagttggttgtttcttcctgacgtatgctctatgcttaagaatgtatatcccttctgtgcagagggttcatgctcttctatggtttatatatatatatgtgtgtgttttcattcatgctgaaaaacaaagttgatcatgtcctaaaaataatttgtcaagaatttttctctcatcattcatgctgaaaaacaaagttaatcatttcctaaaaatactttgccaagagttttgtagcctaacaagatctggctaaacctcacgatgctggtggtctgcccagcacaaatggccaaaagacagtggatctggctaaacctcccgtggatccagcgtggcgtgattccattggctccctggatatccctcctccctctcgcgcttgcagcaaaatccaatgcttcgctctcgcttctgcagattgctcgctccccaaaaccttcacaaaaaaagccacccaaaaaaatccgtttcataactgaaaaaatcaaatagaaaaatcaagtgaagccggtaaagaaaaaaatggcagtggttggcctatccagtgctttcgctcctctcagaggttcttggatagccgtaaggatcaggcagggtggccaacgtgcagggatcagcttgtgtccatctccaaggagcaggaggagctgcgcggcagtggttcgggcggaggtgagcttcgtggacgccgacgaggcgaagaggctcgtgggcgaggagggctacacggtgctggacatcagggacagggcgcagcgcgagagggcacacatcaagtcctccacacacgtgcctctcttcattgagaaccaagacaacgacattgggaccatcgtgaagcgccagctgcacaacaacttcgcggggctcttcttcgggctgcccttcaccaagctcaacccggacttcgccctgacagtcaaggacaagttctcgccggaaagcaagctgctggttgtctgccaggaaggtctcaggtcagcagctgctgcagatgcactggagaaagaaggcttccaaaatattgcatgcatcacatcaggtcttcaaacagtgaagccaggaacgtttgaatctgtggggaaaagtgagctgcagaacgcggggaaagctggccttgtgaccatccaagggaagatttctgtagtccttgggactgtattgattagtgcctacctgtttataacattcttcccagaccaggctgagaagctttttgacttggctggcatcagcttgtgatcagagctgatgttcttcggtactccacttcataatcaggatggttgatcaagtcagattcactcagatgtttccagactgaaaaggaatttttgctctgtgtactattagggaattcttgagagattagcacttaaattctttgaaacatcccttttctcgatgtacctcctatatatatcgtatgcttgattcatctacatgtttgtgttgctttttgaagtatctagacctgcagttatgattcaggatttcaaatagaagctttttatccatctaatcatgctcatccacttgagaacattgaccctgaaagattatgtagaccttgataccaattgcagttgcagatgaaatgattgtcttgtgtaatggtgtaataatagatcttgcactttttggggtgtgttagcgtcaatctgggtgccagtcactgggagttgttccgctcggtgggctctctgtggcggcgcggacggtccgcgacttggacagtaggagcagggttccctgtgccgagccagacggtctgcgctgcgctgggctggcggcgttcagcaacgacacctggaatctcgccctccgagagggaccttgtcaggaaggagagatcctagggtttatcttgggatcgataggccacccaatatgtctctagatgatgtagagtcacataggtgaagattgggataaagaagactatgttactggactcctagggcaagaatgtaaagaaat

SEQ ID NO: 5094 - DNA, 1350 bp, Zea Mays
gtatgcgttcggcgacgcgacgcgcacggcgcaccattccgcggccacgaagagcacaatcctgttcgccacgccatgcctctccacgcccgcgcaccgccgctccgccactcccaccttctactcaccgccgccaccgctcggctccgcccgtgcgcagcgccagcgaccaagccccgccgccgctccctcgtcctcgtccgcgcctccagctcggaccctccgcagcagcagctcaacctctccgtgctccgcttcaccctcgggcgctgatgctgccagccgagtgccgttgcccgaggggagcatccaagtattcgtcatgtctgagaacctgtcagctgtgcagaaggaggacatggcgtgggcgtcgtacgtcctgctccggaacacaaacaccacgtctgtggtcatagcaattggggatctcttgtgcgtacgaggatactggaatccacctgcaaatacttcaaaatattccacgatcgagtggttcaaaagtcagatgcagcaactaggacttgttgatttgaggggtgctttatacttccctaattcgtcagattctcagcttgcgaagattctgccagatgggattctttctgtgctagcgcaacctattctgagtcctgatccagctaataatgaaacaaaaactgaaggtgtcatcctgttggcctgcaatgcaaattatgcatatagtgagaaagatagggcttggataagaacagttgcagacaaatttcaacgtgcttaatttagaggtaccaaaggcagtactggaaaatggaccgggaaagattggggagtgtaaagtagactgactggtccaagaaggatttggagtcttggcaacgtggactgagcagaataagagagttttgcagttgggaggaaatcagcattaagctactgtttattagggttggcgctagttgaagcaaaatagtccagcaatagtttgttcagttggctagagactatgtggtgatgtgtttggtttgtctctgtgcctcttgctttggtatgtatgtctgattggatttggcattgaagcagaaaggctgctccagagattagtgacatgtgcaaagtagcaatgctgtcataatttacgcatactccagcccaattgaggcagttgatcacctggctgcatttatataagcagtaaaagcatttttagttcaaagtgttgtcacatttaagattgcaaatactgctgatcaatcacattccttcatatatgtacctagattttctattgcaggcttgcagctagtgaccttttcagttgctattgctagtatacacaaacttaacagacaagggaaatgtttgaatcttctg

SEQ ID NO: 5095 - DNA, 1429 bp, Zea Mays
gtatgcgttcggcgacgcgacgcgcacggcgcaccattccgcggccacgaagagcacaatcctgttcgccacgccatgcctctccacgcccgcgcaccgccgctccgccactcccaccttctactcaccgccgccaccgctcggctccgcccgtgcgcagcgccagcgaccaagccccgccgccgctccctcgtcctcgtccgcgcctccagctcggaccctccgcagcagcagctcaacctctccgtgctccgcttcaccctcgaggtccgaggctgtggggctgtgcctggccgcgttctcggcgacgctgccgttcctggggaggttccttgagggcgctgatgctgccagccgagtgccgttgcccgaggggagcatccaagtattcgtcatgtctgagaacctgtcagctgtgcagaaggaggacatggcgtgggcgtcgtacgtcctgctccggaacacaaacaccacgtctgtggtcatagcaattggggatctcttgtgcgtacgaggatactggaatccacctgcaaatacttcaaaatattccacgatcgagtggttcaaaagtcagatgcagcaactaggacttgttgatttgaggggtgctttatacttccctaattcgtcagattctcagcttgcgaagattctgccagatgggattctttctgtgctagcgcaacctattctgagtcctgatccagctaataatgaaacaaaaactgaaggtgtcatcctgttggcctgcaatgcaaattatgcatatagtgagaaagatagggcttggataagaacagttgcagacaaatttcaacgtgcttaatttagagaaatgttgacagtcaggcagtactggaaaatggaccgggaaagattggggagtgtaaagtagactgactggtccaagaaggatttggagtcttggcaacgtggactgagcagaataagagagttttgcagttgggaggaaatcagcattaagctactgtttattagggttggcgctagttgaagcaaaatagtccagcaatagtttgttcagttggctagagactatgtggtgatgtgtttggtttgtctctgtgcctcttgctttggtatgtatgtctgattggatttggcattgaagcagaaaggctgctccagagattagtgacatgtgcaaagtagcaatgctgtcataatttacgcatactccagcccaattgaggcagttgatcacctggctgcatttatataagcagtaaaagcatttttagttcaaagtgttgtcacatttaagattgcaaatactgctgatcaatcacattccttcatatatgtacctagattttctattgcaggcttgcagctagtgaccttttcagttgctattgctagtatacacaaacttaacagacaagggaaatgtttgaatcttctg

SEQ ID NO: 5096 - DNA, 2163 bp, Zea Mays
cccggccttcgttggtgcgcaaacgacgacgacgacgacgtgcccagtgcgcggccggccggggattcatatcgaatcggatcggaggggaagcaggagcccgcagggggcggctagcgctggtgcgtgcttcctccattatattatcattgcgcctcgtcctccccaatcctcattgcccatcacattccatcgaccagtctcaattcaaggagctgaggacgacctgtccgtccggagctgatcgagaaacggaggggcggttccagtttcagtccagctagctagctagctagaagatcccattcgctgacagatgggttcctacatccaaggagatgatgaggtccctgtacgagctggacgcgcacctggaccgcttcctccggtcggccgcggcggcgcgcgtgggcacggccccgttcccgcgcgaggcgctgcggcgcatcctgatccagatgaccgccgcctcgggctgccgcatgggctccatccgctactggctcagctccgggcccggcgacttcctgctgtcctccaggggctgcccgtcgccggcgttctacggcgtggtgatcgcgtcggagtacgagcagtgcggggtggacggcaccggggtgcgcgcggtcacggccacggtgcccatgaagccgccgcagttcgcgaccgtgaagaacgtgaactaccttcccaacgtgctgtccatcatggacgccgaggaccgcggcgccttcgcgtccgtgtgggtggacgaccaagggtacgtggccgagggccccatggtgaacgtggcgttcgtgacgcccgagcgggagctcgtgctcccggccttcgacaagatcctcagcgggtgcacggccaagaggatgctcgcgctggcgcctcgcctcgtggacgccggcctgctcgcgggcgtcagcaccagggacatcacagccgaggacgccaagcgcagcgccgagatggcgttcgtcggcagcggcctccccgtgctgcccgtcgtcgagtgggacggcaaacccatcggagacgggaaggttgggaagctgatgccggcgctgtctgatctgctgtgggaggacatgaagtccggtcccgacaggatccccgttccatacaagcagtagcctgagcgaaggcgaagccatgacatgtctctctctctctctctgtgtatgtgtttgcagtcgaatggtgattgccttgcctgaataaaaataaacctctctctgtatatctgagcgaatcgttttggaaatacgagcagattccatccaacagcatgtgactgttcaggttcagcacagcacagcagcagtactccaactgaaatttcggaatgaaaacaggtcatttccaaaacgaaaacgaaattggctggcccacgacatcggggcaatccaggcccggcccaactactcatcgtcatctttattccacacttccactccccatccccacatccaaattcccaatcccaaccccaagtcacactccacctccgcaaccaaacgcgctagggtttccgcaccgcacctctagtcctccacccaccccaccccactaccgcgcgccgcgcatcgccgagtgcctcgtcggagacgagaccggcgtcatcgtattcaccgcccgcaacgaccaagttgatttgctgaagcccgatgccacggtgatcttgcgcaatgccaaaatcgacatgttcaaaggatcaatgaggcttgcagtggacaaatgggggcggattgaggctacagagccagccagcttcacagtgaaggaagacaacaacttgtcccttgtagagtatgaattggttaacgtggctgaataaccgtcgaagcgtttctgcccccctttcttctttttcacgcacgccataagatgataagaaaacgaacagcatctcgaagctgagtttatttgttacggtggtcgataaggtcaaggcttctgctgttacacctttggatccaatccattaagatgaattacccttgcatctattgtaattgtgtggttatccaaaaagggtgcatttaatcattactatttttttgacggggtataacaataagccagcaaatgttgctgggccgctgtggcgagccgtccttccccatggcggcgagcttcttcatgatcagctcgtggagcccttccacc

SEQ ID NO: 5097 - DNA, 2253 bp, Zea Mays
cttcagaagtcgccgcgacaaggtgctgaattttgactttctaccagaaatcggagcgaaccaaactgccgggaaaacccctcgcctgcggcttcgcgtcggccgccgccgctgccgacactttaccgcgtgccttgcgcccccgcgccgccgatgcgatcagcgacgcacgccagatccgagcttctgtaggaccttcagccgtcgccgtcccatgggggactgcgtcgtcgaggacggccacgggcaccactactcggaggcggtggagggcgcggtttcgttgacggtagccgtggagctcgatgagcgggcggaagagtcgcgggaggaggaggagggtggcgggcagcggaagaaaatgggcgggatcccaagggagccgtcgttctcgcggtggtgcagggacccctctgccgcctccgcctccaataccgccgctgctgcggcgaccagtgacagcgacgcctcagaggagttcgagctgccgctcctgccatcctcctcgggcggcggcggctcaccgatggacattgaggtgggggcaacggcgagatctgatgatctgccgatctcgccgaggttgcttgcgaaggtcatcgggttgatagcgtgttggtacacactgagcacgtgcttgacgctgtacaacaaggagatgctgggaaagcacatgtggaagttcccggcgccattcctgatgaacacagtgcatttcacgatgcaggccgtggcgtcgagggccatcgtgtggttccagcaacgaggcctagagggagggccaagtaaaatgtcgtggaaggattactgtttacgagttgtcccaacagctttggctactgctcttgatataaatctgagcaacatttcacttgttttcattactgtgacatttgctacaatgtgcaaatctgcttctccaattttcattcttctgtttgctttcatgttcaggcttgagaaaccgagctttagccttcttggaatcatgctggttgtttcatttggagttctactaacagttgctaaagagacagaatttaatctatggggatttatgtttattatgcttgctgctgttatggctggtttccgctggtccatgactcagattcttctccagaaagaggaatatgcattaaagaatccttttaccttgatgagtcatgttgccccggtgatggcaatagtaacagcaattatttccatcgtgatggatccatggcatgacttcagagcaagtcacttttttgatagttctactcacataataagaagcagtgtgttgctgcttctaggtggggctttggcctttttcatggttttgacagaatatgtccttgtttctgtgactagcgctgtcacagtgactgtagcaggaattgtgaaggaagctgtcactattctggtataaaaggttcaaaaaagggcatcacagtgaagatgctgggacaaatatccaatcttacaatgggacttcaaagtacgttatccttgatgatgatactgaagatcaggatgattcaggctgacctgaatatggtagaatgcagactactatatgcactggcgtttccagagaagcaagatcttctggtgcctgcatagacttacttccacaggctaactgatatcatactattttttgagttgatcaaccgctgtggccactggccagccatgcacgagcgtgacgcttgcagccgtgtgacaagttgagaagactacacgctcgtacatggaacatacaaggtacagcctggtatcagtacagatgttttctcctttcgttcaagacaaagaacggtgcatatatctgaacgaggcattctgcagtatgtccacgaagaaaatgttgcatcaattacaattagaaacacaggtaacacacttaactttatggatgaggatagggttcggttttgtagtgcattctgattgttgaagggagattcagcatcggaacatagctttcttttctttagttctttctttttttgagatgaaaaataaatagtactaacaatcttatatgtaataatgttgtatttacgggaatgtgtaccgtttcacgtaggagcatttcgcgccttattgtaatacctcatcttgagaggtcagtgccaagtcggcacggtccatctcaaatttcctttgcgtattttgagagcagcttgtcattgtacatgtcatccattagcatatcttggcgtttggcttcatccgtaggactatgagtatatccagaaggtt

SEQ ID NO: 5098 - DNA, 2258 bp, Zea Mays
cttcagaagtcgccgcgacaaggtgctgaattttgactttctaccagaaatcggagcgaaccaaactgccgggaaaacccctcgcctgcggcttcgcgtcggccgccgccgctgccgacactttaccgcgtgccttgcgcccccgcgccgccgatgcgatcagcgacgcacgccagatccgagcttctgtaggaccttcagccgtcgccgtcccatgggggactgcgtcgtcgaggacggccacgggcaccactactcggaggcggtggagggcgcggtttcgttgacggtagccgtggagctcgatgagcgggcggaagagtcgcgggaggaggaggagggtggcgggcagcggaagaaaatgggcgggatcccaagggagccgtcgttctcgcggtggtgcagggacccctctgccgcctccgcctccaataccgccgctgctgcggcgaccagtgacagcgacgcctcagaggagttcgagctgccgctcctgccatcctcctcgggcggcggcggctcaccgatggacattgaggtgggggcaacggcgagatctgatgatctgccgatctcgccgaggttgcttgcgaaggtcatcgggttgatagcgtgttggtacacactgagcacgtgcttgacgctgtacaacaaggagatgctgggaaagcacatgtggaagttcccggcgccattcctgatgaacacagtgcatttcacgatgcaggccgtggcgtcgagggccatcgtgtggttccagcaacgaggcctagagggagggccaagtaaaatgtcgtggaaggattactgtttacgagttgtcccaacagctttggctactgctcttgatataaatctgagcaacatttcacttgttttcattactgtgacatttgctacaatgtgcaaatctgcttctccaattttcattcttctgtttgctttcatgttcaggcttgagaaaccgagctttagccttcttggaatcatgctggttgtttcatttggagttctactaacagttgctaaagagacagaatttaatctatggggatttatgtttattatgcttgctgctgttatggctggtttccgctggtccatgactcagattcttctccagaaagaggaatatgcattaaagaatccttttaccttgatgagtcatgttgccccggtgatggcaatagtaacagcaattatttccatcgtgatggatccatggcatgacttcagagcaagtcacttttttgatagttctactcacataataagaagcagtgtgttgctgcttctaggtggggctttggcctttttcatggttttgacagaatatgtccttgtttctgtgactagcgctgtcacagtgactgtagcaggaattgtgaaggaagctgtcactattctggtataaaaggttcaaaaaagggcatcacagtgaagatgctgggacaaatatccaatcttacaatgggacttcaaagtacgttatccttgatgatgatactgaagatcaggatgattcaggctgacctgaatatggtaggtaagaatgcagactactatatgcactggcgtttccagagaagcaagatcttctggtgcctgcatagacttacttccacaggctaactgatatcatactattttttgagttgatcaaccgctgtggccactggccagccatgcacgagcgtgacgcttgcagccgtgtgacaagttgagaagactacacgctcgtacatggaacatacaaggtacagcctggtatcagtacagatgttttctcctttcgttcaagacaaagaacggtgcatatatctgaacgaggcattctgcagtatgtccacgaagaaaatgttgcatcaattacaattagaaacacaggtaacacacttaactttatggatgaggatagggttcggttttgtagtgcattctgattgttgaagggagattcagcatcggaacatagctttcttttctttagttctttctttttttgagatgaaaaataaatagtactaacaatcttatatgtaataatgttgtatttacgggaatgtgtaccgtttcacgtaggagcatttcgcgccttattgtaatacctcatcttgagaggtcagtgccaagtcggcacggtccatctcaaatttcctttgcgtattttgagagcagcttgtcattgtacatgtcatccattagcatatcttggcgtttggcttcatccgtaggactatgagtatatccagaaggtt

SEQ ID NO: 5099 - DNA, 2720 bp, Zea Mays
atcggcccttcctccgtctctcgccttttccgcgctcacctttgcgcatcggcatcggacaccaggtttcttccgttttgctagatggattctgacgcgggcggctccagctccgctccaccacctccgtcggcagccataggtgcaggcgcgggcgcggagacgaagggggatgagcgcggccgcaagcaggtgatggtggtactggtgggcccaccgggcagcggcaagtccacgtttgcagatgccgtggttggcggctccaccgccggccgccactgggttcgcgtctgccaggatacaatagggaacggcaaagctgggacaaaaatacagtgcttgaaggctgcatcagatgctttgaaggagggcaagagtgttcttgtcgaccgctgcaacttggaacgtgagcagcgtgctgattttgtgaagctgggaggcacattgcgcgcagatgtgcacgctgtctccctggatctacctgcaaaggtctgtatctcacgtgcagtgagccgaaagggccatgaaggaaatctgcagggtgggaaggctgcccttgttgtgaaccgcatgctgcagaagaaggagacacccttgctcacagaaggtttcagtcggatcatgtgctgtaatgatgatggcgacattaaaaaagcagttgacttgtataatggtttagggccttcagatagtcttccatcaggagtttttggtcagaagagcaaaagacccgtacaagttggtataatgaagtttctaaagaaaactgatgcttctgttgttgagacatctagcggacctaagcaggcattgacagaaataaagccagcgcagcaaaatcctttgccaaaacaggaaaatgttgaagctggttttgcctgttccatggaagttgagaagggattaaatgacaagatggaaaatgaagagcatgctaaaggaagtgattattgtgatgttggttcccgtactctggcatttccatctatttctacagctgacttccaatttgatcttgacagagcatctgatattatagtggacacagctgctaatttcttgcagaagtttgataatataagactagttcttgtagacctgagtgagaaatcaagaattttgtcattggtcaaacagaaggctgctaagaagagcatcgactccaacagatttttcacatacgtgggagatatcactcagttgcacacaaaaggaggtcttcagtgcagcgtgattggaggctaaaacctggaggtggaggggttaatacagcaatatatagtgctgctggagaatctttacaacatgctactaaaaaatgtgctgatgcactgaggccaggaacctctgtagttgttccacttccatcaacttctcctctgcatcaacgggaaggtgtgacgcatgtcatacatgtgctcgggccaaatatgaatccaatgcgaccagactgtcttaagaatgactataccagagggtctaagattcttcgtgaagcatacacttcactttttgagaattttgcatctattgtgcagagctacatgggaaagcagaacaatgagtctggagcagaaaagtcagcgtctggaaggatatcgcccaatgacacaaaaatgaagcgagaggacaaccatgaatctgaaaggatgaaaaaacataagttgtttcaacccatcatgactgcaaagcgacagcatgagtgtacaaaggttaatgctccaaattgccatgataatgccatgacttcatctgctgctcctagccaaactagacaagtagacaacaaaaggaatgatgtggttaccagtaagacttggggatcctgggctcagtctctttacgaacttgccatgaacccagaaaaatacaagaactcagattctattctagagacatcagatgaatatgttgttctgaaagatctctatccaaaggccaaaaggcatgttttggtgatagctagaatggatggtcttgactctctagcagatgtcaagaaagaacacttgcctttgttgaggaggatgcattcagctggggtgaagtgggcacataagttcctagaggaagatgcggctttggaattcagacttggataccattcggttccatcaatgcgacaattgcatcttcacatcattagccaggatttcaactctgcaagcttgaaaaataagaaacattggaactccttcaccacatcatttttccgtgattctgttgatgtgattgaggagattgaacaaaatggatcaacaaccaccagcagtgatgaaaaggtactcgctatggaactccggtgccacaggtgcaggagcgctcatccaaacatcccgaaactgaaatcccacatcgccatctgtaaatctcccttcccttcacatcttcttcagaaaaacaggctgttgttgtcctcgacgatgcatatggaccgcacgtagatgctagaactcgatgatcagttgtccttgcacgcacattttgcatgtcgtgcttgcctaaggatagtgttgatcgattttttttttacctaatgcggactagtggaaacttgccttgcttttcagagaccattacctgtgttggcgtgcttactgaagattattggggatggaagctccatttgacttgggtcattggatcgatattaaaattttctaaaataaattagagtgcgtcaggatctagattctcgtagaaatattttggatccagat

SEQ ID NO: 5100 - DNA, 1548 bp, Zea Mays
gctgaaccgaaagcaaaccccaccacaacaacaccaccgctcgcctgctctcaccgaccagcgccgcgccactcctccgccggatctccagcatgcagccctcctcctcgtcctcctccgctcacccgcccgaccatcccaactccaagcccccggccccgccggcccccgccatgggctaccccgcccccaacgggaaccccagcgcctacttcgccgccgcgccgcccgccgccgccgccgccaacggctccgctccggcgaccttcggcgtcgcgtacccctaccccgcccctcctcaccaccatcacccgccgccgcaccaccactacccgtatcccccgcccccgccgacgcaccaccactacgcggcccacccgccgccgccgcccacctgcctgcgccgcctcctcgccgccgtcgttggcgccttccttctcctcggcgccgccaccttcatagtctggctcctcctccgcccgcgcgccccggccttctccctcacctccctggccctctcccgcgtcgcttactcccccgccaactcctcactctccgcctccttcgacgctgccctcctcgccgccaaccccaacgccaagctctccgtcgcctacttctcacccctcgcatccgtctccttcgcgccctcctccccgctcgccgtcgcctcgctcgcgcccttcggccagggccccggcaacaccaccacgatcgccttccgcctcgtcgtagaggatgcctacgtcgggcccgacgacgccgcagcgctcaagaccggcgccgggggcgctgtcgacgtcgaggtcaggctcatggccgtcgccgtcttcgacagaggtggctggcgcacgcgccggagggtcatgagggttatgtgcgatggcgtcaaggtggttttccgcgggaagaattccactgaggcggccttcgatgggccgccaagaaggtgcgatgtcgtgttgtgaaggatcatcataacaggtttgctgactactctggatgctgatcggggggtacaagaagctaactggcacaatgggggtgcgtttatctgcatttgatttgatgagcaatactcaagctgggtaaccatgcttttatctggctgtaataggagtagcgagtgagagaagtctggaatgatccatatgcttggtgggtaatgagtggtctgtgtagcttcaacagaaatgtttgtgaaagttacggtaagaattactgtgcacgcgtggtggttaactggtttatgtgggcgtgtgctatggagcctctcatgagtcatgaaacgaatcggtgtacattgaactagcgcttggaatgaagccctgccattcttggagatggatggctggatcctgtaaccgtcctgtccacttagggcttgtactgttgcacatggatcgaagggtactgagggggattaaaactcgttttagcctactggatgtatgtgtgcatagcacatatatcaactaaaaaaaactcctctatgtggtggggagagagagagagtatgattatgtctaataaaaaagatcaaaataa

SEQ ID NO: 5101 - DNA, 1987 bp, Zea Mays
gcggctttggtctctttcctgcagcaagactccgggaacgcgccagattcaatgaatccatctccatcctttcataacacacctgcaatcataaagagaggtgcaacgtcttctccgtgcttaccactcgccattcctaagtcctaactacctccacccccgcacgcacaactggccgcgccaaggcaaagctagaagaagacaacgcaaagggagaggacagaggaggagcagaggacgatgggcagcggcggcgctaacactgcccccctcctcaccccctacaagatgggaaaattcgatgtttcccacagggtagtcctcgcaccactgacgagacagcggtcctacggcaatgttcctcagcctcatgccatactgtactatcagcagagggcgactaaaggaggtcttctgatcgctgaggccacgggggtttcagacactgctcaagggtacgtctgtcgtctgctagaccatcaggctactacggctgcttgagatctgtgtggtcatgctaaatttcatcattcagtagtttagtcgatgtctgaataaagatgtgttttctgtatgcgcacaaggtacaaggacactcctggcatttggacccatgagcaagtcgaagcatggaagccgatcgtagacggggttcaccagaaaggagggatatttttctgtcagatttggcacgtagggagagtctccaattccagtatgtttaccacctctaacgcagatcggttctcaaagctataaatttaacggcagtctagtcagcttgcaagagaaaattggattcagagttatccatgaagacttcatggcaacattagctgtgtttgtcatagaccaagatgtttatgaaagcgctcatactatttctactacagttttttttgtaataaaagtgccattataccaacgactgttaaatgttccaatgcagcttttcagcctaatgggcaggctccaatttcaagcaccgataagccactaaagcctcaagtgagagccaatggtatagacgtggctactttcgcagttcctagacgcttagagactgatgaaatccctttggtcgtcaatgatttcagggtagctgctcgaaatgcgattgaagctggatttgatggtgtcgaaatccatggagctcacggttacctgattgatcagtttctaaaggacggggtcaacgaccgcacagacaaatacggtggcagtctggagaaccgctgccggtttgcactggaagtaactcaagccgtggtcgacgaaattggagctgacaaggtcgggataaggctgtcaccattcgctagctactcggaggcgccggactcagacccggaagctctgggcatgtacatggcgaacgcgctgaacgagttcgggattctctactgccacatggtggagccgcggatggtgaaactcggtgaaaagttcgaaaccccctacagccttcgcccgataagggacgctttcaggggaacgttcatcgttgccggcggctacggcagggaggatgggaatcgcgcgatctccactgggtatgctgatttggtcgcgttcgggcgcgtgttcttggctaatcctgacctgcctcggaggttcgaagtagacgctccccttaacaagtacaacagagacacgttttacatccctgatccggttattggatacctgactacccatttctttcgtcagatgtataaatgttctcttttcagcaatctgctttttagattgtgtagtaactggttggtgtaccagtaaaatattagacgaataaaccattggtctgaatgcctcattctcatatatatggacaaaagcaatatgatcgttgtaattgtgcctcaaatcttatagttatagttgtaaaaaaatattgtgaagaagatcagtcagttgtcaagttgtataaaaagtcagcctggttcacagaatcacaggcaactactatgcccctgttggaatcaca

SEQ ID NO: 5102 - DNA, 2916 bp, Zea Mays
caggcgcatagttctgtttcaacctcacagcgtcgtgacgtcgtcctctgcttcgcaagcgcccgagccgcgcgccgccgaacccgccgcctcctccagcctccgggcacatcggagcacgccagccaatcgcaccccgacacggcggcaccggaggaacccctccttcttggtcgtagcctccgtggcctccctcccctcaccccttccggtgttggattgagggtggagcggagatccgccacggcttgattgatccctggctcgtcctcctacgcaggatcgatacaccatataatttgggattctaaggtcccggtgcagcttcttctcgcagaagtttacgccctatgcccctcgctaagcccacccctgtgattccgccgtgacgcgtcatccacgggagaaacgccatgatgtcgaggtttgcccacttggggaagagcagaaaacttgctgaaacccttttggttgcctcaaagcccaatactgctggtggccaaaacattgcttcaagctttgcattcggcttgggttattccagcagggcctttttgcacgggaaggttcataatggtccaaacacctcctacatgctgggaagagcaaatgatagcttacattggagcactggtgtgaggaaattctcaattctttcatcttgtagccagaatgcatttcagagtcagcttgcttggaagcgacttgtagcactgggttctcgtgcaccaaaagcatctccaatttttagtaaggttgcttgtgccattggcttggctgtgagtaggtctaatatagccccttaccttgtcgcttttattgcgggagaggtaatgctagctcagaagacatctgcagatggagaatactacccaatacgtgagagagctcaggatggccgtatttacgttacctctctaatatattcggcagtagaattggttattataatcttcagatcaatatatttggcattgctgttcactccaagtatactgatggccccatttgcagagactcttggcagtaagtataggaaaacatggcttcgacttgtccatcgtactttggagcttgcaggtcctgcgtttatcaaatggggccaatgggctgcaacacgccctgatctgtttccaagtgacctttgtactgaattgtcaaagctgcacacaaaagcaccagctcacagctttacctatactaagaaaactgttgagaaagcttttggtcgaaagctatcagacatttttgaaaattttgaagaggaccctgttgcatctggaagtgttgctcaagtgcatcgggctgttctacgattccggtatcctaatcggcagacaaagcgtgtaactgttgcagtaaaagtaaggcatcctggtgtaggggactcaataagaagagatttcaatatcatcaatgccgtagcaaaaatatctagatatatccccacgctgaattggttgcgcctagatgagagtgtacaacagtttgctgtcttcatgatgtctcaagttgaccttgcaagggaagctgctcatctgagccggtttatctacaacttccgaaggtggaaggatgtatctttcccaagacctctctatccacttgttcatcctgctgttttagttgagacttacgagcatggggagagtgtttcacactatgttgatgaccttgaaggacatgatcgaattaaaagtgctctggcccatattggtactcacgcgctcttgaaaatgctactggttgataatttcgtccatgcagatatgcacccaggaaatattttagttcgtgttgcacaaccaaagaactcaaataacacccttaaaaagtcaaggccacatgtagtcttcctggatgtaggaatgactgctgaactttcaagtaatgaccgtgtgaatttacttgagttcttcaaggctgttgctcgccgagatggtcgtacagctgcagaaagtactctaaagttgtcaaaacaacagaattgtccaaatccaaaagcttttattgaggaagttgaacgatcattctctttttggggcactgctgaaggtgatgctatccacccagctgagtgtatgcaccaactgcttgagcaagttcgatgtcataaagtgaatatcgatggcaatgtttgtactgtcatggtgactacattagttcttgagggctggcaacgtaagttggatccagattataatgttatgaagactctgcaaactttactttttaaggaagattgggcgaagtctcttcaatacactatccaagggctcatggcgccttagggtcgtccgcaatcctttctaaagttttgatctggtttgtgttcgactggaggatcctcttctctcaccatcacgtctggcttcttttctacgttatttcacgtttcgtttctctgtacctgtcctggcgttgtgctgctaaagcagccttgatgataaagtaataactgcagtaaaaattttcagaagctaccagagtactatgctgctcagctctgggctgtcttcttatatgttcttgatgaagggccaaagaattaggtccttttcccccccctcctaccaacacttttgacaatagctcttagatgatgtagcaaaaggcgttctgttctgatgatcttttttgtaactggagagattgtatccgtggactggagagttgcttatgtacagacagagatactgttaatctcgaaggaatccacttgtcaactgacaattattcccaggaaaaggctcccagttttttcttgttttacatgtattagcaatgctgaatgtctgaaatttgaatgattttgctggtagggaggtatattgaacaacattgtggttacccttatatgtttgtagcgttttataggtcataaattaacttggaacatgaagcgtgctctcgtca

SEQ ID NO: 5103 - DNA, 1879 bp, Zea Mays
aaaagcggcgctgccagtgtgtatattacacggcgcggaggacggggacgcggaggactcgcccggcccatcccgcaccccctacctccgaggctgcgatccgctcttgtaggctccctcgccaatccgctcctcctccctccctccaactgttgtgcgtgcagcggcgtcggagaagagatggcgtcggaggccaaggacgtgggcatcctcgccatggacatctacttcccgcccagctgcgtgctccaggaagagttggaaacacatgatggtgtgagcaaagggaagtacaccattgggcttgggcaggaaaatatggcattttgcactgaagttgaggatgttatttcgatgagcttgacagttgtgaagtccctcctgaaaaattataacattgacccaaagtgcattggacgtttggaagttggcagtgaaacagtaatagacaagagcaagtctataaagacatggctgatgcagatatttgaggaatctggcaatactgatattgaaggagtggactcctcaaatgcgtgctatggtggaacagctgcattgtttaattgtgttaactgggttgaaagcaactcatgggatgggcgttatggacttgttgtttgcacagacagtgcggtttatgctgaaggtccggctcgtcctactggtggtgcagctgctattgcaatgctgattggaccaaatgctcctatttcttttgaaagcaaatataggggatctcatatggcccatgtatacgacttttacaagcctgatctcgcgagtgaatatccggtggttgatgggaagctatcacagacatgctacctcatggcattggactcctgctacaatgtattttgtaaaaagtacgaaaagcatgagggaaagcagttttcaatttttgatgcagattatgttgtgttccattctccatacaacaagcttgtacagaaaagctttgctcgtttgtactacaatgatttcttgagaaactgcagcacggttgatgaagagtcgagggaaaagttggcaccgtatgcaggcttgtcatctgaagaaagctaccagagtcgcgaccttgaaaaggcatctcagcaagttgcaaagaacctgtacgagtccaaggttcagccaacaacattgatcccaaagcaagttgggaatatgtatacagcatcactctatgctgctcttgcatcggttatacataatagacatgaaactctggcaggccagaggattgttatgttttcgtatggcagtgggttgacatcaacaatgttctctttcaagattaatgaaggccatcaccctttcagcttgctaaacattgcaaacataatggatgtttccaagaaattgaaggcaagacatgtggtcccgccaaagaaatttatcgaggtactgaaactgatggagcaccggtatggggcgaaagatttcgtgaccagtcaagacacaagtttgctatctgtaggcacatattatctcacgcatgttgactccaagtaccgaaggcaggtgttcctaagcattctgattcttcttagattatctattaggaagggacgctggagcttagattaatctctgccaagttgtaaggttgtaaagttagttagagctgcgtcattgctgtaatgcttgcttggtaaaagttctggcgctcttcagttcttcagtgcttgcaaaattcaaatcaagctcactactagttgtaagaattctgaataatctgcagaatcactggttacatccaagttacgctgttgaatgcatgatttcatgtttaacacgattaatgcatctggattcagctgtgttgttggagtactcgtgtcgtgtcttgtacctttttaaaaagaagtttcttaca

SEQ ID NO: 5104 - DNA, 1684 bp, Zea Mays
gttgcatatattttattacaccaagatttggttacaagaatttgttgtttggttctgaggcatgaatcgtagtcctggctgcatgcctggcccacaccatcctctattaaaccgattttaatatcaaaatgttatagacattaaatataataataccatactgtatgatggaaagagactcgatcgtaaaagtatggagttttataagaataaaagtttcttttttaaaaacaatatgagtgtgttttggcattaacacactgacgagacgacggccttttatatactcggactcggtgcgggggggcacttcatcccaaaccagttcagcttccaaaaaggcaaagcagagcccgcaagcggagaggctacagaagggtatgggtcacctccgcggcctcaccgccgcgcggctcctcgcggcggccttcctgctctccgttgccgtcccggccgccagagcccaggaagaaaccgagcacgaggaggagttcagctacgtcgtcggcgacgagaacgggccggagcactggggcagcatcaaggcggagtggggcaactgcagcgccgggcggatgcagtcccccatcgacctctcccacgagcgcgtctcgctggtgcggtccctcggctacctcacccactcctaccgccccgccgaggccgccatcgccaaccgcggccacgacatcatggtgaggttcaagggcgacgccggcttcctggtgatcaacggcacggcgtactacctgaagcagatgcactggcactcgcccaccgagcacaccgtcgacggccgcaggtacgacatggagctgcacctggtgcacgagagctcggcgaacaaggcggcggtgatcggcatgctctacgagatcggcgccgaggacccgttcctgcaagcgctggagccgtccatccaccggatcgccgacaggcaggaccgggaggaggccatcggcgtggtggacccccggcgcgcgcgcggcagggccagcgtctactaccgctacgtgggctccctcaccacgccgccctgcaccgagggggtcatctggaccgtcgtcaagagggttagtggccgtggccccgctgcgcaattttcttccccgaattccaaccaaacggcatcattcgatcgatcgtccgcaccgtgtccaggcaccagctggagctgctcagggaagccgtgcacgacggcatggagaagaacgcgaggccggttcaggacgtcaacgacagggacatcagcatcttccgcccaaagccacacaagcactactagtactagctatggtataggttgcacagtccagcagcgcgcgtagttggtatcgatcagtagtgatgcacgagctagctgacgcggttcagtgttggggagaggtgtctgctgtatatggttacggttttgttttataattctttccatctatgttataggacgaaataaacagacgaggatcaccttcaggtccactcttcagaagaagaacaaaaaaaaaaggaaaagagaacatgtcgatgcgcatgtggctcgatcgatttgattattgttgttgagtagttggcactcaaacatgacctatctaactggcacggtcttttgttaaaaaaaatactatgatttgattgtcgtttagcaggacgagtcacatgtgtacagtataagcctatatatatt

SEQ ID NO: 5105 - DNA, 1994 bp, Zea Mays
agccgcaaggccagacagacgccgagcccagccagcgccagccgaagacgaccgccgcccgggagccagcccaatcaaacccatcgcccatcggtctcctctctccctctttgtccaccgcgtcgtcgtctcgtctccctccccgcccctcgtatattaacagccccgtcgtgactacactgaccaccgcctcgaatccatcgctccgctactcgaaccagactcattggtgcatactcccgcgtcccgcctggctccggggtccattcgtcgacccatctccggcgaaagcttacctctactaccactgaagcgaaggcgtcacatcggaagaattgtagctgtttgtcctcctcttcccgacagcgcagagcggagatccgaccggacctgggatcgattccttccttttctcggagattgatgagctatgtgatgagtgggagccagagccgctatgccctccagtcaaggagggggctcgaattgatactccaatgttggaaagtgctgctggaccacatacgattgttgatggtaaagaagttgtgaactttgcatcagcaaactacctcggtttaattggcaatgagaagattattgattcttgcattggttcactggagaaatatggtgttgggtcttgtggtccacgtggcttttatggaacaattgatgtccatcttgactgtgagtcaaaaatagctaaattcctgggcactccagactccattctgtattcatatgggatttctacaatattcagtgtgatacctgccttttgtaagaaaggagatatcatagtcgctgatgagggtgttcactgggcagtgcaaaatggtctccatttatcaagaagcactgtggtgtacttcaagcacaatgatatggtttcacttgcaagcactttggaaaaacttacacatggaaataaacgtgctgaaaagattagacgctacattgttgtagaatccatttaccagaattctggccaaattgcccccttggatgaaatcgtcaggttgaaggagaaatatcggttccgtgttattctggaggagagccattcttttggtgtgcttggcaagtctgggcgtggccttgctgaacattatggagttcctattgaaaaaattgatataattactgctggaatgggaaatgcattagctaccgatggtggattttgtacaggaagtgtcagagttgttgatcatcagcgtctaagcagctctggatatgttttctctgcatctctgccaccttatcttgccactgctgctgtttctgctgtcaactacctggagcagaatcccgcagttcttgcaaatctaaggagcaatattgctcttttgcataaagaattatcagatactccagggctagaaattttcagccatgttttgtcacctattgtcttccttaagctgaagaaatcgacaggttctcctaccactgacctagaccttcttgaaactattgctggcagggtcttgaaggaagactcagttctcattgtgacatcaaagaagtcaaatctggataggtgcaaactccccgttggaatccgcctgtttgtatcagctggacatactgaatccgacatctccaggctttcctcatccttgaagcgagtttctgcggcagttctttcagactgcttttgatccacatcggatacccttgaagatgaaagccatccattttctacgcactttgtaccctagaccgtgtgtgtgtgtttggtaaatgtacataacctgtacatttctacatatttatgaattcaccttgttgtcgtttatacccgtagtacatgggattttttttttgtagaacagtgatgttggagaatagtgcgtttgtgctgtacatctcgttgatttccatgtagtgatgttttcccctgtatcctcacccacaagacattggccgtcttatattttcaaacaattgcaacacccacctctgctgtgttgttaattagactcata

SEQ ID NO: 5106 - DNA, 696 bp, Zea Mays
catgtatgattttattaataagcctcactgtgtgcagtgagcaagagcccaaacatgttttcttaggcatttgcattctcaaaaagaaagaagaagaggaaagaaaaactggtatccaaccagtcaagaaaattgggaaagctgaatctccaaatctccaaagtttcgtgaagcagcagttctcgggtactcctccagatcagcagaaagttaacactctaggacctgaggataggcctaaggacacaactcatacagaagatgctacgacagacaatgagaggtatactgaaccaacgggaactggtgccactttcaagccagggacttggcagccaccaacatgaatgccaacatgaactttagaagatgaaggacggtgtaccggagcattttcctttcacctatctgtgtaacattttaacatttgctctgaaagaatcactagcctatgttccttctttcagatggttacccatctgatggagttatagccttaagttccttcttttagatgcttacccatctgatggagttataggtgatcgggggctcccacggtatgctgttttttttgtggctaaattgtcctctgtaatctttactgtgatagcaactgtaataaactggaccagtgttttgcatcagggctctcttagagacactgttcaacatattctagtatgtctgatgctg

SEQ ID NO: 5107 - DNA, 767 bp, Zea Mays
tgaagaatcctaatgtaactgctacggcaccgtgtttgcagtcgagtggatttgctggctgaatggccaaaggaagaaagctccaacaccagaggaattggctgagctggaggcaagacgtgaacgtgtcaagcaaaacattcagcttctcaaaaagaaagaagaagaggaaagaaaaactggtatccaaccagtcaagaaaattgggaaagctgaatctccaaatctccaaagtttcgtgaagcagcagttctcgggtactcctccagatcagcagaaagttaacactctaggacctgaggataggcctaaggacacaactcatacagaagatgctacgacagacaatgagaggtatactgaaccaacgggaactggtgccactttcaagccagggacttggcagccaccaacatgaatgccaacatgaactttagaagatgaaggacggtgtaccggagcattttcctttcacctatctgtgtaacattttaacatttgctctgaaagaatcactagcctatgttccttctttcagatggttacccatctgatggagttatagccttaagttccttcttttagatgcttacccatctgatggagttataggtgatcgggggctcccacggtatgctgttttttttgtggctaaattgtcctctgtaatctttactgtgatagcaactgtaataaactggaccagtgttttgcatcagggctctcttagagacactgttcaacatattctagtatgtctgatgctg

SEQ ID NO: 5108 - DNA, 1125 bp, Zea Mays
cttttatgtgtttccccgtttcgttgttttcggttctcctttgcctttgtttcccttttctgttctttaggggttgagctctgaggttttcatacggggtttcatctctagcctaccccaacgtgcttgggacaaaaaggctttgttgttgttgttgttgttgttgtatatgaacggctatatcaagccaagcgcccaagccaatgtagcgctgcagataaggttttggattggaccaagcataggctcgacttgaaccaagaacaaggtacgtaggagcaatccaaagcacccattgcacgcttctgcattgcagaggtagtagcaaggaggatcagcaatgtcttcccctccgccgcctccgatgtccactctgcacaagtgctgctcgtcgccgtcgcagccatcacctaagctaccgcctaagctgcagcgagctccggacagcaggcacaggcctatctagcaggcggcggagccaggctgtcggtcaccaggagagctcacgccgcctccctcctcctcctcggcctggcgggcggtgcggtgccggcgccggtcagggcggcggaggacgacgggagcagcggaggggagggcgtcctcggcgccatcaagtccatcttcgaccccaacgagacgaccaaggccgggaaggtgctgcccaaggcgtacctcaaggcggccagggaggtggtgcgcacgctccgcgagtcgctggaggaggacgacggtggcgacatggccaggttccgccgcaacgccgacgccgccaaggagtccatcagggcgttcctgggcgggtggaggggccagcaggccgtcgccgacgaggagtcgtacgtcgcgctggagaaggcgatcaggtcgctggccgagttctactccaaggcagggccgtccgcctcgcttccacaggacgtcaagaacaagatcctcgatgacctcagcgccgcagacgcctacctgtagattttgcttctcctcagggacattgtattgcattgcatgcaacgcacatctcaaacgatgatatggtttcgctctagtataatgacccgcaaaagctttccttcacaggaagaacacacacattccaacacgatgcaaaacgaaacattaaca

SEQ ID NO: 5109 - DNA, 593 bp, Zea Mays
aaattctaggattggttctggtaggaaaaatggtaggaaaaggaatgttgtagaagaagatattggagatgatttcttatcagatagtagtgagggaggaggtagcccaacctacaacgaatcaggtggtggtgatgacgaagatggtgaacctagtggtccatgttttgcagctaggacacaacctaaattagctacagaccaatataatggtcctggtcaagatgaacaagcagcgcctctccgtccaagatcaaaaaggcagaagaagctctccatcaagggcctgtacatgcttcagaagtgatctaatcttcaagcacaagcacaagaatatggcgtatacatggactgattcaatggcaagattttgaacatgtggctctattgtatcaattgtgtgctttgtttcagtttcaacacaatattgctgccatatttggttcatgtggcctaacaatatttataactgtgattgatttctatgcattatttgaactatggactaccaaatatttgtgacacaccactagtgttatattcaccggtgcatggatgttgccaaagaactttatttatgtaatatttggttt

SEQ ID NO: 5110 - DNA, 973 bp, Zea Mays
ttcctctcaaatgtcatcttattgcacgttttccaaattgacaacgccaagcctgcaaagaaaaaataagaaggcatatgtacgttggggtaaattcagatggacaagatctcacatagtcataaagctaccagatatgtcatgccttttcactaagacaatgcagagaatacttggaacacattttggaatatctgacatcatttctgtatcgcacagagccattgcaagacgtcgataagattttttttaaagctgaagagtgaatttgaggaacgatgggccaatggagaaatacctggatggggaaataaaggcgcagaaaacgagtctaaaatagatcttgattactacagcacagttgaaacaggtccttaatgctttgttcaacctttgcaaaattaataaaagaagacaggaacaagcagccaaaaatggaatcatccctcacttgatgaaatttgtcatgtcagactcacctctgcggcagtatgccctgcctttgttgtgtacttaaatctgctcgaggatgatgcatgggcatgcacgacattagattctattgctgtttgtttggctcacgataatgatcacagaaaagtggaacaagcactcttgaaaagaggccattcagaatttaatgaagttcttccaagattgcctagaacagttttttggccatatattggacgctttcttgaagataataacgaaatcttctaggctaaatataacaatggctaccaatggtttaacaacattgctcattgcaagacttgaccattcaaatttggtggtcgcaaaagtgtggagacttgaattcatataaagttaggcttaacattagtgcaaacagttgtattttagtttagatttagagtacactaatgtatgcgttgtttgacaatgcttatttatgatatattgaatggtacttatttatatcatattaattataatgttgttcaatata

SEQ ID NO: 5111 - DNA, 1041 bp, Zea Mays
caaaaccctagctacccggcgtaactcccctttccctcgcctctctgcggcgctgcgcggcacctagcttcctatacgaagcaccggaggcggggtagactagcgggctggccatggcgtcaacggtgctggaggcgacgagggtggcccatgaggacttggagaggctggagcgcctcgcggcgcgcgagctgcaatgggagcccgataacccgcgcgaccgcttttttcagtcccaccgcgtccgccacatgctcgacctcgtcgtctccacctcctgcaagctcagccattgcaagacgtcgataagattttttttaaagctgaagagtgaatttgaggaacgatgggccaatggagaaatacctggatggggaaataaaggcgcagaaaacgagtctaaaatagatcttgattactacagcacagttgaaacaggtccttaatgctttgttcaacctttgcaaaattaataaaagaagacaggaacaagcagccaaaaatggaatcatccctcacttgatgaaatttgtcatgtcagactcacctctgcggcagtatgccctgcctttgttgtgtacttaaatctgctcgaggatgatgcatgggcatgcacgacattagattctattgctgtttgtttggctcacgataatgatcacagaaaagtggaacaagcactcttgaaaagaggccattcagaatttaatgaagttcttccaagattgcctagaacagttttttggccatatattggacgctttcttgaagataataacgaaatcttctaggctaaatataacaatggctaccaatggtttaacaacattgctcattgcaagacttgaccattcaaatttggtggtcgcaaaagtgtggagacttgaattcatataaagttaggcttaacattagtgcaaacagttgtattttagtttagatttagagtacactaatgtatgcgttgtttgacaatgcttatttatgatatattgaatggtacttatttatatcatattaattataatgttgttcaatata

SEQ ID NO: 5112 - DNA, 1812 bp, Zea Mays
ggcgtaactcccctttccctcgcctctctgcggcgctgcgcggcacctagcttcctatacgaagcaccggaggcggggtagactagcgggctggccatggcgtcaacggtgctggaggcgacgagggtggcccatgaggacttggagaggctggagcgcctcgcggcgcgcgagctgcaatgggagcccgataacccgcgcgaccgcttttttcagtcccaccgcgtccgccacatgctcgacctcgtcgtctccacctcctgcaagctcgtccatccgcttctgcagaaaagttatagcataacacagcaattcagaggggtgattaggaaatttcctctcaaatgtcatcttattgcacgttttccaaattgacaacgccaagcctgcaaagaaaaaataagaaggcatatgtacgttggggtaaattcaggaaacttttggtcgttacctcgacttgcatgagctttataacgagttcataaattccaagtttggaacgctaatggaatactcgacttatgttggctgtttctcctagatggacaagatctcacatagtcataaagctaccagatatgtcatgccttttcactaaggtctgaaacatatgatttcctagcatgtgcttgactagtatggttatgccatatccatctctggttgaatcccttttgtcttttctgatagcggtagtatgtggtgagggacattgcctaccgtaggttagtagggttcaacttcaacatgttcaagtctatatctaggatagataatcagctgcctgttgttgaacctgtgtaccatttatttcatatggttcatagggaaaaagaacctaattcatggtatagggcagtgcatatccaagtacatatgtatgatagttgctcagctttttcatctgtctattattcagtttcatatgttggtgcgcttataagtgaattgtagtgttggatattgtttatatttttcaacttctttaattgacagacaatgcagagaatacttggaacacattttggaatatctgacatcatttctgtatcgcacagagccattgcaagacgtcgataagattttttttaaagctgaagagtgaatttgaggaacgatgggccaatggagaaatacctggatggggaaataaaggcgcagaaaacgagtctaaaatagatcttgattactacagcacagttgaaacaggtccttaatgctttgttcaacctttgcaaaattaataaaagaagacaggaacaagcagccaaaaatggaatcatccctcacttgatgaaatttgtcatgtcagactcacctctgcggcagtatgccctgcctttgttgtgtacttaaatctgctcgaggatgatgcatgggcatgcacgacattagattctattgctgtttgtttggctcacgataatgatcacagaaaagtggaacaagcactcttgaaaagaggccattcagaatttaatgaagttcttccaagattgcctagaacagttttttggccatatattggacgctttcttgaagataataacgaaatcttctaggctaaatataacaatggctaccaatggtttaacaacattgctcattgcaagacttgaccattcaaatttggtggtcgcaaaagtgtggagacttgaattcatataaagttaggcttaacattagtgcaaacagttgtattttagtttagatttagagtacactaatgtatgcgttgtttgacaatgcttatttatgatatattgaatggtacttatttatatcatattaattataatgttgttcaatata

SEQ ID NO: 5113 - DNA, 5137 bp, Zea Mays
atgcccgacaacactgggcttgaaattggccttaaaggctccaagggagccccaatgccaggaacggaaggaagagtggcaaaggatttgaagaaagctcctgcctccttggaggaaagcaatgcttctcgtgatgaggatcctggcggagggcctgccttgactgggaagaaaaggaaggaccggaggggttccgcggatgacaacaggaatgtgacaagaagggtgttgaggtccgacgccatgaagctgcgtgctgaggctgaggcaccatgtggagcgggtgtggaggttagcaaaactgatagtttggagaggaaacactgtgacactactgtggaggctgaggcttgcaaaagtagtgtgctgatggaagttgcctgcaatggtggggaagccaacggattagttaacttggatgcgagcgatgtttcggaagaatcaactaggtgttctgataataatatgggaatgcctggtgttcctgcaacagatttttctcaagatggtggcttagctcaaggtagcattgcagaatcagatgataagacagtcaagtcagatgaggtgtccgctgtaactcattcagagcagaatgactcccaagctggaataaacagttataatgctgatgaggcccaagataacaaagtgagacatgggccttgtcaggatgaggtcatagactcagcaattactaatggtgccaacacaagtacagatttaaccaaaaccagccctaccagtggatcagaatctgttaagcaggatgatagtaagcaggagaataatttggttcatactgaaggagtgatactccacagtggtgatccgaaagttgagaatcattctcaaattgaggacacttgtacagaaactgagatttctttgactgggaatggaagatgtgcagctgataaccacactgatcgaactgggtacactaagcaggaggagaggggcagccctgtgaacgaaaccaatgatatttcggcacatgacattgtttttacaaggagaggtagaaaatcatgtgaggcaaagcaggggacatgtgaagaggagtcacggtttgagaagcgagttacgagatcagctacagttagacagagagaagtttctggaagcttatgcaaaactaccacgaatgagactgcactaggaagcagagggaggaagggagatattattgctcactatacaaggaaagtgagcagtgcagtatctccaaaaggtcaccatgctgagctgggagaatgtaataccagtatggagaatcaaacagtgaaacaaaaggtggttgatcgaagagattcaggtgccactaagaatgataatgatgcgaatgacacaaagaataaggaatcagaaaagacagagatcaatctgaagacgcaaccacctgttggaagtgttagcattgtaaataaaacaactgtaggagctgtttctgtggtgggtcagagtatctctggttcagccatcactgagagaaatgatacagatcatactgattctgatggagttaaatatgaaaatatgactcttgtgcagaaactactactgtctgttggcgcgaagattgttgccagcaagaagagggtattggaagcaggtcctgataaaaccactggaaggtcaccaattgctttgccatccatgaaaaagacaagaaatacgtcttctgatcctgagatagatcaacctgataagtcttctggagagaagcttattggaaataactgtgatttgggcaataaacgtgttttgagggaacggcagcatcagaatcaaacatatttgtcaagcaggtcttctaaccagtctaatcaaaatgctatcaagcagacacaggatcaatctgacgatgatgacatcagcagcgatacttcctacaggagaactcgtagcggacgtcgtcgtggtgctgcccgtcttgccgtgccaaaacaagaggactccagtgattctgaagaagttgttgttgtgaaaaagaatcgacggaaacgtaagaaatctgtgcataaacacagggctggatctaagttgaagcatacttctggtagtcctcccaaaacaggtcgtttgggtagacctccacttgtcaaatctgaatgtggctgcttacctctgcagccaggaaaagggaaaatgaatgtgcctgaaggtacaggagctctacgcgaagaaaaacaaaaaataagtgatcagataaaggccatgcttctagatgctggttggacaattgatttaagacccaggaatggtagaaactacatggattccgtgtatatacatcctagtggcaaagggtcttactggtcagttacaaaagcatattacgtgttccgtgcagatatggaatctgagcagaaggaaagttctaaagaccatattctgtcaaaaaaatctgttggtagccccggcaaaaggcaggtctctagttcttcaggctgtactttaacagatgatatccttagcaaattaaaaagagttgttgtaaacaaacgaacaaccaaagtagagattcaaaggttgagacagaagaaggaaaagaagaatactacaaattcaacaagattgcatttaggcaatgaaagaaaaaagagaggtggctgtgctctactcgttcgtggatcgaacaaggagtctggcagcaccactgatggttttgttccatatgaatggaaacgtacgatcttctcctggctgattgatctgaatgttctatcagtcaatactaagctgaactgtttggatgaaagccactcaaaggttttactagagggttttgtcactagggatgggattaactgcagctgctgtagcgaggtcatttcagtgccagaatttgtgactcatgctggttctgaagtaaataagccatacagaaacatacttgtggatgggctagacattgaccttttgcactgtctcattaatgcatggaatatgcagtctgatgctgaaagacaagatttctttcccgttagcattgagggagatgaccccaatgatgacacctgtggtatttgtggagatggaggcaatttgatctgttgtgatggatgcccctcgacatttcacatgagttgtctaggactggaggcacttcccactgattattggtgttgttccaactgctcatgtaaattttgccatgaacattctagtgatgatgctgaagacactgctgatgttgattcttcattgcatacttgttcccagattcataacatatggtatcatgagtcaggtatcctttccatgacttctgctgcggacgatgtacgcacatggcgtgaggagctcgctcgtgccagggcagatctggagcaggcccgatctgctatcctccagctagtgatctactcacggcaaaggtggagtctgactgccgatcagcggcgacaacgcgactgcaggaggctgtgcatgggttcctggcgtgacgtccagtgtggcagcggcttgccgtcttcaggctacgacacgtggcttcctggcgcggcgtcaagcacagcaagcagcggcttgccctcttcaggttgcggcacttggcttcctgacgtggcgtcaagcacgacaagcggcaacacggttgcaggctacggccttcagcagggttggccgatccttagccatgtggacagcaagaacaagtctggttgggtggtgctgtctccactggaactcgcggtagctcaggccctgtttgaggaattgcagaatcttctcgcagtcaagaaggatcttgaaccagaatactcatgcagagttgttcaacgcatccatgaagaggtaccagaagaagtccttgctttggacaaaagagttgagtgtaactccaagattgctgttgcactctcattaatggacgagtgcttccttccgattgttgaccagagaactggcatcaacttgatacgcaatgttgtgtataactatcaaattttgcccgattggatttccgtggattctatataattattttagaacgtggagatgaaataatagctgcagcatctgtccgaatacatggaaccaagttagctgagatgccgttcattggtacccggaatatgtataggcgacaagggatgtgccgccgacttgttgatggaattgaaatgatcctcagctctctcaatattgagaagctgatcattcctgctatcacagaacttgtggacacctggacatctaaatttggatttagtccactggacgattctgagaagcaggaagtgaaatccgttagcatgttagtttttcctggtacaggtcttctccaaaagccattgctgaagacctcaccatcggaagatcaatgctcccaaggagacaaaactgaaaaatcatctgatgtagtcaatgaagattcgctttgctctggtgcaagtgccgaccccctaggttcggtggtcaaagagcatggggacaccagcaaagatgccgatggtacttgcaacggtgatgtttcacagcgatctcctctttcctgatggtaagatttggttgcagctttctgggcccccccaagctttatatggacgaaacctccgtttgtttttgtacctctcgagttttgactcagcagccagcatgacaaccatccgtttggcagaaagaggcttccggttttttgcagattagttgccggggcacccctgtagttgtactcagaatttgaccattgactcgtcggcctgggaaaagaatcagcccgtgcagtactgaaaagcgtttactccaaccaggaaccagctaacttactgtgcagctgaaaagtcagtatgcagaatgtggaggataatatcacttcttttgtttttttttggtcgttaacttagaactccgagggcgagtcgtcgtaaatgttacaccagttgttattttgttaatagctttttttttaaaaatgttttcgctagcgcattcctagaaccttctcatttctgtaagatagttctcgcctctgtaagataaactaatgtatgcgcaagctagaaatagtccgcctgatccgtcacgcggaattggttacctaaaccctgttaatgtttcgttttgcatcgtgttggaatgtgtgtgttcttcctgtgaaggaaagcttttgcgggtcattatactagag

SEQ ID NO: 5114 - DNA, 5166 bp, Zea Mays
aaataataaacccctccaggcatacgcgagagcactctagtctcgagcacagcacaaggccgccggtcccttctctcccactcccactactcgcgctcgccgctggatcctccacccgccgcggcgccaggccggagatccagcagctgggaccacggaggtcggccggttgctccgttcccgctggtggttgctcttcggccgctggagatcggcagacggaagcagttgacgccacagggcttcgtgctgccgaattccccagatattctgggggttcaaccgaacccccatgcccgacaacactgggcttgaaattggccttaaaggctccaagggagccccaatgccaggaacggaaggaagagtggcaaaggatttgaagaaagctcctgcctccttggaggaaagcaatgcttctcgtgatgaggatcctggcggagggcctgccttgactgggaagaaaaggaaggaccggaggggttccgcggatgacaacaggaatgtgacaagaagggtgttgaggtccgacgccatgaagctgcgtgctgaggctgaggcaccatgtggagcgggtgtggaggttagcaaaactgatagtttggagaggaaacactgtgacactactgtggaggctgaggcttgcaaaagtagtgtgctgatggaagttgcctgcaatggtggggaagccaacggattagttaacttggatgcgagcgatgtttcggaagaatcaactaggtgttctgataataatatgggaatgcctggtgttcctgcaacagatttttctcaagatggtggcttagctcaaggtagcattgcagaatcagatgataagacagtcaagtcagatgaggtgtccgctgtaactcattcagagcagaatgactcccaagctggaataaacagttataatgctgatgaggcccaagataacaaagtgagacatgggccttgtcaggatgaggtcatagactcagcaattactaatggtgccaacacaagtacagatttaaccaaaaccagccctaccagtggatcagaatctgttaagcaggatgatagtaagcaggagaataatttggttcatactgaaggagtgatactccacagtggtgatccgaaagttgagaatcattctcaaattgaggacacttgtacagaaactgagatttctttgactgggaatggaagatgtgcagctgataaccacactgatcgaactgggtacactaagcaggaggagaggggcagccctgtgaacgaaaccaatgatatttcggcacatgacattgtttttacaaggagaggtagaaaatcatgtgaggcaaagcaggggacatgtgaagaggagtcacggtttgagaagcgagttacgagatcagctacagttagacagagagaagtttctggaagcttatgcaaaactaccacgaatgagactgcactaggaagcagagggaggaagggagatattattgctcactatacaaggaaagtgagcagtgcagtatctccaaaaggtcaccatgctgagctgggagaatgtaataccagtatggagaatcaaacagtgaaacaaaaggtggttgatcgaagagattcaggtgccactaagaatgataatgatgcgaatgacacaaagaataaggaatcagaaaagacagagatcaatctgaagacgcaaccacctgttggaagtgttagcattgtaaataaaacaactgtaggagctgtttctgtggtgggtcagagtatctctggttcagccatcactgagagaaatgatacagatcatactgattctgatggagttaaatatgaaaatatgactcttgtgcagaaactactactgtctgttggcgcgaagattgttgccagcaagaagagggtattggaagcaggtcctgataaaaccactggaaggtcaccaattgctttgccatccatgaaaaagacaagaaatacgtcttctgatcctgagatagatcaacctgataagtcttctggagagaagcttattggaaataactgtgatttgggcaataaacgtgttttgagggaacggcagcatcagaatcaaacatatttgtcaagcaggtcttctaaccagtctaatcaaaatgctatcaagcagacacaggatcaatctgacgatgatgacatcagcagcgatacttcctacaggagaactcgtagcggacgtcgtcgtggtgctgcccgtcttgccgtgccaaaacaagaggactccagtgattctgaagaagttgttgttgtgaaaaagaatcgacggaaacgtaagaaatctgtgcataaacacagggctggatctaagttgaagcatacttctggtagtcctcccaaaacaggtcgtttgggtagacctccacttgtcaaatctgaatgtggctgcttacctctgcagccaggaaaagggaaaatgaatgtgcctgaaggtacaggagctctacgcgaagaaaaacaaaaaataagtgatcagataaaggccatgcttctagatgctggttggacaattgatttaagacccaggaatggtagaaactacatggattccgtgtatatacatcctagtggcaaagggtcttactggtcagttacaaaagcatattacgtgttccgtgcagatatggaatctgagcagaaggaaagttctaaagaccatattctgtcaaaaaaatctgttggtagccccggcaaaaggcaggtctctagttcttcaggctgtactttaacagatgatatccttagcaaattaaaaagagttgttgtaaacaaacgaacaaccaaagtagagattcaaaggttgagacagaagaaggaaaagaagaatactacaaattcaacaagattgcatttaggcaatgaaagaaaaaagagaggtggctgtgctctactcgttcgtggatcgaacaaggagtctggcagcaccactgatggttttgttccatatgaatggaaacgtacgatcttctcctggctgattgatctgaatgttctatcagtcaatactaagctgaactgtttggatgaaagccactcaaaggttttactagagggttttgtcactagggatgggattaactgcagctgctgtagcgaggtcatttcagtgccagaatttgtgactcatgctggttctgaagtaaataagccatacagaaacatacttgtggatgggctagacattgaccttttgcactgtctcattaatgcatggaatatgcagtctgatgctgaaagacaagatttctttcccgttagcattgagggagatgaccccaatgatgacacctgtggtatttgtggagatggaggcaatttgatctgttgtgatggatgcccctcgacatttcacatgagttgtctaggactggaggcacttcccactgattattggtgttgttccaactgctcatgtaaattttgccatgaacattctagtgatgatgctgaagacactgctgatgttgattcttcattgcatacttgttcccagtgcgaagagcagtatcatggagcctgctctcctgatattgattccatagctactaatctttctagtcagacaggcaatttattctgccaacaaagctgcagactgctgtttgaggaattgcagaatcttctcgcagtcaagaaggatcttgaaccagaatactcatgcagagttgttcaacgcatccatgaagaggtaccagaagaagtccttgctttggacaaaagagttgagtgtaactccaagattgctgttgcactctcattaatggacgagtgcttccttccgattgttgaccagagaactggcatcaacttgatacgcaatgttgtgtataactgtggatcaaattttgcccgattggatttccgtggattctatataattattttagaacgtggagatgaaataatagctgcagcatctgtccgaatacatggaaccaagttagctgagatgccgttcattggtacccggaatatgtataggcgacaagggatgtgccgccgacttgttgatggaattgaaatgcgtgcgccttacatggttgaaccaactgtggagcatattttcaaaggtgtctgcagctatgagactagcatagctgtcctgtctttacacctcacattgatgatgaccataatcctcagctctctcaatattgagaagctgatcattcctgctatcacagaacttgtggacacctggacatctaaatttggatttagtccactggacgattctgagaagcaggaagtgaaatccgttagcatgttagtttttcctggtacaggtcttctccaaaagccattgctgaagacctcaccatcggaagatcaatgctcccaaggagacaaaactgaaaaatcatctgatgtagtcaatgaagattcgctttgctctggtgcaagtgccgaccccctaggttcggtggtcaaagagcatggggacaccagcaaagatgccgatggtacttgcaacggtgatgtttcacagcgatctcctctttcctgatggtaagatttggttgcagctttctgggcccccccaagctttatatggacgaaacctccgtttgtttttgtacctctcgagttttgactcagcagccagcatgacaaccatccgtttggcagaaagaggcttccggttttttgcagattagttgccggggcacccctgtagttgtactcagaatttgaccattgactcgtcggcctgggaaaagaatcagcccgtgcagtactgaaaagcgtttactccaaccaggaaccagctaacttactgtgcagctgaaaagtcagtatgcagaatgtggaggataatatcacttcttttgtttttttttggtcgttaacttagaactccgagggcgagtcgtcgtaaatgttacaccagttgttattttgttaatagctttttttttaaaaatgttttcgctagcgcattcctagaaccttctcatttctgtaagatagttctcgcctctgtaagataaactaatgtatgcgcaagctagaaatagtccgcctgatccgtcacgcggaattggttacctaaaccctgttaatgtttcgttttgcatcgtgttggaatgtgtgtgttcttcctgtgaaggaaagcttttgcgggtcattatactagag

SEQ ID NO: 5115 - DNA, 1114 bp, Zea Mays
aactgcctccgcagcatggatccagcaaacgaacagaagagaagtctccagcaggcagcagcccatcgtcccacaccaagaacaaccagagaggcaagcaggggagaatcgcggaggtctgggaaacaccatcctgcagagatgacagtgctgctctccccgagctcctccctgttcctcgccaaaccttctgccgtcgccaagggcagggcggcggctgtgacgtgcttcagcgggccctccctgtcagtggggcgtgaagatcaggagggtgtagcagtggtggtggggaggcgtgcgttggcttccgcagcagctgtcgcctcagtgcttgggtttgcaggccgtggtctggcggccaaccagggcctgctcgccgggagggtccccggcttgtctgaacctgacgaaaatggttggagaacgtaccgcaggccagacgacaagtccggtggccacggagttggctggagccccatcatcccgtacagcttcaaagttccagacggctgggatgaggtcccggtgtccattgctgatctgggcggcacggagatcgacctgcgcttcgcaaaccccaaggaaggccggctatgacctggacgacgcgaccatcgagaagatcggcagcccggagaaggtgatcaccgccttcggtccggaggtcatcggagagaacgtggaagggaaggtcctgtcctcggagacggcggcgcattcgggaagaacttactaccagttcgagctggagccgccccatgtgttcatcaccgccacggcagctgggaacaggctctacctcttcagtgtaactgcaaacggtctgcagtggaagaggcattacaaagacctcaaacagatagcacaatcatttcgagtcgtgtagggttccaattcctactactactttttttttacagcgcctggctcttgttgatatgattagaggacatgggagacggtaatacggagagaggacaagtgagcatcgcttctgatgaccactctaactctgtaaggttacaaagctgcagcagcagttcaacagcttgtgtaaacctgctcgctaaggctaaatgcttttactatattttttttccccctgatgttgcct

SEQ ID NO: 5116 - DNA, 904 bp, Zea Mays
ttttggcccaaaatagaggactaggaggtagtgccgacagaggcacgagcgcctccctcgtcttcgttccgtctctccccacagggaaccgccgcccgtcgcctccagatacgtgcctccggcggaaaatcggtatcgagctcgctttgttcgagtgagtaacgcgcagcgactcctctcccaaccagattttgatggatttcgggcacgcgtggcacagatcttctgtatagccagcaaggaggcctctccatctcctccgggaagctattgtgcaggctgtgcagcaatggagaagtataacagcaagactcagttagcacccttgagagataccccatttgctctccgtggtgctcttggtagttcaagctcataccttgagcaagccaggggctacacgtcttcccctctagcagctctgcgaccaaagatgtcttctactactggaaatcgactcctgcactcgagttgccccctgtcatctcctgtagcaaaccgcccgctgtcgccccaccttcctctgaagaagccacagttcagcgcgactttctcaatctcgcatcgtatattcggtgtcgcgttgggagttgccatcgtatctgtccctctcgccaccaagttcagcctaatgtttggtgtctgagagcgatttgctgcgtctcaagagaaccatcattttccgtttctgtgtctgtttttcatcgtctcggttaccttgcgacacaactgtaggtgccgttggaataatatctttgccatgcttgcagacttgtgtaataagtaaataaacctataaaataccagtttaactgtttgaggagatttgcctcattatggatatacatgctatgaaagtcgattgtcatcgctaattgaaaaaaaaaatataagagacatgttc

SEQ ID NO: 5117 - DNA, 892 bp, Zea Mays
ggactccaggtctaggcgtctagctctagctgtagttggaagttggaacagctcggtgccgggcggtcgcctgtccagtgcatcggcgacggcgtctacgctgctaacagcacctaccaagccaacctccgccgcgtcgccgccctcctcctagccgagctccttatgccggcgccgcgacgtcaacggcacccacgttggctacccctgcgccgactgcatcgccggggccttcctcgaaatggagagagcgtgcccgtaccgcagggaggccttctatatcgatcgcaactgcagtgtcgaacttgccgagattcgcatcttcgggactggcggcatcttccaacggaacatactgatacaagccatggcttcgggattggtacttcaagcaattggatttgcttggcttttcttcttgctatttcaagaatggcgcagccggaaaagaggcaacttgatgcattccacccctcttttatctggagatgagaatgttggcaacatgtctaccaaggcgtaacggcaaatgttgcatacttgcatgaagggatcggattttctctcatcaagggaataaagattaaagaatgaatacttgctctccaaattgcaggccttcaattcggtcgtttaatttcaagccagctgaaatgttcattgttttcacacattcttatgttttcattggaatttcattcccacttgtcctgttcctagcttgaaatgtacatgtgaatacaaaaaaaaaaccaaaacttgccacgattgggcagtcggcactgaaacagcagtgtaccatattataatgtatatacgtaagaacgtaacctactaaaatgactacttgttctcaattgcaagatcaaaacagaattacaacctttatttt

SEQ ID NO: 5118 - DNA, 1630 bp, Zea Mays
caaatttctctcaacggtcctagcaatcgcgtcaccgtcttctccatcgccggtgctcccttactctcgatggcatcctcggccgccgctcgccgccttctcctcctccgccaccgccatgggaaccttctccccaaacgccacttctcttcctcatccgctcccgacggcctcgacgacggcggtggccgcgtcaagatcttcgaccgcgacctgaagcgccggcaccgggaccgcgcggcgtgggtgatgcgtgagaccgatgggctcgtggatgcggtcgctgagaatctcctagaccgcctcgaggactgcaggaaagccttcccctccgcactctgccttgggggctccgccggcgccgtccgccgcttgctccgtggccgcggtgggattgagaggctgatcatgatggacatgtcagccgatatggtgaagaagtggcgagagtcagagaatgccactggtgatgggcctgagacccactttgttatcggcgatgaggagtttcttccaatcaaagagaggatttgataatgagctgtcttggacttcattggacaaatgatctacctggagcaatgatacaggctggcgttgcaacctgatggcctttttctggcagcaattcttggtggagaaacactgaaggagcttagaattgcatgcacagttgctcaaatggaacgcgaagggggcatcagtcctcgaatgtcccctttagcgcaagtccgtgacgcaggaaaccttttgacaagggcaggctttacccttccaggagttgatgttgatcagtataccgttagatacaataatgctttggaacttgttgaacatcttagagcaatgggggaaacaaatgctctctttcaaagaaatcctgtgttgaaaagggatacggccttggcaactgcagcaatttaccagtcaatgtttgggttagaagacggatctattccagcaacctttcaagtaatttacatgactggctggagggagcatccatcacagcaaaaggctaagagaaggggttctgcgaccatatcattcggtgatatacagaaacaatttggtcccagtgagaactgagcctcactgcttcagaaatgtgttcccaaaccccactcaggctttgtttgggtaaagaggaactgaagtggattgaggtgtattgaaaggactgaaagggaaattagttcatgttacacttcaatacaccccataccacctcaattcactccaataagagattacccaaacaggcctcatgtgagagcctccggagctgggtctaaccattttagtattcccaaacccttgatcgaaaattaaaaaaaaaaacaacatttgaggaaagaaaagaaatcctctggtggttccacccaacggctttgtattcctgaaggttgatgtttgtggtgggcttctgttgcctgttgtatgaacatactgagtttgatggaatccagcaattgtgaaattcatctgtagtgttactccacccacaaggttcgctagtggcgtgctgcaatgttacaagacaccaccactgttgtggtagacctgtgagtgcaaagaaacttagaaatttatttactcccttaacaaatgtgttcaagttttcgctggt

SEQ ID NO: 5119 - DNA, 1836 bp, Zea Mays
caccatgtgtgagaatcttcaaccttgggctgcagttccacctctgagaggtctccaatagttaaaggcatggtaactgacttcagtgaggaaatgcactgccagtttctagaaattctacgcatattgatggattcttttactacgtctggagcacatagagacgtagttattgagattttctacgaaagacatcttgactatttggttgatgtaatagcatcctcttgtcccccgaggagcttgtctcgatcatcatctaactcggatgaccatctcattcgccatgttgtgaagttcaacttgctgaaaccaataattgatgtctttgttgacaatggggagagatataacatgctacattcaggagtactcgaattgttggaatacatacggaaggaaaatataaaaactctcattatctatgctattgagtctttctgggatgaacttgccatctttgaacactttggaagtattcaggccttcaaactcaagtatcaacagtacctggagagcgctgaaccaaggttgaatgctagtgtgcctgacatgagaaagaaggcagaacaaagaggtcttgagaaggaagaggaagactacttcaatgaggacagtgatgaagaagattcaggctccggccggcgggctaaacatgcacagaaccaaaataacaagcctaagtccaaggtccccaatggaagtgaagctgatgacactgatggcgcctctaggcctaaatctgctggacttgtggactatgacgatgatgacgatgaggacttcaatccaccaccaaaggagccttctaggcctgcagaggatgatgtgcccttaaacatatccccgttgaagcggaagccagtgaatgcagtggatgggaaacattcagacggagagggtcgcaggaggcaaaaaatagaaactagaattagttgtgctaaaattgctgctgttactagtacagctattaagcacacagatctacaaaacaagtatgcttcccacttgcttacgtcagccacaccaagtactgaagccaatggtatttttagtgaacatggtactaactatgaggagcaacaacatcctatggagaacacagaaacttcacgacaaactggtggtgattgtataaaagatgtgggcagtatgtctcccgagaaggccgtaaatactaccaatacaagcgattcggagccttattcagtaagatgactactacacagctggttggtccatgtacccatcctgtgctgtggtcaacaggaaggaatcagaatgtgtttggctccaagcgctgaatgcatcgatatcatgctggaaacatgattggaggtgacatagattgcagctacctttacatctcaagtaaacatggtcactccatccgcaaagaagaatcatgtgttcaaccagtgtcaattcaacagaataaagaagaatcatgtgttcaaccagtgtcaattcaacagaataatctgttcagcagtttgctttatccgtgctcattgtactacgaacctccgccgtctacttgaatatcaagcctccacgggcagcaaagaatggcgcaaattattgagactcgacagcaatgagcttgatcagtatgttcagggacggtccggaggtgtccttgagggggtcgccgatgacggcagctttctgagcgtgcgacccaaccgaggctatatctaacaaactgcactatgtaaacagtctacattgtaaaataatattttacacggttatatacactctatttaagcatgatcttagtgtggttgtttaaacatggtcttagtgtggttggatgcaccacttgcccttgtt

SEQ ID NO: 5120 - DNA, 2037 bp, Zea Mays
ctcagcctctggcaattaatcccctcgccttcgtaagctcagtcctccactcctccacctctcccacccaacaacaaaacaagcctaatggcttcctctccatctcacgccactgcgttgcctacttgccctagaaccctcgccgccgcccctctttaggattcccatgtccctggtcgccccctgacacgcccgccccggatcctgcaccggaattccgcgtggaattccgggccgaaccgcctctctgcgtgcgcctccgaccaccaaactctctcacacgcgcgcgcgcgcacgtctgaggcggttggattctccggtgggggtcccttggtctcgatttgctgctgatgggggtgccgaagcagcgctggacgccggaggaagaggccgcgctcaaggccggcgtcgccaagcacgggcccggcaagtggcgcaccatcctccgggactcggacttcagcgcgctcctgcgcctccgctccaatgttgacctcaaggacaagtggcgcaacttgagcgtcaccgcaggaggttacgggtctagagagaaggcaaggatggcgttgaagaaaggcaggcgcgtggtgcctaagcttactgctgagccaatggatgtagatgagaaggatatggacaacgctcatgacacagtcattgatgtggaaccgttagcaatggctttcgagcccttgccttttttggaaagcccagataagtcagttgctaggctcgatgatctcatagtagaagctataaggaagcttaacgagccatctgggtccaataaggcagtcatttctggatatattgaggtttgtggatataaatttatagtgtgctcacttgttttttgtttgttttgtttaacttaaatcagctgtcctactaattcttttctggtcattgctgtctgtaatgggaatatttgtctcatccttctgtatgaaccatctctgctgaatttttgctagcttgggacaatcatttattactttttttgggggtatggatttaacttaattgtctatatattaggaccaatactggccgcctgctgattttcaatacctgctatctacaaaattgaagtcattggttaattctggaaaattaatcaaggtaaaccaaaagtacagaattgcaccaagttcttccttgggcggaataagcactaaggtatcctcttctgaagggatgaacacagaaaataataatgttaaacggctaactaagcctcaagtggttgctgaactggagaagatgaaaggcatgaccagggaagaggctgctgcctttgctgccaaggcagttgccgaggcagaagtagcaatggcagaagctgaggaagcagcaagagttgcagaggctgcagaaaatgatgctgaagctgcaaaggcttttcttgatgctgtcattttgtcaatgagaaacaggaacgctgcttccatgatacttcgagcttgctgatcctttacccatgcagcacaccgatgttctgctgcaaagattttctggatagacgagtttcttgtatagccttatagatcatggcgggttttcaacagcttgctgttgtcctgtgctgtgcagccaatcgacaacatgataacaagaatgatcgagaaagtagtcttcatttttttttgtttcccattgtgttgctttgtaattaaactatagccttttcccttcattagttgatgaagtgatgtcgtctaatagaacaactgtagtgaaaagaaaatgtcagaaagccgccttagttaatgcaaattgctgtgatagtatttttgcagaaatgattatatggtgacagcgtttaagattataactgccttgcagttgccgtcgattatatgcctgtaatagctagtttgggaactccatttttctaagagattttttttatttagaaaaatataacaccttagtaaaatgaggtttccaaactagccctaagattgacaacttccctttggataccagcaaaactgtacagcacaaaatggtgtttcgtaatcatctcgttacatc

SEQ ID NO: 5121 - DNA, 962 bp, Zea Mays
tttctaggcaaggacgaagtactagaagacagcaaccacaaggacattgcccccaagcaacaaacttggtactagataacatgaaagagtagcttcgacgtagaagaaactttggcgcccttcaaatcccatggccgcactcggttcttctgtcacatccagaggcttggcactccatacctccgtgtgtgtggtttttcttcatcgtcgccacgggaatccagtgatcccggccgcaccgtctcgtccccagcgaagtcttgcgagtgggttaacaacgagttcttcaggcatgaacaatgccttccctattatcaaaggaactacacgaattcctgcggttggtcctggccctgcaaatccgccaggaggaaacctaccgatacccagcagcatgcctccgtgggccaagtgggtggccggggccgtcatacttgcgatacctatctacaggaggttcagaactttagaagagaagacggcagaggtggccatcgaggtggtcgacacggtggcggaggcggcggagaaggtcgccggcgaggtcgccggcgcgtttcccggcaacgacggtctcagggaagcggcctcgaagattaagacggtcgcggatgagatcgaggaagacgccgagaaagccgaggccctaatcgagaaggttgacgagatcaagaaagaggttgattcaattgtggatcctataatcgacaaggttgtcaaggacaaagaaatatagagacaggtggtgaactgaagatgtaaacatttgttgggctggtctggttaggaatggatccggatatttattcagatgttaaattactttcgattgcaaacaaatatgatatataatttgttatgtaaatttatattggtgattttagtattaagcttatcaagattcataaaatttaaatatcaaatatgttatatatcattttaaatatttgatttaaaattcg

SEQ ID NO: 5122 - DNA, 1899 bp, Zea Mays
acaccgggccgccacacaaaatccccacacctgcctgcgtatcgcgctgcccacccaccgcacatccccgcctcccgccggccggccgcccgcctaacgactcgcggtcaccgcctgcgggccaccgtccgcccccagctcgcttacgatattgtacgttcgtggcgcggagcaccgtggtgttggcctagtacgtcgatttcacggtgacttcaccaccattgccgcccagtggctgcagaagctccccgccagcaacaagttcacctacaactgcgacggccacaccttcagttacctcatagagaaaggatttagtgagtagctttcatcccgtcgctccgctccgccttattccatcggaatctgcaccgccgcgggctcgaatcgggttcggcttgcttggatctcgcggggttcgcctcgatccgctagatggtatcaggtgtgggattaatctggacttggataaatgaagtataatgcaagaaatgtgggcaaataataccttggctgtgtggtggagaacaaggtgttttgcaactaacggctcttacgtttacaagtttgtgttttctttaacccttgaacattgaagtgaattgtgttgccacattgtttatgcattataggaatcccattaagtttactgctgctaccatttaaagggcagaactgccggtcttcaagctctttgttactcctgatcatctgtggcacaattgtcatcgggcaaaatgccatcagtttatctctacatccctaacattatcgggtattttaggatcatcataaatttcattgcatttgcggtttgctattccaacaaggctctctttgctgtcttgtacttcttcagctttgtccttgatggtgtggatggttggtttgcacggaagtttaatcaagcatcaacatttggagcagtgttggacatggttacagatagttttacagacctggtttagtcttcttgatattgctcgggttggatattacgagccactggtttcagatgtacagttctttcttgtcaggtaagactagccacaaggatgtaaaacacacaggcaattggcttctgaaattatattatgggtacaggccattcatggccttctgctgtgtttcttgtgaggttttgtatattatcctctttctctttgctgatgagaagtcaacaagcttgcttagtgcatgcaaaggtctcctgaaccaaagccccatcattatcttggtgtttatttccacattagttggctgggcagtgaaacaagtcaccaatgtcatccagatgaaaacggctgcggatgcatgtgttgtgtacgacctgaagcgcagcaaatgaaaagcatgaagggaaaactctacggtttaactcagtcctgtgtggacgtatccaaagggaaaaactctccgaggggatacgtcttacgttccttgacatctttctgatgatgccttacgtggggccagaggatgacatgccgtgggaagagcagcatgtcataaagagaaccaacgcaaacaattgttttgtgaaggcggctattgatttgttgtcaagagtgttttattatgtcatacaaatgatgaattgatgatggtacctttgttacctgggctagccctttgtgtcaacatgaaagatgcttacgagccacatgttcccttctgaaatgaaggttttgagttgcaaaaatttacatattcccttctgaaagccagcaactgcacctcgagagggtttaatggttacttttaccccccaaaataggcactagctattattcggatgatttcccttttgctccttattaaacatcctttggttcagttttattgatagttttaatttttttacatgatctcccttagttcaaaaaaataaaattaaaa

SEQ ID NO: 5123 - DNA, 2886 bp, Zea Mays
acaccgggccgccacacaaaatccccacacctgcctgcgtatcgcgctgcccacccaccgcacatccccgcctcccgccggccggccgcccgcctaacgactcgcggtcaccgcctgcgggccaccgtccgcccccagctcgcttacgatattgtacgttcgtggcgcggagcaccgtggtgttggcctagtacgtcgatttcacggtgacttcaccaccattgccgcccagtggctgcagaagctccccgccagcaacaagttcacctacaactgcgacggccacaccttcagttacctcatagagaaaggatttagtgtgggattaatctggacttggataaatgaagtataatgcaagaaatgtgggcaaataataccttggctgtgtggtggagaacaaggtgttttgcaactaacggctcttacgtttacaagtttgtgttttctttaacccttgaacattgaagtgaattgtgttgccacattgtttatgcattataggtatgaaagtatatttatcctggcaaaagattatgttagtttttgtgcctaaagaccatttatttcttttagttctttaaatgaatagctctagctttgcatgtactgaaattcattatgctcttgctgtacttgtagctgcttgctaatgtcaactaaaactacctgttgccaacttgatgagttgtgtgttaagcttgtttctctgaacatgtttttttgcctaattgtcatggcaaaagaaagaaaagaaaaagaaaaccgagagataaaaaaagagaagtctgacccaattgccctggaagcattgcaatctcctgccgtcctgtgttcacacactgtttgccatattctctcgttcaccttgcctggccctgctcgattcggccactttcatggagccaggtgtctgcatcactggggcggggcctagtgtcagcgcaaccaaacacgccggtgactgtcgccacccttctcccagctgtcaggtcttcgttgggccctttgcccacgacgagcacctgccacaccaagtaggcatgccccctctttcctttcttctgtgtaaaactgtgcacccgaaccctaattaaacctatttggctatctgtatttggatcggatgtattatgcctactagcttggtggtgctggtgcacatgttgtattggctccacccctggctgatgttgttagattagatcaactccgtgatgccaaaaccatgcatatatgggtttaaatatgatatctgatgcttttagatttatactaacaaagaagcaaatgcttcaatcatgcctagttccatctatacttgccactattcagatattttgccagaagagacctgggtttcagattcaaattttcatgtcatctgttcagaacttgcaattctgtgattcctcagattagtgacctgtagtctggagccactatactcatttatactgctatgtgcaaataaataaatgcttgctttcatctcctattttttttttttttttggaaaaccagcgggtgtgttgatatttccttgggacatgaaaatgcaagttttttttgtttgtaaaaggaatcccattaagtttactgctgctaccatttaaagggcagaactgccggtcttcaagctctttgttactcctgatcatctgtggcacaattgtcatcgggcaaaatgccatcagtttatctctacatccctaacattatcgggtattttaggatcatcataaatttcattgcatttgcggtttgctattccaacaaggctctctttgctgtcttgtacttcttcagctttgtccttgatggtgtggatggttggtttgcacggaagtttaatcaagcatcaacatttggagcagtgttggacatggttacagatagggttagcactgcttgtttattggcccttctttcccagttttacagacctggtttagtcttcttgatattgctcgggttggatattacgagccactggtttcagatgtacagttctttcttgtcaggtaagactagccacaaggatgtaaaacacacaggcaattggcttctgaaattatattatgggtacaggccattcatggccttctgctgtgtttcttgtgaggttttgtatattatcctctttctctttgctgatgagaagtcaacaagcttgcttagtgcatgcaaaggtctcctgaaccaaagccccatcattatcttggtgtttatttccacattagttggctgggcagtgaaacaagtcaccaatgtcatccagatgaaaacggctgcggatgcatgtgttgtgtacgacctgaagcgcagcaaatgaaaagcatgaagggaaaactctacggtttaactcagtcctgtgtggacgtatccaaagggaaaaactctccgaggggatacgtcttacgttccttgacatctttctgatgatgccttacgtggggccagaggatgacatgccgtgggaagagcagcatgtcataaagagaaccaacgcaaacaattgttttgtgaaggcggctattgatttgttgtcaagagtgttttattatgtcatacaaatgatgaattgatgatggtacctttgttacctgggctagccctttgtgtcaacatgaaagatgcttacgagccacatgttcccttctgaaatgaaggttttgagttgcaaaaatttacatattcccttctgaaagccagcaactgcacctcgagagggtttaatggttacttttaccccccaaaataggcactagctattattcggatgatttcccttttgctccttattaaacatcctttggttcagttttattgatagttttaatttttttacatgatctcccttagttcaaaaaaataaaattaaaa

SEQ ID NO: 5124 - DNA, 1740 bp, Zea Mays
aaattaaggaatccaaacatcaacatgaatatatatacgcagcttggagactaggatgagttccatccctataccatcttgcttcgctagagcaatgccaggcgcaccggcctcacggaggagtgctcagctggttctcgttttgaccttgctctagaggacattgctgaagggaaggtgacggtgcaagaagccatcaacccttttttctgaatgggttattggtgcagactgatttaggagggtttttattgccattgttctgatttgctgctccacataaaaagccaattggaaaggtaccattgttttcccgtgcttgctacaacatgtttgttaaactgttgatgtgtacttatgtgccaaatattcaaatatgtggtccgttagattatttagtgtttacatgttgaggagctacctacggtggcatcaattgttgcttatgatttgctccctagaggccttaaaggtaaaaaccattagccctaaggaattatctctggcatatgaaccatatcaagttgacattccttttttctaattttcttgttattaatatgcctggttacctgcacaattcattgggtttcatcattatcttgatattggtgtgcatttaaaatacttgatcgatctctgtccaagtgctacaggctgcatcccaggtgctcgatgaaatgcctaaagggctacaacaatagtaattcactagctagctccagcgaagctgccatatggtaccatggaggcaccaacttcgacaagaccttcggtgggtcgttcatcgccactggctaatgcgccgatcgacgaatacgtccgctgaggcagccgaaatgggtctcctaagggacctgcacaaggccatcaagcaaaccgagctggcgctgatctctgtcaaccacacaatccaatccatcagaaaatacgagaagcatgaccatcaactcgaatgagcaattctaagtctgggcagtgaccgcagttgatcatctactctgctagccagtccatacatgtgttcgtcaacgaccagtcctatgagttcttcaacaacaggcatcgtatatggtggctacaacagtcccaagctaacatatagtgggcatgtgaagatgtggcaaggcagcaacaagaaattcagaaccaggcgacctccatgacaaagcactaaatgatggtttggtgcaggctcaagcatgaagcatcacttatgcgtgatgataaggttcaatatcaattgcatgtcgcggagatggaggcagttagcgttgcaatgcctcctgtttatgtaaatcacggtaatgatggtgggccagctgttaaggatatacatatggagaactttagcatcactattgatctaattcaagaagccactttaacaatcttatttggaaggcactatgattataaatgttagtggttgtccaagtttccacatgtgtgtcgcgtaatctcacacatcttcaaggtttgtggactcaagtggtcttatgacaattgctagcttgcatccagaggcaatgagaaaggagtaagatgtctgttgatatgtttctgttagtttggaatgcactattattaggactctacactgttgttttcccatactaatggttccccttgtctagctttttgattggaatccacattcagtacaaccagtactgaagtatacaagcacacaacagatgtcaaagctattgccatttgtaaaaaaaattgttgggcatt

SEQ ID NO: 5125 - DNA, 3552 bp, Zea Mays
ctcaacttgcgcgcgcttgctcgctcggagagggagagagagactccacccggtcctctgcccacccgcgctacggccctcgtgctcggcggcgagaaggcgaaggatggcagcggcggaggacgcagagggcgaccgcgtgattgaggtcgtgtcagcgggggcactctaccaccgcggcggcgactgggagcgcaaatactggagctgctcgaggggcaaggaccggtacccttacccagtgggttaccatgccgtccgccattttactggaatatcctatgctatggaaatccaacagggacctagaggtccaatattcctggttacatccaccgaaggagatacagcgatagggcagacccctgatatcgcttggaagaacttccagaaaaagactggggctaaactttttgggttcaaaaatgcatctattcagagattgcttcgtgagcttatagtagattcaactggagcagttgaacttaacgagccttgtgaagtcacttctgaggctggtgcacatttagtttgtaaagatgcatctgatgtttctgaggctgaagatccatccgtttgcttaggcatggaaagtggaactcctaaaagaagtatagagcccagccaggtggaaaataccttggcagtccactacccggacatgttaacagcagttgataagtgcaatgtatccacacataaaaatacaaatgaaggagatactgtaggtagagcactgttgcaagatgtctctgattcaagatgcacacttccattgctggaagaagtccctaagaatgcacaatccacttctcttgatgataatttgggagagtcttctctagtttcatctcaacaagttggtttatcttctggttcttatttgaactctgaaaagtctgatatagaattggctgagaaggaagtagcaaagtctatgatgtctattttgcttccccaagctattccccttctcatgaaaagttacaaaaggaagaaattcaagcataaaaatagagaaaactctactgtttcagtgaaaacagtttcagcttacaatccatctgatagttgctgccgaggtgtgactgtaccaacaattgtgggtgaaggtacaaatggaaatagttctgaaatgtgtgaccatgggggatctcatcatgacaaggttaaaaatggctttgccaatgaggactgcagaaatgacgacttagtggttaaattagatgagatgaatgattatgttgcagatagttttgaggatgatgcacaaattttgggcgacaacacaacaaaatcaatgggtaaccatcatcattattctgagtatgtgctctctagggggcctaatgagaagtcaaagctgctaaatggtaaaagtgaagtttttgagtatcaggctagtgtgcataatggcaaaagggcacctgatgtggtatacaatcatgaaaatggacaatatatgttgtctgattcgcttgttgcttgtctagaggatgagttcggtggggaagatagttcccaccctgcaaactacaaccagtttaatggcgatgttaaacaattcgagcagcaatttaaggagcttacagctgttataaaaaatggctcatcagttccggtggatgtttcataccacaagaacactgataatggatcaattaatgtttgtgcacaagcttttgctagaaatggtccaggagtttcgaggaatgaggagtgtttagcaaatatcttgcctgctccagttcattctaatgcacataatgatgctgtaacgagtggtaagcatgatgtgagttcaactttgaatttgccacctgcatgtgaggcaaaatctactttgttggtcatgcgagatggacaacatcatactgaagtgccagcaattgatcagaaggaaaataggttccacagtgtaagctacaaatgcacaaaatctgatgataatactagttttcattctgagaatgttgagtttgttgacaaacatgttgcttttgagtcaccagacaatggcatgtattctagtgatggttcacaaagagcaatcaccactgaaggttggcctgctggtgatggagttaaagcagatgaagaaaatctgcttggcaaagtggaagaatgtcaaattagatataaaaatggtaataagaacacaatactatctgtctatggggaaggtaatgtttgtgaacacatacctacaaagggtgaaaatgatgtttttcatcaccaaccatctcatgccctttctacgactaattgtacacatggtttagtatctgaagacagaacacaagcaaggccagatcatcacctagagctggtgggatgctacctgcatccaatgcctgtcttgtctgtcatgttaaacactaaaaatcataacagcctctatatttatgtattgtgtggccttttggagagctgccaaaggttcctttatgtttactctatcaatcccaaagaccagaaagatgtgtcaccatgttttgttggttacactccccttgtactgcccaccttggaccattcttcaacaggaaattttctgtttggaagatctggtttgcattttacacctgatggccagtttctggtcctcctgagcagcatcaaaataccttcttgcaggttgtaatcataatcccagtgacatgcaggaaaatgttgtatatacttcctctgtccacaaaaggacgcaattctcacttttcgagaagtgaaatgattcgaagttcgactacagttatataaaagagtacaaacatttatgatataagataagtactgttaatctagttgatgacataattgttaatacttttcactatagacttggtcaaagttaatctagtttaacttgcacaaatcccgtagttgcatccttttatggacggagggagtataccttatgctggtgctgattaaatattcttattgacaggatgcaaaacattgattgcttgtgcccagtctgcaacttgtgtcaatgtgaagataattctttaaaaattgtatctgttaactcgggctatgcttcacttgtaaccaatttgatgccttatgggacagtgtcgtgcattctgatatttgaaccaaattacattgtagctattgaagacagcagaaacctgcatatctgggaaatggttgatgggtggagggacatctccaagcgcacactattggcgacttttgcagctccaggaaacactgtcttccagattctgccagttggcttatgtagtttgcaggaggatattattcatgctccagttgatgacatagataaaaatctacaagtgatcacagtcggtgacttgtacagaaaaaatgtcagggtgaactttgtgacgccgccaagacaagatatagcagtttgggtcctgatttcttgtgcttctgtggctgagtatcaacatgatcttcaagccaaggaaaacagtgcacgatggaggtttgctctgttagcgaagaagagagtttttatcggaaatgttttggatacaagggatgcatacgtcgggggatgagattcggtgcaac

SEQ ID NO: 5126 - DNA, 1493 bp, Zea Mays
ggtaggttcccacgcagcacagaactgcccacgcagcacaccccactgcgccactcgcgtcgcacggatctctccttccctccaggctccagctccaaagcctcgtcgtcttcttcgccccgccacccgtcctgcacactcacaactagacatcgtaccacccaggttttgctttatgctggttcatttgtctacggacaatggactagttgctgcactgtttctgtgattcaccatgggaagcagtggagcagatacaccgtctaaggagcagcagccacctgctacctcaggtgctgcaataccacctgtttatccagattggtctagcttccaggcatatcccccaatcccaccacatggattcttcccctcacctgtggcatcaagtccacagggtcatcctttcatgtggggagctcaagctatgattccaccttatggaacaccgccaccatatgtcatgtacccccctggagtatatgcccacccatctatgcccccgggtgcacatccatttactccttatgccattacttctccaaatggcaatgctgatgctactggaactactgttgcagctggtaatactgatggcaagccctctgaaggcaaagataaaagtccaacaaagcgatccaaaggaagtttgggcagcttgaacatgcttactggaaagaatcccagtgaacatggtaagtcctcaggtgcatcgggtaatggagtcacttctcaaagtggcgaaagtggcagtgacagttcaagcgaagggagtgaaggaaattctcacaatgattcacatcacaaggaaagtggacaggaacacgatggggatgttcgaagttcccggaatggtgtatcacgtttgcaatctgagggaaaattgaaccaagctatggcaatcttgcccataccatcaagtggcccagcaactgatccaactacaaacctaaatattgggatggactattgggccaacacagcaagctctgctcctgcaattcatggcaaagcgacgtcaacaacagttccaggggctgtggtcccagcagagcagtggacacaggatgaacatgaactcaaaaagcaaagaagaaagcagtccaatagggagtctgcacgtagatctaggttacgtaaacaggctgaatgtgaggaattggctcaacgtgctgatgttttaaagcaggaaaatgcttcacttagagatgaagtaaaccgtatcagaaaagagtacgaggaacttctatcaaggaataactcactaaaggaaaaacttgaaggcaaacaacacaaaactgatgaggcaggacttaacaacaagctgcaacattctggaaaatggttctggactatgtcttagatgggaagcatagttcattagtatgtctgccttacaggttcttaagcagggatcgtggaagaacctgtgttgggaggtggtagagaagatgtgccaatgattggtttttggtcaatgtcttctctggtgc

SEQ ID NO: 5127 - DNA, 2162 bp, Zea Mays
gtacctgctgccagccagccctgccgtacggtaggttcccacgcagcacagaactgcccacgcagcacaccccactgcgccactcgcgtcgcacggatctctccttccctccaggctccagctccaaagcctcgtcgtcttcttcgccccgccacccgtcctgcacactcacaactagacatcgtaccacccaggttttgctttatgctggttcatttgtctacggacaatggactagttgctgcactgtttctgtgattcaccatgggaagcagtggagcagatacaccgtctaaggagcagcagccacctgctacctcaggtgctgcaataccacctgtttatccagattggtctagcttccaggcatatcccccaatcccaccacatggattcttcccctcacctgtggcatcaagtccacagggtcatcctttcatgtggggagctcaagctatgattccaccttatggaacaccgccaccatatgtcatgtacccccctggagtatatgcccacccatctatgcccccgggtgcacatccatttactccttatgccattacttctccaaatggcaatgctgatgctactggaactactgttgcagctggtaatactgatggcaagccctctgaaggcaaagataaaagtccaacaaagcgatccaaaggaagtttgggcagcttgaacatgcttactggaaagaatcccagtgaacatggtaagtcctcaggtgcatcgggtaatggagtcacttctcaaagtggcgaaagtggcagtgacagttcaagcgaagggagtgaaggaaattctcacaatgattcacatcacaaggaaagtggacaggaacacgatggggatgttcgaagttcccggaatggtgtatcacgtttgcaatctgagggaaaattgaaccaagctatggcaatcttgcccataccatcaagtggcccagcaactgatccaactacaaacctaaatattgggatggactattgggccaacacagcaagctctgctcctgcaattcatggcaaagcgacgtcaacaacagttccaggggctgtggtcccagcagagcagtggacacaggatgaacatgaactcaaaaagcaaagaagaaagcagtccaatagggagtctgcacgtagatctaggttacgtaaacaggctgaatgtgaggaattggctcaacgtgctgatgttttaaagcaggaaaatgcttcacttagagatgaagtaaaccgtatcagaaaagagtacgaggaacttctatcaaggaataactcactaaaggaaaaacttgaaggcaaacaacacaaaactgatgaggcaggacttaacaacaagctgcaacattctggtgatgacagccagaaaaaaggaaactaatgctatcatgcaatgcttgcctacattggtcctaactagattattgggaggtgcaattgtagtatgcacattaactccttactttattgcagttaattgttaccaggttgtgataatgttgatgccaaccttttgtgtgggtgtttcctgtttcagatctatcttggcttatcttttagaagccaagatgtgactgaagctataggctgtgacccaattcactatatctgttagaaatagtggataaagtcaaactttcaaatttgaagtgctgactaatattgttatgtatacctggcaaaagactggtttccttttaattcagtctggttgaacattttgctgggctttcactactgcctagtttatgtacattgttgttcatatcggttgttcctagttattttttgtaataattaacaaatagatgagggacactgtctcaacctctgcaccaatatatatatggacacacacacacacacacacctcttttttgcgtctattttctgttttacttcaaagtttgcaggtttgtttcagccctgtttgattgtgagccttggcgctggcggtattttttttaagtttaaatgatccacctgctgtaggaaaatggttctggactatgtcttagatgggaagcatagttcattagtatgtctgccttacaggttcttaagcagggatcgtggaagaacctgtgttgggaggtggtagagaagatgtgccaatgattggtttttggtcaatgtcttctctggtgc

SEQ ID NO: 5128 - DNA, 2304 bp, Zea Mays
ttattctgcgctttaagtgaatagggatcaaggatatcgtacacaacagttttgctttatgctggttcatttgtctacggacaatggactagttgctgcactgtttctgtgattcaccatgggaagcagtggagcagatacaccgtctaaggagcagcagccacctgctacctcaggtgctgcaataccacctgtttatccagattggtctagcttccaggcatatcccccaatcccaccacatggattcttcccctcacctgtggcatcaagtccacagggtcatcctttcatgtggggagctcaagctatgattccaccttatggaacaccgccaccatatgtcatgtacccccctggagtatatgcccacccatctatgcccccgggtgcacatccatttactccttatgccattacttctccaaatggcaatgctgatgctactggaactactgttgcagctggtaatactgatggcaagccctctgaaggcaaagataaaagtccaacaaagcgatccaaaggaagtttgggcagcttgaacatgcttactggaaagaatcccagtgaacatggtaagtcctcaggtgcatcgggtaatggagtcacttctcaaaggtatttttgctgtaaccttaaacaccttatattcttgtgtgcatccgtctttaagtatatcagtgaatgagttgctgtttctctttgtagtggcgaaagtggcagtgacagttcaagcgaagggagtgaaggaaattctcacaatgattcacatcacaaggaaagtggacaggaacacgatggggatgttcgaagttcccggaatggtgtatcacgtttgcaatctgagggaaaattgaaccaagctatggcaatcttgcccataccatcaagtggcccagcaactgatccaactacaaacctaaatattgggatggactattgggccaacacagcaagctctgctcctgcaattcatggcaaagcgacgtcaacaacagttccaggggctgtggtcccagcagagcagtggacacaggatgaacatgaactcaaaaagcaaagaagaaagcagtccaatagggagtctgcacgtagatctaggttacgtaaacaggctgaatgtgaggaattggctcaacgtgctgatgttttaaagcaggaaaatgcttcacttagagatgaagtaaaccgtatcagaaaagagtacgaggaacttctatcaaggaataactcactaaaggaaaaacttgaaggcaaacaacacaaaactgatgaggcaggacttaacaacaagctgcaacattctggtgatgacagccagaaaaaaggaaactaatgctatcatgcaatgcttgcctacattggtcctaactagattattgggaggtgcaattgtagtatgcacattaactccttactttattgcagttaattgttaccaggttgtgataatgttgatgccaaccttttgtgtgggtgtttcctgtttcagatctatcttggcttatcttttagaagccaagatgtgactgaagctataggctgtgacccaattcactatatctgttagaaatagtggataaagtcaaactttcaaatttgaagtgctgactaatattgttatgtatacctggcaaaagactggtttccttttaattcagtctggttgaacattttgctgggctttcactactgcctagtttatgtacattgttgttcatatcggttgttcctagttattttttgtaataattaacaaatagatgagggacactgtctcaacctctgcaccaatatatatatggacacacacacacacacacacctcttttttgcgtctattttctgttttacttcaaagtttgcaggtttgtttcagccctgtttgattgtgagccttggcgctggcggtattttttttaagtttaaatgatccacctgctgtaggtaagtttggttaaaagacattcctatttttctgtttagtgacactgatattagtaatccttttttttcatccatctatttaagtgtcagcagaatcgtttgttaaacttgctttcctgaacttgctcttgattctggtaagtttttgggctcctggcactttacttttatgatcttattttgatttgctttttacaggaaaatggttctggactatgtcttagatgggaagcatagttcattagtatgtctgccttacaggttcttaagcagggatcgtggaagaacctgtgttgggaggtggtagagaagatgtgccaatgattggtttttggtcaatgtcttctctggtgc

SEQ ID NO: 5129 - DNA, 2448 bp, Zea Mays
actcgcgtcgcacggatctctccttccctccaggctccagctccaaagcctcgtcgtcttcttcgccccgccacccgtcctgcacactcacaactagacatcgtaccacccagaaagtaattgacaggattgcatatgatccacgctagtttattctgcgctttaagtgaatagggatcaaggatatcgtacacaacagttttgctttatgctggttcatttgtctacggacaatggactagttgctgcactgtttctgtgattcaccatgggaagcagtggagcagatacaccgtctaagcagccacctgctacctcaggtgctgcaataccacctgtttatccagattggtctagcttccaggcatatcccccaatcccaccacatggattcttcccctcacctgtggcatcaagtccacagggtcatcctttcatgtggggagctcaagctatgattccaccttatggaacaccgccaccatatgtcatgtacccccctggagtatatgcccacccatctatgcccccgggtgcacatccatttactccttatgccattacttctccaaatggcaatgctgatgctactggaactactgttgcagctggtaatactgatggcaagccctctgaaggcaaagataaaagtccaacaaagcgatccaaaggaagtttgggcagcttgaacatgcttactggaaagaatcccagtgaacatggtaagtcctcaggtgcatcgggtaatggagtcacttctcaaaggtatttttgctgtaaccttaaacaccttatattcttgtgtgcatccgtctttaagtatatcagtgaatgagttgctgtttctctttgtagtggcgaaagtggcagtgacagttcaagcgaagggagtgaaggaaattctcacaatgattcacatcacaaggaaagtggacaggaacacgatggggatgttcgaagttcccggaatggtgtatcacgtttgcaatctgagggaaaattgaaccaagctatggcaatcttgcccataccatcaagtggcccagcaactgatccaactacaaacctaaatattgggatggactattgggccaacacagcaagctctgctcctgcaattcatggcaaagcgacgtcaacaacagttccaggggctgtggtcccagcagagcagtggacacaggatgaacatgaactcaaaaagcaaagaagaaagcagtccaatagggagtctgcacgtagatctaggttacgtaaacaggctgaatgtgaggaattggctcaacgtgctgatgttttaaagcaggaaaatgcttcacttagagatgaagtaaaccgtatcagaaaagagtacgaggaacttctatcaaggaataactcactaaaggaaaaacttgaaggcaaacaacacaaaactgatgaggcaggacttaacaacaagctgcaacattctggtgatgacagccagaaaaaaggaaactaatgctatcatgcaatgcttgcctacattggtcctaactagattattgggaggtgcaattgtagtatgcacattaactccttactttattgcagttaattgttaccaggttgtgataatgttgatgccaaccttttgtgtgggtgtttcctgtttcagatctatcttggcttatcttttagaagccaagatgtgactgaagctataggctgtgacccaattcactatatctgttagaaatagtggataaagtcaaactttcaaatttgaagtgctgactaatattgttatgtatacctggcaaaagactggtttccttttaattcagtctggttgaacattttgctgggctttcactactgcctagtttatgtacattgttgttcatatcggttgttcctagttattttttgtaataattaacaaatagatgagggacactgtctcaacctctgcaccaatatatatatggacacacacacacacacacacctcttttttgcgtctattttctgttttacttcaaagtttgcaggtttgtttcagccctgtttgattgtgagccttggcgctggcggtattttttttaagtttaaatgatccacctgctgtaggtaagtttggttaaaagacattcctatttttctgtttagtgacactgatattagtaatccttttttttcatccatctatttaagtgtcagcagaatcgtttgttaaacttgctttcctgaacttgctcttgattctggtaagtttttgggctcctggcactttacttttatgatcttattttgatttgctttttacaggaaaatggttctggactatgtcttagatgggaagcatagttcattagtatgtctgccttacaggttcttaagcagggatcgtggaagaacctgtgttgggaggtggtagagaagatgtgccaatgattggtttttggtcaatgtcttctctggtgc

SEQ ID NO: 5130 - DNA, 2936 bp, Zea Mays
gccatcgcgcgctcgcctccctccccgcgcccgcagtccccgccgcaatccccgcgtccgcgcccgcagtccccgccgccgagcagtcccgccgcgccccctctccctgcaaaccccgccacgacgcagcaactgatccaccatcgacgcgcgcgccgcgcgccccgacgcggaacgctggatcccgcgcagcagaaggcggccaaccagtcgccgtcgcccccggcccccaccccgcctgctgcagcaagcggcgtccgctaccgcatgccctcgtccccggacctcctcctccccgccgacgctaccaagatgcgccgctactccgcgctgcccaacggcggccgccaggagacgttggccgaccgcgtgcaccgctaccagggcgtcatgctcgtcatcctcgcctcgctcgcgctcgtctctctcgtcctcctcctcatgccacgctcacccgctggcaccatgggcggcgcccggggcagacaggtacgcactcccccgcccggtgacccgttgccggacttggagtcacgctgcctagactcgcccgctgggtggattcgtcgcgttggaggtcggattgtgaccacgccgtccagttaggatgtcgtcgtctccagatccaggggatggggttgctcggcatggcggccaagggcccctcgcccacgcgtcgcctcctatcgcagccgcacttggccatctcctcgctggtggcctccgtggctctgatccactgcttcctcaacacccggagatggttgacgtcgccttcgccgtctcctcgccagtggcctccaccagccccgcagtccaagacaaagccgcgacatgagtcaacccaagtccggtcgcacctacaccgatgaccgtacccaacgtattcaatctctctattcggcaacaccttaaaaagtggattgcaggcttagataatttttggaacacaacattgctccaaaaaagtttttctgaagaaaaggtatcaatctgcagtttggtaagtgagtctgaatctgcagcaccaaggacttcaataattagtttgaacctgcacttacagttctatgggtcttctcaattcttaataatattatatttttaatgaataattgaatatatattgagtctgtgtcatagattcagtcgccttaacaccctttgttgttttcccacttaagttagttaatgagatgaatggatggaaattacgtagtgaatgtatgataagtccaggctacatgttaaaagacacacttggctacttgagctctgtatttccatgaagaaatcttattgacgggtgctttcatctgctatttggatccgttgctgatggatcttacaaagaagaagttgagctttaagaggaacgtggtgtcattgtcatctgagctcaagggtgtgaggagcaagcttgcttcctaggagcagttgtttgtaagggaatctcaaactagaaagcttgcggagacaaaaacaaggagcatggaagaggaagtaatcaagctgcagaaatgcttataggacaaggatgaacaactgcattcattcacaagtagcacagaacagtaccatcatgagttggatgatcttagaacacatctgtcatttactcaagctacaggagaagcagatctgtgagcaagcgagttgtcctataacagttggctcctcacaatgggtattcgacatgagccccatccctgccacagacttgggaaaggcacagtgatttttatggtgacatgaagacattcctcttcaaattatatctttaagcaaccaattttcgccctactggtgcaaacaagaatttgcaatggccggacttctaatagaatgaactgaaagacttctctaacaaaagtggagctgaggggagcaagagtgctaaaagtggtccaatgtttttagatgttctcgaatgttatctgaaatatgaggtttatctcttgcttgatcaacaatagaagcaaaaaatcatccttttgtttatttatgtttcccaatataaaggaaaaaggggaaatattttggtgcagtgtgcccaattcttttgtccctagaaaactgtgtagccgcctataacaggcgctatagtcagttttagctattttagacaccactactatttgtacacacatttctattatcctattttagcctgctatatccatgtatgagccttatgggaactctgcaactactatggatcctcttatacattatgttcgacatgcagacaaggtattatattgagttggaccaataatccttcatatttattgatgtgaattatgttgtactggtgtcctgtccttttgtttgtgctttataatttgtaattcctagctgctgatatggtatgatggatgggaggtggctgaaatcgttcggataagtgtcaatttgttgttttctatttttatgaatggttttctatttcagctgatgaaccttttatagttcttttattatatactgccactgattgctaatagggtgcatgtctcctatttctaggtatggtgcataaaaaagtaggaaccacaatgagattgtgatgctgcacatggcacatcaaggtgcgcaagatatgtaccatagaaattatcgtaaagtgcacacagctgtatgtatagatgtttagaagtgaccgaagttaggcttgctcaaccggggcaatgatttacttagcctgctgaaatgtactataggtagcattcaagtttgtgaccatcatgcaagtacatgtgggtttgttgaaattgtgtggtcatcggagatgtagcaaaatgttccctatcgagagctcgtgtactatatttgttttatgaacttaattttgttgatgtaggactattacaaagttctagagacaacttaatttttattacaacataatatgtggtcatacatatgttaatgtt

SEQ ID NO: 5131 - DNA, 1806 bp, Zea Mays
agtttgacacacacaattctcggccccgcacaatggcccactcgctgcacgcgcacgcagacgtatcaatagatgccgcactcgccgcatcacgagatgtcgccgccggctgccaacacagtggatcgtccgccgctgaagatgagggaggtatcacggcgcgtcacgcctacacctcggcccactcgctgtcgtcggctgcctacacagggagcccccgccgccgaagaggagggaggtcttgcggcacgggactcggcgacggcgccccctaacacatcgactgggaggtctgcctcactgctgccacactcatcgccagacctctatgctgggttgaacatatgtcgttggacaatgaaactggattagacaaacctggaataagggtcaggtcagtcacaggccttgttgcagcaaactattttgtccctagatattttgtttgggctgtcttaattgccaatttagctcgtattggatatgaagaaaagaccatgtacatggttgcatatgattggaggttatctttccagaacactgaggtactcttcttggatggccttatacaagtaaattttagtcagaagtcaccacggattagctatttggttatgaacttttgatgcttagtgatagttcccagttcccaccgtgtagatggttctggtataaaatgtattgccatatttgtaacacagattactatatacaggttcgtgatcaaactttgagcagaataaagagcaatattgaactcatagtagcgacaaatggtggaaatagggtggtggtgatcccacactccatgggggtcctctattttctgcattttacgaaatgggtcgaagcacctcctcccgtggggggcagtggtggtccgaactggtgtgagaaccatattaaagctgtaatgaatattggaggatctttcttaggagttcctaaggctgttgctgggcttttctcatctgaagccaaagatgttgccgttgctagcaaaagggaatagcaaaagaatggaatattattggatgctcgacaagcttggcggagcttttgctcccaagccatcttctggacctcacaagtccagggagtgcctgcctctgatcctcatcatcaggaacaggctcaagtatgcaccgacgtaccgtgaggtcatttctatcctgatgcaacaccatgtacttgttgatggcaagatgtcatttccatccctaagacaaacgagaactacaggctgctttcgtcttcacccaatcagggatgaggatgccaagttcaagctctacaaggtgaggtctgttcagtttggccagaaagacatcccctatctgaacacctacgacgaccgcaccatccgctaccccgacccgctcatcaaggccaacgacaccatcaagatcgatctggagaccaacaagatcatggacttcatcatgtttgacgtcggcaacgtggtcatggtgatcggcaggaggaataccgggcgtgtaggagtgatcaagataagggagaagcataagggcaacttcgagaccatccacgtgctgcttggagctttttgctatgtctagttttctcctatttgttgtacaggaaaacatagaatgaaattcaaatttggtggccacaaaagtgtggagacttgatttcatataaagttaggcttaacattagtgcaaacagttgtattttagtttagatttagagtacactatgtatgcgttgtttgacaatgcttatttatgatatattgaatggtacttatttatattaattaattataatgttattcaatat

SEQ ID NO: 5132 - DNA, 2009 bp, Zea Mays
agtttgacacacacaattctcggccccgcacaatggcccactcgctgcacgcgcacgcagacgtatcaatagatgccgcactcgccgcatcacgagatgtcgccgccggctgccaacacagtggatcgtccgccgctgaagatgagggaggtatcacggcgcgtcacgcctacacctcggcccactcgctgtcgtcggctgcctacacagggagcccccgccgccgaagaggagggaggtcttgcggcacgggactcggcgacggcgccccctaacacatcgactgggaggtctgcctcactgctgccacactcatcgccagttgaaatccaatttactatgctcaattgcccatcgtgaagaacatataatttatgaatcttgaacttcagaagttcttcatttaccgtcttatgaaacatgaggacaggtttcacaacacattttgacattatatctttatcaagtcagttgtggtgaactgtgaacaaatgtgcttgttatgcatatcaacacctcttgtatttgcattcttcccctagcagtaaggtcaatggcactcagatgggaaataaccgaagcatcttatgccatggcagttgcgctcttcttctttggccactgactcttactttctctttctggtcaaatcttcattctttcagacctctatgctgggttgaacatatgtcgttggacaatgaaactggattagacaaacctggaataagggtcaggtcagtcacaggccttgttgcagcaaactattttgtccctagatattttgtttgggctgtcttaattgccaatttagctcgtattggatatgaagaaaagaccatgtacatggttgcatatgattggaggttatctttccagaacactgaggttcgtgatcaaactttgagcagaataaagagcaatattgaactcatagtagcgacaaatggtggaaatagggtggtggtgatcccacactccatgggggtcctctattttctgcattttacgaaatgggtcgaagcacctcctcccgtggggggcagtggtggtccgaactggtgtgagaaccatattaaagctgtaatgaatattggaggatctttcttaggagttcctaaggctgttgctgggcttttctcatctgaagccaaagatgttgccgttgctaggtataaggtaattgattcatttatttaaagcaaaagggaatagcaaaagaatggaatattattggatgctcgacaagcttggcggagcttttgctcccaagccatcttctggacctcacaagtccagggagtgcctgcctctgatcctcatcatcaggaacaggctcaagtatgcaccgacgtaccgtgaggtcatttctatcctgatgcaacaccatgtacttgttgatggcaagatgtcatttccatccctaagacaaacgagaactacaggctgctttcgtcttcacccaatcagggatgaggatgccaagttcaagctctacaaggtgaggtctgttcagtttggccagaaagacatcccctatctgaacacctacgacgaccgcaccatccgctaccccgacccgctcatcaaggccaacgacaccatcaagatcgatctggagaccaacaagatcatggacttcatcatgtttgacgtcggcaacgtggtcatggtgatcggcaggaggaataccgggcgtgtaggagtgatcaagataagggagaagcataagggcaacttcgagaccatccacgtgctgcttggagctttttgctatgtctagttttctcctatttgttgtacaggaaaacatagaatgaaattcaaatttggtggccacaaaagtgtggagacttgatttcatataaagttaggcttaacattagtgcaaacagttgtattttagtttagatttagagtacactatgtatgcgttgtttgacaatgcttatttatgatatattgaatggtacttatttatattaattaattataatgttattcaatat

SEQ ID NO: 5133 - DNA, 3068 bp, Zea Mays
actctagggaggattaagaaacattcagacaatagacaatttacctattcttctgtaccggcggggttaacatttggtaacaccgtagcaggcatccgccgatcctcggctccgatcaatggcgtccaccaacgcaatcgatttccaactcacccaggcccgggcgctgctgtccgaattcgacaaccggctccgcgagattgattccaagtgggagacccgcgtcggcgtcctcgaaacgaaagttgcggactctgctcgaaatctggagacgatctccaaggagatccgcgacggggtggtggcgcagttggcggcggccgaggcgggtgtggatttccggatccgcctgcttgagacggggaccatcattcgcgtcgctgcgctcgagtcgactgcccacgccttcgagctgtggcgtcctcacgtcgacttgtcgatcgacagtctcttctcctccattgacgcggtttgtaccgaggtcgagaaattggggatccaccggttcccaggaccgcgtcccagcgatggcgcagcagcaccggggaccgcgacgcaaccggaaccctcttctcatcggccacgttcatcgcctccgcccgaggtccatgacggcgacgatgacgatgaagaaattgacgatgacgatgacgacgacgacgacgacgacgacgacgacgacgacgacgacgacgacgacgacgacgaggtttgggtttgtttccagcttcacgcgggtctcttggggttgtgtgcgttggcaggttctggatttcttgattcgcggcacccaatttcttggggattaatttctcccgttctgatagaaggcgatggctcatcgactgggtcggtcgtaggctggttttcgtttgaacacgtcctcgatttgattgaccattgggtcgggtttttgattttacggggaaacccagaaaagaaggaaggaaggggaaaccgcaatgccagttattgaatatcgcggagtggtgccatggcaatttcgagtgtccgttttttgtcccgttctggctgattcttgccctctgaagtttttcgtcgctttattcaatcatccgtttacatttttatgtgtcataatttgggcttccttcagggatttgatccatttgcaggatgacttagtttttgtagataggtaaatttagcaaattcgaggtgtgaatcatgtgaagcatttttttctttttccgtttagaattccgcgagaaaactcggtacatgttgagcacattatttggattctttttttacgtgtttttgttgtaaatggacatatcatgataccagaggtcatgccatgacttgcatgtcttctggaaagtttttttagactatggccaatcattcgagtaggataaaataggtgaattactgggattatttcgttgtgctctccctgcttccatttggaaataaaataaaataataaattacctgatgattgcaactcacaaggattatgagggcttcacagacgaagagctggacaaattcgaaagcgccttcggatggggttctacattcttgagtgatcctcaagttctttgtatggactcgagtgatccacaaaacccccctcgtattggccggcaaaattatgagccgctcaccgcacaggagtttttttcactgcgccacaattggcaacagctgctcgatggcaagaagacatacctccgcccaccaaagaacaaccgtgttgccaagcacagttatgctaactgcacctttgtaaccccagaacctcttgagaaggcactacaatgtcaggagccgctatctgattttggtcggaaatatgcagaaaattctatagttcagcaaaagtttaagattcttagtgaacattatgcgcacgtcagacaaatgcgaatggatggatcatctttttacagagctttccttttctcttacttggaaaaccttgggaaaatgcaagctagtcatgctgaggtcactcgcttaatggaatgtgtggcaaggtccagagagaaattttgtcgtttacattggaatgatgcgtacttctcaaatcctgaagcatttttctcaagtgttgtttctgagttcgagcaattggtcaattcagttgccaatgggctaaatgctgatgagctttacaagagaagcctacatgagattacatcatccaggagtgaggatacaaatttttttgggatgtgttgtttatttgttctctatgtaacattttctttggttagttctttgtttgtttagattgctgacagaggttcatatccgtacacatcatgcggactacccagaattcagtcaggaaacagaagcccttatggctggtcccttctaagttcaagcgaggaagaacggtgtaggaggctttggttgatggtcgttgggtcagagatatcaggggtgttctggatgctcaagttctcatggagtaccttcaactctgggatgtcatggaaacggttagtctggcgccaggggttagtgaccagcacctctggaccccatcatcctatggacaatactcttcaagatcggcttaccggaggttctttatatgctccgtcgcttttgaacccgcccataggatttggaagtcctgggcccctctgaagtgcaagtttttcctttggttagcgagtctcaatagatgttggacagtggtccgtttggcgagaagagggctggaacatcctgactgttgtgtgctctgtaatcaagaagaggaaacaattcaacacctgctggctggctgcatcttctctaggcaagtctggttccaggttctttccgcctgcaatcttcaacacctgtgccccttccctggggaggacaacttccaagtctggtggcagcaggcggagcaaaacgtaccaaagcagcggcgaaaggttttcaactcggtggtctgcttggttgcttggtggttgtggaagcatcgaaattgctgtgtgttcgatggtggggctgctgatatcgctaaagtggtgcgggagatttgtgaagatgccacttactggcgccttgctggagcccctagggttgtgggctga

SEQ ID NO: 5134 - DNA, 1977 bp, Zea Mays
gaacacgtcgtttccgaccgccagcgacgaggatgagctaggatgcaatgtgatgtgatgtcagtcgagcgagacgaaaaagaagggagctgtgctaaaatttcttggaggggagggggtagagatgacgtttggtagcgccgacatggaggccggcggcggcggcgagcgccgccacggacaacaggaggaacagtcatccgacgagcggcgcgcgcggttcgcggaggactggggctgctgcgcctgcgcctgcgcggggctattcctggggcccaacccgatggtggcgcgctacatgtacgcgctcatcttcctcgtcaccaacctcctcgcctggacgctccgcgactacggcgactccgcgctcgccgagctgcagcggctgaaggtctgccagggcgcgctctactgcctgggcgcggagggcgtgctgcgggtcagcctcggctgcttcgtcttcttcttcgtcatgttcctgtccaccgtgaaggccaggaaggtgcacgactgccgcaactcgtggcactccgagtggtggccggccaagctcgccctctggctcggcctcaccgccgtcaccttcctcgcgccgtcgccgctcgtccagctctacgggaaggtggcgcatttcggagcaggggctttcctggtgatccagctgatcagcgtcaccaggttcatcatgtggctcaacgactggtgccgcgcagagatgacccagaagagataccacttgcagattcaggcggtgtccatcgtcacgtacgtggggtcgctcctggggatcgtgctcatgtacgtgtggtacgcgcccagcccggcctgcaggctcaacatcctcttcatcaccgtcacgctggcgctcgtgcagctcatgaccttcgtctccatgagctccaaggtgaaggcagggtacgtggcgccggggctgatggggatctacgtcgtgttcctgtgctggtcggcgatcagaagcgagccgcacacggaggtttgcaacaggaaggcagaagtcgccacgagcgcagactgggtgaacatcgcgagctttgtgatcgccgtcgtcgtcatcgtggcggcgaccttctcgacggggatcgactccaagtgcctccagttcaagcaggcggagggggagtcggaggaggaggaggaggacgacatcccctacggcctcggcttcttccacctggtgttctccatgggcgccatgtacttcgccatgatcttcgtcggctggaacgcgaacgcgagccacaccatggagaggtggacgatcgacgtcgggtgggcgagcacgtgggtgcgcgtcggcaacgagtggctggcggcaatcgtgtacatatggatgatgatcgcgcccgtcatctggaagacgaggcaggtgggatcggcggcggagacgtgagcagtttttccgctgattctgagtttctgacagccggaatctatatatacatacaaacacaagagcaaatcaaagggacgggaaacgggaagagctcgggtagtttttgctaagctggaggtgcagcagacaagacaacaagaaagaggaggcaactaaggagtagtactatactgatgccactagtccatcgtggagctcggttcaggaagctcatcgatctcgttgtacttgtaccgaactatctcaaaaaacatagtgcctgtttgtctggattgctgctcggccacaagcacagctgtctggcccggggcaccatccaaacaatcccatatagagcgtgtttggacgcagtcatgcgcttgggttttgcttttgcctgtctgtgcccggcagattcatgggcctgtaagcaaacacgtcccaattatctgaactcggaattatttacgcctcggcaagattcatcaactcaatttttttgtgaacaatcttattgtgttactaggtgaatgcccgtgcgttgctacggagtaaacatattatgataagatatattgaaattc

SEQ ID NO: 5135 - DNA, 2413 bp, Zea Mays
gaatctttgagattaaacaaatcgctaatcaccaacgcactgaagcgcttgcttttaatattactattatattgttatttgtatataataaatcttgtcagattatatccgattcctctgtccactatacggcatgtctgacctgttgagtcgatcgaaactctccctccctggaccgccttcagatccagcagtcaaacttccccgtccccggcgaccgtggggcccaccacccgaacttcttcgcagaacaccagacagaccccacgccgggcccgttccagtggaccattgggctcaagaacagcccgacgtgggatgggagtgtcctcaaacccatccgggatccggccatcccgcacgcctcgtcctcactcctcagtcctcacccccgacacaggtctcgctggtagcttgccctcgtctgcgccacgcctcctctagcccacctcctgctcctcccccactcgcacagtgctcaatgccgcacaaaccctagtgcccccactccctgtctcgcgtggcagccatgggaaactgttgccgctcgccggccgccgcggcgcgggaagacgtcaagtcgtcgcacttcccggcctccgccggcgggaagaagaagccccaccaggcgcggaacggcggcgggggcggcgccggggagaagaagcggctgtctgtgctcggggaggaggggtgcgacgttggcgccgggatcgaagagaagtacgcgctggaccgggagctcgggcgcggcgagttcggcgtgacgtacctgtgcatggaccgtggcacgcgggagctgctggcctgcaagtcgatctccaagcggaagctgcggacgcccgtcgacgtggaggacgtgcggcgggaggtggccatcatgcggcacctgcccaagagccccaccatcgtgtccctgcgggaggcgtgcgaggacgacggcgccgtgcacctcgtcatggagctctgcgagggaggggagctgttcgaccgcatcgtcgccaggggccattacacggaacgcgcggcggccgcggtcacgcgcaccatcctcgaggtcgtgcagctctgccatcgccacggcgtcatccaccgggacctcaagcccgagaacttcctcttcgccaacaagaaggagaactcgccgctcaaggccatcgacttcggcctctccatcttcttcaagcccggcgaaaagttttcggaaattgtgggaagcccatactacatggctcctgaagtcttgaagaggaactatggacctgaaatagacatatggagcgctggtgttatcttgtatattttgttatgtggtgttcctccattttgggctgagactgaacaaggagttgcacaagctattcttcggggaaatgtagattttaagcgagaaccctggcccaatgtttcagataatgctaaagatcttgttcggcagatgcttcaacctgatccaaagctcaggctaacagcaaagcaagttcttgagcatccctggcttcaaaatgctaagaaagctccaaacgttcctcttggagacattgtaaagtcaaggctgaaacagttttcaaggatgaacagattcaaaagaagagctctaagggttattgctgatcacttgtcggctgaagaggttcaggacataaaggagatgttcaagaatcagaagtgcaaatgcttatcgaagctgtggatacaaatggtagaggagcactagattacggtgaatttttggctgtctcgctccatttacaaaggatggcaaatgacgagcaccttcggcgggccttcctatttttcgacaaggatggcaacggtttcatcgagcccgaggagcttcaggaagccctgatggaggacgggggagctgataccatggacgtggtcaatgacatattgcaagaagttgacacagacaaggatgggaaaattagctacgacgaatttgtagcgatgatgaaaactggcacggactggaggaaggcatcgcggcactattcaagagggcgcttcaatagccttagcataaagctgataaaagacgggtctgtaaagctgggtagcgggtgaggttgcagctctgcaaccgatgctcttctcttctcttctccacgcattgcccctcgggcccactaatgattatttgtggtccgggatttagatagtcggagcctccctgattggtttactcgtgtaattagcagccttttccagtgtcgctggggagcatctgctgaaggattgcacacctgcacgcctgctcatctcctccggtgtagtacctgacgctcaaaatgttgtaaaaatgttttggtgttgacctcaaatataatgcaatttgctcgctggtaccgtgtgctgtcaccctatactcatttgcacctacaaatcggtgaagagtaactatgacagt

SEQ ID NO: 5136 - DNA, 2580 bp, Zea Mays
ctccttccgacctcgccgcctccctccctaaactctaaaccctccaccagccgaagctactgccgcggccgcagcagaggtcgcgacgacgaacgctgaagaagcgccggcgagggagagtcctttactttttcctatgctgtagcaaaacaagcctataccatcttccaaatatactcgttccgtgccggcggcctcccctcctacgcccctgtcgattcttcaatcttcaccaacgtctgcgcgtagcaggctagcagtcggcacggcttcctcagatctgccggacgacttgttgttcgtcaccgactcaccagcaaccaatgtcggccatcagccggcagcaggggaagctgggcggagggtcattgcggcacggcgtccaggcgtacagcaggcaccagcaacagcccatggcaaacgccgcagatgaccctatggtagatgaagccggagtagaagatgccttcacacatgagatcaccgattatttgtacgtccctagataccatgtgttgagttggatggaaactgtggaggggatggtggccggtgtggcggcgcttccgccggtgtatttgatactgaacagagatcttcttgagacgggatggggatggaagaggctggtgccctacagacctggttatgttgagtggcatgtgttcaagaaataccttggggactatttcgaccataatcgtgaagcttttctttgtgccgagcagaagcctgatccatttggatggattattgctgaaaagagtgccctgattgctgcagccaaattgtgcctcaagatggagaaggcacttctcaggtactgtgctagctttctcactcctgacgacaaaaggctgatcctcgggatcaaggaccaggcaaagcaaatgatccaatcagaggtgcttcaagcaatggttcaaatgggtgtccttgttcctactggagatatgactgttgtcagaagaaccgctcaatttttccttaatagctttcaagagtgcctaacagcacaaaggaaggagagagaaatggcaaccgcagaactgggtttcaaaaagcaattaactaaggaggagaagtttgaaaagaggaagcagagacttgctacaatcggagaggatcttttggcgattgctgctgatcaaccatttcgcttccctgccacatttacatttgtggtcagagcattctcagttctagatggtactgggaaaggccttcatcctaggtttcatattacagagattgctaagccctgaaaatgccaaggaattgctaagatttaatgacgctggtgttgaaatagttgtgaaggtgtgtggagagacatgtgtattcctcctatgacgaattcctcaggctccatgaaggatattaacggtatacatcaacaattcattctattttaattgcttgcaaaacttttttggcccttcaaatgagttccacgcatcaagaagtcaagattccaggaggcctaaaataggagaggagggcgcagcttgattcaatccatgtcaagtcaaaggctgctgcgaagtttgcacatgcaagtagaatttagatggtgaggttttgtctctgttcccatttttataacgactaggtgtttgaattcctaagattaaagtttatgtagattcttatttgtaattagatctctgttaggcatctaactgaataaatgatctcctaaagaattgacagattccatcactgagcagcccttcgccccggtggctgcggtgtcgcactggctgacacctgctcgcagttgcattacaagttttactgactatgtattttcaggtttattcaatttcggttctaatgcttctgacagcagttgtatcagtcctcttgttcagcttacattgtacctacactcagttggaaaacttcaaccacactgcaacaaggtttataaaaggtttgctatcaggaaaaacaaatttatgggctcaaacaaagtgtgatagtgaaagtcattttgcttccagcttaagaaccaagccaagaaaacagatatcaactgtgacgccacactcaaaagcttgtttggtgggagggacaaggttgggatgctggagatctccaagcttttgagtcgtggcttcccgaaaatctccaagcttttgtggtccatggagccagggatggctctttggtaaaagacttcgttgtggatggcctcttttatggtccatgttaagtcccaagtcccactaggtggttaagcagaaaaatcttgtgatggcattaagactttcagactttgtttttgggtctgatgcatgtaaaaaggattcccagtgtttctgttgctcttgcgatcctgtgaggacacatatgagagaaatatttagtttgttgatggcaaatcttgtcttatgttcatgtctgtgcctatctgatcaagcgttatgatatgatcccatgcgtggtactgtgttctttagagatgtacttaattatgtttctcttgcatttcatattgctttgtctaattgttaccgcaaattaagattttattataattccaatttgatatgcctcatcataaccatggttact

SEQ ID NO: 5137 - DNA, 2590 bp, Zea Mays
ctccttccgacctcgccgcctccctccctaaactctaaaccctccaccagccgaagctactgccgcggccgcagcagaggtcgcgacgacgaacgctgaagaagcgccggcgagggagagtcctttactttttcctatgctgtagcaaaacaagcctataccatcttccaaatatactcgttccgtgccggcggcctcccctcctacgcccctgtcgattcttcaatcttcaccaacgtctgcgcgtagcaggctagcagtcggcacggcttcctcagatctgccggacgacttgttgttcgtcaccgactcaccagcaaccaatgtcggccatcagccggcagcaggggaagctgggcggagggtcattgcggcacggcgtccaggcgtacagcaggcaccagcaacagcccatggcaaacgccgcagatgaccctatggtagatgaagccggagtagaagatgccttcacacatgagatcaccgattatttgtacgtccctagataccatgtgttgagttggatggaaactgtggaggggatggtggccggtgtggcggcgcttccgccggtgtatttgatactgaacagagatcttcttgagacgggatggggatggaagaggctggtgccctacagacctggttatgttgagtggcatgtgttcaagaaataccttggggactatttcgaccataatcgtgaagcttttctttgtgccgagcagaagcctgatccatttggatggattattgctgaaaagagtgccctgattgctgcagccaaattgtgcctcaagatggagaaggcacttctcaggtactgtgctagctttctcactcctgacgacaaaaggctgatcctcgggatcaaggaccaggcaaagcaaatgatccaatcagaggtgcttcaagcaatggttcaaatgggtgtccttgttcctactggagatatgactgttgtcagaagaaccgctcaatttttccttaatagctttcaagagtgcctaacagcacaaaggaaggagagagaaatggcaaccgcagaactgggtttcaaaaagcaattaactaaggaggagaagtttgaaaagaggaagcagagacttgctacaatcggagaggatcttttggcgattgctgctgatcaaccatttcgcttccctgccacatttacatttgtgttctagatggtactgggaaaggccttcatcctaggtttcatattacagagattgctaagccctgagtactttttgcattactagcatctgaatacttattcaaaaacacacaaagcttgcacatcttcacttattatgtactgtctatattttcatcttgaacttttctggtactgacttgaaatgtctattaaatttgctagaaatgccaaggaattgctaagatttaatgacgctggtgttgaaatagttgtgaaggtgtgtggagagacatgtgtattcctcctatgacgaattcctcaggctccatgaaggtaagcctgtcttaatgggcttgattgttgaacctgacttagtacttttatccatgtcacgacattgaaccagacagtcactcatgtccttaggatattaacggtatacatcaacaattcattctattttaattgcttgcaaaacttttttggcccttcaaatgagttccacgcatcaagaagtcaagattccaggaggcctaaaataggagaggagggcgcagcttgattcaatccatgtcaagtcaaaggctgctgcgaagtttgcacatgcaagtagaatttagatggtttattcaatttcggttctaatgcttctgacagcagttgtatcagtcctcttgttcagcttacataataatgtactaaacttcagtttggtgtctatctcagtgtacctacactcagttggaaaacttcaaccacactgcaacaaggtttataaaaggtttgctatcaggaaaaacaaatttatgggctcaaacaaagtgtgatagtgaaagtcattttgcttccagcttaagaaccaagccaagaaaacagatatcaactgtgacgccacactcaaaagcttgtttggtgggagggacaaggttgggatgctggagatctccaagcttttgagtcgtggcttcccgaaaatctccaagcttttgtggtccatggagccagggatggctctttggtaaaagacttcgttgtggatggcctcttttatggtccatgttaagtcccaagtcccactaggtggttaagcagaaaaatcttgtgatggcattaagactttcagactttgtttttgggtctgatgcatgtaaaaaggattcccagtgtttctgttgctcttgcgatcctgtgaggacacatatgagagaaatatttagtttgttgatggcaaatcttgtcttatgttcatgtctgtgcctatctgatcaagcgttatgatatgatcccatgcgtggtactgtgttctttagagatgtacttaattatgtttctcttgcatttcatattgctttgtctaattgttaccgcaaattaagattttattataattccaatttgatatgcctcatcataaccatggttact

SEQ ID NO: 5138 - DNA, 2655 bp, Zea Mays
aaaattttcttcgaaccagttctgagcagtgtagccctcctgtccgctgttcggtgcccgctgcccacctccctctcctccttccgacctcgccgcctccctccctaaactctaaaccctccaccagccgaagctactgccgcggccgcagcagaggtcgcgacgacgaacgctgaagaagcgccggcgagggagagtcctttactttttcctatgctgtagcaaaacaagcctataccatcttccaaatatactcgttccgtgccggcggcctcccctcctacgcccctgtcgattcttcaatcttcaccaacgtctgcgcgtagcaggctagcagtcggcacggcttcctcagatctgccggacgacttgttgttcgtcaccgactcaccagcaaccaatgtcggccatcagccggcagcaggggaagctgggcggagggtcattgcggcacggcgtccaggcgtacagcaggcaccagcaacagcccatggcaaacgccgcagatgaccctatggtagatgaagccggagtagaagatgccttcacacatgagatcaccgattatttgtacgtccctagataccatgtgttgagttggatggaaactgtggaggggatggtggccggtgtggcggcgcttccgccggtgtatttgatactgaacagagatcttcttgagacgggatggggatggaagaggctggtgccctacagacctggttatgttgagtggcatgtgttcaagaaataccttggggactatttcgaccataatcgtgaagcttttctttgtgccgagcagaagcctgatccatttggatggattattgctgaaaagagtgccctgattgctgcagccaaattgtgcctcaagatggagaaggcacttctcaggtactgtgctagctttctcactcctgacgacaaaaggctgatcctcgggatcaaggaccaggcaaagcaaatgatccaatcagaggtgcttcaagcaatggttcaaatgggtgtccttgttcctactggagatatgactgttgtcagaagaaccgctcaatttttccttaatagctttcaagagtgcctaacagcacaaaggaaggagagagaaatggcaaccgcagaactgggtttcaaaaagcaattaactaaggaggagaagtttgaaaagaggaagcagagacttgctacaatcggagaggatcttttggcgattgctgctgatcaaccatttcgcttccctgccacatttacatttgtggtcagagcattctcaggtgtgtggagagacatgtgtattcctcctatgacgaattcctcaggctccatgaaggtaagcctgtcttaatgggcttgattgttgaacctgacttagtacttttatccatgtcacgacattgaaccagacagtcactcatgtccttaggatattaacggtatacatcaacaattcattctattttaattgcttgcaaaacttttttggcccttcaaatgagttccacgcatcaagaagtcaagattccaggaggcctaaaataggagaggagggcgcagcttgattcaatccatgtcaagtcaaaggctgctgcgaagtttgcacatgcaagtagaatttagatggtgaggttttgtctctgttcccatttttataacgactaggtgtttgaattcctaagattaaagtttatgtagattcttatttgtaattagatctctgttaggcatctaactgaataaatgatctcctaaagaattgacagattccatcactgagcagcccttcgccccggtggctgcggtgtcgcactggctgacacctgctcgcagttgcattacaagttttactgactatgtattttcaggtttattcaatttcggttctaatgcttctgacagcagttgtatcagtcctcttgttcagcttacataataatgtactaaacttcagtttggtgtctatctcagtgtacctacactcagttggaaaacttcaaccacactgcaacaaggtttataaaaggaaaaacaaatttatgggctcaaacaaagtgtgatagtgaaagtcattttgcttccagcttaagaaccaagccaagaaaacagatatcaactgtgacgccacactcaaaagcttgtttggtgggagggacaaggttgggatgctggagatctccaagcttttgagtcgtggcttcccgaaaatctccaagcttttgtggtccatggagccagggatggctctttggtaaaagacttcgttgtggatggcctcttttatggtccatgttaagtcccaagtcccactaggtggttaagcagaaaaatcttgtgatggcattaagactttcagactttgtttttgggtctgatgcatgtaaaaaggattcccagtgtttctgttgctcttgcgatcctgtgaggacacatatgagagaaatatttagtttgttgatggcaaatcttgtcttatgttcatgtctgtgcctatctgatcaagcgttatgatatgatcccatgcgtggtactgtgttctttagagatgtacttaattatgtttctcttgcatttcatattgctttgtctaattgttaccgcaaattaagattttattataattccaatttgatatgcctcatcataaccatggttact

SEQ ID NO: 5139 - DNA, 2690 bp, Zea Mays
ggatctgaaaattttcttcgaaccagttctgagcagtgtagccctcctgtccgctgttcggtgcccgctgcccacctccctctcctccttccgacctcgccgcctccctccctaaactctaaaccctccaccagccgaagctactgccgcggccgcagcagaggtcgcgacgacgaacgctgaagaagcgccggcgagggagagtcctttactttttcctatgctgtagcaaaacaagcctataccatcttccaaatatactcgttccgtgccggcggcctcccctcctacgcccctgtcgattcttcaatcttcaccaacgtctgcgcgtagcaggctagcagtcggcacggcttcctcagatctgccggacgacttgttgttcgtcaccgactcaccagcaaccaatgtcggccatcagccggcagcaggggaagctgggcggagggtcattgcggcacggcgtccaggcgtacagcaggcaccagcaacagcccatggcaaacgccgcagatgaccctatggtagatgaagccggagtagaagatgccttcacacatgagatcaccgattatttgtacgtccctagataccatgtgttgagttggatggaaactgtggaggggatggtggccggtgtggcggcgcttccgccggtgtatttgatactgaacagagatcttcttgagacgggatggggatggaagaggctggtgccctacagacctggttatgttgagtggcatgtgttcaagaaataccttggggactatttcgaccataatcgtgaagcttttctttgtgccgagcagaagcctgatccatttggatggattattgctgaaaagagtgccctgattgctgcagccaaattgtgcctcaagatggagaaggcacttctcaggtactgtgctagctttctcactcctgacgacaaaaggctgatcctcgggatcaaggaccaggcaaagcaaatgatccaatcagaggtgcttcaagcaatggttcaaatgggtgtccttgttcctactggagatatgactgttgtcagaagaaccgctcaatttttccttaatagctttcaagagtgcctaacagcacaaaggaaggagagagaaatggcaaccgcagaactgggtttcaaaaagcaattaactaaggaggagaagtttgaaaagaggaagcagagacttgctacaatcggagaggatcttttggcgattgctgctgatcaaccatttcgcttccctgccacatttacatttgtggtcagagcattctcagttctagatggtactgggaaaggccttcatcctaggtttcatattacagagattgctaagccctgagtactttttgcattactagcatctgaatacttattcaaaaacacacaaagcttgcacatcttcacttattatgtactgtctatattttcatcttgaacttttctggtactgacttgaaatgtctattaaatttgctagaaatgccaaggaattgctaagatttaatgacgctggtgttgaaatagttgtgaaggtgtgtggagagacatgtgtattcctcctatgacgaattcctcaggctccatgaaggtaagcctgtcttaatgggcttgattgttgaacctgacttagtacttttatccatgtcacgacattgaaccagacagtcactcatgtccttaggatattaacggtatacatcaacaattcattctattttaattgcttgcaaaacttttttggcccttcaaatgagttccacgcatcaagaagtcaagattccaggaggcctaaaataggagaggagggcgcagcttgattcaatccatgtcaagtcaaaggctgctgcgaagtttgcacatgcaagtagaatttagatggtttattcaatttcggttctaatgcttctgacagcagttgtatcagtcctcttgttcagcttacataataatgtactaaacttcagtttggtgtctatctcagtgtacctacactcagttggaaaacttcaaccacactgcaacaaggtttataaaaggtttgctatcaggaaaaacaaatttatgggctcaaacaaagtgtgatagtgaaagtcattttgcttccagcttaagaaccaagccaagaaaacagatatcaactgtgacgccacactcaaaagcttgtttggtgggagggacaaggttgggatgctggagatctccaagcttttgagtcgtggcttcccgaaaatctccaagcttttgtggtccatggagccagggatggctctttggtaaaagacttcgttgtggatggcctcttttatggtccatgttaagtcccaagtcccactaggtggttaagcagaaaaatcttgtgatggcattaagactttcagactttgtttttgggtctgatgcatgtaaaaaggattcccagtgtttctgttgctcttgcgatcctgtgaggacacatatgagagaaatatttagtttgttgatggcaaatcttgtcttatgttcatgtctgtgcctatctgatcaagcgttatgatatgatcccatgcgtggtactgtgttctttagagatgtacttaattatgtttctcttgcatttcatattgctttgtctaattgttaccgcaaattaagattttattataattccaatttgatatgcctcatcataaccatggttact

SEQ ID NO: 5140 - DNA, 2705 bp, Zea Mays
gagcctgtccgcgtgtaacacctggcgtaccggatctgaaaattttcttcgaaccagttctgagcagtgtagccctcctgtccgctgttcggtgcccgctgcccacctccctctcctccttccgacctcgccgcctccctccctaaactctaaaccctccaccagccgaagctactgccgcggccgcagcagaggtcgcgacgacgaacgctgaagaagcgccggcgagggagagtcctttactttttcctatgctgtagcaaaacaagcctataccatcttccaaatatactcgttccgtgccggcggcctcccctcctacgcccctgtcgattcttcaatcttcaccaacgtctgcgcgtagcaggctagcagtcggcacggcttcctcagatctgccggacgacttgttgttcgtcaccgactcaccagcaaccaatgtcggccatcagccggcagcaggggaagctgggcggagggtcattgcggcacggcgtccaggcgtacagcaggcaccagcaacagcccatggcaaacgccgcagatgaccctatggtagatgaagccggagtagaagatgccttcacacatgagatcaccgattatttgtacgtccctagataccatgtgttgagttggatggaaactgtggaggggatggtggccggtgtggcggcgcttccgccggtgtatttgatactgaacagagatcttcttgagacgggatggggatggaagaggctggtgccctacagacctggttatgttgagtggcatgtgttcaagaaataccttggggactatttcgaccataatcgtgaagcttttctttgtgccgagcagaagcctgatccatttggatggattattgctgaaaagagtgccctgattgctgcagccaaattgtgcctcaagatggagaaggcacttctcaggtactgtgctagctttctcactcctgacgacaaaaggctgatcctcgggatcaaggaccaggcaaagcaaatgatccaatcagaggtgcttcaagcaatggttcaaatgggtgtccttgttcctactggagatatgactgttgtcagaagaaccgctcaatttttccttaatagctttcaagagtgcctaacagcacaaaggaaggagagagaaatggcaaccgcagaactgggtttcaaaaagcaattaactaaggaggagaagtttgaaaagaggaagcagagacttgctacaatcggagaggatcttttggcgattgctgctgatcaaccatttcgcttccctgccacatttacatttgtggtcagagcattctcaggtgtgtggagagacatgtgtattcctcctatgacgaattcctcaggctccatgaaggtaagcctgtcttaatgggcttgattgttgaacctgacttagtacttttatccatgtcacgacattgaaccagacagtcactcatgtccttaggatattaacggtatacatcaacaattcattctattttaattgcttgcaaaacttttttggcccttcaaatgagttccacgcatcaagaagtcaagattccaggaggcctaaaataggagaggagggcgcagcttgattcaatccatgtcaagtcaaaggctgctgcgaagtttgcacatgcaagtagaatttagatggtgaggttttgtctctgttcccatttttataacgactaggtgtttgaattcctaagattaaagtttatgtagattcttatttgtaattagatctctgttaggcatctaactgaataaatgatctcctaaagaattgacagattccatcactgagcagcccttcgccccggtggctgcggtgtcgcactggctgacacctgctcgcagttgcattacaagttttactgactatgtattttcaggtttattcaatttcggttctaatgcttctgacagcagttgtatcagtcctcttgttcagcttacataataatgtactaaacttcagtttggtgtctatctcagtgtacctacactcagttggaaaacttcaaccacactgcaacaaggtttataaaaggtttgctatcaggaaaaacaaatttatgggctcaaacaaagtgtgatagtgaaagtcattttgcttccagcttaagaaccaagccaagaaaacagatatcaactgtgacgccacactcaaaagcttgtttggtgggagggacaaggttgggatgctggagatctccaagcttttgagtcgtggcttcccgaaaatctccaagcttttgtggtccatggagccagggatggctctttggtaaaagacttcgttgtggatggcctcttttatggtccatgttaagtcccaagtcccactaggtggttaagcagaaaaatcttgtgatggcattaagactttcagactttgtttttgggtctgatgcatgtaaaaaggattcccagtgtttctgttgctcttgcgatcctgtgaggacacatatgagagaaatatttagtttgttgatggcaaatcttgtcttatgttcatgtctgtgcctatctgatcaagcgttatgatatgatcccatgcgtggtactgtgttctttagagatgtacttaattatgtttctcttgcatttcatattgctttgtctaattgttaccgcaaattaagattttattataattccaatttgatatgcctcatcataaccatggttact

SEQ ID NO: 5141 - DNA, 1457 bp, Zea Mays
tggccatctctagcacagcccggccggcgtcgttcatctgtgtttggtagtacggtcgttccgacggtcggatgctcacaagagaaaagagatgctgtgtgcaagctgcagagactggcgtccgacccgatcccactcccacggtcccacctcgcctctcgcgctcctgcccacccagcctgtccgccgtctggtgtccgcctgttccccaaaagcaaagagaggcgcagagccgccgccgttgatctctgacctttccgatccagagcctagctctcaccgtctaccggagctctcaccatggcggtgagctcgcggtttccctcccaacccgcggcgcgtggcctcctgcgccgcaccccgcagcgcatcctccccgtcgagcgcacgccgcgccgcctcgccctggtcgtcaccgccgtctctgggggacctgtacctggcggatcgcccgttcccaggcggccgccaccgccggaggacgccgcgaccgtggcaccgacctcagtgccgtcgtcggccgcctcggccatcgatttcctcaccctgtgtcaccgcctcaagaccaccaaaaggaaaggatggataaaccatagcatcaagggccctgagtccattgctgatcacatgtaccgaatggccttgatggctctgattgctggtgatctgcctgctgtggatcgagaaagctattgttggtgacattaccccatcggatggtatacctaaggctgaaaaaagccggcgcgaacaagcagcactagatgaaatgtgccaagttcttggtggtgggccagctgctgatgagattaaagagttgtgggaagaatatgagaacaattcttctattgaagccaatcttgtaaaagattttgataaagtggaaatgattcttcaggcattggaatatgagaaagaacatggcaaagtgctagatgagttctttctctccactgccggcaagttccagacagagatcggtaagagctgggccgctgaagtaaactcgaggagaaaggagggatgcggaaagcaggagccttcatcaaacttccacggaaacgtgttgtgatggggacggtgtggccaactagagcctggcaagtttaagtggccctggagccaacttcagcggtgggctgatggcagttcaccgattgacacggctgttcagccttcctaaataataacaggagggttatggagtgaacactagattttagtctggttagctgaaatgttcgtagttgctcgaagaccaaggggtaggtaaaactgtgtagtgtttcgttgtagcctggaatccagcgaggatgagatacttcttcttttttcaactccgtgaataatgaaagggcaatggtgtttgcccttctcatcttccctgcccatttttattgggcaaaatctatgcacacagttacttagggcctgtttggaagcaccggtttttaaaa

SEQ ID NO: 5142 - DNA, 2386 bp, Zea Mays
tttgcggcctgcggcgggcgcgacggctgttggatcccgtgccgccgcctcgcctcgcccgttctcggtacgccagcgaccccgtcactgtagctgcgtgcctgcgcggccctgcgcttgcttcgccctcgcttcgctccaaacgatagagctggggcaggctgagcgaccgcgagcttgacccgggcgcacgtcggctcgcactgtcgcacccagccatgtcggcgcctggattcgatgacccccagcttccgccgctgcggctgcgcgcctcgtgcggcggcagcggcggcgtgatcgccagcccacgctcctgctcctcctctgataccttcgtcagcatgcgttccacgccctcagcctcaggtatgccgaatctgtgcggcgggctacggtctccacctcgcacgccgtcggaggcgtcttcgtcggagatggagttcgggacggcccgcgagtacgacaccactgatccgttcttcagtgactactggctgtacgacaaccacctgttccacagcaagctagagagcgacggcagcgaaggggaggacaagttcgttgttggtcctgacgtcagcttgcagcggagtgaggtgcgggagcttggcgacggatgcggtcgcgggcacgtacgtacagaccgcaatgcggactctgatgggtgcacagatgcgaatgcttgctcgtcgccaccttgcggttgctgctataatgaggagttggtggtgagagattcttgctccgctgtttatgggaggtgtcagatcatggaggaccacgcggaggggcttgatgagtgcgttgcagaagcgttccggttcagactgaatgcgtttgttgatgctggcgaccagtcagtggcttccaagaaaggacaggacgactggctggatcttactgttctggagaaggaacttcaaatgcttactccgcacttggctgatgcagatgctcttgagaatactggacttgaagatgacttgagagggaatatcaacctagatgtctgtatggtaacaaacgagaaaaatgctgatggcaaagaatttctaaaagatacttactgcatacattctttacctgagagtgcaatcccttttgatgtttatggtgtggaagacttcaaggagtatgaggtatttgacctgaaaattttccaccggaagagcaggacaggctttgaggaaaacaaagaattcgctattgtcatggattcagttgtagctggaagatatcgtatcactgagtatcttggttctgctgcattcagcaaggttgtccgggcacacgacctccacactggagttgatgtatgccttaaaataataaaaaatgacaaggatttctttgaccagagtttggatgagataaagctcctcaagtttgtcaataaatatgatccagatgatgatcatcatatactgcgtctctatgattatttttattatcaggaacatctcttcattgtcactgaattactacgtgcaaacctttatgagtttcagaaatataatcagcagtctggtgatgaggtgtacttttcactgcccagaatacaggctatagctcaacaatgtttggaggctttggtgtacttgcatcatctaaacatagttcactgtgatctgaaaccagagaatatccttctgaagagctacagcagatgtgaaatcaaagtcattgatcttggaagcagctgcttcttgtcagacaacttaaacttatatgttcagtcacgttcttatcgatctcctgaggtcatcctgggtttgccatatgatcagaaaattgacatttggtctcttggctgcatcttagctgaactgtacactggggaagtgctctttcctaatgaatcagtaccaatcattcttgctcgtatgattgggacaattggtccaattgatatggaaatgcttgcctcaggacaggagacccagaagtacttcacagatgactatgaccttttccacaaggacgaggaaacgggtcagttggagtatttgatcccagagaaatcctctttgcggcgccacttgcagtgtccggacaagaaatttgttgaatttctgtcttacctgctgcaaataaatcccagaaacagaccaacggctagcgaagcattgcaacaccgatggctttcgttcaaatatagtccaacggccaatcaaactcgttactgacaagtaggcttcactttctgaagctattggcccttgaaacaacatgtttcattgtaatactcaagttgtataccaagaataataaagagagctcctcattttgtgtgtcttatttgcatcataaaaagagcacctatgtaatggagagtgactaaataaaacaattattctaaaataaagaaaaagtgcatttgttggag

SEQ ID NO: 5143 - DNA, 2390 bp, Zea Mays
ttggatcccgtgccgccgcctcgcctcgcccgttctcggtacgccagcgaccccgtcactgtagctgcgtgcctgcgcggccctgcgcttgcttcgccctcgcttcgctccaaacgatagagctggggcaggctgagcgaccgcgagcttgacccgggcgcacgtcggctcgcactgtcgcacccagccatgtcggcgcctggattcgatgacccccagcttccgccgctgcggctgcgcgcctcgtgcggcggcagcggcggcgtgatcgccagcccacgctcctgctcctcctctgataccttcgtcagcatgcgttccacgccctcagcctcaggtatgccgaatctgtgcggcgggctacggtctccacctcgcacgccgtcggaggcgtcttcgtcggagatggagttcgggacggcccgcgagtacgacaccactgatccgttcttcagtgactactggctgtacgacaaccacctgttccacagcaagctagagagcgacggcagcgaaggggaggacaagttcgttgttggtcctgacgtcagcttgcagcggagtgaggtgcgggagcttggcgacggatgcggtcgcgggcacgtacgtacagaccgcaatgcggactctgatgggtgcacagatgcgaatgcttgctcgtcgccaccttgcggttgctgctataatgaggagttggtggtgagagattcttgctccgctgtttatgggaggtgtcagatcatggaggaccacgcggaggggcttgatgagtgcgttgcagaagcgttccggttcagactgaatgcgtttgttgatgctggcgaccagtcagtggcttccaagaaaggacaggacgactggctggatcttactgttctggagaaggaacttcaaatgcttactccgcacttggctgatgcagatgctcttgagaatactggacttgaagatgacttgagagggaatatcaacctagatgtctgtatggtaacaaacgagaaaaatgctgatggcaaagaatttctaaaagatacttactgcatacattctttacctgagagtgcaatcccttttgatgtttatggtgtggaagacttcaaggtagaagatacatatgttcaaaaccctactactcacaaatttcaggaagatccaaaaactgatcctgcagtctctaagtttcagcaggagtatgaggtatttgacctgaaaattttccaccggaagagcaggacaggctttgaggaaaacaaagaattcgctattgtcatggattcagttgtagctggaagatatcgtatcactgagtatcttggttctgctgcattcagcaaggttgtccgggcacacgacctccacactggagttgatgtatgccttaaaataataaaaaatgacaaggatttctttgaccagagtttggatgagataaagctcctcaagtttgtcaataaatatgatccagatgatgatcatcatatactgcgtctctatgattatttttattatcagaaatataatcagcagtctggtgatgaggtgtacttttcactgcccagaatacaggctatagctcaacaatgtttggaggctttggtgtacttgcatcatctaaacatagttcactgtgatctgaaaccagagaatatccttctgaagagctacagcagatgtgaaatcaaagtcattgatcttggaagcagctgcttcttgtcagacaacttaaacttatatgttcagtcacgttcttatcgatctcctgaggtcatcctgggtttgccatatgatcagaaaattgacatttggtctcttggctgcatcttagctgaactgtacactggggaagtgctctttcctaatgaatcagtaccaatcattcttgctcgtatgattgggacaattggtccaattgatatggaaatgcttgcctcaggacaggagacccagaagtacttcacagatgactatgaccttttccacaaggacgaggaaacgggtcagttggagtatttgatcccagagaaatcctctttgcggcgccacttgcagtgtccggacaagaaatttgttgaatttctgtcttacctgctgcaaataaatcccagaaacagaccaacggctagcgaagcattgcaacaccgatggctttcgttcaaatatagtccaacggccaatcaaactcgttactgacaagtaggcttcactttctgaagctattggcccttgaaacaacatgtttcattgtaatactcaagttgtataccaagaataataaagagagctcctcattttgtgtgtcttatttgcatcataaaaagagcacctatgtaatggagagtgactaaataaaacaattattctaaaataaagaaaaagtgcatttgttggag

SEQ ID NO: 5144 - DNA, 1771 bp, Zea Mays
ctgcttatctctcttctgcgcttctgtatgcctgtttgtttttggtgggtgcaaatccccaaatccgatttggctccccgcattgcgcacaagtgccgccgctgctcccactgccgccgcataagcctgagtttccttggccatattttttctgcaacaaagatgggatggtgatgcgtgagcggatcttcagcgagagagtaaagatcgagtgctacaaacctgcaaggccgaggcaggcttagtttcagagaaaattggtcgcggaggcctcatcatgctctcgttctgttgtggcctgtggcgatgccctgtcctccttggccggttccaagcttgtggcctggggagcccattcgtctttcacttgatatgaaggacggaagaaatagagctcccgttcgtttctttctttaagaaactcaccatattcttgcctcgttatgtgggtatctttcagagtcattctctctggagtctggccaagtttgttctgggacgtatttgatctcttctcaactgtagcaggattctgatttttctgttggaggaatgtcctcaaccacatctattcagccctcagcatcttcaggtggtgcatctacttcagctgatgagaatgcaaggcctcctgattcagcacgaagcatattgtctctacagttggaccagcggtcattacatttttctgttagtgcttgggttcttattgttgccttgattggcatctttccattggcaccacattcccttcagtataagggatatcggttgtcacttcttggcacaacatgtactacaggctatgctttgtttgctttgtacaggctaccccgagcagggaacatgcaggctgttcaggtgtggtgtcaccatgtaactgcatcaaaggattttataccattcatgtactgccttatgttttctacatccaaactgcacttgaagcttgttttggtacctgtaatttgttgggcacttgaacatgtcgctcgatttctacgtcgccattttactagctcatctttgtacaggacatacttggagcaaccttgtacatgggttgagacaaacacaaatgcagtccagtttctacgttcaaatgcagagattttgacgggctttcttttgatcctatccctgttctcgcgacagcgaaatcttatgcaaacattcatgtattggcagttgctgaagctcatgtaccattctcccttcactgccgcttatcatagagctatctggctaaaaattgggcggacaattaacccttatatccaccgttacaccccttttcttcatgacccgataaatgctggcatgagatggtggtttaggtaggttgaatgcagcactgtcagtcatgtaaagagatgcaagtatgtttatggtattattttactccaaagagaatctttgagaaaactgctgcttgggagtggtgtgattagtcccttgtgtggctttgagctgatgacaatttagtagttagcatgatcagtaactcttaactcttgtaggcttgtagctagagctagtcgagatcttagcctgtttggcatgaactgaagttaggtggggaggttattattgtgaccgaattgttttgatttttctgactattggctattgctgaccacatatcagtgttatcaaagggacgttactattctacgtgttatatggttcacccattgcacagtcttagtcgaagtgtacaaaaagcaacattatcctgttttactaaaatgaatctgttgacacctttttg

SEQ ID NO: 5145 - DNA, 2276 bp, Zea Mays
ataaatgcgcccccacttgtcccttttccctcctcctcctgactcctccagctcctctcgtacaccacgtccctctctgggctgtggtggctcccaagcacacggcccgcacgagcagttggaacagattcctcgaccgcgtcgccccggaacccagttcttggcatccggtgcctagcttcgtcgcccctccggcaaggaccacctccagccctccacctcgcgaggttgcacttgctgctagtgagctagtatatttctgaaaccggaaacccgcgacacgggaccgagttcttgggagcggattcggctcgctgcagcaggctgaggctaccggcccgctcttctccacggcggcggagagccagccagtagttgcgactggaggcgggcatgggcgcgggcgcgtcgggcctggcgggcgcggagcccggcggcaaggtggcgcgcggcgccgggctgggcgacctcccggagctgtgcaccgcggaggtgctgctccgcctcggcgcgccggacatatgccggctcgcgcggctcaacctagcgttccgcggcgccgcgggcgcggacttcgtgtgggaggccaagctgccggggaactacgcccggctcctgcgcttcgtggacgaggccgaggaggagggagggagtgggcgggattggagcgcggtggggaggaaggacgtctttgcgaggctcgccagacctgtgccgttcgacggtggcaaaagggaattctggctggagaagaacgaaggtgggatctgcatggccttgtcgtcgaaagcgctggtcattactgggattgacgatagaagatactggattaacatgccaacatctgaatctaggtaaattaatatgaactcacttcttttcctcccgttttgttcgacttctaccatattgaaatttcactccctcttcgtttttttacgaacagttagctagggctgtatcgtgtttattgtcggagccatgctcaaagctcaatagtgcgtgtatatgaccatcgtagtgacgtggtgagacatggagtgagggccgtaggggtgagagagaggaaggctaccggtgagtgacacagtaatgaatgccttgttgcgacagttgagaatagcgaaagcaataaaagtgaaaccttttattctcttttacgattgacttgataaaaaattaaattcggaaatgaactttatgctagccgctacactggtgaggtaagcatggacgccagcaaaaattgacaggagatataattggtagagaacagcaccatgtgtgggtctgaaattttcaacagctcagtatatatatctccttcatttccctatgaagtcgtgatttttcagcaccatctgactctgaccaccggatttttatgggcaaataaattgttttcttttggacaaaaggcacagataaattccggaattacctgtgcgttggaataccagtccatcgtggcggcacctaagaaacacgttccactccactgcatacctgcagcaaatctggtggttcgaggtggtgggagaggtggacttctgcttcccggcggggacggcctacagcctctacttcaggctccacctcggcaagtcctccacgcgcttcggccgccgggtctgcagctcggagcaggtccacggctgggacaagaagcccgtgcggttccagctctccacgtcggacggccagcacgccgtgtcccagtgctacctggacgagcctggacgctggatcctgtaccacgtcggcgatttcgacgcgccgccgagctctggtcagccgaccaggctcaagttttcgttagcgcagatcgactgcacccacacgaaaggtggcctctgtgtcgattcggtgctcgtgtatcccaaggggtttcagccggaacgggtggtcagggctcggaaatgaccgtgtgtgggcatttggtagctatagaggcactgcgcattagagcgagctgtcgagagatatgagtagcctgccatttttttttagcttgggctaattgtattctgaaagcgtttatacatagcatagtagcacactggactttttttttgtttgatagcattagtgtgtgcgcgttactttgccatttctcatgaaggccatggcaaataaggaacctttgtacgtgtacctagctccggtacatcgcgtttgcatcggcacacaatgaagccaggaaggtctcctgttttatttccaaacaaaaactgggtcgtttttttttcgtgacctaccaaacatcgaggcacgag

SEQ ID NO: 5146 - DNA, 2096 bp, Zea Mays
tgtcggcggtgaaggcccatctgttttgctggcccacatcgtgcggcagccctggctggtcttccgtcttcctcgaaaccctgacgcggccgccacgccatgctcgccgcaagtcccctgcgccaagtgccgccgccgggcatcccatccacctcccgtcctactccctgaaggcatgaacccccgttccaagcgccctataccgccgccatctcccgttcccctttcctttgttctctttcgtctgctgggcaaaccaacgccgccagccactggtcgatcacttccagccaaggagtggcggacgcgcagggcttggagtgtggcggacaggcggatcctgtagcggcagagacaggtacggacgagagaggtgagttctccgcacgatcggctgggacaggggaacgacgcgcgcaactgtgtggcctgggggggcattaaacgcttaaacggcgatcaatcgtcgcttaatcgattgctgtcgggtactcctggcactcagaagaggttgaactaagatagggatattcaatgacgggtggatcgggtgtggtggtgatagacaatgggggtggtcttctcaaggctggctttgggggggacaatgatccaattgctgttgtccccaactgtatggccaaaccccctggtggcaatgccagctcgaagaaatggcttgtggctgaccagctgcaggcagaagatgtcgatgtgactggcatgactttgaagcgtcctattgaccgtggctatcttatcaataccgaggtgcagagggatgtgtgggaacgggttttgcgcaatcttctccaggttgatcctactaactcgtccttgttactggtggaacccatgtttaaccctccagcgatacagcatgcaactgatgagctagtgttcgaggagtttggcttcaactcgctttatgttgcagatggtccttcccttgtccacctttatgaggctagccgacaaccaatgatgtttcgtgcccaatgcagccttgttgttgactgtggcttctctttcacccatgcatcccctgtacttcagaactttactcttaattatggtgttcggcgtatggaccttggcggcaaggcccttacaaactatctcaaggagctcgtctcataccgttcccttaatgttatggatgaaactctcctcattgatgatgcaaaggaaaagctatgttttgtctcgcttgatgtccctggtgatctacaccttgccagatgttcttatattctccctgatggtataacatacaagaaagggtttgtcaaggatatggatgaagcacttagatatcgcaccctgcctcaagtatcagatagcaaagaccatggtatggatacaaataagtccgaggatcggaaaaaggcagaattaagtcaaaatgaatttgtcttgacaaacgagaggttccttgtcccagagatgctttttcatcccattgatcttggcataaatcaagctgggcttgctgagtgtatagttcgtgctgtacaagcttgccatccatatcttcaacctgtgctttttgagagcatcatcttgacaggtggaagcacactgttccccagattcaccgaaagattggagagggaacttcggcctcttgtccctgacgactacaaggttaagataactcgtcaagagaacccaatttttggtgtctggagaggcggatctattctagcatcaagtcctgatttcgaatcaatgtgcataacgaagtctgagtacgaggagatgggatcagcacggtgccgacgaaggttttttcactgaacagaatactgagtttttggcgaagtagcttcagtgtaggtcaatcgcttaggagaagcgagtcttgtttgtaaatactggtgttgcatgtatttagtccagatgtttgacagtttggtggtatatgaattagaagtccggttaacagtaatcatttttactctgatttgacaactgtagctcgtgagattgaaatggcaaggtggttgaccggacccttgcgtatgacagtggctcgaaaattgaaatgcatgggcccttgtttggttttatgtgatccgaaagcgattgaggag

SEQ ID NO: 5147 - DNA, 882 bp, Zea Mays
caatgatacgctttggaacatcaacaaagaactcgcatttcattaggaactaagcggttggcttcagaggacctggccaatgactgggataataaaaggctaaatccaggaaatgacaattatccactttcaacaggagctgcaaataatttatttttgggtattgagcaaggagctggaagcagcaatggccagtctgcctttcccaagtttgacaatgggagctcagtggcattaccatctgggcagggaatgtctggtcttatgggaaaaggggcaaaatggcgtgacggggactggttgtgcaacaactgcaacaatcacaactatgcatctcgtgcgttttgcaacaggtgcaaaactcagaaagaatctgcagttcaccctggtgtgttatagcttgctgttggattattttgttccaggatatgttgctgcctgttctagctccttcctcaaggctgcggtttgagttttttcgattctgcagtgtttttgctgctctaaaatgtttgtctcgatatttcattagtgcttgttgaagttccccatttgtttatggtataagcgcttgaataaaatgtttctggaaagtaccggcctacaatctggattttggcaaaataattgaattagttgttgtacaatgaggcaaattgtcttacgttgtacttgatgaactctggagtattatcactcgtcgggttgaaaaggggaactatacaatgtaatttcagtacagattattattttttcctgagaactccagttgtgctgttatgcgagttttgcccattcagaatacttttgatgcattcatcagaattcggctgttactttttcatcttttatgcccctttgcatctattaaattgcccttaa

SEQ ID NO: 5148 - DNA, 1629 bp, Zea Mays
cttctctcctccccaaaatcaatccctcgcccacaaaggagagccagccaaaccttccacctcctccatttccagccccgtccccacaccagctcgcgtaacctcctccccatggctggaggcggcggcgcaggcgcgggctcgtcgtccggcggcggcggagggggcggcagggagggcgactgggactgcggcagctgcggcaaccgcaactacgccttccgctcgctttgcaaccgctgcaagcatccgcgcctcctcgtcgaccccaacaccccgcgcgactccaagtggctaccccgcgccggggactggatctgcaccgcagcaactacttgcaaatgcaaactggccctatgggatggctggtagatatgggatgcaatcttctggttggccatttggcaacggcaacccaaatcagtttttaggtgttccaaaggattggcgtaatggagattggttctgcagctgtggatctcataactattcatctcgtactcagtgcaaagagtgtggtgcacctgtaccatcgagcattccctccacaacaatgaaagctacatctgatgcctcttccactcacaggcgtcctggctacagcctcagctagttggggcaaaccatctagaagaccatcctcaaattgaccttctggatggtttgcggcgcggaggccggctgcggggttccggggcagcgcgtctcgcggaggtgcgtagacgacggcggagcggcgtcctcacctccatggcgtcgctgtcgagcaagcaccacgtcctaatccaggtgctgctcgcccgcggcccgctctctgagcgcgacttccacgctttcatcgatggcgcctttggcaagaacaccgcattaggaactaagcggttggcttcagaggacctggccaatgactgggataataaaaggctaaatccaggaaatgacaattatccactttcaacaggagctgcaaataatttatttttgggtattgagcaaggagctggaagcagcaatggccagtctgcctttcccaagtttgacaatgggagctcagtggcattaccatctgggcagggaatgtctggtcttatgggaaaagggtgcaaaactcagaaagaatctgcagttcaccctggtgtgttatagcttgctgttggattattttgttccaggatatgttgctgcctgttctagctccttcctcaaggctgcggtttgagttttttcgattctgcagtgtttttgctgctctaaaatgtttgtctcgatatttcattagtgcttgttgaagttccccatttgtttatggtataagcgcttgaataaaatgtttctggaaagtaccggcctacaatctggattttggcaaaataattgaattagttgttgtacaatgaggcaaattgtcttacgttgtacttgatgaactctggagtattatcactcgtcgggttgaaaaggggaactatacaatgtaatttcagtacagattattattttttcctgagaactccagttgtgctgttatgcgagttttgcccattcagaatacttttgatgcattcatcagaattcggctgttactttttcatcttttatgcccctttgcatctattaaattgcccttaa

SEQ ID NO: 5149 - DNA, 2198 bp, Zea Mays
acccgagttttggttacccattgtcatggatgttcatgggcacacggccaccacaccgcggcgcgtggccagcgcagcgaatccatccccatcctcatgattataaataaataataattttacacgcccccttctctctcgatttctcgcggagcggccctccacctttatcgccgccgccgccgttgctgtgttccgtctcttcgccgatggcttcggccaagttcggtgctgcccagcaggtggagaaccgaggcgcgctgtccaaaaggtcacgtaacgacggtgaggcacttccccactctgatctgttgttcgctcgcttgttagaccgggagttagggtttagtcaagttgcaaacgggagatcttctcgtgcaggatttgctcttttttgtttaggaattagcgattgatcaatcgcaaggccagctgaggcataattgagagacaggagcggctctaatagatgccattaggagaatgtgcgctaaagctgacataggttcaccagagtcttttgtaaggagttcgtctcctttgtaaggagacaatgagttcggggaaatcgactatgtttcactcttctactgaattgttgttgtttttttgttagctttaggcacttcatggtggcagtgggtcgtcgttaccattttagggcttgttcggttagctctcaatccatatggattgagtgggattgggtgggtttaaattccaactaagtcaaactctttcttaattttttccaatctcatccaatccataggtaacgggattaaccgaacaaggccttagtctatccgagtcctcatggataacaatttttagttctataaggggatatttcatactaccatgccttttatctaatttgattctgattagtaccttgttagttacactcgtggttaatcttatgcctgtctaaagtacttgctggagtttgagaggccgtcacgtgaaggcggaaggatgattttgtaaagctatgtgacacaataaaatagcttctttctttgtgcagagttcatggatgtataatgtattcattgaactccctgggttaaatgtattatactgtcttcttttcccaccccttttgaagggaaactaattacagccttgttttgcctgagtcttgttggttaagaaaaagttctactattttcagtgtctgtaagggagggggactggaattgtcctcagtgtggtaatgtcaacttcagttttagaaatgtttgcaaccgtggagcctgtggtgcaccccgtccatcaccgagtccaagtccaagaatgatgtcaggacctcctgcttctggatatgaccggtcacctctattttacggaggaggtggtggcgccccacctccaattccgcttggaactggtagctatggtgctccatatccacaccttgggatgcgatatggctatggtccaccagtaggacctcctggttcatacggtcttttctcttcatatggtccacctgggccaatgagtggtatgggatatggcccaggacctgagctaggccgatatagctatgggtttagaggttctccaatgccggtttctagtccatggtctggtggagcattagctgaaaacaatgacaacattgcttcacgaaagcgccgtggaggccctgatggactttctgagggtgactggacctgtcccaaatgcgacaacattaacttttccttcagaagcacttgcaacatgaagaaatgtggagccccgaggccaactccgggaggtaacacgagctcatctcgcaaggacaacagcaataaggaagcccctgaaggaagctggacctgcccagagtgcaacaacctgaactacccattccgcacggtgtgtaacaggaaaggatgctcgtacagcaagccagccccggcgaacaactgaacccaaccttcgcgcatcgtcgagatattgttgtacccgtagattgtatcctagtcgtgtgcaatctttgaactgcacaaagatgtttgtgcctggagacgagagattcgattcgttacgcttaatttactattatacttttttattaaatgatgaaaactagggaagagcattatatctataaactcttagtagtctgctatacacagcaattgacatcaattgttgcagctctcgagacattaatccttgaaccacgcaacatgttctcaaac

SEQ ID NO: 5150 - DNA, 2212 bp, Zea Mays
gctttgtcaccggcccctccctcacctaccaggatgaacctgctgacgtcgacctctgtcaccattcccgcccatgctcaactcccctagagaccggtcccacgcgccggcggagccctgcttttttcgtcgtcgctctcccagcgagccgtgcccgtctgctcctcctctctccctccatgctcctcgctgcgctctcttccccgcacacttatctttccagctcagtgtccgtccctctcctcgacacgcacatcttccattgctcgcttgcttcctcgtgtcgtctagctctatccgattccaacacagctacctataaatacatctctctctctctctctctccccgagcagagctaggcagagggcagaccattggcgagaggattgttggagctcggccgagcagagcacgcacagtgtgattgtgtgtgtgtgtgtctgacatggcgtcgctctggctagcgagagcgtcgtcccagctggcgcgccgtgccgccgccaggaggcctcctccgcgtcctgcgcgccacggctccggccaacccaccagttcgtggttcttgggctcggtgccgcaggcggcccttgggtcaccagcgctggacacaagccgccggggcttctgctccgtccggcgcttcgcaggggagagcagcgctgctgctgctgcggcggctgtcgtcgacgaggagccggagagcgggttcgcagccggcgatcagcaggcagttgactttccaggagggaaagtatcctttgtggccgaaatgaacttccttccagaatcgacgagggaaaggatcaactgctaccgcgtgcttgacgacgacggcagaacgatatcaggaagtagattccaagaggtcagtcgggagctggctctgaagatgtacagcgagatggtgacgctccagatcatggataccatcttctacgaggctcagaggcagggcaggatctcgttctacctcacttccaacggcgaggaagcgatcaacatagcctctgctgctgcgctcagtatggatgacattgtgctgcctcagtacagggaacctggtgttcttctatggcgtggcttcactctgcaggagtttgcaaaccagtgctttgggaacaagctggactatggtaaagggaggcagatgcccattcactatgggtcgaaccgtctgaactatttcacagtctcgtcacctatcgcaacacagctccctcatgctgttggagctgcctactctctgaagatggacaagaaggacgcgtgtgccatcacatactttggggacggtgggacaaggagacttccatgcagcgctcaacttcgcggctgttatggaggcaccggtgatcttcttctgccgcaacaatggctgggccatcagcactccgactactgaacaattcagaagtgatggagttgtcatccgtggccaggcttatgggatccgtggcatccgagtagatggcaatgatgctcttgctgtgtacagcgcaatccatgctgcccgagaaatggctgtaactgaaggaagaccaattttagttgaggcactgacttaccgagtcggccatcactcgacatccgatgattcgaccaagtacaggccagttgatgagattgagcattggcgaacagcgagggatccgatttccagatacagaaaatgggttcagggtaatgactggtggtctgatgctgaagaatctgagctcaggagcagagtgagaaaagagcttctccaagccatccaggttgcagaaagaatgccaaaaccaccagttactgagcttttcactgatgtttacgacaagatcccttccaacctgcatgaacaagagcaattgctgcgggatacaatcatgaggcaccctgcagactacccaactgatgtacccgtttagttttcttggccttagatgagcagtatcgttgtgtaattattgatgagtcaggtccatagcattttgaataatacagtgattcagccagtgaactgctgattcaacacgttcttaaacaataattcaacctggcagattgccctgttgctggcactcgtgagccatgctaagatatttcattgcctgcacagcgtaccttataataataatagctactgaagctgcatataaaatatagtaaccagactggcagagatcatttcaaatgattccctattctaagtaacttaaatgccctccag

SEQ ID NO: 5151 - DNA, 3525 bp, Zea Mays
ttcacaggctgcacagcacacaaaccccgcgtaggggtagagatcacctcacccctcccgactccggcgcatccattcggtcgctgccggatgcgtgcttgacccggccatggatgactctgtccctttcaatgacctcggtccctccaagcccccgtcggcctctttctacgacgatatgttcgagtcctacttcaatcgcgcggccgaggcccccgagcccgcgcctaaggcttcttcctcgccgtcgacgccgccgcccgtgttcgacaagccagtcttcgacgacgatccttacacggccgatccattcgacgcgatccccttgtttggaggcggtggtggaggggaagaggaagacttgcacggtggcgtccggagtgcggcaaagccggagaggacggagttggaggtggtgggttttgatgaagatttgttccctgggttggctgggagcaccaattttcccatggagaagccggccagggaggtggagcgggaccgtcaaccagtggggttcgacgacgagttgatccctggattcgatggaagcatgaagccagcgccgcaaatggagcctgagacagtggcgtttgatgatgatgtgatccctgactgcagtggaggcacgagctatccctcttcggcaagggaggaacctataacgagacaagaaagtgaatcaatttcctctagcaaaattagcatgagcatgccagaagatcctttcgttactttaggtggtacacacaaatcgggatattcatctttagggttgttttcaaatcttctgaataacattggcatgcctagaaaggaagcggacacaacgcctgataataccagtgggatatttcagggttctgatatctttactgagtttccaaaagccatgccacccttttcgtttacatctgaaaaccagagtgatagaactgaaaggagatatactgaaaacataatcagcacgagtcactccgatcggctgcctcaggagaagacagtccaacaagcatcaacagaagcacctgccaatacattgactgagatgaacttccctgaagcatctgttgtccatgaagtacctgttaccactagttttcagacattgaacccatttgttgaggaagacgatttgttagaggtgaatcaatcttcacaaacgactaatgatgtgtggctaactgttttagatattgctttagtgacactacctacaagtgcgccacctccttcaaggcctccacctccacttgctgctaagaaaccacctactgaatctgtaactagtgaagcatatgcccatcattgtaatcaacgctaccatcactccatatgttcttcaaacacctctaaaacatcccaaattgatgaattggaagattttttcttgacaaagcctgcaaattctgccattggtcatccacaagttctaaagcatgaaggaaatgggcattatccatctgcagctactgcaagtttcatggactggactgagatgggacactgtaaaagggggaaccaaggggcatttgattctatgttcactagcagtcaatatcgacagccagaaatagatgagaaagcagaggtatgtgctcatgaaacagaaagtacagatgaagaaaagagattagagaatgaacaaatacaaagagaacataaagaagagcaaataagagcagaaagggagatggaagaagagcttgagagggaaagagaaaatgtgagacaaagggaacaagaggagcagaggaggcgtgaaaaagaaagagtggccaggcaggctgtagataaggctatacgggaggcacgcgaaagatcagctgctgaagcacgcatgcaagctgagaaggaggctcgtcaaagagcagagcgagctgcagtatggaaagcagcaacagaagctcgtgagagagctgcagtggaggcaaaggaaagagctgcgaaggctgctgcagaagctaaggaaagagaagcagcagaggctagagaaagggctgcaacagaatcaagggaaagggatgccaaagttgccgcagatgcaagggaaagagctgctagggctgctgctgaagctagggaaaaggaaacagcagaatttcaggagaaagctactgcagaagctcgggcaaaggctgagcgagctgctgttgagaaagctgcagcagaagcacggtggagggctgaaagagcagctttcgagagggttgctactgaagttaagcaaagggcttttaatgatgctagagaaagggctgccgctgcagctgcagctgaagcactggcaagagaaaatcagcaaaggagagcaacaacagaacctgaccttgagtcattctttggcatgccttctcgatcaagtagtctaccgagatcatacaacaacacaacaacgaatcctttcgatgttcaacctggcaatgctggttctggtggtgtaaggaggacaccttctggttcaggttttccctttactcagccttcatcaagcaatcttatggatggcctatcttctatatttggagcacctttaccatctgctgtatttcaagaagtggatggagagagtgaagagagaaggaaggcaagattggaacgacaccaaagaacaatggagcgtgcggcaaaagctcttgctgagaagaatgagcgtgacttgcaagctcagcaggagcaagaagagcgacatagaattggtgaatcacttgattttgagataaagaggtgggctgctggcaaagaaggcaacctacgggccttgctaacaacgttgcaatatattctttggcctgaatgtggctggcgacctgtatcattgactgatctgattacagcagcatctgtcaagaaagaatacaggaaagcaacattgtgtatccatcctgataaggtgcagcagaagggtgcaaatcttcaacagaaatacattgcagaaaaggtatttgaccttctgaaggaagcctggaaaaaattcaactcagaagaactcttctaacaacttgtttaggaaaatgttgatcgcaaaacaagtattgggaaggacaggtaggcaagctacggtagatatttttattcatttctatatttagttatatagtgtttttcttatttccttgtttccgatttcttgctcgctctattcattggcatatgcacccttattttgtgtcatgtaacgttgtatatatatatctttccgtgtgcagtgtaagtaaacttgtgctcactcctttctttttcatttgccgtgttttagttaaaaaatgaactagcggacggcaaatattcgataacggaggtagtactcacagaaaaacaaagtttgggagcaatgggaatgaaattgattggatgggctaaaaccctgcattccatggctcccaaacaagtcctaaaagttgcattttttactagcattatcgcatggatgtcttgactccattggctaaatgaattttatctagaaatggttaaatggatatcaattctgtagcatttggcaaagcatcactcaatgcaatc

SEQ ID NO: 5152 - DNA, 2234 bp, Zea Mays
gtagcccccttcaatatctgttcccagtatcccccttcaaatctttgatgggggttgtgaatcatgatcctctaataaccataccctggaaggctggaacaaatttcgttccaaaagggacataatcagagaaggccagttaagggggcagtgagaagggatggcgatggagttggccaagcaattgctcgtcgctgttctcagaagctatgcaccacctctctgggctacaatcattgccagtgtttttgttatcatctccgtctcactgtccctgtacttgctactcaatcatctgtcagcctacaaaaacccagaggaacagaagtttcttgtcggcgtcatcctcatggtgccatgctatgcagtcgagtcggtggtgaagataggacaattgaatttttgaaaagggaaggtggttcaggttctgctgtaccactcttaggccaagcatctgaacaacgatatgtaaaccatccatttccaatgaactacatgcttaaaccatggccgctaggcgaatggttttacttggtcatcaaatttgggctagttcaatatatgataataaaatcaatatgtgctattcttgcggtgattcttgaatcctttggagtgtactgtgaaggagagtttaagttgaactgtgggtactcttacacggctgtggttctcaatttcagtcagtcatgggccttatactgtctcgttcagttctatgctgtgataaaggatgagttagctcatataaagcctcttgcaaagtttctgacattcaagtctattgtgttcttaacatggtggcaaggtatagcaattgcactgctcttcaactggggttcgttgagaggccctattgctcaagaattgcagttcaagtcaagtatccaagactttattatctgcatagagatgggtgttgctgccgttgcccacctgtatgtcttccctgcgaagccatacgagctaattggtgattgttttgttggagatgtttcagttcttggagattatgcttctgtcgactgccctctagaccccgatgaagtcaaggatagtgagcgcccaaccaagtttaggctcccccagccagatgatcatgttaggtgttccactgccataaaagaaagcgtccgtgatgtcgtacttgggggcggtgaatacattgtgaatgacttgaagtttaccgtgaaccatgctgtggaacccatcaatgaaaagctgcacatgatatccgagaacatcaaaaagcgtgagaagggaaagaggaaaacgaatgatgatagctgcatcagttcaccaacatccttgaccagggtcatcagtgggattgatgatccgctcctgaacggaagcttgagtgacaacagcggtccaaagaaagcacggaggcagcgcaggaaatcaggctatgcaagcgcagagagcggtggggagagcagcgaccatggcctaggcgggtttgagatccgagggaacagatggattactagggagtgacagctaggagcaatctgtggagatactatgtaaatgtcacaggagttggcctgtggtgatgtgcgataaccgggccagtgggttctgagcgtaagacgaggtctctagcaatgatatgttgtagcgtgactaaatcgagatgagcaatcaggttgttgtctgttgattctttcggctgaccatttcggctgctgaggccttgatcctgtatttgagatgtcaggcctacttagagcaaatgctggaaggaagcaatgtgcctgttctgaggtccctccagcatcacttgtaatttgtaaagtactcaagtacagactagaactagtcatgcataccagaagaatagatagatgtttcagaagttgaggcctgagatgccgtgccactctatttgctctgtttcatgctttgccgttattatatcactattttcactgttcattctaaggccgttgtcacacgggtaccagaagagcagaacacctttttacgttccttttgctgctatggatggacttcgagagttccttgagaaagcactctcatctatctttccaattccttgtttccttgtggatcctgatcactgaagatggccatttgatttttcacttttcagttatatataaagtgaagacggttgtctcacgcaatatgtgaagtgcaagatgagctctacactgcaaggaaccccaagaaaaaaccacaggtaagtttgtctgattgacaacggc

SEQ ID NO: 5153 - DNA, 1862 bp, Zea Mays
ctttatagacgcctaggacctggtgcggctgaaccgcactgctattatgcacggacagtgcgacatacttgagttgacagcggagaggaacaccgctctacatgtggctgcggagcaagggcaccacgagctgatccgggagctctacttcaggttctcagaccagggcctcctcaatcgcctgaactcggcgctggacacgccgctgcattccgcggcgagggcagggcacgtcagggcagtcgctgttctcttcgagctggcgagggatcgtggcgtgaacattctgggatgcaaaaatgaggcaggggacacggccctgcacctggcggcgaggcacgggcacggtgcagcggtggaggtcctgatctcggcggcggcagaaccggcggccgagctgaacaacgccggcgtgtcgcctctgtacctggcagtaatcagcggctcggtgcaagcagtcagagcgattaccacgtgcaaggacgcatcatcgctggggccaggcgcacagaatgctctgcacgctgccgtcttccagagctcagaaatggttcacctgctattggaatggaggccagctctggccgaccaagtcgacagcggcggcagcagcccgctccatttcgcttcgtccgacggcgaccgcacaatcgtgaaggcgatcctgcgtgcctcaccaccaagcacagtttacaagaaggactcggacggcctgtcggcccttcacgtcgcggcgcggatgggacatcgccgcgtcgtgaaggacatgctacggagctatcccgacgccgccgagctccgcgacggtaacggcggtaccttcgtccacgcagcagccagggagaggcgctcctcggtggtgtcgctcgctatcagcaactccatgctgcgcggcgtcctggacgcgcaggacagggacgggaacacgccgctccacctcgcggtggcggtgggatcgaccggcgacgtggaggccctgctacgggagggcaaggtgcgtgccgacgttctgaacaacgacggtcacacggcgttggatctcgccgccagatcgaacgccggtttcttcgccacgatcaacctggtggtggcgttagtcgccttcggggcacggctccggccgcagaggcaggaccgcctggagcagtggggcggccgcgacatggtgcggaaggggatacagaacacgtccgacagcctcgcggtggtggccggcctcattgtcgctgcagcgttcgccgccgggttcaacttgcccggtgggtacggagacgacggcaaggcgaacctcaagcacgagattgtcttcaagaccttcctgttcttgaacaccggggccgtggcgacgtccatgctggcggtggcgctgctcgtctatgggaaggcgtcttcgcactccgacggctcgtggaagaccttcgcggcggcgctgcacctgctgtgggtgtcgctcgtctgcatgatgctggcctttcaggcggctctgttttccgtggcgacaacaagggcactaacttacgggttcctagttgtatacatgtgcatctttatcttgcaggtgcgtatcgcgaagtggctggggcctgacacgaggttgcgcacgatttggaggtttcactggaaagggaggcatgtcgacatcaaacggcagtatccgttcgccaacgctttcgtagtcaatgtatatctgtttacagctctaagtttgctagtgcctattggttttgaagtcatgtttctattaggtgggagatccatcgatacttcctcttaggctgtaatcggatcgaaaacaaaacagacggatattttttgaatcatatttatttttatatttttttctctttagattcggatcggat

SEQ ID NO: 5154 - DNA, 1843 bp, Zea Mays
acaggtttgggccgacttttcctgcccgtgcttttaccctgcctgcccagccctggccctgggtgcgtttgcattgcagccactgcatggatgcatttggcatgccgcggtactgctgctcgctcgccccttccggtccggccctcgtcgtcttctttataaccacgcgccactgaaagctcgagcgcttctggcacttgaatccgtttgcgtcgtcgtcgttcctgtgtgcagtgcgcggtgcgccactgctagtgagaagagatatagctaggcttcagtgcgacgacgacgacgagatggggcaccactcctgctgcaacaagcagaaggtccggaggggcttgtggtcgccggaggaggacgagaagctcgtcaagtacatcaccgcgcacggccatggttgctggagctcagtcccaaggcaagcagggctgcagcggtgcggcaagagctgcaggctgaggtggatcaactacctgaggccggacctgaagaggggaagcttctcgcagcaggaggaggccctcatcgtcgagctccacagggtgcttgggaacaggtaatcaatccttggtcgtccgtcgccgccgccgccgccggccggcccctactacacgcaaatcagctatgcatacatgcatgccactctgctgcttaatttccctctgcatgacgcagttgttcctttatctctacatgcaactgccgcccacatatgtcgccttaataacttgcttgggagtttgggacaaaggaaagagacgcgaatggaaaatgcagctagctaaaaatgcgtgccactgcacacacaggtgggcccagatcgccaagcatctgcctggtagaacggacaacgaggtgaagaacttctggaactccaccatcaagaagaagctcatctcccaggccgtgggcagcctccacccagacctgtactacaacattctggatggaggagccgccggagcacaggacctcgcggccgccggatgcgcgccgctgaacggggcggacagcgcgtcagcagcggcggcgcaagcagtgggcgtgacgacgacgcagccttctccttccatggcgcacgtcgaccccgcggcggcgtgggcggcggacttcggctcccagacgctcttcctccccggcggcgcggccgctctccagtacgccgccgccgtcgagggggagttcgtcaagcagtgccgcacggcggcggacgcctgctacccgccggagccggaggacggcggcggcggcgcgaggcagtgcaacaaccaggcagctgccgatgtcgtgacggcggcggtgcaaccggaaggcgccggcctcccggtgttccttgaacccaagtgcgccggcagtttcatgcccgagcctgctctggctccggtgatggacttcatggaagccatcctggggtcgacggcggcggcgtcggctgccagcgcttcgtctctcgacgacacctgcttctcggcgaacgccggcatgcagtcccactgttggattccctgaattattcaccctatttacttccatcggtagatgcatatatacatgcatggatgactcttcatcaagcgcgcgcggagtatcagatatgattaagtatagagtttatgaaataattaatatagatatagtaggtttctctcactctcatcgatcagggtagtaacaacatgggttacatgtaaatatgtttacgtacgtatatataatgtctagtgaaggcaagggcaagcatatatatatgagtgggtgtcagtcacgcgccagtaaggaatagtacttgaaactcctttacagctaagctatatgtttgtagcgtgcatgttattgc

SEQ ID NO: 5155 - DNA, 2472 bp, Zea Mays
aaaacacgcttctcccttcccatcttttcctttcccctcctccctcctcggctcgtctctgttcccctttccctcctgcgcaccccgtcttctcctccccgcgtcaaaccccagcacaaaaagcaaccgcccgccgcctcctcgctcctctcccgaatcagccgtcgaggtgcctaatccggccgatcccccctccgatccgcgggtgcccgccgcagaggcggcgcctccgggcctcccccgatgtatagcaacttcaaggagcaggcgatcgagtacgtcaagcaggcggtccaggaggacaatgccggcaactacgtcaaggcgttccctctctacatgaacgcgctcgagtacttcaaaacccacctcaagtacgagaagaaccccaagatcaaggaggccatcaccgccaagttcaccgagtacctccgccgcgccgaggagatccgggcggtcctcgatgagggcggcgcagggcctggggccaacggtggcgacgcagctgtcgccacgcgccccaagaccaagggcaaggacggggacggaggcaacggaggggatgactccgagcagtccaagctgagggcggggctcaactccgccatcatcaccgagaagcccaacattaagtggaacgacgttgccggcctcgagagcgccaagcaggcactgcaggaggccgttatattgcccgtcaagttcccgcagttcttcacgggcaagcggaggccttggagggcgtttcttttgtatggccccccaggaacaggaaagtcttatttggcaaaaagctgttgcaaccgaggctgattcaacgtttttcagtatatcttcttcagatctggtttcaaagtggatgggtgaaagtgagaaattagttgcaaatctgttccaaatggctcgggaaaatgccccttccattatcttcattgatgaaattgattctttatgcggtcaacgtggagaaggcaatgaaagtgaagcatctaggagaattaagactgaacttcttgtgcaaatgcagggtgttggtcacaatgatgataaagttcttgttcttgctgccacgaatacgccatatgctctggaccaggctgtgcggcgaagatttgacaagcgtatctacattccgctacctgacttgaaagcaaggcaacacatgtttaaggtccatctcggggatacaccacacagtttaactgaaagtgatttcgagagcttggcccgtcggacagacgggttttctggttctgacgttgctgtctgtgttaaggacgtgttatttgaacccgtgcgcaaaacgcaggacgccatgttcttcttcaaggcggacggtgacatgtggatgccatgtggaccgaagcaaccgggcgccgtgcagaccaccatgcaggagcttgcatccaaaggcctcgctgcgaagattcttccgccccctatttcgagggcggacttcgagaaggtcctgtcgaggcagaggccgacggttagcaagaaggacctggaggtgcacgagaggttcacgaaggagttcggcgaggagggctgacagacgcgcgcacccacccatgcacgggcggctgcaccacacaaatggccattttattagagagggtatattctggaggtgatctaattctctcgggcgttctatttgaggtatttacctccgctagaatctgcacatctcagtaatggttcaaattttttacggtttccatattatatctaccacaaacttcagcagttctgaatgatctgcacgttctgtatttttgattagttgcttagtatagtaactactcagtatagccatcatctatttacttagtatattaactactcatggttaccagctagaaaaagcgagcaatgcaggtaggttgctgtggtggtaataatagcgacgtctgggtgttggttcctgactggtttggctggattcatcggtgcacgtgatggtgctgcagttgcagtacacagatgagattgggctctggctcagctatgcacgcgtcgtgtgtcagctagaaaacgacgggactcatcgatcgatcgtccatccatgtccaccatgggtgttactgacatgtactctccgactccgttgcacaacgaactgatgatcgaaaggagaagaactgatgatcgaaaggagaagacgtatactactactcgtacggtctacactagacagaagcgtacgtgtccggcgtcgtcttgcctgctcaagtttctttggacggacatgcatgcattttgtcagaccaactgtgcgtagataaggttaggtcatccttatcatctctctctcacaccaagttcatgccgtctgccggcgcgcgctttaatcgtgcctaatgcatgcctacgagtataaatactatataccgagtattatgtatacaaagaactactgtaactttaattgtagctatctcctctcctcgcctcaataaataaaaagca

SEQ ID NO: 5156 - DNA, 675 bp, Zea Mays
gccgtggcctcgcccacaaactaatcctacggcccacggaaccagtcagtcctctctccttccggcttccgctgctcttctttctttcctggcatcttggagacggcggcgagacgaggagaggactggaactggaccatggctgcctcttcggctctcaggctaatcctgggctcctcgtcggcgtcgcgtcgccagattctgtccgagatgggatacaagttcacgcttattagtgcggatatcgatgagaaagcgatcagaaaggagaacccagaggaactggtggtcgccttggctcatgcgaaagcagacgctattctggagaagatgcagaacaatgggatgatgaaagagattcttgattctcaagatactactctgatgataactgctgatcagtctagttccagcatggtcatcaattgggtcaaggaggagtctcacatctggtgtagggttggagccagtgatttatctagcatccttatgctccagtgaaccagtcggtaatctttattttagagtctccatggtcacgggtctagatgtcttttgttgttatttttctacctataattcagtgtatgtgggtttgtgtggagttgtatgaggtttattttgcctcacctattcttcttaatataatgatacacagctctcctgcgttttcgg

SEQ ID NO: 5157 - DNA, 1077 bp, Zea Mays
ctgtctccacccagcctctctcacagtccactcagtctttacacactgtctgcctcactcacgtccttctcctgctgccgctacaccgagccatggaaagggaggtgcagctgatggaggggaggcaagcgtggccgctccacatgatggggatggctgccgctggtacgaccgccacctgcttcgacaactacagcagcagtggcagtggcggcggcggcggcgactgcttcgtgctcgggtgggagcagctagcgccggcgccgttcggctgcttcgggctcctcaccgccgacgtccacgacctcttcccgctctatgatgacaatgatgacggcgatgatcccttgagctcgattttctccgcgggcctcgcgccggcagcggagggagcggtgtgccccgccgccgcagaggcagagcccctccccagctcgtcctcgtccaactgccgcgggggggacccgcgcgccggcggggtcgacctgcagccgcagggacagatgcagcagggcaccgcgcgggcgcggggccgggccgggaccccgccgctgccgaggacctccgcgccctcgctgaaacgcgcgacacgcgaagagtcgtcgtcggagcacgcggcggcggcggcggcggaggagtgcagccagagcggcggcggcagcaagcggcggaagggcgcgggggtggtgcgcccgttcgcgctgctgaagcccgacgggctggacggcggcgcgacgctggcggacatcaacgcgcgcatcctgatgcggcccgcgcggccggtccggcaccccgtgggcgagttcgcgtgcgcgccgcgcgtgtccgcggaccagccgggcttctcgggcaaggccgtcgccagcctcacgcgcctgcacacccccggcgggcgcggcaccatcaccatcataaggacgcgaggctaggctaggcttgtactatgcatgaatcatggcggtgtatgtaggattagctagctagccacctgttgtggtgtaaattatgagcgtaacctgcaatgtaaatcgaacgaataaatttctccaatcatggcggtggtggctcatgacatcc

SEQ ID NO: 5158 - DNA, 705 bp, Zea Mays
acacgaaaccccagcacctcccatataatttgtctctcgtgcctcgttgcgtctttgtcgagtctaaccctagcgcgcgccgccacacctgccgttgctaccgccccgtacctcgcttgctttcccgtcgccgaaatgacgaagcgcaccaagaaggctggaattgttggcaaatatggtatggcgctagcttgcgtaagcaaatcaagaagatggaggtatctcagcactccaagtacttctgcgagttttgtgggaagtttgctgtgaagaggaaagcagttggaatttggggatgcaaggactgtgggaaggtcaaggctggcggtgcttacaccatgaacactgctagtgcagtcactgtcaggagcacgattcgtcgcttgagagagcagactgaagcatgatttagcttgctacatcagggttctcctagttgctgttgtcgggaatgttgagctcctctagttggatcacgagactggctaaaagttgggtgctaagatttgtagttggttaccgttgtgaatttctcaagtgatattatcctatgcttgtctcaatgactcaaatttggttgtggtttctatgcttttggctgtgtcaatggtttgccattgttgaaattcaacccttaatgctgcctcttataataaaaagtttttttattggtctggttcagaaagcaagattatatacgcttct

SEQ ID NO: 5159 - DNA, 1177 bp, Zea Mays
tgctgtgttaatcgcgcctcacatgcagatgagctctcaacatcccgaatacatacggcgcaattagtgctccatgttatcgccgctcaagggcactgaaaccgttatgaatcagctaacaattcatccaaacaaagcaatcaacaaccttatgtaagtatctgagcttctagatgcacggcacattaattgtctcgtcctactgctagcaccagaccgctgtcttcttgagcacattgaggtcttcggatttctccgggggtggccgcgcgcagcaccggcaatgtcgtcatgcaagcggtacttgccgtgcttgatattgttgttgctgcacggaggacgaggtgcggtggccgggaaggtgtcggcaatcgtcgtgttcggcgactcttccgtggacacggggaacaacaatttcatcccgaccatcgcgcggagcaacttctggccgtacggccgcgactacgacgatggcctccccacgggccggttctccaatgggcgcctcgccaccgacttcatctccgaggccttcggcctgccgccgtccatccccgcctacctggacaacaactgcaccatcgaccagctcgccacaggagtctccttcgcctccgctgcgacaggcctcgataacgcgacggccggcgtcttgtccgtgatcacgctggacgagcagctcgcttacttcaaggagtacacggaccgcctcaagatcgccaagggcgaggcggcggcggaggagatcatcagcgaagcgctctacatctggagcatcggcaccaatgacttcatcgagaactactacaacttgccggagcggcggatgcagtatactgtgggcgagtacgaggcctacctgctgggactcgccgaggccgccatacgccgcgtgcacaccctcggcggccgcaaaatggacttcaccgggctcacgcccatgggctgcctccccgccgagcggatcggcaaccgcgacaaccccggggagtgcaacgagcagtacaacgctgttgccaggaccttcaacgccaagctgcaggagctcgtcctcaagcttaacaaggaactgctgggactgcagctcgtcttcgccgacacgtaccagctcctcgccaacgtcgtaaacaggccggccgactacgattgcaaacattgttgtctccggtaacaagtg

SEQ ID NO: 5160 - DNA, 1410 bp, Zea Mays
tgctgtgttaatcgcgcctcacatgcagatgagctctcaacatcccgaatacatacggcgcaattagtgctccatgttatcgccgctcaagggcactgaaaccgttatgaatcagctaacaattcatccaaacaaagcaatcaacaaccttatgtaagtatctgagcttctagatgcacggcacattaattgtctcgtcctactgctagcaccagaccgctgtcttcttgagcacattgaggtcttcggatttctccgggggtggccgcgcgcagcaccggcaatgtcgtcatgcaagcggtacttgccgtgcttgatattgttgttgctgcacggaggacgaggtgcggtggccgggaaggtgtcggcaatcgtcgtgttcggcgactcttccgtggacacggggaacaacaatttcatcccgaccatcgcgcggagcaacttctggccgtacggccgcgactacgacgatggcctccccacgggccggttctccaatgggcgcctcgccaccgacttcatctccgaggccttcggcctgccgccgtccatccccgcctacctggacaacaactgcaccatcgaccagctcgccacaggagtctccttcgcctccgctgcgacaggcctcgataacgcgacggccggcgtcttgtccgtgatcacgctggacgagcagctcgcttacttcaaggagtacacggaccgcctcaagatcgccaagggcgaggcggcggcggaggagatcatcagcgaagcgctctacatctggagcatcggcaccaatgacttcatcgagaactactacaacttgccggagcggcggatgcagtatactgtgggcgagtacgaggcctacctgctgggactcgccgaggccgccatacgccgcgtgcacaccctcggcggccgcaaaatggacttcaccgggctcacgcccatgggctgcctccccgccgagcggatcggcaaccgcgacaaccccggggagtgcaacgagcagtacaacgctgttgccaggaccttcaacgccaagctgcaggagctcgtcctcaagcttaacaaggaactgctgggactgcagctcgtcttcgccgacacgtaccagctcctcgccaacgtcgtaaacaggccggccgactacggatttgacaatgctgtgcaaggttgttgtgggacggggcttttcgaggcaggttacttttgtagcttcagcacatcaatgctatgcgaaaatgccaacaagtctatacggccatgcctgtgtacaatctataatgcacatagacacacctaccgctcctccacatacaactttgattgttgaaaccatatcatatacaattttaaattatagcacgtgtactataaattttatcttatagatcaatgttgttgtcacgaacaaaa

SEQ ID NO: 5161 - DNA, 3585 bp, Zea Mays
tcgcaaccaaaccctcgcatcgtacagcagccgcaccaaatctcaccgccacctccgggtccggggactcaagcgccccgccgccgccgctgccggggaccacgaaaggacgcgccgaccccggatctgcgactcgccggtctccgaacgcacgctactgaacggacgcggggcttggctgctcgatcgcaccgcccgggaaaaaaagggagagcccgccggatttaaccggacacaccgaacgcgcagctcctccgggccaggggccggacagaatccatgcagccgaggtcccgcattcggggccgcgacccgccgccgccgccgccgccaggaggacgctaccgtcgccgatccccgccccctccatcaccgcgccaccagcgccgcccacgtgatccgccccctccacagcggaagaggcgcagctccgagctgcccccgccacggcgatacgaggaggatcctctccttaacggcttcgcccccgctgccgagaggcgttcacgcggcgacatcctgctcgaggccggccgtctggccgctcactacttggttgccaaaggcctcctctccgagcaccttctcctggcaagggaggacccaaatcacaatcccatttaccgccctgagccccccgctcccgctcccgctcctcctccgactctagctccctctagttacgggaggaagagagacgaggacgacggcccgaggtggcggcggagtggaagtggagccgaggaccaggggcgtggctcaaggtgggacgacgacagggaagccaagaggtcggggtgggacaggaggagccacagctttgatggaaggcgtaaatgcaacgatgacggtggcggtgatgctgaccgtagcggccgccggacacgcgactacgatgagtcgaagagaccaccgatgtcaaggtcctattcgcataacgatcgttgggcttcagctgatgccagagtagatcgaaggaggagaagtaggagcaggaccaggagctactacagtggcagcaggagagatccagatttgctagcaggcacccgtgatttggatcgcaccaaggtgccagactctggcattgttcctgctgctggtggtgatggaggcgtgcacgatgcggatgccgatggaacacgaaagcagctgaaggttcctagttcaatgttggtttcggagatgaatgacagtgctgtcgaagctgcgcctatagaagaggatcatgctcaagacatgtctgaaggtgaggacggtgagtttgcagaagagatttctgaagacgaggatggtgagtttgcagcctctgatttgaatgatgaagatggtgatgaaatggatgacacccaaagacaaccgtctcacatgcatgttcatgcatctgaatctatcgaggaacctgtccatagacagtcccagctcagcaatgctgaagagggaatggaaactggcattgcacacgtggatgcatatatggtagagccattggcagagaacaatgttttctctgaaacaaggtatgaaatggaggctccacaaaatggagctgaaactgctgttgttgatctttacagagatgcagaagagcaaccattgacagagaataatgattgctccgaagcagagaatgagatgaacaagagtgagtttgaaactggtgttggcaatcttgatagagatgaacaagagcaactattggcagagaataataatggctctgaagtaaggtatgacatggaggctccacaaagtgaggttgaaactggtgttggcagtcttaatagagatgaccaagagcagctgttgacagtgactgatggttactctgaattaagatatgaaacagggactccacaaactgaagttgaaactgttattgatgatatcagtagggatgagcaagagctgccagcttggtacaaaatttttgatctcaacgtcattgaaactccattgggctgtgaggtttccgagatttcttgtggtcatccagcagatggtctttgtgattctgtgcctgattcagttggtctggtgaaccaagaagcaaacaatgatacctctgaaattcaaggtcaagatggtcatgcaggggccaatcaagtgttagaagatgagtctgatttgaatagctatgatctgaacaatgaagctgatgaagatgcacaggatgatactttagaaaatcaagttcaagacgagaatgtagaggataatcacttactggaggatgggcatgatttgacgaggtatgatgtgaacaatgaggctggtgagcatgcacatgataaccacctggtgaaaaatgcggaaatacttctaaatcatattatggttgcatgtatatcagataattgccatatgaacaatgagaaaatgcttctaaagcaaaatgtggatgagcaacagatggagaacgagcagatgcttatagatcaggtcactagtgttcaagttttggatagtcaccatgtgcacgatgaacagttgctggtaggtcatgctgcagatgatcatcaccaaatggaaccaaatcccatggctttttctttgggcgttcatgatctggataactactatttgagtagcaagcaaatacttctgtataatgatgcaggaggtatacaccatttgaaggatgggcaaattattttagatgaggctgcagatggacaagctagagttcacaatatgggccatggacgaacgattcctggaattgatctggaagatgattatgcacaggtgtctgccatcagaaatacaggagaatgtctagaatctgcaagtgatacctcgcacgaatacacggataatgttctacaagaacatatgtgttctcaagactagcaaacctcaagttttggtgacaatcctaagactaacacacaagcagcttcttcttcaactgtcaccagattttcaaaactggtgtactggaaatgatgctgtgaaggcacaggtgattcccatttctcagtgatgatgtgttgtatattggattcaacaatatgccattagaacttgtgaatgtctgggacctgccatcctctgagcttgggaaatccttgtgagctctggcaccctgttgtctgtgcattcagatcctaacacaccggaccatgggaggtctgcaccggaccgatcgctggagctagttagtcgactggtcgttgttatagcttttcattgacaagtcggtttagtgacacttctgccttcccgagatatagctgcgatgtcagtatgtctcagtagctgaatatgtcatatatttttttaactagaaatgatttgatgggcgttttgtgctgcgcctgcttcagagctctcctgcttttcagtggaactgtcaactgtcaagtgcatagagaacacgcttctcgttgttgcttacacgggagtagcgttgaccatgaccacttcactcgtttccaacctaactgaaacatgccgtacacatctggagtacgggcgtgtgccagaaagtacaaattggcttgctggatagaaccgagaccgagggccttgatgcctttagcttgtcttttctcctctttctttaaaaaaagaaaaaaaaga

SEQ ID NO: 5162 - DNA, 1280 bp, Zea Mays
gtcggtttctctcatgccaatttctcttgccctggttctctctcgctcgtcggcgcgcagttggagtcgccgagagcgccgtctgcgccgaatggtactcgccgtcaaactccgtcgtggagctgaaggcgcgattggcgtgaactacggcatggtcgccaacaacctgccggcgccggagcaggtcgtctccatgtacaaggccaagaacatcagctacgtgcggctcttccacccggacacggacgcgttgaacgcgctccgcggctccggcgtcggcgtcgtcctgggcacgctgaacgaggacctcccgcgcctggcgtccgacccgtccttcgccgcgtcgtgggtggccacgaacgtgcagcccttcgccggcgccgtccagttccggtacatcaacgccggcaacgaggtcatcccgggggacgccgcggcgcgggtgctcccggccatgcagaacctggagtcggcgctccggtccgcgggggtcacgggcgtccccgtcaccacggccgtggccaccagcgtgctcggcgcctcgtacccgccgtcccagggcgcattctccgaggcggccgcgtcggtgatggcgcccatcgtctcgtacctgtcgtcgaagggcgcgccgctgctggtcaacgtatacccgtacttcgcctactcgagcagcggcgggcaggtggcgctcgggtacgcgctgctgtcggcggacgccggcgcggcgtcgtcggtcacggacgccggggtggtctacaccaacatgttcgacgctatcgtggacgcgacgcacgccgcggtggagaaagccggggtccaggggctggagctggtggtgtcggagaccggctggccgtcggccggcggcgagggcgccaccgtggagaatgccgcggcgtacaacaacaacgtggtgcggcacgtcggcggcggtaccccgcgccggccagggaaggccgtggagacgtaccttttcgccatgttcaacgagaacggcaaggccgagggcgtggagcagcacttcggcctcttccagccggacatgagcgaggtctaccacgtcgacttcacggcgggatccccctaggtctagggaggaggcggcttacccgcttcttcacttttagtagtaggctcatccttcattcccctgatctacttcgttttgttggagtagcaaaactgccgcacgtcacgtttactgtttattttttaatatcttatatagaaaaataatatcaacatttattctttaaataagtttatgtttactataaata

SEQ ID NO: 5163 - DNA, 3264 bp, Zea Mays
gcaggatgggtaggtgggcgggtgagggcaaaaggaagacttcgcttttcgctttcccggctgttgctgttgctttccttccccttctaatcatcccttctcctcctccctagttattatcgtcgtgccaccataagcgcggcctcgcgccaacaagaacctcggcctcgggaggcagcagtagcaccgccgggggaggcgcagcgcagcgcaacggccggcgccgggacgagagatcctcgaatgtacatgacttgaagctccaaggaacagcatggagttcgctttggaggcttcccacagctatggcgtgtttcaggaagatgttccgcactatccctgcaatatgaggcagtacccaaaatcagggctcaaccacagctttaacccagtcaagaagctgatccaggaggacatctcgttccgaacgaatgaagtccagaagaggcccggcggcgtcatcgccagactgatgggcatggaatcgcctccactgaacgcagctactgaatccatcagtcgttcggagatcaccccgagaccaacaatgccaagaagagatcctcctgaaagggagacctcagccaagcatgtctccttcgtgcagcacggcaacagggactccaccaagcaggcgtcaaagcaggagatccgagcctatggcgaggagagggacgtgtttgggcagcagaacaagaggggcaacgagtggagtaagccgcagccgcgggagcacccgcaggaggaggagctgcagaagttcaagaaggagttcgaggcgtggcaggcgagcagggcgtgggagcactcgagaagcttcgagctggagagtagcaccctcggcgacgacgatgacgacggcaggtgcacggacatcgtgccgtacaggtaccagcaccaccaccaccaccaccacaaggggaaagatgccagccatggcggcaagcacatacgctcctccaacgaggacgtgcattgttggagaagaagcagcaaggagagcggcacgtccatctccgggagccgtacgttctctctgacgaccagcgcagacgccgccgcctgctccacgaggctgccgctctccaggttctaccacgaggaggagaggtcgctgtcgccgacgaggatcgtgatcctcaagccctgccccgagctgagcgcggacgacgtcgaggagtcctcgctcgggtcgccggagctggtgaagaaggagaacaacatggaggccttcctggaggaggtcaagaagaggctcaagatcgagctcgagggcggggtggcctccgacgacaaggcggaccgccgttggttcgccgccgcagccgccgccgacgttattccggccgacccgaagcagatcgcgcggagcatcgccaaccagatcagggagaacgtcacgagggacatgcacccggcgctgctgcggtcggagtccacgcgctcgtaccgcagcgacgtgccgttcgacgggcagggacagatggattacatcggccgagacgccaggaggcagctctccgacagctcaagaacgtgctgaggagggacccgccggacgccgagacgcccttctcgttctcccaccggagaagggccacctcgacgtcgttcgacgaggagccaacgaggcccaagccgacgaggcacgaggtggcgccgccgtcgtcgaggaaggggaaggtcaggagcaaggaggaggagaagaagtgcgcggtggagtccgacgtccggtcgttcagatacggaccgagcaacaccccgacgacgacccagctggactccgagcccgtgtcgccgcgaaacctcatgaggtcgttctcggcgccggtgtccgggacgaccttcgtgaagctcctctcggaggagccgcgggtgctgaccggagcgaggctgcagcgcaagcaggaaggccacgggagcagcaggccagcgtcgtcggaggagaggaaagggaggaaggacgcgttcagcatcagaggcaaggtgtccaacctgaggcagaactttgggctcagagccaagctgttcggcaagaagttccacgcctccgacgagccgttccccgacgacctcccgcccatcggcaccctcgtcaccgcaccatcggtcctcatacaccccggcgtcctgcaggagaactccaccgaggtaccaccgagcccggcgtcatggtgcagcagcccgcctgacgagatgagcaggggaggctacccaagccctgtctcgccattggaggcatcctttagcgagcaccggtctcccatgaggacggaagccaaagacatggcttcagctgcttctgaacctctcgcagaaccaggagaacaagcccatgctgaagaggggcgcgccgagacaagtcctgtcctggacgagcaggacgacggcgacatggacgatacagatcaccccatgaagtccttcgtcagagctgttctcgtcgtcgccggcatgtacgggcggaggcacaaccctggcaacgccaccatgtcagagtgcgaggtcaagcctatccccaagtgggtgctggaggaagtcgtgtccccgtcctcagccccggcgggcagcggcgcggcagccgtcatggaccaccggctcctcttcgacctcgtcaacgaggcgctgccgggagccgtccgggcctccacgacgctgtgcgcgttcgacaagtgccacgccatggcgccaaggagagcctccggtggcaaggcgctgctagaggcgctgtggaagtccatgcaggtgtggatagagccgccgagcgaccgcaggacggcgagctctgcctccgtggacgtgctgatcggccgtgacctgagcgtgtcggcgtggcacggcgcgttccgcgaggacgcggacgcgctggctggggacgtggaggcggagctgctggacgagctgctcgaagagacggtgtgggacgtgctcctcaatgtgggggactcatgatcggatcgtatgcctcttctgacgagtatacttgtacattttggggtgcctttttttctgcctcttttgggtgcttgccgggtttgtgaacggtgttgcattggcgagtgagatatgtaactatgcttgcgtgtggaagaatgctgaatttacactgagaaatgcttaaagaagagagagaaaaagatgaataataaaaggaacagctgtcgtcatgtcattcgtgacagtaaataccagcaacgtagtaacagatagtttataacattaaaatatagtcgttaaaaatgcacaaaacatgtccaatgcagt

SEQ ID NO: 5164 - DNA, 3438 bp, Zea Mays
ctctcttctcttctcttctcttctcttctctcgccgttcgcgctgtgctctggttctgctgtctggtcggtcctgctgtcgaggctgcattgcatatttgcatgcacaggagcggctgcagggaaggagtgagaggagcaggatggttattatcgtcgtgccaccataagcgcggcctcgcgccaacaagaacctcggcctcgggaggcagcagtagcaccgccgggggaggcgcagcgcagcgcaacggccggcgccgggacgagagatcctcgaatgtacatgacaaggaaacttttccgtccagctgacccctctctgatctcgccaccgaagcgcacgctggacacccgtggttggtggcaccatgctgcagtacctggacttctcgcacgccagcacctcaaggaagtgggcgcacaggagacagggcgacggacttgaagctccaaggaacagcatggagttcgctttggaggcttcccacagctatggcgtgtttcaggaagatgttccgcactatccctgcaatatgaggcagtacccaaaatcagggctcaaccacagctttaacccagtcaagaagctgatccaggaggacatctcgttccgaacgaatgaagtccagaagaggcccggcggcgtcatcgccagactgatgggcatggaatcgcctccactgaacgcagctactgaatccatcagtcgttcggagatcaccccgagaccaacaatgccaagaagagatcctcctgaaagggagacctcagccaagcatgtctccttcgtgcagcacggcaacagggactccaccaagcaggcgtcaaagcaggagatccgagcctatggcgaggagagggacgtgtttgggcagcagaacaagaggggcaacgagtggagtaagccgcagccgcgggagcacccgcaggaggaggagctgcagaagttcaagaaggagttcgaggcgtggcaggcgagcagggcgtgggagcactcgagaagcttcgagctggagagtagcaccctcggcgacgacgatgacgacggcaggtgcacggacatcgtgccgtacaggtaccagcaccaccaccaccaccaccacaaggggaaagatgccagccatggcggcaagcacatacgctcctccaacgaggacgtgcattgttggagaagaagcagcaaggagagcggcacgtccatctccgggagccgtacgttctctctgacgaccagcgcagacgccgccgcctgctccacgaggctgccgctctccaggttctaccacgaggaggagaggtcgctgtcgccgacgaggatcgtgatcctcaagccctgccccgagctgagcgcggacgacgtcgaggagtcctcgctcgggtcgccggagctggtgaagaaggagaacaacatggaggccttcctggaggaggtcaagaagaggctcaagatcgagctcgagggcggggtggcctccgacgacaaggcggaccgccgttggttcgccgccgcagccgccgccgacgttattccggccgacccgaagcagatcgcgcggagcatcgccaaccagatcagggagaacgtcacgagggacatgcacccggcgctgctgcggtcggagtccacgcgctcgtaccgcagcgacgtgccgttcgacgggcagggacagatggattacatcggccgagacgccaggaggcagctctccgacagctcaagaacgtgctgaggagggacccgccggacgccgagacgcccttctcgttctcccaccggagaagggccacctcgacgtcgttcgacgaggagccaacgaggcccaagccgacgaggcacgaggtggcgccgccgtcgtcgaggaaggggaaggtcaggagcaaggaggaggagaagaagtgcgcggtggagtccgacgtccggtcgttcagatacggaccgagcaacaccccgacgacgacccagctggactccgagcccgtgtcgccgcgaaacctcatgaggtcgttctcggcgccggtgtccgggacgaccttcgtgaagctcctctcggaggagccgcgggtgctgaccggagcgaggctgcagcgcaagcaggaaggccacgggagcagcaggccagcgtcgtcggaggagaggaaagggaggaaggacgcgttcagcatcagaggcaaggtgtccaacctgaggcagaactttgggctcagagccaagctgttcggcaagaagttccacgcctccgacgagccgttccccgacgacctcccgcccatcggcaccctcgtcaccgcaccatcggtcctcatacaccccggcgtcctgcaggagaactccaccgaggtaccaccgagcccggcgtcatggtgcagcagcccgcctgacgagatgagcaggggaggctacccaagccctgtctcgccattggaggcatcctttagcgagcaccggtctcccatgaggacggaagccaaagacatggcttcagctgcttctgaaccaggagaacaagcccatgctgaagaggggcgcgccgagacaagtcctgtcctggacgagcaggacgacggcgacatggacgatacagatcaccccatgaagtccttcgtcagagctgttctcgtcgtcgccggcatgtacgggcggaggcacaaccctggcaacgccaccatgtcagagtgcgaggtcaagcctatccccaagtgggtgctggaggaagtcgtgtccccgtcctcagccccggcgggcagcggcgcggcagccgtcatggaccaccggctcctcttcgacctcgtcaacgaggcgctgccgggagccgtccgggcctccacgacgctgtgcgcgttcgacaagtgccacgccatggcgccaaggagagcctccggtggcaaggcgctgctagaggcgctgtggaagtccatgcaggtgtggatagagccgccgagcgaccgcaggacggcgagctctgcctccgtggacgtgctgatcggccgtgacctgagcgtgtcggcgtggcacggcgcgttccgcgaggacgcggacgcgctggctggggacgtggaggcggagctgctggacgagctgctcgaagagacggtgtgggacgtgctcctcaatgtgggggactcatgatcggatcgtatgcctcttctgacgagtatacttgtacattttggggtgcctttttttctgcctcttttgggtgcttgccgggtttgtgaacggtgttgcattggcgagtgagatatgtaactatgcttgcgtgtggaagaatgctgaatttacactgagaaatgcttaaagaagagagagaaaaagatgaataataaaaggaacagctgtcgtcatgtcattcgtgacagtaaataccagcaacgtagtaacagatagtttataacattaaaatatagtcgttaaaaatgcacaaaacatgtccaatgcagt
